United States Patent Application Publication US 2007/0067865 A1 - sequence listing, part 69

SEQ ID NO: 445024 - DNA, 473 bp, Triticum aestivum
  unsure (1)..(473): unsure at all n locations
gggnnnnnggnaactgttacgtngccagtcccggtcnagaatncccgggtcgaccccaaaaacttgattagggtgatggttcacgtagtgggccatcgccctgatagacggtttttcgcctttgacgttggagtccacgttcttaatagtggactcttgttccaaactggaacaacatcaaccctatctcggtctattcttttgatttataagggattttgccgatttcggcctatggttaaaaaatgagctgatttaacaaaaatttaacgcgaattttaacaaaatattaacgttacaatttaggtggcacttttcggggaaatgtgcgcggaacccctatttgtttattttctaaatacattcaaatatgtatccgctcatgagacaataaccctgataaatgcttcaatatattgaaaaaggaagagtatgagtattcaacaatttccgttgtcncccttaatcccttt

SEQ ID NO: 445025 - DNA, 398 bp, Triticum aestivum
ggggctcttcaagcacttgaacccgcttggatcacggcgagacagatggaagcaggacgaagagcaataacacgatatgcacgtcgtggtggaaaaatatgggtacgtatatttcccgacaaaccggttacactaagacccactgaaacacgtatgggctcgggaaaggggtcccccgaatattgggtatccgttgttaaacctggtcgtatactttatgaaatggggggagtatctgaaactgtagctagagcagctatctccatagctgccagtaaaatgcccatacgaagtcaatttattcgattagagatatagaaccctaaaaggggtatggaagataaaaaaaaaaatgcccggtttttctttctggaaagacaatatttctttcatccttt

SEQ ID NO: 445026 - DNA, 488 bp, Triticum aestivum
  unsure (1)..(488): unsure at all n locations
tgnnnnngnnnggttnnttggnccngnccggtacaaatcatagaattcccgggcccagctgancgctaaacttgccagcgccctagcgcccgctcctttcgctttcttcccttccttttcgccacgttcgccggctttccccgtcaagctctaaatcgggggctccctttagggttcgatttagtgctttacggcacctcgaccccaaaaaacttgattagggtgatggttcacgtgtgggccatcnccctgatanacggtttttcgccctttgacgttggagtccacgttcttatagtggactcttgttccaaactggaacaacactcaaccctatctcggtctattcttttgtttataagggattttgccgatttcggcctattggttaaaaaatgagctgatttaacanaatttaacgcgaattttaacaaaatattaacgcttaaaatttaaaggtgggaactttccgggaaaatgttcnccgg

SEQ ID NO: 445027 - DNA, 405 bp, Triticum aestivum
aatgcccgggtcgacgggtcaaccaactgatgttgtaaaagcaaaagagggatgtttttgatatttgaaggatagaatctggaaacatatacagggctggatggaaaagtgtctatcggctggtgggagggaagttttgattaaatcagtcgcacagtctattccaacttattccatggcatgttttaagttgccccgtggactatgtgagcacatcaatgggctactacggaaattttggtggggtagcaagggaggtcagaggaagccggcgtgggtatcatggagaactatgtgcaaacctaaacatatgggaggcatggggttccgagatattgaactttttaaccttgctttactggcaaggcaagtatggagattgctccaagagccggataccctatg

SEQ ID NO: 445028 - DNA, 448 bp, Triticum aestivum
  unsure (1)..(448): unsure at all n locations
ggtcaagnaatccgggccgaccgggaagcggaacgaggtcaaggtttcggaggacggcaccgtccgcgccacagacttcaagaagattaccgctggaaaagatgacaagggtcttaagacttacgatcctggttatctcaacactgcccccgtgcgttcttccatctgctacatcgatggggatgagggaattcttcgctacaggggttatccaattgaggaggtggctgaaagcagttcatttgttgaggtcgcctacctcttaatgtacgggaatttgccaactcagagtcaactggcaggctgggaatttgcaatttcacagcactctgctgttcctcaaggactcttggatatcatacaatcaatgcctcacgatgcccaccccatgggtgtccttgccagtgcaatgagcacactttctgtcttccacccagatgcaaaccct

SEQ ID NO: 445029 - DNA, 356 bp, Triticum aestivum
gggtcgaccaatcaacttacagtattcaggcttccaagaccatcccttaggccccttaactctgacgataaatgaaccctgtggagagacaacaagccaaaatcaaacagattagggtccacaactgtttcaatgggaatgcagcgctcactattgaaatatcatacacatcacaaaattagctattactgttatatctagataactcataatgaagaaaacctacactaaaggcaagcatcacccacaagtataccttgtcatagactggaatgaaatagtagccattaggagcacattgggtgctttctttcaccaaaccatcaacagtacacagctcaacctgattcaaaaag

SEQ ID NO: 445030 - DNA, 343 bp, Triticum aestivum
gggtcgacggggatgagttccgacagcacgacggcatggtgacgatcttgatgttctaccgtcgcatggcttcgcctaatcaccgctacaatattatcaaggattatggtggaggggggcaccgcacacagctaaaagatcaatgatcaaatgttgtgtgtctggggtgccccctgcccccgtatatagaggaatcgaggatggggccggccaacgaaggtggcactcccaacggggggaatccacatctaaaccttgtcatacactagaatgaaatagtacccattaggagcacattgggtgctttctttcaacaatccatcaacagtacacagctcaacct

SEQ ID NO: 445031 - DNA, 274 bp, Triticum aestivum
gggggattaatcaaataatatcatttctaacagttggtctgaaagttactcttcatagcaagtgccagaatttttttccttttctgttcccaccgggtgtgaaactatcttgtagctgtagatatattgattatggaaggctgaagttcgcaattgatgcaagaaaaaaacaaaaaaaaaaaaaaaaaaaaaaaaaaaaaaaaaaaaaaaaaaaaaaaaaaaaagaaacacaaaaagaataagctaaaagattaactctaaggtaatcaaaaat

SEQ ID NO: 445032 - DNA, 231 bp, Triticum aestivum
tcagctacaacggacaggcaggcaccttgtcacactgcgagaacgccaatgccacctatgttggctaccagcacccagagccatgcatctagacgtacggccaattgggtttcctttttcctcttctaaagttagcgttttctaaacgttttgttggttcctggtgcttaaatataggaccatgaaataattggatttaattcaaaataagtcaattctaatacacacgaa

SEQ ID NO: 445033 - DNA, 411 bp, Triticum aestivum
gggtcgacgggactcatgaacactcttgcaaggttgagtatcaagttgaggaatgcagcgcggaaaaccgagccaacaatgagtgcatccatactaagactaccagagcggtcttgccgcgtggaggagatatcgtgtacagtgttgcacaccagcactctggaggagtcggtgcttctctgcatggccaggatggacgccttctatgtgaatcgcttccaacttacggcacagggaaggaggcagggaacgaggcaaactacattgtcggcatgtcgagttgctaccctaagccaggatccatcaaggtcagcgacggcgaggtgctgaccatcgtctccaactacagcagcgaccgagagcacaccggcgtcatgggcctggtctacatcctcgtgggcgaaccgcaac

SEQ ID NO: 445034 - DNA, 417 bp, Triticum aestivum
gggccggactgcgagaaagaattcgagaatgagctggatttgcttggcaggatcaggcaccccaacatagtgtccctcctgggcttctgcgtccatggtggcaatcactacattgtttatgagctcatggagaagggatcattggagacacaactgcatgggccttcacatggatcggccatgagctggcacgtccggatgaagatcgcgctcgacacggccaggggattagagtatcttcatgagcactgcaatccatcggtcatccatagggatctgaaatcgtctaatatactcttggattcagacatcaatgctaagattgcagattttggccttgctgtgacaagtgggaatcttgacaaagggaacctgaagatctctgggaacttgggatatgtagctcctgagtactta

SEQ ID NO: 445035 - DNA, 494 bp, Triticum aestivum
  unsure (1)..(494): unsure at all n locations
gtgtgaggaagcttcttgtntgaccggcctgtacatgatcanagaatgcccgggncgacgggaaaaaaaaaaaaaaaanagataaaaaaanaaaaaaaaaaaaaaaaaaaaagcggccctctagaggatccaagcttacgtacgcgtgcatgcgacgtcatanctcttctatagtgtacctaaattcaattcactggccgtcgttttacaacgtcgtgacngggaaaaccctggcgtacccaacttaatcgccttgcagcacatccccctttcgccagctggcgtaatagcgaagggcccgcaccgatcgcccttcccaacagttgcgcagcctgaatggcgaatgggacgcgcctgtagcggcgcattaagcgcggcgggtgtggtggttacgcgcagcgtgaccgctacactgccaagcgccctancggcccgctcctttcgctttcttcccttcctttctcggccaagtncnccgggtttcccctttaang

SEQ ID NO: 445036 - DNA, 197 bp, Triticum aestivum
cgggccggccgggatgacgacgaagaaaagtaatgtgtttctgcttcactttcatctatggtgtaacctagcatcatttattcaatcatggtgagtgatgtgggcttgtgataacaattgtacagtggaatgttggtgatgtgtagacaaaggtggccatttcatttctaagttatttatggatgccgagactgaag

SEQ ID NO: 445037 - DNA, 383 bp, Triticum aestivum
gggtcgaccgggatgacaagcaatcataacacaatacactacatgtaaacagttacagaaacctacatagatgttcattcccaacgctgatgatgctcgtgtatagtgctgcaggagtgcatcgttattcgcatctcagagatgaacacagtgggtgtaatacatcttatttgtttggcagtcgcaatcgctcgttctatatctgaatggccgtgctatcctatcttcgaaggttcataaatgttgaacaatagggcgcatgcccaatggaattgcgataggtgtccccctgccaatgacaatgaagacacccgacgatgtctccaacaagaacgatgcccataaagccatggctgtcctcaaggtgctcgtcaacaaagtta

SEQ ID NO: 445038 - DNA, 410 bp, Triticum aestivum
gggtgcgaccaatagtgatggtattgaactacggtcacatctatttaggaatgatgtaagatatttactatttgtcctcagtgcatattttgcatacataatttttttgctaaactttcattgctaagtgtattaattaagtactatacggtgttcttcaacaggactgccgatgacagttgtgcctcaggggatcgagactaaaggtcagatgtcaattgttagcttacggccaagatatcctgcattgcacatgaatgcattcaggatttctagaagcgatgaatgcttaatagtgaaagattggaggaaaattgttaatgatcgcagagaagtactacggggcagcaatgagaagcgcaacccacgattaggagacaggttcatctgcatgccccagtatgatcaat

SEQ ID NO: 445039 - DNA, 95 bp, Triticum aestivum
gggcaaagtaatggaggaagtcatgcatctaacgagtactccctccgtaaactaatataagagccaaaaaaaagaaaaaaaaaaaaaaaatagaa

SEQ ID NO: 445040 - DNA, 95 bp, Triticum aestivum
ggggctatctagttataaaaaaaaaaaaaaaaaaaaaaaaacaaaaaaaaaaaaaaaaaaaatacaacaaaaaaataacaacaagaaagacaaac

SEQ ID NO: 445041 - DNA, 360 bp, Triticum aestivum
gggggtcagaagacaactaaagagggacaactcaaaggaacatacggttttctgagttgtggatgcataagttagtatgtcgaacaagttcaacatatttcttccagataacccatgctaaagaggaaggactggcagattcacaatatagaatggagaactcatcgagagcacttttgttgtgatctttcggctcaaaagaacttctgccaagaatggttcatggtatttggcagaatgaaataccacggacctcgaggactatcgcaacagttactaataacctaaaggaactagcagatactaccatcaagaagtacgtagagtgaatctcgggttcaaaaaccaatgagtagaata

SEQ ID NO: 445042 - DNA, 390 bp, Triticum aestivum
gggatatactgtatagctttggatccaaagagagccagaaactggatgcctcctagctgctacagtgatgttacctacatgctatctggagtgtaattcacagatatactgtatagctttgtccgactagaagctgaagtgtaatgttaagtatcgaatgactgaattagagaaaaaaaaaaaaaaaaaaaaaaaaaaaaaaaaaaaaaaaaaaaaaaaaaaaaaaaaaaaaaaaaaaaaaaaaaaaaaaaaaaaaaaaaaaaaaaaaaaaataaaaaaaaaaaaaaaaaaaaaaaaaaaaaaagggggcccccaaagggtttaaaccttaatttcccttgaagggaaatttaaaccccctcaaaagggcccccaaaattcaattcaagg

SEQ ID NO: 445043 - DNA, 393 bp, Triticum aestivum
ggggcataatattgatcatataatctaatcatagcatgaatattaagacacgagtgattcaaagaaatagtctataatttgacataaagacattaatactcaggcatcccaacaaacaatcctgcctttcaaaatatcaatgctaaagatcgttatccatacaaaatcgtatagttgtaacacccggataattaagctactgtaatcccctgttaatgatgccaggtcatcgcttttactgttgctagaaatcacgttcattcaatatcagttcaaattcaaatttaaaaacaaagtaaaaatttatagttttcaaaatgtcgaaactaaaaaatgcaaaccatgacaaataatccagaggtaataatggtgaagaaaccagattttttaata

SEQ ID NO: 445044 - DNA, 423 bp, Triticum aestivum
  unsure (1)..(423): unsure at all n locations
cgggtcgacggnnanncgcacggctgggctggctgggccggcccagtcggaggaaggtttttttttataaaacattttttacacacaaccaaaaatagaataaaccatacaagataaaaataaaataggcatattatatatcaaaattttcagaaaaagatttcctacaacctaaacatatttatagcatcaaatgaaatccaaaaaattcaaataaagcaaagagtgctatagctctaataaaatcaaataaaaatcattttaaaaaataccaaaatgatttcaaatttatttctctccaattttctaatgtagtgaatcattttaccctattttccatatattttatttttggtgaaaaataatttgaataaaacccaaataactccaaattgaaaataatttaaaagggacattaaattt

SEQ ID NO: 445045 - DNA, 434 bp, Triticum aestivum
gggtcgaccggcctcttccttacacccagctcgtatgccgggcgaaagcccaaatccatgccggattgagcgacagcggcgctccgggcgtcgtcaccttcttgggggtgtcgttcttggtgagcttggggtggatgtgatgctttggttgcttggcggcggattggtcttcagaagccctgccggtctcggcggagcggtgcttcatcctactcatggatggcggcgtatctcggcggcgtggcgcagtggagattcggcgtccgatgtgtggcgatggactcgcgcaggacgacgaagctgtctggtgtcgtggtgacgtcgatagctgagtggccagacaaggtacaagcctcaatttgatctgaagacggacctgtggaagatggcggcgacgacacacgagtgcgtctgaccggattatgccccagacc

SEQ ID NO: 445046 - DNA, 329 bp, Triticum aestivum
gggccgaccgggtgaagaaagcacctctacacacatgatggcatcgccgatttggaactagctgagccggatgctattgtgggcgaggatcaagcctggtcatcgcggctgactcacatgacaaacgttgcgtttatctaaatcgtagatgtgctcgcatgctgtagaacatgaggcacgcttgtgtacacgcagtgactgtgcttgccagcacacattgcaaatgacttagttacagatgctagctcatgttatcatactgtgtttggaacattaaatagataatggattccacgacgacgcagtctggtgtcgtggtgacgtccaaa

SEQ ID NO: 445047 - DNA, 467 bp, Triticum aestivum
  unsure (1)..(467): unsure at all n locations
aacgttacttgcncgccaggtacaggtcaagaattcccgggncgacgagctcactantcgcggccgctctagaggatccaagcttacgtacgcgtgcatgcgacgtcatagctcttcttagtgtcacctaaattcaattcactggccgtcgttttacaacgtcgtgactgggaaaacctggcgttacccaacttaatcgccttgcagcacatccccctttcgccagctggcgtaatgcgaagaggcccgcaccgatcgcccttcccaacagttgcgcagcctgaatggcgaatggacgcgccctgtagcggcgcattaagcgcggcgggtgtggtggttacgcgcagcgtgaccctacacttgccagcgccctagcgcccgctcctttcgctttcttcccttcctttctcgcccgttcgccggctttccccgtcaagctctaaatcgggggctccctttangggttc

SEQ ID NO: 445048 - DNA, 407 bp, Triticum aestivum
gggccgacgggttagactaaatgtttgaatgcaatagcaatgcaaagatgagctatttgttgaaatatggctgccagccggctaggccgacatatatgaatcgacgcgttgggcgccctgccgattcaaatctaaaacatgagccggatcgctcgagtgatttttcgaagaggaaaagcgccggatcgctcgccacggtgagcaaaggatggacgcgaaatgaatagagctggcttcaggcacacggcgtttctgcatggatgcatgttccccatgccgggccggctccccaccatgcgggcatgggctggtgcaagtctgatacgtgcccaggcagtctgccagcgcgtgtgagttgtgaccatcctcacttatcgaattaagatttttctgaccctaaaaaaaga

SEQ ID NO: 445049 - DNA, 460 bp, Triticum aestivum
  unsure (1)..(460): unsure at all n locations
tgttacntcgccaggcnccggtcaagaaatcccgggtcgacgggatgaccatgcccaagccaagccgctcatcgccgccgctcacccgcgcctgccgccgcagatgtacggctcctgtctagccacggcatgcagatgcagtaagctcgagcaaaacatgcagggatgtttatcacagaatggtgaaagaatacatcatacatacatacatacatacatacatacattgatacataatgtaatctgagatatatcaacgcagaacacgatgaattgaatcatttccagattattcctgtctcctctctggatcttgcgttcatatgtgtaactaattagatcttgttcatgcataacagagatagtagctttgtagtagatgtatgcacttatcttactgatgtaccgaaccatgccatatcgctgtaaaaaaaaaaaanngnnnnnncnnnnnngnnag

SEQ ID NO: 445050 - DNA, 426 bp, Triticum aestivum
cgggcaacaacgagcggcgagagtggagaactggatttgggggaagtggccgtggggaaggacgaaccccgtggttaagtcagaagtagcagtagcgcgttacagaaagcgcgctactgctacattagctacagcgcgttctgggatacacgctactgctactactttctcttttccccctttatcatttagttttcttcacattttatttttttcctttcaccttaatatatttctttcattttcaattacctttctatttgctttccatttaattttatatcctttagcagtagcgagtttagattaaaacgcgctgctacaaagaaagtagcggtagcgtggttcgatataggtcgctactactatgtgtagcctatcggataagctgtgggaattttagtagtaacgtgtttagaacaagac

SEQ ID NO: 445051 - DNA, 473 bp, Triticum aestivum
  unsure (1)..(473): unsure at all n locations
ttnnntgccttgccccccaaancanaaaggcccggccgacgnncaaactaaacggcggcgctctagaggatccaagcttacgtacgcgtgcatgcgacgtcatagctcttctatagtgcacctaaattcaattcactggccgtcgttttacaacgtcgtgactgggaaaaccctggcttacccaacttaatcgccttgcagcacatccccctttcgccagctggcgtaatagcgaaaggcccgcaccgatcgcccttcccaacagttgcgcagcctgaatggcgaatgggacgcgcctgtagcggcgcattaagcgcggcgggtgtggtggttacgcgcagcgtgaccgctacattgccagcgccctagcgcccgctcctttcgctttcttcccttcctttctcgccacgttcccgggtttccccgtcaagctctaaatccgggggtccccttaagggttccnattaatggct

SEQ ID NO: 445052 - DNA, 346 bp, Triticum aestivum
  unsure (1)..(346): unsure at all n locations
accgggcccaacaaggggaaaagggggaaacgatgcgggtgctcacagcgcgtccgatggcgtcgtcggcgaggtcggcggcggtcgggttgctgcgaatcgacgacgacggctgtcggtgcagaggacgaaggcaacaacgatgacggcactgcggggcgctccggcgtcgtttgtctcagcaaagatgaagggcaggtcatggcggagctcctggaccgctcgagaggacgagggggaggcgatagccgcggtggtgctcgtcggtagcgtcggcgcggtctggtgaggtggggaacagccagggagagagagccagggaaggggaaagagctccanggaagag

SEQ ID NO: 445053 - DNA, 417 bp, Triticum aestivum
attcccgggccgacgggggtctgagacatggtgacagagtcacacacacaatttatgtgataacttgggcacataagtccaggaaaatttccactgatgagtgcaaagaaagaaccgctaggatgcgtgctaaaaaagattgctttgtgaaagcgtgttcttctagttttcatgataataatgatgaagatctaaaagtgattgatgtggctcctattaaacctttgttttccaatatgaatcttgataaatatgggactggcgattagtcaactttagttaaaaggcgtccaatgattcggagtttttagatcttgatgcaaaaattaataaaagtgggattgaagaggtcaaaactttacatagcaatgaacccactattttggatttcaaggaatttaattatgataattgctc

SEQ ID NO: 445054 - DNA, 464 bp, Triticum aestivum
  unsure (1)..(464): unsure at all n locations
tacttttacgccggccaggtaccggtcanagaattcccggggctctagaggatccaagctacgtacgcgtgcatgcgacgtcatagctcttctatagtgtcacctaaattcaattcacggccgtcgttttacaacgtcgtgactgggaaaaccctggcgttacccaacttaatcgcctgcagcacatccccctttcgccagctggcgtaatagcgaagaggcccgcaccgatcgccttcccaacagttgcgcagcctgaatggcgaatgggacgcgccctgtagcggcgcattaacgcggcgggtgtggtggttacgcgcagcgtgaccgctacacttgccagcgccctancgccgctcctttcgctttcttcccttcctttctcgccacgttcgccggctttccccgtcaagtctaaatcgggggctccttttagggttccgattttagtgctttacgggaac

SEQ ID NO: 445055 - DNA, 421 bp, Triticum aestivum
gggaccgattacaaatctcggtaagaccaaaattattgcaacaggaaccagagagtttgcaagcccatctccgtgagactgagatcccattggtgagatcaaactgattagggtttctggtagtggctatgtcaagtgaactcggtggctccggatagatcaaattggtagggctgagtttgacatttggtttgggacatatgtggatatgagaaagtggtttagggctttggagcatatcactaagcactttgagcaagcaagccattaagaaacacctcatccctttttaatagtattgactttcctaaggactcaatgtgatcttgaatcactaaaatgaaaacgtagagtcttgagcttttgagcttttgccaatcctttgttcttagcatcttgtaagggttccacatcctcttgt

SEQ ID NO: 445056 - DNA, 408 bp, Triticum aestivum
gggttgctcaagcactctgacaaggagagccttgcgagaaagaacaaatcaggattcaatgccctgcacatcactgcaaaggaaggccacggagaccctacttgtgccattgtgtgttcctccacttctggcctcctccattaccagtgactaacactacaataaatatgcaaataattagttttgctacactatagtagcaacaatccttgcgtgacaattattgtaccgattacatcatagcaaatcatagcaaagggacaatatgaggggccttcaaactgcagtttgagagacaatctgtttgtcctatggaggtgctcaatggacttaacatcagaatagcctggctttcagaagaaaagatgacagctttattttgttgttgtagtgtgcctattcggaaac

SEQ ID NO: 445057 - DNA, 420 bp, Triticum aestivum
cgggggtctggacatggtgacagagtcacacacacaatttatatgatatcttgggaagatcagttctgccatagtgcccttgctgctgctgctacttttagcctttgtttccttgggaacatgttcagagtgtagataagaaacttatgctactatagatggatatatggcattcggtacatcgacagcaagaagacggatattctttttctgtaaaacatgaccctttgattgatttgggttcactactaaactttctaatgcttcctcatacgactaccacctctgattaatctcctttggattcagttatgtacttttgtttgtttccaactatttttcactcgggtttttgtgggtgttggtagctggaatgcagagcatgaagtggtgtaaggtggtgttgatgtgggacattgc

SEQ ID NO: 445058 - DNA, 362 bp, Triticum aestivum
gggctaaaaaaaaaagagaaaaaataaaaaaaaaaaaataaaaaaaaaaaaaaaaaaaaataaattcagaaaaaaataaaaatacagaagaagaaaaaatttaaaaaaagaaataaatgagaaaaaataaaaaaatataaataaaaaaaataggggccccccagaggtttaaattttattttgtctttcttgcaactttaagacccttaatcgttttccctaaaatataatccttggggtgtttttttaaaacttctaaaggggaaaacccctggttttacccaatttaaccccttttgaaaaaaccccgttttcactaatgtggttttgtctgaatgggcccacattttacccccttccaa

SEQ ID NO: 445059 - DNA, 277 bp, Triticum aestivum
gaccgaaatgattagtgccagtgtttgaatttgttctgtttgtcatggtacgaggaaagatcacgaaatagataatgtctttacacacattttgtctgtatctaatcattatccgtatttcactcctaccaactggtagattcatgtttttccctcatttgtctgcccattgtttcagaataattcacattgacaacaattacaataaagcagccactctagacgattctagcattcgatatcttgaaagcaaattcatagcgcttctatattctca

SEQ ID NO: 445060 - DNA, 419 bp, Triticum aestivum
cgggtccgacgggaaggcaaaggaagaaagggcaagctctacggacctttgtaattcggtcaacacaatggtgtcattccggtggtggataattgggttcaactgggtggtaaccggcggcaaaatgctcgaaaaaggtgctccaaaactctattggttaactgtcgtttttctcgtgtttgatgtcttcttcgctgttttttgtgttgttgtggcctgcttcattggaattgcactgtgctgctgcttgccttgtgtcgttgcaatactgtatgctctggttggccaggagggtgcatcagatgcagatattggcattctccccagatataaatattctgatcccagtgagaatggagaaaatggaacggacgatggggttatgattcctatccttaataatagtggaacatctacaa

SEQ ID NO: 445061 - DNA, 71 bp, Triticum aestivum
acaatctcagcaaaccgcgtacgataatagtgccccttagttggtgctttataagagaacatgcagaagat

SEQ ID NO: 445062 - DNA, 388 bp, Triticum aestivum
gggttgtactaaaaaaaaattgcaaaacttcaggcccaataatcctgggaaaacctttcctaaaaacaattggggcaattattgaaatgaaagaaggaaacattagatttcaattccccccaaggaaaggcatggaacactttccaagaaataaaattaagttaccatatgaatctatcatgagggctacttatggattaaataccaaagatgacaatacctagatctttgtattatgcctagctaggggcataaaacaatagtgcttgttgggaggcaacccaattttattttgtgttttttgtttttgcttctgtttttcaataattacacagtataaattctatagtaattatgtgttagtgttttaattactgtttgtgccaag

SEQ ID NO: 445063 - DNA, 417 bp, Triticum aestivum
ccgggtcgacgggtcccaacaccactcaataccttcgggggaaaccctagatcagctgatcggatgttggcggcaatcatatgtcgtaacccccttgggggcggcattcttggaggtgcactcggcttcgcgggaccagcggacggcttctttggtggagtggtgcttcatccatacattgatggcgacggatcttgacggcgtggcgtagtgcagattcggagttcgatgtgggaggatggactcgtgcaggaggacgacgctgtctggcgtcgtggtggcgtcaatggcagagagacctgacacggtagacgcaacagtacagctctgaagatggactcgtggcaggtagctgcggcggcctcatacccggcaggcatcctgattgaggagtgcgcccgactggtaggtgcccca

SEQ ID NO: 445064 - DNA, 339 bp, Triticum aestivum
acaggagtacgaacgcaatgttcaggcaccacccagcaaacctcaggttcatcgctgacctcaatcctttctccttcccggtttcggcacgggaatcatgcaagtaccaccaggatcggacggtccacctatggcatgtctttcaggattggcacgtccactatggcatgttcatgacgtctcataacgacttcgtctgatacatctacagctgttataaatctgaatgtgagtctcattcataacgaccacactttcaggtcttctcatccagtcaataccacacataccagcaacaggcttctcaatacttgacatcatatcatcgggacgctccac

SEQ ID NO: 445065 - DNA, 432 bp, Triticum aestivum
attcgcgggtcgacgggggccatacagcgttgtgctttttgatgagattgagaaggcacatccggatgtgttcaacatgatgctccagatcctggaagacggaaggttaaccgacagcaaggggagaacagtggacttcaagaacacgctcctgataatgacatcaaatgttgggagcagcgtgattgagaacggggggaggaagatcgggttcgacctcgactcggacgagaaggacagcagctatggcaggatcaagagcttggtgatcgaggagatgaagcagtacttccgaccagagtttctcaaccgtctggacgagatgatcgtcttcagacagctgaccaagctggaagtcaaagagatcgcggacataatgctgcaggaggttttcaccatgctcaagaccaacgacatcaacctgcatgtgac

SEQ ID NO: 445066 - DNA, 309 bp, Triticum aestivum
tgtacaccagcgcgagtgtctaaggaggcagtagtaggcgttgacagcatattaatttttcaaaggtacataattgattggttcctctcacatctatggtacaaagaagagctaagatgttctccttgttgtcctatacacatacgcaaacgctgggacattaagcgcaaccaaatccctaatttgatataccggtatacttttgctaacattgttgctaaaatagtcaataatatcatttcccttgtctccggtgaaaaaaataaaaaaaaaaatataaaaaaaataaaaaaaaaataataaacaaaa

SEQ ID NO: 445067 - DNA, 463 bp, Triticum aestivum
  unsure (1)..(463): unsure at all n locations
tgggngnatttntacgcgcnacggtaccgaacngnaattcccgggccgacgagctcactatcggcggccgctctagaggatccaagcttacgtacgcgtgcatgcgacgtcatagctctctatagtgtcacctaaattcaattcactggccgtcgttttacaacgtcgtgactgggaaaccctggcgttacccaacttaatcgccttgcagcacatccccctttcgccagctggcgaatagcgaagaggcccgcaccgatcgcccttcccaacagttgcgcagcctgaatggcgatgggacgcgccctgtagcggcgcattaagcgcggcgggtgtggtggttacgcgcagcgtaccgctacacttgccagcgccctagcgcccgctcctttcgctttcttcccttcctttctgccacgttcgccggctttccccgtcaagctctaaatcgggggctccctta

SEQ ID NO: 445068 - DNA, 406 bp, Triticum aestivum
ggggccaagggaaggaacaaactgaaaggaccaatggattaagaatttggttttggaattgcctcaaggtgatcctcaaattctccgaattaatttcaaataaactactaaaataatttgggaaaatgcaaccgggaacctgggaattgggcatagaaggtcagttctgatgccagataatgtccacttgaaagagatgattattaggtgcgcgcaagtgcaattgtgcaatgatagtgtcaattcgttatttgttcaaagtgacatgaaaacgaatatcctacaactgagttggatcttcactccaacacaacatctttttttgtggaagaaatggtgacaacttcactgcatatgacatgagtgtaatatatattaaatctcatgtttcatatgttccaaaatc

SEQ ID NO: 445069 - DNA, 215 bp, Triticum aestivum
gcgacgtgcgaaacatgcagttcatctctgtaaataaccctggagtcgggccttagttactctggggggctcgcttccattcaaaagcgcgccccggcgtaaaattgttaattctaggtgatattctcccagcaagctgtctgggaaacctaataccttctgtatatgaacaaatgtatcattgtagcccctaaaagctgtttgttgtgttgctg

SEQ ID NO: 445070 - DNA, 464 bp, Triticum aestivum
  unsure (1)..(464): unsure at all n locations
ggggngcttatctggcgtacgggtcannccaaccgggtcgaccagctcactaatcggagccgctctagaggatccaagcttacgtacgcgtgcatgcgacgtcatagctcttctataggtcacctaaattcaattcactggccgtcgttttacaacgtcgtgactgggaaaaccctgcgttacccaacttaatcgccttgcagcacatccccctttcgccagctggcgtaatagcgagaggcccgcaccgatcgcccttcccaacagttgcgcagcctgaatggcgaatgggacggccctgtagcggcgcattaagcgcggcgggtgtggtggttacgcgcagcgtgaccgctaacttgccagcgccctagcgcccgctcctttcgctttcttcccttcctttctcgccacgtcgccgggtttccccgtnaaacccctaaatccgggggcncccttaagggttc

SEQ ID NO: 445071 - DNA, 76 bp, Triticum aestivum
aaggccagaagggtttccccccacaattgtggacggtgacaatgaaatacccaacccaaatacccaaatggaaggg

SEQ ID NO: 445072 - DNA, 432 bp, Triticum aestivum
cccgggtcgacgggggccccgagcaaggcggttgagcggttcgtgcagaccaggctccgctcctcaggtaatgtgctcagctaggatgaactggccgccgagaacgtctacatcaatataatggtccaagtagaactggagaagctcgcactcaagggtcccagcactggtcagcaagctccgtccagtccaagcgccgcagcgggcgacctgaatactgtatgcgccgcttcgaccgcgtcggcatccgcagcaggcacgtcgaccgacaagaataagaactatgccgtgctggctggcaccctgtctggtctgaacgccctgagctggtacctcctgtcaaagcctaataatacggaggaggttgtcgactgatcggtccatcctgcactggatttttacttccttactgcacatggacctgcgcgatga

SEQ ID NO: 445073 - DNA, 464 bp, Triticum aestivum
  unsure (1)..(464): unsure at all n locations
tgggnagctcntntaggtcgtncggtancnnncnnncncgggtcgaccgggncgctcaaaangcacannanaanntnannnanancaaaaaaaaaagcggccgctctagaggatccaacttaggtncgcgtgcatgcaacgtcanagcncttctanagtgtcacctaaattcanttccnggccgtcgttttacaacgtcttgactgggaaanccctgncgttacncannttaancncttgnagnanatccccctttcgccanctggngtaatnccgaatcaggcncgcancnatncccttcccannanttgcgcancctgattggcgangtgggacncgccctgtatcggcgcataagcncggagggtgtggnggttacacgcatcgtgaccgctntacttgccagatccctacgcctgctcctttcgctttcttcccttccgttctggaacgttcccggattt

SEQ ID NO: 445074 - DNA, 390 bp, Triticum aestivum
gacgggcttcatgaatttgatgcatgttgattgtagtttttaaagcctagtattgaacattgtagatgagttcgtcgtatgattcttccgaaaaagaatttgatatggaagaggaggaggatcttgcgatgatcctagctatgcacatcaataaaaaaccgaagcacggtggttcggttattggtcggcaaaaaaattggagggataggatcgatgcccataatagattgatgaggtactattttgtggagaatcccacatacccggagtcgtactttcgtcgccggtttaggatgagcaccgagttgttcaggcgcattgcagagaaactagcgagccatgaccggtttttttcagcaaaggaagaacgcctccagagagctcgggcat

SEQ ID NO: 445075 - DNA, 467 bp, Triticum aestivum
  unsure (1)..(467): unsure at all n locations
tgggnaaatcntcnagganggacggtaccacacacngaattcgcnggccgacggggtcactngtaactcaaattcgcgtactctcgaaaaaaaaaaaaaaaaaaaaaaaaaaaaaagcgccgctctagaggatccaagcttacgtacgcgtgcatgcgacgtcatanctcttctatatgtcacctaaattcaattcactggccgtcgttttacaacgtcgtgactgggaaaaccctgcgttacccaacttaatcgccttgcagcacatccccctttcgccagctggcgtaatagcaaaaggcccgcaccgatcgcccttcccaacagttgcgcancctgaatggcnaatgggaccgccctgtagcggngcattaagcgcggcgggtgtggtggttacgcgcagcgtgaccgctcacttgccagcgccctagcgcccgctcctttcgctttcttccttcctttctcgc

SEQ ID NO: 445076 - DNA, 374 bp, Triticum aestivum
  unsure (1)..(374): unsure at all n locations
ggcaacaacccctggaacggtaatttggaaaatcctttcctcaaggaaaaattaaccgggctaacaaatccccctttcgtgcctcctttggggtgttggtgttgcaacggtgactgattgcaactcaatgctgtggggtcatactgtccttgttggcaaatatcacgacttgcatcgcgcaaatcatgacanacactattcagaagaaattcaaggtttcttcaacccagctgctatatcagtcctgtccttaccaatcattgacactgtntcttatcggcccgttccttgatggattcctgactaaccaaaacgtcttcgctttcaattacacatctaacgttgtgtttttcaacgtcctgtcctgtttgaaa

SEQ ID NO: 445077 - DNA, 352 bp, Triticum aestivum
acctgctgaccggcggcgggcccacgcggaaggaaaataagggaagggcccacaaccgctcggttaggcaaggcaaggcaaggcgcaagcgtatgcgcgttccctttttcggacggttgtacagcgggcaagggaaaagccaggaaaaaagagagcggtggctcgttttggcacggcccgggtcggtcgcatcgctttcttccgcggcatgggcgggcagcggcagcgatcggtccgtccatcaatgcagtcggccttgtgcggtggtgcgttgaagggtgaggttgctaggaaatggaaatggtgctcgctggctggcccttgtcgcgttgcctgcttttgcgtccggttt

SEQ ID NO: 445078 - DNA, 394 bp, Triticum aestivum
ggggccaccggaactattgaccagggaacggcaaaggccaaaatggcacccgggttcaagccaaaggacctggcccctaacacaagcaccaaggagaattggttcaacggtgtgaactaaccgcggcatcttcttcagaggagccaaagaagctccagtctctttccgtaatcgcctctagaccatggcagaagtgcaataacaccgcgacccgggcgacctttcagccggtgtcgcccttgcccttgtctcattctgatgcaataaggcccgaagaaatttgaagagtttgtttgtacctttgaatattatagagcatgcaccgagcagtcgtgatgtttgaatcaaaccgtcgccttcaagcgcttgattttgatggatgctgtttgttttc

SEQ ID NO: 445079 - DNA, 459 bp, Triticum aestivum
  unsure (1)..(459): unsure at all n locations
tgngnantctttcggagncacggtcatnaaatcccggggcnccagaggatccaaagctncgtacgcgtgcatgcgacgtcatagntcttctatagtgtcacctaaattcaantcactgccgtcgtgtttacaacgtcgtgacngggaaagncctggcgtnacgcaacttaggcgcccgcancacatccccctttcgncanntggcgtnatagcnantaggccgcnccgatcgccctcccaacagttgcgcagcctgaatggcgaatgggactctccctgtagcggcgcattangcccgcnggtgtggtggtnacncncancntgaccgctacncttgccagcgccctatcgcacctcctttcgctttcntcccttcctttctcgcgacnttcgccngcttcnccgtcaagctcaaatcgggggctccctttanggttccgatttagtgctttacggcac

SEQ ID NO: 445080 - DNA, 411 bp, Triticum aestivum
gggaaggcctatgttggatgatattatctcacctgaacaaagtgcctttgtttctggaagaatgataacgaacaatgcactaattgcttttgagtgcattcattatatcaagcaagaaaaagatccaacaaaaagcttatgtgcatacaaactagacctgtcaaaagcatatgatcgggtagactagaacttcttgaggcaagtgatgcaaaagctggggttttgatcatcgatggattgactggattatgacttgtgtcacatcggtgagatgttcggtaagatttaatggaaccctcttggattcatttgcaccgtcgtgtggcctacggcaaggtgatccactctcccctttcgtgtttctgtttgttgctgacgggctttctcaatcctacgacaacgtgtggatgt

SEQ ID NO: 445081 - DNA, 393 bp, Triticum aestivum
attgccgggccgacggggatgtatactggccgactggcaagattaacttatttaactatcaacatcttagcaaaaatacccgatacaaacgccatggtgctaacaccatgtgaaagagaattgaagacatataaattccttttctaagaaggggcgacctagccagccgccaggacgacggctccccttcaccggcgacctcagtcatcggcggaggggggtcaccggatccacgcatgtggatcatgtagctttaggtcttaggtagcttactttttcggtcgttcatcgtcttggcttgggcagcggcactaacgccgttgaatagataagatccccagctatcggtcctatggttgaatatccccgctatcggtccgattgaattgaaat

SEQ ID NO: 445082 - DNA, 418 bp, Triticum aestivum
gacgggggtaggcggcagcgatacgcggcggctcggtgcacgcgcgtgcaaaacgtgcgctctgggcgcgcccagagcgtgcacgccaactgttcggcaaaatgccaatgcgtgccacagggcttgggtgaggctggcaattagcagacctaggttaggagtagctaggatcttagtggacaaggttactgggtcagtggattaagtacacagtgcaaactaagaatcatgtcaaaactgactatgcacaccaagtgttcgacagaatgtcatgggcatctaggcaactcttggggtggccaaactctccagatcatattctctttagatgataaagagggtggcaaggttacttggtcaagaccagaaactcgttagtgcaaaaatttgagaaaaccaattttgggcagaaactaaa

SEQ ID NO: 445083 - DNA, 194 bp, Triticum aestivum
ttatacttgcgctgtccgatctgctccgggaggacagtgagtcttggctcgacaaggtcgccgttctatacaagtcatccacgggatgggaacgctgcatagattgcctgtgcatgcgcatgcactggcacgttcctgcgtgtacaagatagtgtgtgagccgagccgcgctttgttgcccgtactgtttgtca

SEQ ID NO: 445084 - DNA, 441 bp, Triticum aestivum
cggtcaagatatcccgggtcgacgggcttgatcaagagctacgccttccatcgctactcttacacctcccccgtgcaaataagcagccgccgccgagtctgccttgccaatactctctggagatgcaaagcctcccatgggcgattatccgaagcgtcagcagagtcggctctgctgcgcctcgctggtggcttccagctcttgcccgacgagatgcccctccactcatggagtcagtaccgtcttatccaaatcaacatctctataaaattttccgtgagaagcatagcaagctggatttgccgtgcctctccttctgttctgctactacacgaggcatggataaagcagagaggatgaaggcagcagaggagagcaatcccatggtagagacaagtgcaatacaagatgtgtattaccagccaatcatcccgggtagca

SEQ ID NO: 445085 - DNA, 239 bp, Triticum aestivum
  unsure (1)..(239): unsure at all n locations
anaagggtgntanaaaaaaanaattcggcngcncnaaaggatccannctnacntancctgcatgcaacttcanagtcctccaatagtccagcctatttcanttcaccgngctgtcntttacaacctcgtgactgngaaaantctggcgtnncccaatntantcnccttgcacnacagcccctatctccagcnggcgtannagcnaaaatgcccgnancgatnncccatcntaacantnc

SEQ ID NO: 445086 - DNA, 429 bp, Triticum aestivum
ccgggtcgacgggaggatccaaatcctagggttaatcaattttagctagttgatgggaaaatacgaattaatggtaatggtcttagggcgatttagttcggggaaaggggaaggggaagaaaattctatgaacctttccttttttttcgttaagttcaagtctgacgagagtaatattctacgactaacaactcatttattttgagaccgacccacttcctatctaggattttatttactagtcctttatattccaacgtgtcaatcgccaaatgctttggcaatttccccgggtccgatgaagcaatataattttgaaccagaccttttgatctttggttatctttcgtagtaataatatctctgggtttgcaacgaaaacttggtatattgactatacgaccattaactaaaatatgtctatggttg

SEQ ID NO: 445087 - DNA, 839 bp, Triticum aestivum
  unsure (1)..(839): unsure at all n locations
gtnggtgnnnnnnggggnnnnanatttttatttcnttcnggggctttccggggcccctanncgggtggnttccnaatttgaannnaanaattntcccccccgggggggggnttcccggaaccncgggggggcccaaanngggggggaaaaaaatatttccccctttnaaaccntttaatntggggggttttnttgcccctttggggggggggcccccccggncccaaaggggggggccccttgggttttaannnnnannnannngggaaaangcccccggggggggtttttttttanggaaaaanngggaaaanttttcnaananaccngggtnttgggggnanngggggaagggtttttttttttattntccccaaaaagggggtttttttcccggggggggccccccnggccaaanggnaantttttnngttgtggtttggttttaaaatttaancccccctttaancttccccttgggccctttaaggttttttnggttnggttttttttatccctttaangttnggtgaattttaggancctnagccttacaaaaaggttgtngttanggggtcccgaaaaaagttcgnantcctcctcaacaagtnacgcctgcggggccctccaatttnattagtcaaaaggggcgggccatagtggcacacatgaggtggaaagttgtacagcagtcgagtttatcgcctgcatcacgggacaaaatgcattaaatgcgctacttaggtgccctcttgctttaccggtgagacagcatagcccatcctgtctgtcgccgcttcgccttgctccgacatgctgtcaggccacgaaggcatgtt

SEQ ID NO: 445088 - DNA, 331 bp, Triticum aestivum
gggaatgcctaaacgcccggcaaattcatcagcaaggaagaaaccataacttggaaccgcggtgcttcaaagtgctaacaagacttggaactccagcaaaggaagattgtacatatgtgactttgtttaggcagtgtagggaggtgctaggcacaaggtttattctgtgcgcaccagtgtatctatgttgatatgttagggtgtgcttatccacactgcactagttggtagccgtgtgcaaaatatgtatagtaccagtggtttggcttgtatgtgtgatacatgtgtgtatcttgactgcttggtaatgtaatggcttggttgcttgctt

SEQ ID NO: 445089 - DNA, 180 bp, Triticum aestivum
  unsure (1)..(180): unsure at all n locations
ccaaaaancggtcgcnctanangatnnaaccttangtacncgtgnatgngangtcataactcntcnaangtgtcacctaaattcaattcantggccgtctatttacanantccatgacgggaaaancctggngttncccaacttantcnccttgcggcacatccncctttcgncannggc

SEQ ID NO: 445090 - DNA, 312 bp, Triticum aestivum
cgggtcgaccggagaaacaaaacgcgtcggaagccgctgcaaggctttcacacgacgagaagcaacctaccactaggagtgcatcatatttacaagcgtcacagcacattgcaaatcctggccttaccacaaagccacatcattttgatcgcccagattccgacgaattccgtatggctccacttgcgcccatgtctacgtccacgcagacgccattaacaggatctgaaccatctatagagtgccggatgacttaattaccttttgaggctaacccgaccttgagcgactcaattcatgtgttgacaatgt

SEQ ID NO: 445091 - DNA, 343 bp, Triticum aestivum
gggtcgactgacggagattaccccatcatcatgctcgctacacgtggcattgaccgtctcgacacagcactcctcctgcgcacgcggattgccgtctcgatccacatgcgacagtgttgctccgaggcattcaccatgttggccgcctcttctcagcacgtgaccaaccatacactcttcttacacatgcacggagtgcttgcccatgtacacgtcatcgtcatcccaggttacgtgtccaaaatcctgctgatcatcaagaaggactgcattgcacttcagctgctgaccgttttcctccatggcacaaggatcgcggtaacacaacagggatagacgtcaa

SEQ ID NO: 445092 - DNA, 374 bp, Triticum aestivum
cttgaaggatggtgatcctggtttaaccttcaaaggcgggaaaaaaattcaaaggccccaaaaaacggccccaagggtacggccccccaataatggacggttcaaccattggagcacctcattaaggtgtacgacggcgaagatgaagcaagacaagacagataacattaatctgaagtgggagtctaatagcatgtgaatagatgatgtaaaatacatcaccaaaaagtgctagatgtaaaatgcatcaaccacgccgtggccgctctgacggatgctgtaaatactgttgactctgaacttaattgaagaaactgaactttacagtcgaaactgaattttactgtggaaactgaattttactgatgaaactg

SEQ ID NO: 445093 - DNA, 426 bp, Triticum aestivum
gacaacgatgagaatgaattagccatccttgaattcatacatcttctcgtggaaaccatggaccgtcactttggcaacgtgtgtgagcttgacatcatgttccatctggagaaagtccacttcatgcttgaagagatggtgatgaatggttgcatcgtggagacgagcaaacagaacatattggcgcccatccagcttatggagaaaacctcgtaaatagtgtgtgaactcaagagcgcctaggtgatgcttagcctcttcctcccgccttcaccatagattcccccgttgtgtgaggagaaatgccgaacaactgctgtatgcatgggtggctgtgttcacccgactggaaaatgtgaaatgttctgtaatgttgaaaatgaagaccccatcattacttaacaacagttctgtaaaataatactg

SEQ ID NO: 445094 - DNA, 419 bp, Triticum aestivum
  unsure (1)..(419): unsure at all n locations
accaacaaacatgtagtatatgatggctcccccgattctgcatcaattttctcactgcatcttggctgtaaacggactgtagcatcgattgttggagagacaggatcttcaaagaactcctttgctgaaactgtaattatgcagtcatcttcagcactcgaactatccactttgataaaagctccagattcttgcctaatctgtttgataataccacctctttttccaattacacctccgacattcgccgcagcacaaagcagacgcaggctaaactcttttgcagagctcacctccctccgttgttggtatatagaaggccaatctcccaccatatcacctttgtatcgtccataaggactaaccataggagtaatccctacaactggtgcagtagaggaactnacaaggcgggatcc

SEQ ID NO: 445095 - DNA, 406 bp, Triticum aestivum
ggggagaaagaaattagtgcaaacaaatctcacattagttccgttaaccgaccatgcacgccgatcagctattaccggcggtcgtcgccgcggtggccatggcttgcctgctcatcgccggccgggccgacggcctcgaggagtacgccccttctgccgcggtgagcctggagattgagccgctgtccatgaaccagaaccccggggagttcctcccgcgaccggaggtgatgtcgctgccgaccgatctgctctcaaggccagacgtgggtggcgacggtgaggggtacgtcccgcatgtggaggttgtgccagaggtggtgctgcagcccggagaccccctcgccgaggctctcggcggtggctcgtatgcataggagccatcgacagagccggtcacgctcat

SEQ ID NO: 445096 - DNA, 133 bp, Triticum aestivum
tcttaccatccggcgttaaaacttttgttcctaaggcgggcaccttaacatcaagcgttgctgaataagttcctgcggatgctgttgtatgtaatagccagacattataaatatatcggatgttccactgtct

SEQ ID NO: 445097 - DNA, 419 bp, Triticum aestivum
gggtcgacgggggagaagatattgggaggggcaatggttttgttgctgtcgaaataccattcacaccacgtgcaaaacgtgttttagagctttcattggaggaagctcgccagctaggacacaactatattgggtccgagcacttgcttcttggattgcttcgtgagggggaaggggtggcagctcgcgtacttgagtctcttggtgctgaccccagcaatattcgtacccaggttgtccggatgattggtgagacaacagaagctgttggtgctggagttgggggagggaacagtggtaacaagatgccgacacttgaggagtatgggactaatttaacaaaattagccgaggagggaaagctagatcctgttgttgggagggaaccacagattgaacgtgtcgtacaaattttgggc

SEQ ID NO: 445098 - DNA, 345 bp, Triticum aestivum
tacggtgaaatgagcttctaggtcgtatgatcagtgatcagatggcacatgcatagtacttgtactttctgcgcatttcccaaactccctcaaccgtataatgccaaaacaatcaaacctcctaatggtggccgttaaatttcaatgaactcccatcaccatagaaactaaacagtgcgggagcacctcatattctcacatgcgagaaaacatagggtgctatcgcatcttggatgctacggtgatacaagctttgaggtcatttgatgtgagatccaatggcatcggagcactctttgtgcttgtaaacagtggcagaactcttttggggcttttctgcaaaaa

SEQ ID NO: 445099 - DNA, 419 bp, Triticum aestivum
ccgggtcgaccggcagggagaggtgaattggatacatctaaaatgtaccaattccttttgatgtttaattcctactccctccattccaaaatatagtgggctcgcgcttcccgaggtcaaactttgaccataaatttaaccaatgagactgactgcgatgggagaaaaaattatataattaaaaacttcttttgaatatgaattcattggtataacttttgctcccgccgcagtcgatctcgttggttaaatttatggtcaaagttgaagcacgggaatagaggaagcactatattttggatcggagagagtatgttttttaaaaaaaaatagactagcatactaataaaatgcaagaaggcatatttccctttttgaggtgctgcgggaaataactttgaaatattcataggacaata

SEQ ID NO: 445100 - DNA, 384 bp, Triticum aestivum
ggggcttcgtaaacggtgccctgttttgtagcgactgactacaatggtaggttgcgtacgtccttaatacatcactactaggtgcttatgttacttcgttctgtccggttattagcactcatgtttactttcgcactgagaactgaaaaactgaatgtaaatttagtatggatgccgtgtatgtggaccttgtgttgtaattccgtttaaagcaaaaaaaaaaaaaaaaaaaaaaaaaaaaaaaaaaaaaaaaaaaaaaaaaaaaaaaaaaaaaaaaaggaaaaaaagaaaaaaaaataaccaacacataaaggggtctcccaataggttcaaagctttagtccacggacgggcaacttcataccgctgctaggatgtaaccaa

SEQ ID NO: 445101 - DNA, 427 bp, Triticum aestivum
aattcgccgggccgacggggtcacttatgttaattattatttgaatgcaaaacttatgcttcatttgcttcaacttataattttaaattttcactattctactagcgcatcccctactatgcaagaatttttgtcttggataagataggttctagtgctatagatgatatggaggtaaagagagtttacttgaagacggagcatgggtatactttcaacgtcaaattatataatggagacacatacacccattttgaatgcaaaacttggcaagcactatgcaaggcttatgcatttgagcctgatatggttatcacctttgatattcgtccggaagatgatattgaaggtaatatagacatctgggtcgatgtgcaaacgcctccagttctaccatttggtgactttttctcaaccatgcatgcat

SEQ ID NO: 445102 - DNA, 419 bp, Triticum aestivum
gggccatgccaagtttcatgattttctggtgagttttggatttgcggatatttccaaatcgagattgcaatgtttcgagccaggacgccgagacggttgaattcatcctcattccttccgtgggacctaaacatgcatcccaaggacacatgtacatttttctagccattttggtgcactaaagcatgtatttgtagtttgtatttgaattatggacattcctataaaactcggctaatgaaacaataaggtcaaatgaaccctgaataatttcaaagttcagcgtgaatctcctgttgctccatgttacgtgtagaagaaaatacaaggctaaaagagggagcgattatcctttcacccacaaggggacacgtttccctatcgaaaccacgacggttcttgtgacaaggctccggttt

SEQ ID NO: 445103 - DNA, 470 bp, Triticum aestivum
  unsure (1)..(470): unsure at all n locations
gnnngnagnatttatntagggccggtacnggtaccnatcngtnaattcccgggccgacggctcactaatcggcggccgctctagaggatccaagcttacgtacgcgtgcatgcgacgtatagctcttctatagtgtcacctaaattcaattcactggccgtcgttttacaacgtcgtactgggaaaaccctggcgttacccaacttaatcgccttgcagcacatccccctttcgccgctggcgtaatagcgaagaggcccgcaccgatcgcccttcccaacagttgcgcagcctgatggcgaatgggacgcgccctgtagcggcgcattaagcgcggcgggtgtggtggttacggcagcgtgaccgctacacttgccagcgccctagcgcccgctcctttcgctttcttccctcctttctcgccacgttcgccggctttccccgtcaagctctaaatcnggggctccctt

SEQ ID NO: 445104 - DNA, 399 bp, Triticum aestivum
tccaaaattcaatgaaaggacggtaaccctggtaaacaaaaaatccaaaccccaacaaaacctaattcacccctgggcaacttccaaatgattgactgacggccgggaataaaacaacggtgctaaacagactcggccttggggtagatccgtacggcgacggccaggcccagtatcgcgagggggaccaagaactggaggatcttgatgactaactccggaagggattaaagttattgttaatgatgatgacttcagcaccatttttgctgatattgagggccctgctggaactccatatgagaatggagtattccggatgaagctattgttgtctcgtgacttccctcactctctcccaaaaaggttcttctcgacaaaaataatccatccaaacat

SEQ ID NO: 445105 - DNA, 62 bp, Triticum aestivum
  unsure (1)..(62): unsure at all n locations
ttntggcgttactcaacttaatcgccttgcagcatntcncnctttcnccagctggnntataa

SEQ ID NO: 445106 - DNA, 423 bp, Triticum aestivum
gggccgacgggaccaaggaaaatacaagcactggaacgaggggacagtttgtgtggcatggtggacgcagtgttaggatagcaaaggctaccgaaaacgcaaataaatgaataggatggatgggtgatgtatagtgctaagtatgggaaggaatagaccacgcctgggcctttccattacgtcttaattgtatagacaagtatgtgcaatcctgtctaatcttaaccataaaagggagatcacaaatatatttcatggtcctcggtttagggaattaggagtatatcacaatcccgtgatatattagtctgacagatatgaataaagataatctaagatggatattaggtaatgattcatgttcagtacatatattatcttacagccaccttctttacttgttcaggcccgcagctgatgctc

SEQ ID NO: 445107 - DNA, 463 bp, Triticum aestivum
  unsure (1)..(463): unsure at all n locations
tgggngnanttttatctggcggcacggtcaaanaacccggggccggccgacgagctcacaatcggcggccgctctagaggatccaagcttacgtacgcgtgcatgcgacgtcatagctttctatagtgtcacctaaattcaattcactggccgtcgttttacaacgtcgtgactgggaaaccctggcgttacccaacttaatcgccttgcagcacatccccctttcgccagctggctaatagcgaagaggcccgcaccgatcgcccttcccaacagttgcgcagcctgaatggcgatgggacgcgccctgtagcggcgcattaagcgcggcgggtgtggtggttacgcgcagcggaccgctacacttgccagcgccctagcgcccgctcctttcgctttcttcccttcctttccgccacgttcgccggctttccccgtcaagctctaaatcgggggctccctt

SEQ ID NO: 445108 - DNA, 417 bp, Triticum aestivum
gggaaccatccaaggatttgaagcacctaaacctgaagttatttataatgtttgggttcgaggatgaagacaaggtgacaaactatataaggcttgtcatggaacgtgccgtgggcttgaaaagaatcgagttgcatggtagaagcccatgcaatgggtgcgatgccatcgaccttgagtccctgagaagatcccaggcggatgaagctagcaggcatcggattaaggagcaactcagacatggatcttcctcgtccgtggagatagtaatctgctgatggatatggtgaaggaatgataaatttcataaagctgctcgagcgatgactgtacgaagtgcaggcagtcgtaattttaagttcagttattgatagtctggatgaatgttttgtttttgtccaatttacggagtaatta

SEQ ID NO: 445109 - DNA, 385 bp, Triticum aestivum
  unsure (1)..(385): unsure at all n locations
cccgggtcgaccgggaaggttaaaccttattaccaagaaaaattgaaaaggaaaaaattgaaaagggcaaatctgaaccgaagattggcatccaagaactcccccttgccaacttcaagaaaatgttaaatatcaggaccagcaggggaaaattaggaggtcatccacaatggatctcctttgtgtctcaaaccagcttctccgtgtccttggttatttacttgaacgaaactgaaactgaaaactgtgaggatcgaacttcgatgtctttagagctactctgttttaaccttggtttaccatctcttcttctttcactgtatgctttgtttttcgccgtcaaagatgcgattgggccaacgcttctagtcctcangcaagacat

SEQ ID NO: 445110 - DNA, 503 bp, Triticum aestivum
  unsure (1)..(503): unsure at all n locations
ggnnnnnnnnnnttnncttgcncggccccngtccacatcagnaaatncncgggncgatanctatncggantcatggggctcacttantnngccttgaacttcccttccngaanncntaggtatggtgacaacctngtnncggctgaaattgtgcccatnancaacctgnaggtgangtcnagnttattacanaaaaaacggcgggnnaattccnacggctgagggaatttgancaacaanatggccatcancctgttgcngctgctaaggaattggccaancaagatgantgtcatgtgttgcaaatgctaagggantggncaagcaanatgggtatcagcctgttgcnacngcaagggaatgaacaagcaagatgggtatcaaccctgttgccaaaacaantttaatgaaagccaaatgttaccccttgtttgatggnnaaaccaaaggggaattcaatttgattcaatttcaattacagcacctangttaagttaggtccc

SEQ ID NO: 445111 - DNA, 391 bp, Triticum aestivum
gacctccgcagacactgtggacctcaagccaacgaacaacgacactggcgaactcatcatgcaccttgagtgggttaacctccccccaagcatgtcacagtgaattgatttgacttgcaaagggagggcagctaatgtctgccttttgtgcttctaatgttgcctcctcgatatatgatctatgaagataattaagcgatgcctagctcattcgttacataacacccaccgtaatgatttgtggattacaacagcatggtgagtatagaataggagcatcttcgtgatgagatccgcacatcatcacagtgggtgctacgtaatgcatgtgatatacttatgctgctgggggtaatgcatgctttcagttttggttctgcatatattgtat

SEQ ID NO: 445112 - DNA, 411 bp, Triticum aestivum
ggggtataagccatggaaaagttataatacagtagctacagtgcaaaaacagaatatgaatgggtttgcaacaatacttagagtagtgatttgcattattatactaacggatcttaccgtgctttctgttgagttttgtgtggatgaagtgatcaaggatcgaggaggtctcgatatgaggagaaggaggagaggcaagagctcaagcttggggatgcccaaggcaccccaagtaaatattcaaggagactcaagcgtctaagcttggggatgccgcggaaggcatcccatctttcgtcaagaagtatcgatatgttttcgtcttcgtttcgttcatgtgatatgtgtaaatcttggagcatcttttgtgcttaattttcatttttcctttatgcaacatgatggtatgag

SEQ ID NO: 445113 - DNA, 416 bp, Triticum aestivum
acggggtacagatacggcggcattatagatactcggatgaacgcaagggaaaactggcaggcttttccgatccagtgaattagtgctggctgccaaacgtttgaaagagtagattattttttcaaaagagtctggctgccgggttgagcccctttacttttgccggagggttattatagtggtgtgggattcgatgcaacgataggttacagagactttatatgatacggttagttttcccatttgcatttgcaggactagttatgacctcccctgtgtttcttgggagatttcctttctttactgttgtagaagtgcaaaaatgtcttcgtatgtactagctacatataggtagtagtagctcgtacaatgggtttagtagaacacaccattgtcatgtgctgttacctgcactt

SEQ ID NO: 445114 - DNA, 412 bp, Triticum aestivum
gggggggaggtcatatgtacaataattgtgcccaaggaggacgcgaaggaaagggctgaacagttttcgaagccagcactaaccttagaagaattgacaagttggtcaaaagataaacttgctccatacaagattccgacgagattgcacgtatgggactctcttcctcggaatgccatgggaaaggttaacaagaaggagcttaagaaattattagaggtgtagccatatttacattgatgtacctatttttcaatcgcacccttctgcgaggcagacatatagtggtgtcagctaataattttgttctgttcgacaataatgataatttagagcaactatagtaaatgtgcaagtaaataatgcacactatcctatgatatcttaaaagcgagaatgtgaaataactaga

SEQ ID NO: 445115 - DNA, 406 bp, Triticum aestivum
  unsure (1)..(406): unsure at all n locations
cggtcgaaatacccgggtcgacgggtgggcacacaaatgaggggtcatgtttaaagctatataatttagttgctaaccccttcatatctttccaggatttacggtcttttgatctttcctccatagccgctataatctctggcctgtgcttttctcttagctcttgcaatcccatttctttgactgactgaaaacccatacaagctgtcaatacaagttggctgctgtcaaaggtagagccagcaagagactgcagtaacgtaattgcatctccagcatcctttgtggtcaccaaggcangccctaaaagttaacataaaagatatagtgttgggtagacatcaaagtttagtcaaatgaacaaacaataggacatagtaacattttcagattaatccaaaaacag

SEQ ID NO: 445116 - DNA, 377 bp, Triticum aestivum
gtcgacgtcgtcaagaagggttacgtcggaatccacagctcagggttcagggacttcctgctcaagccagagctgctccgtgcgattcaggactgtgggtttgagcatccttccgaagtgcaacatgaatgcatccctcaagccattctcggaatggatgttatctgtcaagcaaaatctgggatgggcaagactgctgtttttgtcctctcaactctccagcagattgatccggttgctgggcaagtagctgcacttgtgttatgccatacacgagagttagcataccagatttgcaatgaatttgagaggtttagcaagtacctgtcagaaacaaaagttgctgtcttctatggtggcgttcacataaaaaaaca

SEQ ID NO: 445117 - DNA, 420 bp, Triticum aestivum
  unsure (1)..(420): unsure at all n locations
gggttgggcgacggtgaagacatgatcgaaccgaagctagctgataccaaattgttatggtgctgctagaagganggcgcgagaaggccggccgggggccttttgcccatggccgggcaagatggaagggatttccttcttaattcttgcttgattagattgatacatctcctctctttatatagagaggtttacttgactcccaagcaaggcttacttgatccctaagaaagcgacccttatctctaattaaccctaagactaacgggctataccgccagcccaggccattaggcccattacgtactctaacacagtcataagattgtaactagtaagatttttaaaacatcaaaactactgttctttgtagttgttaaaaacacgacatccttcaagttcattaacaatatatgacaa

SEQ ID NO: 445118 - DNA, 427 bp, Triticum aestivum
gggggcaaggacgccgaggaggttctccagccggacgagggcaagggcccgatctccctcatgttcccaatcttcagcgcggcaaccatcgaccagatcttcaccacctcagatacactgtctcttccccatgggcccgctcatgcatggtgaagaccccctgctccgaggtggtgccgtggtcaagaggagaagcacagaatatggatggaggatggggaatacatgcagaaggcggaagctccatgctcagctcagctctcaactacactgctctaagactacttggtgagaatgtcgatgatgagcaagatatgtccgtgccaaaaacaaggaaatggatacatgaccatggtggtgcaatgatgataaaactggaagcaagatgcttggattttttgacaggtcaggtgtaaaccctaccccc

SEQ ID NO: 445119 - DNA, 380 bp, Triticum aestivum
gggactgttcagtttttgacagattctgttttcattgtgttgattgcttattttgatgaatctatggctactgaaatagtttatgatccatagataagttggaatacaataggtttaataccaatacaaataaataatgagttcattacagtaccttgaagtggtcttttcttttcttccgctaatggagcttacgagttttctgttgagttttgtgttgtggagttttcaagttttgggtaaagattctatggactatggaatgaggagtggaaaagagcctaatcttggggatacccaatgcaccccaaggtaatattcaaggacaaccaagagcctaatcttggggatgccccggaaggcatcccctccttcgtcct

SEQ ID NO: 445120 - DNA, 403 bp, Triticum aestivum
ggggcaataagcacataacacaagcgaagaaaaagtgaagactttctatcaacaactattataatgatgcctttgatgtagaatatcactgcagttacatttgaacaaatgaaatccctttttaacagatgagttttcgtccgaaaccctgatacttccaaagagattgtctgttttgtatccagtttttgtcataaccctttcaactttttagcacatgctatatgggttaaatgatgataccatgccaactttcaaccttttcagagttcatttgtattgcttttcaattaaagggtcattgagctcaaataatgaactaataccaaaaagaatgaactaatagcaaaaagaatgaagtgaaagccaaaagaatgaactaatagcaaaaacaaagaactaa

SEQ ID NO: 445121 - DNA, 342 bp, Triticum aestivum
aatccttaaccctttaaaaaagctgttaataacaaacgcctccgcctaatccccaaagggcaatcaaacgggccggttggattaccatgtccgttttgatgaaaaccccaataagaggacacgatctctgctttgacaagacgtgcaaataaaactgcatcttgaaacatggagcaagaggcttaaaaatagttcgaaataatgaccgggcagcgacgtgatgtgacgctacaaaagttgtcagtagattggactcaagaaatattatactctctgcggatatatgtggtacttgttttgcagagccggacacgttttttatgttcgaaggctattttggag

SEQ ID NO: 445122 - DNA, 460 bp, Triticum aestivum
  unsure (1)..(460): unsure at all n locations
ttacgcngccagtaccggtccaagaattcccgggtcgacgagctcactantcggcggccctctagaggatccaagcttacgtacgcgtgcatgcgacgtcatagctcttctatagtgtacctaaattcaattcactggccgtcgttttacaacgtcgtgactgggaaaaccctggcgtacccaacttaatcgccttgcagcacatccccctttcgccagctggcgtaatagcgaagggcccgcaccgatcgcccttcccaacagttgcgcagcctgaatggcgaatgggacgcgcctgtagcggcgcattaagcgcggcgggtgtggtggttacgcgcagcgtgaccgctacactgccagcgccctagcgcccgctcctttcgctttcttcccttcctttctcgccacgttcgcggctttccccgtcaaagctctaaatccgggggtccccttangggtt

SEQ ID NO: 445123 - DNA, 359 bp, Triticum aestivum
ggggagcacaagaaggacggcgagcacaaggagggcaggaaggacaacatcggcgacaagatcagcggcgacggccacagcgacggcaacagcgacggcgaccacaaggagaacagcgaccagaagaagaagaaggacaagaagcacagcgagggccacaaggacgacgacggccacggcaacaacaacagcgacagcgacagcgactgagccagctccggccacgcaccggcagcagcgtgcattctatgcaagatagatgaacgcttgggagaagtgtggcatacatatatcttgcatggtttggaccgtgtggtaccaaatgttcgtaatgcgtgacatgtcgcatggatcctgtg

SEQ ID NO: 445124 - DNA, 57 bp, Triticum aestivum
ggggagcacaacacggagtggcagcaccacgatggcaagaatgatagcatgaacgac

SEQ ID NO: 445125 - DNA, 336 bp, Triticum aestivum
  unsure (1)..(336): unsure at all n locations
acggtcctagaatcncgggtcgacgggcgctgcaaaaactccggcgacggcgacatcgtggtttagggagagtatgttaggataaaccacgtatatgggtgtcgtgcgcgcagccgtggctggctagctacatgcgtggccgggtgatctttcgtgtgcgcatgctagttggttagttggctttgtggccggtgcgctgtgtgtgcatgcacgatgctatgcaagtttgttagtcacggatagactcccgggaggtgagccagatgtgagtggccgggtgtgacggccaactaagtgggcgtgcatgcaagtcatggtgtgcgtgcgtgtgtgtaa

SEQ ID NO: 445126 - DNA, 419 bp, Triticum aestivum
gggcgttgccaacttgattgagctcttgttgatcatctcattgtcattggcctctatcatcaccaaagctcttacttcttcttgtttttgcttttccctcttcctcttctttggtgcctcatgtgcagccctacatcgagccttttgttctggtgtggcttgcatacaactttttattgcccctttgataccagctatgtgttgcttcatcctagtcaccccacctgacatctcctttccacaaagaatgcacttgaatctttgcagatcatctggatcaatcagcacaacaaattcccaagccatgtcatctgattttctcttaagtttggaacttgcaacctctgaagtaccagaatcaggcatctacaaaaatcacaagggcaatagcatgtattatagtattagtattagacgtt

SEQ ID NO: 445127 - DNA, 372 bp, Triticum aestivum
ggggctgcggcggcggcgacgatgacgacgacaagatcgacatcgtcacggggctgcggcggcgacgacgacgacggcatcctcacggtgatgcggcggcggcgatgatgacgacatcaacaccatcaaacacgggcttgtggaggcgccggcgatgatgacctatacgtgtggtgtatattgtatatatatatataaatatgtatgtattaattatctatagtagatgtgtatgattgactgtatgcataaaatgtgcgtattataaaatgcatgtatgtgagtactatgaaatgtatgtctacactggaataggtagatttttatattttttaaatctgaacaatcgggatactaagggctaagcacaaa

SEQ ID NO: 445128 - DNA, 502 bp, Triticum aestivum
  unsure (1)..(502): unsure at all n locations
aactgtntacgccggccggtaccgggtccaagaattcccgggtcgacgggggaaaaaaaaaaaaaaaaaaaaaaaaaaaaaaaaaaaaaacaaaaaaaaaaaaaaaaaaaaaaaaaaaaagcggccgccctanaggntccaancttacntacncgtgcatgcnacntcanancncttaanagngtcaccnaanttcaattcacgggccgtcgttttanaacntcgtgacggggaaaccctggcgttacccaacttaancnccttgcagcaaatccccctttcgccagcnggcgtataccnaanaggcccgcaccgntcgcccttcccaacanttgcgcancctgaatggcaaanggacgcgccctgtagcggcgcattaaccncggcggntgtggtggttacgcgcagcgtgangctananttgccagcgccntaacgcccgccccctttcgctttcttcccttcctttctcccaaattttccccgggntttcccctttaaa

SEQ ID NO: 445129 - DNA, 378 bp, Triticum aestivum
ccccgagcacgcttgtacgtgatacctttcaacttgccaaagagaaagctccgtgcattatcttcatagatgaaatcgatgccattggtacaaagcgtttcgacaggtacaaatctttttctgattccagttcatgtatttctgcactttctcagctatttgctcaaatcacattctttggttgagagtacagtgaagtcagcggagacagggaagtgcagaggactatgttggagttgctcaatcaacttgacggattcagtagcgatgaacgtattaaggtgagtgtctttatccattctaaggactaatcatactggtcttaaaaatcgttctcaaagaaacagtaacaaccatacctttctattttttcaggtg

SEQ ID NO: 445130 - DNA, 87 bp, Triticum aestivum
gggcatcaaaaaaaaaaaaaaaaaaaaaaaaaaaaaaaaaaaagaaaaacaaaaagataaaaaaaaaaaataaacaagaatgaaaaa

SEQ ID NO: 445131 - DNA, 395 bp, Triticum aestivum
ggggaagataagattaggaaggttcaggagctgaacgcgaaagcgaaggctgctttggagaacggctggtcgtcgtgcatgaatctggacaagctggtccaatccgtcgtctgaaaattagcgcagcatgtcggccctgaataaattctgctgctttcgctcattgatgaacagattggggttgtttcttgcttgcttggaagatcgagagtgaaaaacatatcctatgttgtaagttgcaactgtatctcatgccaactcaataatgagtgggaccgaaaaaaatcatgatggagcaattcaaaaggtcaagtaggatgtcataattgtcatcgaaggatgtttggacctcaaaaaaatcggcggcttcaaaagtatcaaacttaagttccctt

SEQ ID NO: 445132 - DNA, 389 bp, Triticum aestivum
gggtatgtgaacaataaggtcgtccaggctctacatgttttgcatctgtagtcctcgtagacgcgggcgacatctaacttgatcttggattttgcgtattgcttcaatacagttccggtacacaaaaatacgtgatcaataaagccctcctggctctacatgttacatatgtatggcgaatctcccgtatgacacattagcacaggcccacgtcagcctgagacccatatgtcagtgggagcgagaaataagataatgataagcaaaaatgggtgacgcaaagtttcgaacccacaatccccagccaaaatttgcgtgagcaagccaccacactatgggccaaattcgggtaaaatcaggatgaacattcctgtatataaataacgctg

SEQ ID NO: 445133 - DNA, 367 bp, Triticum aestivum
ctattccctgctctcccccctctcgtcgggtaagtcgcaggtatggccaccgggtaatcggttcagatctcgcgctccttgtttcgctgttcttcgtttggttgtaattccaggcgagcgttctgtttgggttgtgctgctccttattacgttgatgtcgatcgaggcctagttccggtggtttgtcctcctctgttccgttgatgttggtattgtcttctgaacctcgctgctttggtttaggtcgcggctaatctattttgctttgacttctgatctgattgggtcctggctaatccatcatgctctgattgcgatatgttttagggtcgtggcttatccatttttatcctaattgctgatttga

SEQ ID NO: 445134 - DNA, 62 bp, Triticum aestivum
gactcccgggccgacggggatctccacagtgaggccgaccaggctctgcatgcgacccatac

SEQ ID NO: 445135 - DNA, 379 bp, Triticum aestivum
gggcaccattggttctgagcgtttccgttgccctgaggtcctcttccagccatccttcattgggatggaagctgcaggtatccatgagaccacctacaactccatcatgaagtgcgacgtggatattaggaaggatctgtacggcaacattgttctcagtggtggtaccactatgttcactggaatcgctgatacgatgagcaaggagatcactgccttggctcctagcagcatgaagattaaagttgttgctcctcctgaaaggaagtgcagtgtctggatcggaggatccatcttggcatctctcagcaccttccagcagatgtggattgcgaaggctgaatacgacgagtctggcccatccatcgtgcacaggaaa

SEQ ID NO: 445136 - DNA, 425 bp, Triticum aestivum
acggagcacccagatgtatctatcacccctcacgctcactctatggcctgaaataacctccccgagcctggtaccagcggtttgccgacttccacaccaccattggtttcatcttcacatgttcgattcgtcgttgtttgccctctgccatgacactgacatgagctaccttttcttctatctcctccgacaccatgtttcaccgcatgatcagctctttccactaggcgctacattacatcccagatgttgaggtccgagacacctccaatggcttcttcctgtagcatgccaagtatgtcagccggctacttgatcgaggttgcatggccagtttccagccatcacatccctggtagacacccactccaaggtctctgccaccaccggctcagctgctgctgatgcaagcttctactggacta

SEQ ID NO: 445137 - DNA, 495 bp, Triticum aestivum
  unsure (1)..(495): unsure at all n locations
gttacgccggccggtaccggtccaaaattcccgggtcgacggggaaaaaaaaaaaaaaaaaaaaaaaaaagaaaaaaaaaaaaaaaaaaaaaaaaaaaagcggccgcnctagaggatcaagcttacgtacgcgtgcatgcgacgtcatagctcttcnanagtgtcacctaaattcaatcactggccgtcgttttacaacgtcgtgactgggaaaaccctggcgttacccaacttaacgccttgcagcacatccccctttcgccagctggcgtaatagcgaagaggcccgcaccgncgcccttcccaanagttgcgcagcctgaatggcgaatgggacgcgccctgtancggcgcttaagcgcggcgggtgtggtggttacgcgcancgtgaccgctanacttgccagcgccctacgcccgctcctttcggctttcctccccttcctttcncgncaaagttcccccgggtttcccgttaaagncntaaaangnggg

SEQ ID NO: 445138 - DNA, 493 bp, Triticum aestivum
  unsure (1)..(493): unsure at all n locations
ttngccggcccgtaccggtccanaaatcccgggtcnacgggaatgaaaaagcaccttttagaaaaaaaaaaaacaaaaaaaaaaaaaaaaagcggccgcnctanangatcnaancttantangcntgcatgcgacgtcatagctcttctntantgtcacctaaattcaattcactggcgtcgttttacaacgtcgtgactgggaaaaccctggcgttacccaacttaatcgccttgagcacatcnccctttcgcnanctggcgtaatancgaagaggcccgcaccgatcgcccttccaacagttgcgcagcctgaatggcgaatgggacgcgccctgtagcggcgcattaaacgggcgggtgtggtggttacgcgcagcgtnaccgctacacttgccaancgccctaacgcccgtcctttcgctttcatccttccctttctcggcnacgttcgccggggtttccccgtcnanctccnaaancgggggggcccc

SEQ ID NO: 445139 - DNA, 381 bp, Triticum aestivum
ggggtgtgtaaggggctgagaaatcatgtgtggaccccaaagtatcaagatatgtatcaaggccagtgttcctgaaatcagtgccattgtcacttctaaggtgctttatcttggcgccatagttgttcattgctcgattggcgaagcgtctgaagacatcctacacttcagtcttgtagaggattatgtgcactcaagtatatctagaataatcatcaacaataacaaagccatagaggcaagcagtagtagtaagagttgagtaatgagtgggaccgaaaagatccatgtggagcagttcgaagggtcgagtggttgtcatgattgtcttcgagggatgtttggccctcgtcatcttccctgcttcacaggcaccgcata

SEQ ID NO: 445140 - DNA, 274 bp, Triticum aestivum
ggggaccatttcaaattctccgcgcgcctaagataccacttgagaaattactaatggccaacagaaagaatgtcatggccatgttatttctcaccaccattgtggcggtggcggccacaaggccagccgagacctatggcgctgcggaggagaacacattgaagatggctaccccagcaggaaaggggttgacgctaccttagcagctacacgtgttgttgccgccgagaagtccatcaagaaggctgaaagcgccaccacaccagaagaggcc

SEQ ID NO: 445141 - DNA, 481 bp, Triticum aestivum
  unsure (1)..(481): unsure at all n locations
gngnnnnngnaactntacccgtgcngtagccgtcanaaattcangggtcgacggggtgtccaagccaaaaaaaaaaaanaaaaanaaaaaaaaaaagcggccgctctagaggatccaacttacgttacgcgttgcatgcgaacgttcataagctcttctataagtgtcaccctaaatcaaattcactggccgtcgttttaacaacgtcgtnaactggggaaaaccctggcgttaccaacttaatcgcctttgcaagcaacatccccctttcgccaagctggcgtaataacgaagagcccgcaccgatcgcccttcccaacagttgcgcagcctgaatggcgaatgggacgcgcctgtagcggcgcattaagcgcggcgggtgtggtggttacgcgcagcgtgaccgctacactgccagcgccctancgcccgctcctttcggcttcntccccttccttnttcgcaactttcgcggctttcc

SEQ ID NO: 445142 - DNA, 221 bp, Triticum aestivum
gggggctggcagactcacggcgcctgcccaggttgcgctgtgaacactgacaaggggctaatcagacagaatgtcgtggccatgattatttctcaccaccattgttgcggtggcagccacaatgcaagctgagaccgctctgactacggaggagagctcattgaagactgcgaccccatcaggatacgtgttgacgccaccgtagcagctacacgtgttgt

SEQ ID NO: 445143 - DNA, 215 bp, Triticum aestivum
gggtaagacgagcactggttcacgcgagtgtactcttgcgacgtgggtttttgcaacagtccggaacgctgcacagtgagatgttcctttgagttttgtgtgtcttgctggagttatgcattgtgttatctcgaatagctgccgtgctggcatttggatcataatcttaatccgttcgtctgacacaaataaattcaatcacagaataaataaat

SEQ ID NO: 445144 - DNA, 379 bp, Triticum aestivum
gggaacgctaaactccgaaaaggtgcactgccggagtgtgtgtccgaggtaacactggtcttcttcttcttcttccctcacacggtcccagcggcaggagcaagtgccctatcggtggcagctgctgcacctgcttgcaggtacaattggtcctcgcaaatcatcggatctttcttatcggacgggatggtgatgatcatcacaggtcgtggcatcttcagggtagttgtaagcgtagtgtgacgccgccatgaacttgaccaacgctacgcagcgatcgatgtcgttgtagggcaaagcgatcctggaaacatcgtacacgattctcttcgtcctgtagtttagatcgctttcaaaagtcatgggtagcgtaaccttt

SEQ ID NO: 445145 - DNA, 163 bp, Triticum aestivum
aatcttagacgcctctcacttcatggaaccatccacacacctagttcggtctattccctcgcttcatcacggatgctcctcagttcggccgatgcgataatgaataagccgatgtgctttggtgtaactccaacttgtggaggatcataacgctcaaaactta

SEQ ID NO: 445146 - DNA, 274 bp, Triticum aestivum
  unsure (1)..(274): unsure at all n locations
taccggtccgtaccattcncggggtcgacgggtctgcataagcgagattgcaggcagaggattcaccttaaccggctataaggtctgaattagatgccgaggcgcgccttataaatactgttagctgatgcttgtcgaaattacctgtcttgtttcacaattttgtttctgaaaagtttcagtgctgaatgccagcaagacgagcacacaattgcaacagtgcctcaataatttgctcgctcaattgtccattaaaaaaaaaacttgctgatgg

SEQ ID NO: 445147 - DNA, 430 bp, Triticum aestivum
gggggggaagatgggagctctccaatatctgaacttggctgacaataagcttgaagcgaacgacaacaaggggtgggaattcatcacttctttggccaactgcagccaactgcagaaattgatactcagcaacaattcttttggaggacaactaccaggttcaattgtaaacctctcgacaactctccaacagttatacttagatgacactaggatctctgggagtatacccgcagatattggcaatctggttggtctcaacgtggtgttaatagcaaatacttccatatcaggagtgattccggatagcattggtaagctagagaacttgattgagctgggcttgtacaataatacgttgtctggcctcgtaccgtcatctctgggaaaatcttcacaattgaataagttttatgcatacaacaacaac

SEQ ID NO: 445148 - DNA, 426 bp, Triticum aestivum
  unsure (1)..(426): unsure at all n locations
gggccatcattcgctttgaagcatccgccgccgaccatgagagctcctctcttcctcatgttcgcttgggggatcgtaggccacaaagttgggcatctagcttgtgggagagagacgcatccatgacagcttctacaaaggtgggagaagcgaggattctagaggagggatctaatgaagaagagagataggagcagagaccactgcaccttatagcactggtgacggcgatagcttgcaacatcaatggccacaactttgcgagttgtgggggagcaaccgagaggggttcgatgttcgatttggacagtcgcagtcggatcagagagcggcggaaggaaggggagcgagcgagcagaagcaaaagaggcnganggggagatggggttcatggcgccggttaaggctggcctccttcttcgcggg

SEQ ID NO: 445149 - DNA, 390 bp, Triticum aestivum
ggggataggcactcctggcacacacgctcggcaaaatgaggtcgtgtgcgacgggcgagcgatcaaatatggttagacatacaattgtgctaaaaaatacaattatacatgccaaatcgtttctggtcgtaagtacatcccacatactcagtcccggctaaacgtttcttttagtatgtacattccacacagtcagtccaaggaatacgttttcgttagtatgtacatcccttacagttaatccaagaagtacgtttctgttcgtatatacatcccacacagtcactccaaggaaaacgttcgttcgcaagtacatcacacacaattttccccattaaattgtttgtgatagcattgccattgcacatgatattaacaattttatccttt

SEQ ID NO: 445150 - DNA, 360 bp, Triticum aestivum
ggggaggttgacacgctgaatggccggacactgacctggctaaatcctcgcgggcacatcttcaccagggagtcctgcttccacctgtctggggatcccacgaggaaattgaacccgacgcactaccggcatccaacgttttacaccaaggtgtttaacgaatgccactcctatgaccaagatgggaattcctttgagctctccctggtaacatccaagtgcattggaccctatcttacaagcacgaagatccctaactagatattttcgctataggagaacgtcacgtgcacataacacaaatgccttcacacattcctgtacaatgtccactacaagtccactggaatcctaccttat

SEQ ID NO: 445151 - DNA, 474 bp, Triticum aestivum
  unsure (1)..(474): unsure at all n locations
gtgagnnngnaacttacccggccggtaccggtcaagaattcccgggccgctcnagaggacaaagcttacgtacgcgtgcatgcgacgtcatagctcttctatagtgtcacctaaattcattcactggccgtcgttttacaacgtcgtgactgggaaaaccctggcgttacccaacttatcgccttgcagcacatccccctttcgccagctggcgtaatagcgaagaggcccgcaccatcgcccttcccaacagttgcgcagcctgaatggcgaatgggacgcgccctgtagcggccattaagcgcggcgggtgtggtggttacgcgcagcgtgaccgctacacttgccagcgcctangcgcccgctcctttcgctttcttcccttcctttctcgccaaggttcgccggctttcccgtcaagctctaaatcggggggcncccttangggttccaatttagtggcttnacggnncg

SEQ ID NO: 445152 - DNA, 391 bp, Triticum aestivum
ggggggttggcaccggcctcccgtggcccactgttgatgatggcgtccgctgttggaggatgtaggtaggatcccccttagcatcagcttttgtttcctgcgaagaatcatgaatcaccccgtgggggcatgtaaggatctgcaatgcctttgtaccaattttccttgttgtgaaaatttgatgaacgcgcgtcacgctaaggcgcagcctcccctttctttcctcacgatagctttttgctctacgatgacgggtcccgatcccaaggcggctacagccgtcgcgggtatgccaggtcgcgatatcatggtcaaggccaggaggtgcgcggcccgaggtccaataagagaccctgaagcacgatgctcaagagggtccccttagcgccca

SEQ ID NO: 445153 - DNA, 400 bp, Triticum aestivum
ggggctaaccagagagttggtcaggtaaactcagtgggaccgattcgctcatctcagtgagaccgaagtgttacaaaagggaaacagagagtttacattgcaatctcgatgggaccgatcgctcatctcggtaagaccgaaacgttatgaagggaaacagagagattacaatcccatctcggcgagaccgagatccctatcggtgagaccgatttgcctaaggtttgtggcagtggctatgacatttgaaacttggtggcgccggatagaaagaatcggtggggccaagtttgagttttggtttaagtcatatgtgggtgtggaaaggtagttgagggttttggagcatatcactaagcattttgagcaagcaagccattaagcagcaactcatccctcc

SEQ ID NO: 445154 - DNA, 329 bp, Triticum aestivum
gggctaccgtcatgctaagcacatgagatgtaaaacatgataaacatcacatgcaatcaaatagtgacatgatatggccaatatcattttgctcctttgatctccatcttcggggcgctatgatcatcctcgtcaccggcatgacaccatgatgtccatcatcgtgtcttcatgaagttgtcacaccaatgaatacctctacgtacatggctaacgtgtttagcaataaagtatagtaatttacatggcgttattcgatgacacgcaggtcatacacgaattaacacaattcctatggctcctgcctgttgtcatactcatcgacatgc

SEQ ID NO: 445155 - DNA, 420 bp, Triticum aestivum
  unsure (1)..(420): unsure at all n locations
acggggatgagtagagcatcggagacggcttcgtcttgagtcccgtgagccggtccatgtcncatgtcctactctacctcgccggcgaccggagcaatagtttgagggccgcagccggccgctgtacatgggcacggtggagccggacgagcttcacttagattaggtttcatgttgcatgtaataatatgtatttggtgttttgaaattatgtttgtggttgtggaatcattttttataagatgtccgatcaatatccacggacgcaccgcggttgggggccggattttggtgtttgtggttgtacatgctttaagtgtgcatgcaatacttgatatagtggagacatagtcagatatttgtcaggaagtgtcagctgtatatagaaatgcattgcacaaacgaatcctttcccacctt

SEQ ID NO: 445156 - DNA, 477 bp, Triticum aestivum
  unsure (1)..(477): unsure at all n locations
gntgngnnnggnaacttttacgccggccggtaccggtcanaaattcccgggncgacggggcctgcacaagcggtggagcatgtggtttaatccaaaaaaaaaaaaaaaaaaaaaaaaaaaaagcggccgctctagaggatccaagcttacgtacgcgtgcatgcgacgtcatagctctctatagtgtcacctaaattcaattcactggccgtcgttttacaacgtcgtgactgggaaaccctggcgttacccaacttaatcgccttgcagcacatccccctttcgccagctggcgaatagcgaanaggcccgcaccgatcgcccttcccaacagttgcgcagcctgaatggcgatgggacgcgccctgtagcggcgcattaagcgcggcgggtgtggtggttacgcgcagcgtaccgctacacttgccangcgccctancggcccgctcctttcgctttcttccnttccttccggcg

SEQ ID NO: 445157 - DNA, 415 bp, Triticum aestivum
ctagccggaaggtctatcattgtagtatcttgactgagcaatttgaccatcttctccatgaggattttgagtgacttattctagaagttgttccttatggatcccttgtattccgaagcccgacctttacttgatggctatgttgacgcttttaagcatgatcgcggtatctagtacatcaaggagaacattagaagtggagtgctaagtgtctctcggtcgatcatccagatttttttccttggcctcgctaaggtgaaatctgagaaagtgttgtcttcctttgcggctgcatcctccatcgttattcatcattgtagtatctatttgtatcaacattcttggcttagatgttggcaaaccttgatgaatatggagttcctcaagttcttgagagcacacgcatgcactaagt

SEQ ID NO: 445158 - DNA, 376 bp, Triticum aestivum
  unsure (1)..(376): unsure at all n locations
gggcagaatccaaacggaatgaaaccttcgtgagagttatttttggaacaaacgcaatccaggagacttggagtggatgtcaggtgaagctcgcggtggttgtcaaggtgatgggtcgcacggggtcgaggggtcaggtgacccaggtgagagtcaagttccttgatgaccagaaccgtctcatcatgangaacgtcaaggggcccgtccgtgagggcgacatcctcaccctgctcgagtccgagcgggaagccaggaggctgcgctaagaaatttcttcctttatacctgtctgtctttggaagaagaatgatgtactgttgccttcttactctaacgctttcgttctttgcctagctatgtggaagtgtaatga

SEQ ID NO: 445159 - DNA, 385 bp, Triticum aestivum
gggggcaccataccagggactgtgtccgacaaggagtggttgatggctacggagcaaaggttccaagcctggcctcgcgtcacctgcccgccggtcagcatgaacctcatcagccgccagaacttcattgtcaaagacctcaacccctgaggaccaagactcttgaagtttgcggtcggttggaacctttacactgatggcgatgcctgttgctaaatctacctatatgtgctggctgtactctcgaggctattttgtctgtctcaataattaacacaacactattgtgtaaggcgccgtggctatatttcttctgaacaacacaatacaacctgaagcacatttgctttggactttttgtcatcttttgtttgcataaacatat

SEQ ID NO: 445160 - DNA, 273 bp, Triticum aestivum
tcacggtcgaccgcgacggatacctcacatacggcggatactcgagcatggttgtggtgcacgagcgcttcgtggtccagttcccggacgccaagccgcttgacaaaggcgcgcccctgctgtgcaccggcaacaccggtgtacaaccccatcaagtaccacgggcgtaacgccccgggaatgcactcggcgtgctgagcctaggctggctcagtcacatcaccgtcaagttcggcaaggccttcgggattaatgtgacagtgatcagctcat

SEQ ID NO: 445161 - DNA, 316 bp, Triticum aestivum
gtcttccacaagtacttcaggtataatgtgctcgcttcttgcaaacaatgatagatgcactgaggagaacggagccatatctatcagctcatcgcccgatttagaccatcaatccgttcggggtcgacacctatctcaacagcaaatcgacgtcgtatatgggaatgaccttcactcgctcccaagattacgcgctgcgcctaagccggcccatgaacatcagctttagtgcggaatccccgcatataaaactacacatctgattcgatatgatcatcctgtgtccatagattcacccatgatcgttgatgcaaaa

SEQ ID NO: 445162 - DNA, 473 bp, Triticum aestivum
  unsure (1)..(473): unsure at all n locations
gnggnngnaatttacccggccggtacggtcagnaattcncggggctctagaggatccaacttacgtacgcgtgcatgcgacgtcatagctcttctatagtgtcacctaaattcaattcctggccgtcgttttacaacgtcgtgactgggaaaaccctggcgttacccaacttaatcgcttgcagcacatccccctttcgccagctggcgtaatagcgaagaggcccgcaccgatcgccttcccaacagttgcgcagcctgaatggcgaatgggacgcgccctgtagcggcgcattagcgcggcgggtgtggtggttacgcgcagcgtgaccgctacacttgccagcgccctagccccgctcctttcgctttcttcccttcctttctcgccacgttcgccggctttccccgtcagctctaaatcgggggctccctttagggttcgatttagtgctttaagggcacctcgaacca

SEQ ID NO: 445163 - DNA, 477 bp, Triticum aestivum
  unsure (1)..(477): unsure at all n locations
tctacgcgnncggnacngtgtcananaantcncggggccgacggggattgataagnatnnnnatcnttggatctcttacnannannaaannaaaagnggaaaaaaaaaaagcggccgccnagaggatncaagcttacgtacgcgtgcatgcnacgtcatagcncttcnagagtgtcactaagattcaattcactggccgtcgttttacaacgtcgtgactgggaaaaccctggcgtacccaacttaatcgccttgcancacatcccccnttcgccagctggcgtaacaccnaagagcccgcaccgatcgcccttcccaacagttgcgcaccctnaatggctaatgggacgctcctgtagcggcgcnttaatctccgcnggtgatggtngttacnccgcancgtnaccgctacattgccagcgcctnagcnccccgcgcnnttcgcnttcntncccatcnntnnctcgccaaatncng

SEQ ID NO: 445164 - DNA, 373 bp, Triticum aestivum
  unsure (1)..(373): unsure at all n locations
gggttatcaaaaccatccgaagcagttgagtggtgggcagtaccacgtatttaccactagtttatgtaaacgtgaccagaaggttcataagagagctgtcaattctgttgagtcggcgattcctcattatttgaggtggtcagaacagcccatcatatggagcaaagaggatcaccctccacgggtcgataatgcgggtcagttagccttggtggtagcaccccaggttggtggatataaatccactaaggtgctcatggacggcggtagcagcatcaacatcctctactatcaaacttttcagcgtatggggttaactgataaaaatctgaggacatccaacacagttttcaatggagtggtcnctggtaag

SEQ ID NO: 445165 - DNA, 350 bp, Triticum aestivum
agcagtatttaatcgttgatgatggcttatgtgtgtataccctcaaatttacatggcgatatggtttattcccttcccttttatttccgggtctatggttttatattgagtgacgcggtacaaaatcatcatgctatttttatataacttactttactttagtaagatctacgcaccatgtttcactttggccgaaatcgatgtcaacagatgcctctcgaggtctgaatgcgaatgttattctctaattcggattcaaaactcgagagtacatgtatcttatatttacgtgcctcagacatatggcttggcgctggaagtgtatgcatgtcatatcaaaatagccgtct

SEQ ID NO: 445166 - DNA, 286 bp, Triticum aestivum
gggaggattggttgccactaattttggagcggatgtggctgtttcactgtgttttttttttcttttcttttagttggcgttggctgaaggacgacagagtttcgtccgcccacctaaattgcttagcgtacaacgtgaggggtacttttatgtattcacggttagatcccattgagtaggcttatcttgaccctccaaaaaaaaaaaaaaaaaaaaaaaaaaaaaaaaaaaaaaaaaaaaaaaaaaaaaaaaaaaaaaaaaaaaaaaacaaaaaaaaaaaagcaaa

SEQ ID NO: 445167 - DNA, 400 bp, Triticum aestivum
gtaccgtacgaaaattcgccggtcgacggggtccaggattgacaggaagctgctggtctatcccaagatgctgttcgtcagatccaagattggggagggcgcccacggcaaggtctacaagggcaagtatggtgatcagattgtagccataagagttctcaacagtggcggtacccccgaacaaaaagtaacacttgaagatcgtttcatccgagaagtaaatatgatgtgtaaagtgaaacatgataatcttgtcaagttcattggagcctgcaaggaaccattgatggtgattgtgagtgagctgctaccagggatgtctctgaaaaattacttgaacagcatccggcccagccaactagatatgcatactgcattatgctatgcactcaacatagct

SEQ ID NO: 445168 - DNA, 257 bp, Triticum aestivum
atgggctatgcgaatatgcagtccgtcggatcaaatattggtgacggcacccaatgcaaggtctacaacggcaagtatggtgatcacattgtggccaatagagttctcaatagtgttggtaccgtcgaagaattggtaacacttgatgatcgcgtcaaccgagacctagataggatttgtcaagtcatgcatcacaagcttgtcgagttcaatgactcatgcaaagatccatgcatcgtcaatgcaactgatctgct

SEQ ID NO: 445169 - DNA, 412 bp, Triticum aestivum
ttcgccggtcgacgggtgatttcagagaaaaccggagtgccggaggggttaccggaaccccgcggggaagtattgggccttagtgggccttaggggagagagagggcagcatcccaggaggtgccccccaaggggagtctgaattggactaggggaggggggcgcggcccctcttttcctctccctcttcctctctttctttcccccttcccccttcctagtaggactaggaaaggctgaatcctactcctactaggaggaggattcctcctctccttgggcgcaccaagggctgaccggcctccccccttgctcctttatatacaggggcagggggcaccctagataacacaaattgattgttccaagccgtgtgcggtgcccccctccaccatattctacctcgttcata

SEQ ID NO: 445170 - DNA, 218 bp, Triticum aestivum
acagggtccatctacgttattctacacgattactctatagatcaatcactcctaattcactgcgtattaaatcaagtacgtactacggtatttttaactgaagttaaaaggttggttcctgttttaagggtgcagatgtactataacacgtaagtcctactatccaaatgcctcaccatactcttttgaggtggcgcacacgaatcaacggccgcacc

SEQ ID NO: 445171 - DNA, 432 bp, Triticum aestivum
cgggtcgacggggaagccaaaccacctccaaatggcaacccccccattccgaagaccaagctcccaatccggtcccaatgattgcctccaaaaacctccaaaaaacccccggccccccccaatggcgccccccttcttctcaacccccttcaagccctacgtctaccagagccaacagggatctgtgacggcgtttcagatatccggtggggatgtgcaggtcctgcacgtgatggtgaagtcgcaggacaagttgactgcgaaaccaggtacaatgtgttacatgtccgggaacattcagatggacaacaattacttgcctgaaaacgatggaaggcgtgtggcagtggatattttggaaaaagcataaccagcactgttttcttcaatcctggccctgatgatggatatgtggggatttctgcgccattt

SEQ ID NO: 445172 - DNA, 289 bp, Triticum aestivum
gggttcctccaggacaagagaagcaaggcaagacaagaggcaacagaaatcaagatcggcgtatcagagaaggcaatgtagcagtagtagtattattcagtgtcagcatcccctttaacgggagcgttttatttgaggagtagatgaagtgatcgagtatgtgtcacacaggtcggcatttatgtcgggaataatcatcaatcgaacaagctgatgtatcggatttgagctgttttgttctgattcagatgcttcactgatgggaagcaacccaattttaatttgagaa

SEQ ID NO: 445173 - DNA, 413 bp, Triticum aestivum
attcgccggtcgacggggacagtgacggcgacgacgacgagacggactctatgtgatgcagaggacgtcggcgtgaggtggaggtcggcgcgatgccgctggtggccggttgcggtgtgatgccgcaagatgatgatggtgtggtggtcggcgtcgcgaggatgtcatccatgacaagatggtccatggtgaccggcgctgcgccggtgtcggctgtggcacaacggactccatgcgagatggagcccgactgtgcaagaagaaagatggtggccatgcagtgccactatgtgaagatggcggtgtgaagctgccacaagaagagtcggtgcgatgccgacgatggtggtgtgatgccatcgtcatcatggaaagttggtgtgaagccaacaaaagctgcggtgcgatgccac

SEQ ID NO: 445174 - DNA, 233 bp, Triticum aestivum
acagtctctgcaaagcgctttgctgatcttgaggagaagatcattgcactccttgcaaagcaagcagaaatgccggcggataaggaggagctgctgaaggctgcaaccagccgtgtcgctgcattggaagaggaacttgcacggaccaacaaggctttgcaggaaactcttgagcggcaacaggagatcatggaatacattggaaaaaaaaaaataactaaaaaaaacaaaaa

SEQ ID NO: 445175 - DNA, 400 bp, Triticum aestivum
gacgggtctgcaaaatttagatccgtatgtattttgcaaatctctatgtctccctccttgacttgatcgcggatggaattgaagcgtctcttgatgtgtttggttctcttgtgaaatctggattccttcgccaaggctattgctccattattgtcacaaaagattttgattggacccgatgcactaggtattacgcctagatcggatatgaactccttcatttgcttcttccgaagcagctatgtactccgcttcacacgtagatcccgccacgacgctctgcttggaactgcaccaactgacagctccaccattcaatataaatatgtatccggtttgtgacttacagtcatccgaatcggtgtcaaagcttgcatcgacgtaaccatttacgacaaga

SEQ ID NO: 445176 - DNA, 389 bp, Triticum aestivum
actggatatattaacgggcgagccgttacggtgccccggtggccatcaacgcgcactatcacggattgctacctccttcagtgtcatgcagtggtaaaataccatatgctggggatgtacgttggcagagtctacacgtgcttaaggtgctaccgcctctgagcagactatgtcacgatgatccgtttctcaaacaccatgcagtgcgagaacatcaactgacgaggtcgagtcttgtcaggaatagtgctcatacctctgcagcgtgtatacactaatcatggttaccccagtcctcggttatggacatattgagtatctaatacctggattatcaagttaatcacaacatgttactctaagaataattttggtgggttctgtttaat

SEQ ID NO: 445177 - DNA, 420 bp, Triticum aestivum
gggatcgcttagcaagtgggccaaacatatgatgaatataatacctaaaatgcacaactttgatgtgccacacatgcctcaaacaccgtaaacccatgtactcacatagagcaaggttacatatgatggtccccttccccctcctcgacgcatactatatgctcctaccataatacaacccaaaaagaatcttcatcgatggtgaaattaattaacctctcctgatgtaggtcaaagtgatgcacatgcatcaacgatggcctcttgggcccacagatggaagtgtcacacgtgaatgtcctagctaggataaccaccgcctgcatgcaagtggcgcaaagaggtgttgtgtgatgtttgaatagccattttcacaattttgatgtggcacgtgcctcggaaaccgaaaagtcccgacac

SEQ ID NO: 445178 - DNA, 363 bp, Triticum aestivum
gataatgcaccactcaggtggagccatcaccaccccaagactcacacgcttccaaagatcatattgaacgctctcaacctcgtgcacaagaccagggtgcacgatcaatcgcaagattgtggtgaacctccaaatgatgcccacagtcattttctcacccacgagaatcttagatataagatgcaagctcaagatcagtatgaagctcaagatggcgcccattattttcagattaaccctcgtccgtccacataccaagacgacttgtcgcgtctaaccacaaagattgctttcaaactcaaaacgaaggtcgattcagtctaaatcgaagtggtagcctaagactcggggtaagtactcgta

SEQ ID NO: 445179 - DNA, 401 bp, Triticum aestivum
ggggatgtggatttatgttttaattagtgtttgttccaagtagaacctttgggaagacttgggtgaagtctatgcgatcttgctgtaaaaagcagaaagttttgcgctcacgagattagctaccatattttactggagagtgattttaggttgatcctttttgcatatgatttatagacaaattacccaggtccaacaatttgtttcagaatttttggagttacagaaatattctaatgatacagattactacagactgttcagtttttgacagattctgttttctatgtgttgtttgcttattttgatgaatctatgagtaatatcagagggtatgaaacatagattagttggaatacagtagatatgacaccaatattaattttaaatgagttcatgac

SEQ ID NO: 445180 - DNA, 409 bp, Triticum aestivum
gacgggacaatgcaccactcatctggagccatcaccaccccaagacccacacgcttccgaagaacaaagtgaaggctctcaacctcgtgaacaagaccaggggcaagatcaatctcaagatggtggtgaacctccaaatgatgcccaaggtcaagttctccccctcgagcaagttcaagaccatgagcaagctcaagatcaagaacaagctcaagacggcgctcaagataatcaagttaaccctcctccttccacatccgaagaggaattagagcgtcgtgccgcgaagattgcttccaagctcaccaccaaaggccatctcatggagaatgtggttggaagcctaagaaagggggtaatcactcgtagacaattaacaaactattgtgaacatcacgcctttgtcccc

SEQ ID NO: 445181 - DNA, 388 bp, Triticum aestivum
gggtcggccgggatgtcctgtgacggataggtctcgttgtaggccagcccttcgatctccagaaggcaagcctagtgtcctcctctcaaccttcaatgctgaccctagcagcaaccatgattgatcctttgtacgctaaactgaagaaacctcctcacgagtttcatcatgcatgggagtcgaagatattagatgaacatcacatcctgtatgcagcaacggatgcctacctttgtttaaatatctacaagggttggatgaagaagcggagcccggtgtctagttcaagcaaagaagtgtcggcgaagaggaagaggaagagggattaggtcgaagtcgaggacgtggactcggactccgaataggtggtaattccgtcgctcatgct

SEQ ID NO: 445182 - DNA, 377 bp, Triticum aestivum
gggggtagaaatgattgataaggagccaaacaggagcttcgtagttgagaagggtcgtggcactcctttaaaggatataccaagtgtggcacagaggttaacgaggaagaaacctgctgatcgtaaatttcttcacaatgttctttttgggaggaaaggcaagactgtcgattttaaaggccatatacttcagttctctggatttgtgtggcatgagagcgatgaaaagcagagagccaaggcaaaggagaagcttgacaagtgtatgaaagacatgctggtggatctctgttggcttcgtgctattccggttcccaaaacaaacatcagaaaggaagatatcgtggcaaagctgttggacttcattgctgaacctc

SEQ ID NO: 445183 - DNA, 343 bp, Triticum aestivum
ttcgccgtcgacgggggcaacaagtgggtcactgtgggtgtcatgctgcgcttcttcctcgtgtgcacgatcatgtgctgggctgtgctggtgaggagggcgtccaagaccactctctgatccttccttctttcccttgtttttgtttgtcagcttcattggattggatcatatatacaagccgcgttatttgtttgcttttgtcctgtagtttgctctttgtttagatgtgttgagtaacaagtgcaatgcaagtttgcactcgtgtgtaaaatgcttgatttgggttcatgaatagaaaatttcaacctgtcaatacagttcactcaacatatatgaaatc

SEQ ID NO: 445184 - DNA, 402 bp, Triticum aestivum
cgggtcgacgcctacctgcattacatcctcggcgacgagtacgagccggagcacgtccgggagcaagaacttcatcggcccgttcaagcaccaatggccatccgcaaccatatccgcatcacagtcctttggagcacaattgacatatttgcagcggacgtgtgatgagcagttttccatccaccgtgcaaaagacccagagctgctcggcggcatgatcgatgacccacctgaagagccgccatcacagtgctcatcgagagcctgatgccccgcaatgaatgggcagaggacctccgcgattcagtcaagacaaaggcagcctgcggcttcatcattgcccgcaacggccatttcaacctcgattccgatgatgtggtggccaagattgagcgcatcctt

SEQ ID NO: 445185 - DNA, 53 bp, Triticum aestivum
  unsure (1)..(53): unsure at all n locations
angttnnatgagtnatntnccatttttcgtacaaaacatccatttttcngtgc

SEQ ID NO: 445186 - DNA, 406 bp, Triticum aestivum
  unsure (1)..(406): unsure at all n locations
cgggtcgaccggggtttaggtgggctgcaggtgggctgagaagaggagttgggccgagaggagagaagagaagagaagcccggcggtagtttcggagaccgaaacgtccgacaattaaaccggcaacagtgccgctatgttaaacggttgggctatcaaacgaactccgaatgcgacgaaacttggcaggcggtctgtctacactataataagaccacacgacaagttgcaacccattccgagaacatttttatgccactaataaaataatattacggaggtgccgcgggcgcgtgcgagtgtagtcgggctcagaacggacaacggagagaaccggcggaacacgaacggatgcaagttttgaaaaacatgcagatganatacagatgaagtgcagatgatgaca

SEQ ID NO: 445187 - DNA, 381 bp, Triticum aestivum
ggggactctcagaagtttgcaagagcccataaatcatcgacttggaacatgcttgtctgatgccattccaactccggcattttcaaagtccaaactgtgactgtgaaaccagatttcttcatgcttccaaaaaagccattatcgatgtcaacaaagttaacaatacctttgcatacaccaacagttctatatgcctcagggtatacacgaccataagagagatcatcgagctcagtccaaatttctatccctggaagctggatgaaacggagctctagattttcaccagcagaaagcacgttgcaggacaataagccgcggtggtaatccacccagtatattgtaccatctggataggagaatacctgatctgtctcccat

SEQ ID NO: 445188 - DNA, 357 bp, Triticum aestivum
gggaaggtggggaagctgatgctggcgctgtccgatctgctctgggaggacatgaagtccgggccggacagggtcgccgttccatacaagtgatccaggggaggggaacgctagagagatggcgtgtgcatgcgcaagcacgggcacgttcgtgcgtgtacaagatagtgtgtgagccgagccgcaatttgttgcccgtactgtttgtcacttgacttgtcaagccctgtataactgtggtatgtgtgtgccggatggatgactcaccatataaataatactacgatcttgggtcaaaaaagaaaaaacaataagaaaaattttgaagaaaaataacaatacaactgttatcaaaaa

SEQ ID NO: 445189 - DNA, 283 bp, Triticum aestivum
acgatgctaactataacgacacgtccgtcatctccctccaccccgacaccatattagaggctccagctcttcctcggcgagaccttccttctcaacggtaacacgacgaatgactccatctgcattgttcttgctgattacatctgtgatgagcctaaagtcataattatgagatctgtcaagagttaactttagattgaaagatgtgtcatgtggtgtctgttcatcactacgcctagtttcaatacattacacgagtgtatatacttacttttaacaatac

SEQ ID NO: 445190 - DNA, 73 bp, Triticum aestivum
acatggtctgccaccacgacaccctggataggctccagatcttacgcggttaaaccgtcactctcaacgttac

SEQ ID NO: 445191 - DNA, 157 bp, Triticum aestivum
acttcaatcgcagccccttctccagctctgttcttatgcggcaataacttcgctggacgaggataattccttcatcatcaccgactttctgttaatggttttgttcggactcgttaactacggcattacagtgcataccggctcccggtgatacatg

SEQ ID NO: 445192 - DNA, 495 bp, Triticum aestivum
  unsure (1)..(495): unsure at all n locations
gtggnngcagcgtctnctaggtcggcacgtgtcataaatacccggggtccgaccagctcctaatcggcggccgctctagaggatnnaagcttacgtacgcgtgcatgcgacgtcatagtcttctatagtgtcacctaaattcaattcactggccgtcgttttacaacgtcgtgactggaaaaccctggcgttaccnaacttaatcgccttgcngcacatcnncctttcgccagctgcgtaatatcgaanaggcncgcancgatcgcccttcccancagttgcgcagccngaatgggaatgggacncgccntgtancggcgcattangcgcggcgggtgtggtggttacacgcagntnaccgctagacntgncagtgcccgtatngnnngctcctnnggcattncaccatccggtcttgcgangtnncnngncttcactgtcnaaggctnncattgtggggcttccanantggtnccagggtagtnnntttngggg

SEQ ID NO: 445193 - DNA, 394 bp, Triticum aestivum
gggaggcaattaatgtaatatcttgtgagggaatggagaggatggagaggccagagacctacaagcagtggcaggtgcggaatcagagagctgggttcaagcagctcccgctggaccaggaaatcatgaagcgtgcacgggagaaagtgaagtgctaccacaagaatttcatcatcgacgaggacaacgggtggttactacaaggatggaaggggcgtatcctgtacgcgctctcaacatggaaggcgaacccccaattctagcttctgtaaatggtgacctgttcatatttttggactctagagctgattggtcctggccaacaacccattagtagatgatgaacctgattactctcctgtagcatctgcctgttgtatgtgctgcccatgca

SEQ ID NO: 445194 - DNA, 409 bp, Triticum aestivum
ggggagagacaaggctgcatccactgtcgtttacttggcttatcaaactacagagttgagagaacatatgaaagaggcgcgtggcccagcggaaccccacaatgtactccccattggcttcggcttccgtccaaggcgccatgtgaagcgaggccccatcccgggctctgttcttgtcaggcactatcttcgtaagaggaggatgcttgcttcttcgatatcaagtcactgtgaagggtcaagttctgaatcgttaattaaggcaaaagaatggatggtggatcttgttgattcatgtttggaagctggtaagcggcatcaagggtatccacttcaatatgtttgtactccaatggtacacaaaggtgctcctgttgatccattctcgcggagtaatcttggtacattc

SEQ ID NO: 445195 - DNA, 490 bp, Triticum aestivum
  unsure (1)..(490): unsure at all n locations
gngngngcattttcnagnncgnnccgtgtcatacataaattggccggtccgacggtggaagncaangctgcatccgcntttcgtgttngttngnatannttgtcgtatcgttaccngatganngttnacnagctaatgctcttgttcgaaaaanaatgtaaacaccantggaataancggccgcnctagaggatnnaagcttangtacncntgcatgcgacgtcatanctcttctaantgtcaccnaaattcaattcactggccgtcgttttacaacgtcntgactgggaaaacctggcgttacccaacttaatcgccttgcaacacatccccctttngccanctggcgtaatacgaagaggcccgcancgatngcccttcccaacagttgcgcagcctgaatggcgaatgggaccgncctgttaacggcgcattaaaccccggcgggttttggtggtnnccccaacnttgncggtnanattggcnaatg

SEQ ID NO: 445196 - DNA, 422 bp, Triticum aestivum
gggcattgcaataccgtttacgctcatttttatcgcttgttaccttgctgtttttatattttcagattacaaaaacctatatctaccatccatattgcacttgtatcaccatctcttcgccgaactagtgcacctatacaatttaccattgtattgggtgtgttggggacacaagagactctttgctatttggttgcagggttgtttgaaagagaccatctttatcctacgcctcccacagattgataaaccttaggtcatccacttgagggaaatttgctaccgtcctacaaacctctacacttggaagcccaacaacgtctacaagaagaagtttacgtagtagacatcacaccaccggatcgttgaagctctgccgaggttgcaatgaaacgttgtcgccgatggacttcgcctggggg

SEQ ID NO: 445197 - DNA, 384 bp, Triticum aestivum
gacgggagaagtaagacttcagacgccgccgcaaggcttgcacaccacaagatccaagatgtcaatatgactgtactccagtttcaacacgtcacatcacattgtcattgccagggctttccaaaaagccacattagtttgataggccaaatgcagacaaaatacattttgatatacatgtgcacaggctcatgtacatccaggagttagtagagtgcttcggacaacttacagcctgctcactcacctagattaccctcaaggcgatcatgacgctggtcgatgcacttgagctgttgcaggccaccaaaagggcaaccgatggcgtcaacggagtcggcaatctattggataaagtcctaaatgcgatttaatgcgacgtca

SEQ ID NO: 445198 - DNA, 120 bp, Triticum aestivum
ggtcgagatatccgggtcgacgcggaggttcacgggagagaagcgacggagttagaagttgtaaatatgcattgtcgtatcgcgacctgaatgaaataaacgaaataatgctcttgttcg

SEQ ID NO: 445199 - DNA, 414 bp, Triticum aestivum
  unsure (1)..(414): unsure at all n locations
gggaacatctactcccactgaaagcgcatcgccggaaattctgaaataaatccaggcataatgcgagcgccaggatttgaatcctggtgggttggggataccactgtccacctaaccaactcaaccacaggttgattcgccaaaactttttcttttgcggggtatagcttcatagcttaggttccgtatattggattgcgtgtcgcacgtggcgtacgtatggtacggacgtatttaaccaggatctaatcgacctttactttccctataaaaaatggcctttactgtaagggaaggagaacatacaccatgcatcaggcatgaacattgcaaagcaaaacgttcaagtgccatgcgcgcagaagctttgttctanggcatgacatatcacgcctatttcctcttctccgcatg

SEQ ID NO: 445200 - DNA, 112 bp, Triticum aestivum
aagcgaccgagttagaagttgtcaatatgcattgtcgtatcgcgacctgaatgaaatagacgaaataatgctcatgttcgaaagaatgtgtgagagtagactttacgcaaaa

SEQ ID NO: 445201 - DNA, 360 bp, Triticum aestivum
ggtgattatccatagactatacgggcacaatagatgtacatctacatcatccagggaacacaggggcacatcgtatcttaaagggtacggtggttaagatgagttcatacgtacgaattcggttgatgtaatctctcagcaatctgctgaaaagcattcaagtacgcaacattttatatagagattgctatttgactgttccgcttagtcacagtgtgctctgtaaatacattagctcatcagacactgtttaccgtctacacatagcgaacatcagattctaatctcaagtaatgagtgcgttgtttacttacgctcgcagcttcatatcctcgaactgattcaaacgccgaatttgct

SEQ ID NO: 445202 - DNA, 390 bp, Triticum aestivum
gggagctagcagtggcgctagggtggtggtggcggagaggtgtcaccgtcggggggatctcgggtctcctggagtgaacaacgaacaaatagtcgtgttctggactgaattaggacttccaaggctgttttttccctgcagaacaaggaacagaagttaacatctgacgattttatattggctttgccaagtgaacaatcaatcaggcgacagactctacaaatattccgtgggttcatcaggcaaagttcagaaatttcagagaaacgacttcagattcagactcagagttgaatgtaggctggagattcaggatcatagccagatagcctccacagcaatcaatcccggcatcgcaagcttcggcaaagatagtatggcatttcagac

SEQ ID NO: 445203 - DNA, 322 bp, Triticum aestivum
agacgggacatcctccgcctctagtcatgtgagtatcactatttcctgagctgctcgagtgagattttacattctgttcgtggatttatatcgtagtctgttcttcatacctagaatccacgagaataccaatcaaaagatgttacggttagttcatcccatccgaatcaatctgagccttgcataaacttttctgtaatagccttgttgatcttgcggttgcatctacgtgttcaattgctggtcataacgtctagtcctctaaaattgctacttctgttcacatcttgtcacaccgtaactgcaccaacatcatctcacc

SEQ ID NO: 445204 - DNA, 391 bp, Triticum aestivum
gggagtgtccgacgtacaaccggacacattgatgggtcttctagagcaagcggctatctcagaggcacatcgtaccttaatgggtacggtggttgagaggatttcatccgcaaaaagcgggttgaatgaagcttttacgagcctgctaagaggctttgaggtacgcaaagtaatatatatatatatatatttgactgtaccgcatacgcaaggtgtgctctgtatagatagtatcccctgagactctggttgccgtccaaacatggcgaacaaaggatcatagtctcacgtaatgataccgttgttttcgtgcgcaggcagctgcaaatccggcgactgaccgaactgccgaatttgctgaattgaggcggcaacttgacatggcggacgc

SEQ ID NO: 445205 - DNA, 298 bp, Triticum aestivum
gggtctagtgattcacttatatcttttagagcacggtggtgtcttaattttgaagaaatttctagtctctcatgcttcacttatatcattttgagagtcgtttagaccagcatggtctgtgctatgatcataaagttggtcctggaatgacgagcatccgagttgggtctgggaaaaacttgcagttgaagtgctgtggcacctaggatcagtttgatctttcgacaattgtcgtgagtaagagaagtgctgccatgaatgtcctgccaattggttgcacagcctgaatggcaaaggg

SEQ ID NO: 445206 - DNA, 405 bp, Triticum aestivum
ggggcatgtcagacgtttatttcaactagataatacaccgcacgttgttgcgggaattggttgctatatacgtagagatgatacttttggttcaaattattttagtgggcattttttgtatgaaacattagtatttagactaacaatatgtgaattgaaactaacatatagtattatattcgcttattctgtagtatgcatggtgcattttaatgtgggtcttttctcatgaatgcatagtggcacgatgtggcatatttgcatgttaagagaattaaagatagtggggatcaattacttaggtcatgcttggtggcatgatgagctgacatagttgcatgttgagggaattagagttagtgaggatcaactatttaggtttataaaatgggtgtttcctgaaaa

SEQ ID NO: 445207 - DNA, 327 bp, Triticum aestivum
ggtcgacgggaaaaagtagtgctagggtttgagcgagatggcgaggtggaagaggagataatgaccaggtggggagaggtatttataaggagcgcggtgtagtgtaattacgcaggtgcccctagcggttcacatctggatgacatgtggaaagcatgcaacttactgaaaattgagccaatttccccccggccccctgtttggttggaaggtctttccggcttcatcggttttcaggaaaaagggataataccattaaaattggttttaatggtgtacccctaaatcttcacctaacagggacccattaaaaactttcaactggtt

SEQ ID NO: 445208 - DNA, 380 bp, Triticum aestivum
gggagatgcgccatgctttcaggaatggagggagtaagtttcattactgttgaattggattgtatcgagtgaaattcagagatccatgccaaaagtaaggaacctatgagaaagaagtcatccaaaggtttaccagtcagcaccatggatgttgggctagccagcctgggtttgatcatcagctctatcttaatttgattgatacctaggtcctccaacgcatcactctttttttcattgtaaacgtatgagtgatgaataatagtgcctatttgttcatcgcttactatgcctgtgttaaataagtggcgggttggctactgcattttatgattattgtagttatccacatgaaagtgtctgtgcttttaattataatt

SEQ ID NO: 445209 - DNA, 133 bp, Triticum aestivum
ggaaaatagacggtgggttgacagtaagaggtcacgggcaacatcaaattcggttgaccggagaggtgattttgtttgtaaccattgcgatggatttcatgcgaaaaaaagaaaaaaatgaaaaataataaaa

SEQ ID NO: 445210 - DNA, 489 bp, Triticum aestivum
  unsure (1)..(489): unsure at all n locations
gtgnnngnactttattgggcgccacggtcaaaancccgggtcgacgggtacggctncgagaagacgacagaagtcgacgggaaaaaatgaaaatggcgatggnncagaanaagcggccctctagaggatccaagcttacgttcgcgtgcatgcnacgtcnnngctcttctatagtgtncctaaattcanttcactggccgtcgttttacancgtcgtgactgggaaaaccctggcgtactcaacttaatcgccttgcagcacatccccctttcgccagctggcgtaatagcgaanggccngcaccgatcgcccttcacaacagttgcncagcctgaatggcgaatgggacgcgcctgtaatgcgcattaagcncngcnggtgtggtggttanncgcaacgtgaccgctacactgctagcgccctagcncncgctcctttcgctttcatcccctgcattctaggaangttcccggctttccccggttaaa

SEQ ID NO: 445211 - DNA, 297 bp, Triticum aestivum
aattcgccagtcgacggggataccgaactggacgtgaagacggacattgcttgtttatttgctgaatttggttcacttttggataagccatacatcagggaatcattcagcatgaataccattgataagggcgggagtttacctggcaccgcacagttgccgtgtcaggcggcgctccatgggcgcgcctcaaccgctagtattacaccacatgtggttgcatgttctctttcacacacattatgtggtaccagagcacaaaaactcaaaggtaacactatggaacaaacaactcaa

SEQ ID NO: 445212 - DNA, 421 bp, Triticum aestivum
gtacgatccagaattcgccggtcgacggggatggacatagagcttatcacacccgatcatcacttggtgtctgggcacgacgaactttggcaacggtgcatactcggggagaacaattttatcttgaaatttagtgagagatcatcttataatgctaccgtcaatcaaaagcaaaataagatgcacgtacgctactgtgaggtgttgtccttctcttcccgccctcctctttggtgtcctgcttaattcccctacacgtatgctactctaccccaacacgttggacgacaagggcatctccaccatatgatccatccatcctccgtgcatgttgcctgcgccatgcatgcgttgagctacgacgaactacccttctctacgtacccttctgtatgtgtatgtgtgtaacagtatggttgtg

SEQ ID NO: 445213 - DNA, 330 bp, Triticum aestivum
tgtctggcaggatattgacatgtgttgtgcgcggtgggcatattttcatcagggtgtcgtgtctcggagaatctggggatcctgaaatgaaattggagatgaggcgctaccgggagcctcggttctacaccaaggtgtatacaggttgccaatcgtaaggtcatgatgggaactcctttgagctttctctggtatcttccagatgcattggagcttatgtgaattgcatgacgagccattgccacatatgttggctgtgggacaaggttatatgcacagtagatacaggctttcatgagattcctgaacattgtgcattacagatccact

SEQ ID NO: 445214 - DNA, 232 bp, Triticum aestivum
attcgccgtcgacgggcaatgatactcctgacctggcagtccttcaccaatgccatcgtagcacaatccaatgccttgtcccgccacccgtctcccctccttgttactctccgggccacctatgtgcacccagattttccttttctttctagcttcccggggtcttttgtgtctcccccggtggcggcttggccgtcgcacctcgacgacattagccactgtgggatgaatc

SEQ ID NO: 445215 - DNA, 466 bp, Triticum aestivum
  unsure (1)..(466): unsure at all n locations
ggngngcatttctaggncggacggtaccgaacagnaattcncgggncgacgagctcactatcggcggccgctctagaggatccaagcttacgtacgcgtgcatgcgacgtcatagctctctatagtgtcacctaaattcaattcactggccgtcgttttacaacgtcgtgactgggaaaccctggcgttacccaacttaatcgccttgcagcacatccccctttcgccagctggcgaatagcgaagaggcccgcaccgatcgcccttcccaacagttgcgcagcctgaatggcgatgggacgcgccctgtagcggcgcattaagcgcggcgggtgtggtggttacgcgcagcgtaccgctacacttgccaagcgccctagcgcccgctcctttcgctttcttcccttcctttccgccaagttcgccgggttttcccgtnnagctccaaaaccgggggtccctttag

SEQ ID NO: 445216 - DNA, 483 bp, Triticum aestivum
  unsure (1)..(483): unsure at all n locations
gnnngnagnttttctgccggcnggnccaanaaccgggtcgaccggaaaaaaaaaacaaaaaaaaaaaaaaagcggccgctctagaggatccaagcttacgtacgcgtgcatgcgacgtatagctcttctatagtgtcacctaaattcaattcactggccgtcgttttacaacgtcgtactgggaaaaccctggcgttacccaacttaatcgccttgcagcacatccccctttcgccgctggcgtaatagcgaagaggcccgcaccgatcgcccttcccaacagttgcgcagcctgatggcgaatgggacgcgccctgtagcggcgcattaagcgcggcgggtgtggtggttacggcagcgtgaccgctacacttgccagcgccctagcgcccgctcctttcgctttcttccctcctttctcgccacgttcgccgggttttccccgtcaagctctaaatcngggggcncccttagggttccaat

SEQ ID NO: 445217 - DNA, 504 bp, Triticum aestivum
  unsure (1)..(504): unsure at all n locations
gggngcagcttcatgtgtnttggaccggtcattantaccgtggccggccggttctttaacaaatttttcactcangaanangtgtcnctgtttattgtttgntccgtccangcttctcgtgcgatcgaatngcntncnctgtggngccanaatncagtggggtgtgtggacnctctttgtgtcaacggaatgacctgttgatgatgtgggcgtattttctgantnnttaacttntccttttgcactatcatcnattcnctctatgatgnagtgacagtacgagngntgntgntgcncntacattnttcgccacagtgcgttcnnatgtaatggtcnagatgcgntatggganntgcnctatnatgctnnatgttgcctttntnnaatgtanggtggnngctttgntnnatggnncncagnnganttnagcccgnttcacntccngntaggcctgaaaagggtnttaatntncnngnttngtttttgtaantnnnnannnggcgt

SEQ ID NO: 445218 - DNA, 85 bp, Triticum aestivum
ccggggccgaccggctctgtcatatctatgatagttgtggctatcgatggcatgtgcaaaaggaggtacaaaaggcaaatcctga

SEQ ID NO: 445219 - DNA, 479 bp, Triticum aestivum
  unsure (1)..(479): unsure at all n locations
gnnnnngnatttttagccgncggtaccgntcanaaattcccgggcnctttcttcccttctttctcgccacgttcgccggctttccccgtcaagctctaaatcgggggctccctttaggttccgatttagtgctttacggcacctcgaccccaaaaaacttgattagggtgatggttccgtagtgggccatcgccctgatagacggtttttcgccctttgacgttggagtccacgttttaatagtggactcttgttccaaactggaacaacactcaaccctatctcggtctattctttgatttataagggattttgccgatttcggcctattggttaaaaaatgagctgatttaaaaaaatttaacgcgaaattttaacaaaatattaacgcttacaatttaggtggcacttttggggaaatgtgcgcggaanccctatttgtttaattttccaaatanattcaaataggtaacncccaa

SEQ ID NO: 445220 - DNA, 486 bp, Triticum aestivum
  unsure (1)..(486): unsure at all n locations
tggnngnagtttttctgncggaccggnaaananaanatggcgggtcgacgagctcactatcggcggccgctctagaggatccaagcttacgtacgcgtgcatgcgacgtcatagctctctatagtgtcacctaaattcaattcactggccgtcgttttacaacgtcgtgactgggaaaccctggcgttacccaacttaatcgccttgcagcacatccccctttcgccagctggcgtatagcgaagaggcccgcaccgatcgcccttcccaacagttgcgcagcctgaatggcgaagggacgcgccctgtagcggcgcattaagcgcggcgggtgtggtggttacgcgcagcgtgccgctacacttgccagcgccctagcgcccgctcctttcgctttcttcccttcctttctcccacgttcgccggctttccccgtcaagctctaaatcgggggctccctttaagggtcccattaanggcttacgg

SEQ ID NO: 445221 - DNA, 362 bp, Triticum aestivum
gggtctgttcaacaccattgttccgataacaacgtgctcccgttggtgttggcaggcttcttactttaacaattccctataatcggaaaaacaggatcatcatgcaacacatgagttagtcttaaaggtgagatcaggaacctattttgtgtttatcattccacacatgcaatatgggtttccctctgaatctcattgatatctcactaatatgtagactaaagaaccattgcaattgtaggacagaaaataaatattaatcacaacatggaaataaataataacatttaccattgctgttagggcatatttaaaatataataaatcaacaatgttgatgagatgggagagcttaaatacag

SEQ ID NO: 445222 - DNA, 332 bp, Triticum aestivum
  unsure (1)..(332): unsure at all n locations
gggtcgacgggggtggtcactatggtgcacggaatcggggcggtggcccctcttattcgacaacggtggactccatggttgtgtgggagattcgaagtctggatctcgaggtggtgatggcctttctgaggtangccgcggtatgggacatcccatccatcgatatatcaggttcaatgcggctcaataggtgacacatgcgtctctttcggagtcgtcaggcacttcctgtcgccgacaggtgaagcctcaggcggatgctacgcacgacgtctcatgcggaggcatcaagtcatgcctgctnacagcgcgtgctgcatggtgtttgtgat

SEQ ID NO: 445223 - DNA, 408 bp, Triticum aestivum
gacattcttgatcatcgtgattcttacaaactcttatatgttctcttctccgaggtgacaatttgtttcacacgccgctcgaggcagcacatttctagaaactatatagatatatatttgattttgatttctacagaaattttcttgtaaattagactgagataaaatcatttgtttgcatttcgtcgagaatatagttttctccttttcccattttttatttttaaggcagactctcggccgacgacgtctcctagtctgcatcgatgattttttggctagtacttctacaaatcctatgtttcaaaaagtttgctttgccaagaggaagtcacggatacgacattgagctatgctcatgacgtgttgccgctggatgtaagacgaacaatacttcgacaccgccca

SEQ ID NO: 445224 - DNA, 326 bp, Triticum aestivum
gctgcagatagacgacataagtccactgggagcaactagattcacgatatcttcgatgccaccgattccgacaataagctcaacctgcacgacgaggatgaggctgaagacgtgtcctagggcccccacttggggtttgtcaatccctacagcaagatgatgattcctgctctcacataaagtcctatcgcgatccctccctttgctctggttgctgcgaatatcagcctggccgggagcatcatccgcagcatgagggtcactcatgacattctccacttctgttccggccatgttgtgacagcggacatccacgttattgacgt

SEQ ID NO: 445225 - DNA, 396 bp, Triticum aestivum
ggggcgactcatgacaagctcgagtggctgctcgctctcgcctccatgaggaaggaggcaggagcgctggataatcaaatttgatgcggcgctgcatgattttaccagcatcaattgtttttcagttccagaacgctgttgacttaaacatggtttccctcttttgcgaatgagtatgagcatgatttctaagtggccgtaacatcgctagcctagatatccctgctctggatttgtatgaataccccagtgtcagtgtggttgtaatttgggggtttgtagctggtcggttattctgtctgttggtatattggaattagactttaaacctgtgatgatactgaagaactgcaacgatgtgtggaagtcatgttgttcgattgttcattaaatata

SEQ ID NO: 445226 - DNA, 385 bp, Triticum aestivum
ggggcttccgtgcgatgccaaacatgctgatgttccgtcctgctgatggcaaggagactgccggggcatacaaggtggctgtcctcaacaggaagaggccatctattctggctctctccaggcaaaagcttcctcatctgcctggtacctcaattgagggcgttgcgaagggtggatacactatctctgacaactcgaccgacaacaagcctgacttcatcataatgagcactggttctgaggtagagattgctgtgaaggctgccgaagagttgacgaaggaggggaagactgtccgcgttgtgtcatttgtctgctgggagcttttcgacgagcagtcagatgaatacaaggagagcgtgctccctgaggctgtcaccgcaag

SEQ ID NO: 445227 - DNA, 335 bp, Triticum aestivum
gggcggctggaggctgcggcggacggcgagggagttgcgtatgagtttgggctctcaattggagcggaggaaggcggccggcgagggagctgcgggcggatgccggagctgcagcagtggggtggagcctggcggaggggaggagcgatggaggaagacgaagatccccggcgacaagaatttcaaattgagggtagtttggtactttttcctgttttcacctggtcggagaagttccccaacgacaactattttggaacagagggagtatatgtttctatagagtacttcgtttttgtactatacgcttgacaaaatgatttccttataagctg

SEQ ID NO: 445228 - DNA, 57 bp, Triticum aestivum
  unsure (1)..(57): unsure at all n locations
tttnatccctccaaggttngtgtttntcccnntctttcntgttaacccctnctggng

SEQ ID NO: 445229 - DNA, 381 bp, Triticum aestivum
gacggggaagaaaacgaagaagaagacgaagaagacgaagaagacgaagaagaagaagaagaagaagaagaagaagaagaagaagaagaagaagaagaagaagaagaagaagaagaagaagaagaagaagaagaagaagaagaagaagaagaagaagaagaagaagaagaagaagaagaagaagaagaagaagaggaagaagaagaagaagaagaagaagaagaagaagaagaagaagaagaagaagaagaagaagaagaagaagaagaagaagaagaagaagaagaagaagaagaagaagaagaagaagaagaagaagaagatgaagaagaagaagaagaagaagaggaagaagaagatgaagaagaagaagatgatgat

SEQ ID NO: 445230 - DNA, 473 bp, Triticum aestivum
  unsure (1)..(473): unsure at all n locations
ggnnnnnngnannttnttnncngccgnggacaagtcaagaattcccgggncgacgggctatcantttcatcgtggtcttctcctctcgacccccaaaaaaaaaaaaaaaaaaaaaaaaaaaaagcggccgctctagaggatccaagcttacgtacgcgtgcatgcgacgtcatagctttctatagtgtcacctaaattcaattcactggccgtcgttttacaacgtcgtgactgggaaaccctggcgttacccaacttaatcgccttgcagcacatccccctttcgccagctggctaatagcgaagaggcccgcaccgatngcccttcccaacagttgcgcagcctgaatggcgatgggacgcgccctggtancggngcattaaaccncggcgggtgtggtgggntacgcccagcgtgaccgctanacttgccaagcgccctaacgcccgctcctttcgctttcttccttcct

SEQ ID NO: 445231 - DNA, 147 bp, Triticum aestivum
  unsure (1)..(147): unsure at all n locations
gacanacacatgtcagggtgaaatgaaaacacagccgacagatacagaaagaactgcataaattaagtattcacttgatatcatcgatgaacaaaanattaaactctaatggttgccccaaagtttaagcatctgaaagaggatagt

SEQ ID NO: 445232 - DNA, 343 bp, Triticum aestivum
cgggccgaccgggtgcagcacacaagctattatgggctctagcatagttgagtaggttacatgatctcttgaagaggtgggctagcagatgtaggggaaagtaggtgtaccggtccatccagagtaaagagtgattgttcctgaaagactgtgtctcggtcatccgtttctcaaacatcatgcagtgcgagaatcaagcggaggcgatcgagtcttgtggggagaaatgcgcaaacctctacagagtgtacaaactaatcatggttagccgtgtccccggttatggacaacttgagtatctagtacctggattatcatttgaatctcatcaccatgttacttt

SEQ ID NO: 445233 - DNA, 214 bp, Triticum aestivum
gggccgacggggttcacaagtggcggtccgtaaaagacaacgtttcaatttgcgtacaaggcgttcaaagttccctggcctcatgttatgaagcgcacaagctcagaaattccactgaatgatttccagtttacaatgaactggtaacgagttgcttggtgttacagataggctactggacagacgacaacattttgtggaacttcatcgtgac

SEQ ID NO: 445234 - DNA, 305 bp, Triticum aestivum
gggagctgcagcaaggataacgactgcgatgtcatggcttaggaggtgagtgttggcataagtcatgccatgtgcgatggcgaccggcgtcgggtgtgccagatcgtgttcatgtatgcgtgggagaggcagcccgagtcgtgtgtgctgtacgtccgggtataaaaagccctcccatgtaccgatcgaagtgatgcgatatgtgttgagccagagagagatgtagccttttggagtgtaaaaaaaaaaaaaaaaaaaaaaaaaaaaaaaagaacaaaagcacgaaaggataaaaacaaaaagcg

SEQ ID NO: 445235 - DNA, 333 bp, Triticum aestivum
ggggcaaaagacaaatagaagcagacgttggtgtctgtatgtcggatgcgccatcaactgctggatttgtactgcgtacctcaaacctcatatccgggttgttgcttggatgtggatgtttggtggaatttgtgacccttaacagccgtttgcggtccggcttgctaacaccaatttcaggtacctgactggtcaaactaacaggttggccaaggtaaaaattctttgcatttgtgtggtgccccagagagtgtcatatatcagtacaatagtgtacatttgcaaaatctctctgttttcgtgctaactcggaaaaatttctctctttgaaaa

SEQ ID NO: 445236 - DNA, 218 bp, Triticum aestivum
gggcgagcaagtcaattgccacataagagatatccgcatgctgggcgggaagggccagttccgtcggcaatgtattcaaggtgacgcatctctcctgcatcaccaacgtcgactccgttcactcgatctcagtaattgtcattacgttgtcaaatctgttaatatgcaatgtccgcaccatgtgattgcacacgatctgcaacacaacacctccttgt

SEQ ID NO: 445237 - DNA, 426 bp, Triticum aestivum
  unsure (1)..(426): unsure at all n locations
gggcagacggcggcgagggagcttcaggagcagcaggacggcatgatgtacctggacgtgaggacagaggaggagatgggcaagggccacatccgcggctccctcaacgtcccctacttcttcgtcacaccacaaggggtccgggagaagaacccccggttcgtggagcaggtcggctcactcttcaccacagaccaatacatacttgtcgggtgccagagcggcaagaggtccgagctggcctgcgtcgatctcctagcagcagggttcatgaatgtgaagaacgtgggaggaggctacgctgcgtggctgcacaacggactctcggttacaatgggagtccccaaacggccaccanaacctgaatctgctgcagcaatctgaatcaactagtagtacgtactacctgtagcatctatcaattct

SEQ ID NO: 445238 - DNA, 117 bp, Triticum aestivum
cggtccagaaatccgggtcgacgggggcggttgtgccgacgcacgctccgagagcgacgaggagagcggcgaggaggtggacgaggcatgcgccgatgcggccatcctgctgaccaa

SEQ ID NO: 445239 - DNA, 416 bp, Triticum aestivum
gggggtgttactggagcatggccatctttgaaggtcggatatgccctgctttgctgctctgcttttcctcatatgatcctagtgtggagtgctcggcctttgcaagctgtaatcttaatttcctttgcattagctgcttgtggaggttgtagttagcgtttcagtccagtgtttccattgtatccttctgcccgctgtaatttggttgtttgctgtaactcctggccggttgatggctttgttaattcaaagccgggctcctcgtgagccttcgttctaaaaaaaagaaataagtattcttagtctgtcatactattttatagaaacccccccgatgtttcttatattaaaacccgcagtacataataaatgttttttttaaatactcgttacctctaaaccgtaactataaattt

SEQ ID NO: 445240 - DNA, 413 bp, Triticum aestivum
ggggcatgtagttcaaaatgggtactgatatttagatacaaatggttgaaaaaaaattgcatggagaaggttaccttaaatttacgtcggcaaaaaattcaacctcttctgctttgggcactcaatgcttgttttattgcaaaagaattctttctttcttgcatcaatctgtgttgaagtgaaacactcgctaaagtagaagcctagtctagtcataaagataaggaactactttaaaatgaatcagattgtccacattcaataacaagaatgaatatcttcatttacagtcatattcaacatacccttaagatgactaaaatagacttgttgtaatttacagaaaagaaatacatgagataagtcacctacctcatctatcatttaggagagggttagtatatgaagaaaga

SEQ ID NO: 445241 - DNA, 360 bp, Triticum aestivum
gggttgggtcatatattcctcaaatatgcccaaatatttccttaaccagttcaaaaataattccccaatattacttcttcacttctctccagaagggcactttgtgaaggaagtatcatttatattattctgtttgctccaaactttttgggaattctcttatgtccaaatgattgccacatgccaaaacgcaacttcattttcctactgaatcttccttagtgatttttcaaagtttcggttcaaatagaagctttgtgaaggaagtactagctaggagtatccaaataagtttaaatttgcatgcctcttcatgtgctccatcccttgatctatgtgagcacatgaccaaatctttga

SEQ ID NO: 445242 - DNA, 371 bp, Triticum aestivum
cggtcaagatatcccgggtcgacgggcgggatcatgatcacgagaaatatatatataggataataaggtggtgtattgccgccatgtccgttgagctgatgtttgtttcagctagagaaatcgttacgcccgctcataatttttcgacgctatggaaaataataactactggtatatcactctatatcaaaccggcttgtgaaataaatggttgcgccccggttttttgtcgtcaaaaaaaaatgaaatgtaagcaaaatcaataataaaaaaataggaaaaatgtttaaaaaaatatatgttgcaaggtttagaaacttgtggtagcatctgtacgtaatgctttacatttcccatgggttttgtgaagt

SEQ ID NO: 445243 - DNA, 336 bp, Triticum aestivum
gtgtaataaaacgcatgccagcggaagtcgtccgtacatgcgttaatttacgccccttactgtagatgcaaaatccagggtaggtgcgagcataaaatgaagagggtcacatgcgttaatttacgtttagtcctttcagtgtcacgaggcagacaccctcgtcggttcgatctttttcagctccaatcaggccgccacataggaggcgtaggcacgcaccatccgcagcgaccgtcgagcacgagcacatggatgtattattggcagaaccagctgccttggtcgtctcttgacacaactaaccctccgtccacaatatgttttcaagcaactttt

SEQ ID NO: 445244 - DNA, 305 bp, Triticum aestivum
ggggtcatcgacacaccactgtccgtcgggttgattgattatcaagaagggcccagctcgctcctagcccttctgctcttcctcgttgttgcctctgccagccccctagcatcggcccatggtgatcttgactatggcggtggagtgaagaaatctgaagctaccggcggatacaccgccggtattgagaagaaacccgaagctgtctcggccagtgctgagaataaacccgaagccatctccgctggtgtggagaagaaaccagatgccgtctccggaacagacgtctcctccagcgcggagac

SEQ ID NO: 445245 - DNA, 277 bp, Triticum aestivum
gggtcgacgggtacttcaagccgtggcgtctcagcttgctaaggtggttgtggacttcttccatgggagcaggtgatgtgctcctatagtcctatggtttgcagcgggattggagtggggcgatgctacaagagatatgtttgatacattgtcgttgcctttatctggttcattaccctttatatggatgagggggacatggattgattaccctctaattgtggtttgtgttggactctggttatctcggcgtcgcgtgatgggcgcttgcctgggt

SEQ ID NO: 445246 - DNA, 478 bp, Triticum aestivum
  unsure (1)..(478): unsure at all n locations
ggngnngnaatggtagntnccggnnccggtcagagaatncccgggtcgacgagctcactatcggcggccgctctagaggatccaagcttacgtacgcgtgcatgcgacgtcatagctctctatagtgtcacctaaattcaattcactggccgtcgttttacaacgtcgtgactgggaaaccctggcgttacccaacttaatcgccttgcagcacatccccctttcgccagctggcgaatagcgaagangcccgcaccgatngcccttcccaacagttgcgcanncctgaatggtgatgggacgcgccctgtatcggtgcattaagcgcggcgggtgtggtggttaccgcagcgtnccggcnnacttgccantngctcganggggcnggggcnctttgggtnccnncccgtnnttncnnnaangttncatngnggtgttcncngtganggnangaanngggggnggnnantnnggngnt

SEQ ID NO: 445247 - DNA, 428 bp, Triticum aestivum
gggggatatcgatggcacgtctgcgtgtcctgacacgatgtcagagtcgccgccatcagaagagaaggaggagtcacacaagtctttcgagttccccctgtccaaagatttggctgcacaatcagcagatgttgggtctagcacgcccaagattcagatgccgcctcgacctgctgaagttaccactgctgcgaccactcgtgccaagtcaacagtgaaggctgaatcgtgcactcccaacgtgcaggggagctcatccactcgctcaaagaccgtgcaaccgtctaatctgaagcagtcctcgctggcattaacgaagaagagtgtgctaaagggggctcctgatccggtggccggaaaaggcatctgctgctgcaaatgatattaggcaagaaaatcaggctgtgaagaagcaaaaactagatgat

SEQ ID NO: 445248 - DNA, 406 bp, Triticum aestivum
ggtccagatatcccgggtcgacgggaggcacaccacgttgagcgcgttgagctcgatcttgacgtcgtagcagaagcgcgccgccagctcgaaggccttggcgccgcccgggatgtcgtccagctgcagcgtgcacatgccgccgccgtccgacggcggccggtactcgctgatcagacgctgcagcacgccgctccggctcaacagcgggaactgcatgctcataatgacgatcgatgcaccgttagttagtcacattaacgcgcgcaatcgatcggtttgtgcagttcagttggtgaatgcgaaatgtgacggcgacacactcgatcgtgctaaccttgtggagataaaaggacatgtctcctacttccacgacgacatcgctctcgagctcggtcatgcatct

SEQ ID NO: 445249 - DNA, 418 bp, Triticum aestivum
  unsure (1)..(418): unsure at all n locations
tcagcgtgtgacataaattgctaggtagccgcatagctcgttcgccttgcgtcaatggttgacggatcaaggttccatcagttgaccagccaatcattgacttctagaaataaaatactaaaatctgaaaaacaaaaaatcacgaaaaatggataaatgattttgatttcaaataatttcatggatttgaaaaggaattcaaaaaaaaaaatcatcaatacgaaaaaagctcatggttttggaaaaaagttcatcaaattgaaaaaacacaaaattgaaaaggttcatgtgtttgaaagaagttcatgactttgaaaaatgttcattgatttggcaaaatttcatgagttcaaaanaagttcacttaattttganaataagtttacggatttgaaaaaagttcatcgatttgataaaa

SEQ ID NO: 445250 - DNA, 455 bp, Triticum aestivum
  unsure (1)..(455): unsure at all n locations
ttcgttnggccggcaggtaccgatcaagaattcccgggccgctctagaggatcnaagctacgtacgcgtgcatgcgacgtcatagctcttctatagtgtcacctaaattcaattcactgccgtcgttttacaacgtcgtgactgggaaaaccctggcgttacccaacttaatcgcctgcagcacatccccctttcgccagctggcgtaatagcgaagaggcccgcaccgatcgccctcccaacagttgcgcagcctgaatggcgaatgggacgcgccctgtagcggcgcattaaggcggcgggtgtggtggttacgcgcagcgtgaccgctacacttgccagcgccctagcgccgctcctttcgctttcttcccttcctttctcgccacgttcgccggctttccccgtcaagcctaaatcgggggctcccctttagggttccgatttantgcttt

SEQ ID NO: 445251 - DNA, 435 bp, Triticum aestivum
acggtcaaggaattccgggtcgacggggttcaccaggtgcggatccgtataagataacatttcagattggacacgagaagttccatgttccttggctttatgttattaatcgcaaaagctctgaagttccattgactgatttccatttaagatacactggaaacgatttgcttggtgttacggctaaagtagtggacatgcctcagcattttgtggaacttcatcctgatatagagaagattttctgggatccacagaattggcctaaatatgtacttgtaagttatacatgggaggaacaatcagagatagatgttactgcaggattctatgtgttatttggatctggccttgttctttccttcatccttgcaatctatgtattgcaatcatcgcaggataaattaacaaggtttgtacgagaagcggtttctg

SEQ ID NO: 445252 - DNA, 439 bp, Triticum aestivum
cgggtcgacgcggatattaatcaagcatttgaaaaatattaaatgtgcatagaaaaatgttgacgatgtattagaaaatattattctattatttgaaaatctttttgaagcatttgaaagaatttaaagtgtgtatagaaaaaatgttgaccatgtattcaagaaatgctgaccatgtatgtgaattgttttaatcatgtatttgaaaaatgtatatcaagaatatgaaatatgtttaagtatgtatagagaaactgttgaccatttatgaaaaaaaaaatgttaaactcgtattggaaaaaggaaaaagaaaccaaagaaaaaaaaaaaggaattgagaaaagaaaaaatgggttaaaacccatgaaaggaacaaaaagaaaccaaaaggaggacgaaagaagagacaaaaagatgtataatgaaaaaaataaaacca

SEQ ID NO: 445253 - DNA, 231 bp, Triticum aestivum
  unsure (1)..(231): unsure at all n locations
ttttttttntctttttntttntttctntntntttgttcttgttnntcttntggttttttcntgttgttnttttttgtttntnttntttntttnttttgctgtntctttttttttttttttttttttttgtgttnttctngttnnttgtgcttttgttttntgnttttttttttttnttnntttntntgtgtttttntttgnttctgnttctttttgtttgtgttttnntnt

SEQ ID NO: 445254 - DNA, 474 bp, Triticum aestivum
  unsure (1)..(474): unsure at all n locations
gggnnnnngnaantttattcgccggcacggtcaagnaatcccgggncgacgagctcactntcggcggccgctctagaggatccaagcttacgtacgcgtgcatgcgacgtcatagctctctatagtgtcacctaaattcaattcactggccgtcgttttacaacgtcgtgactgggaaaccctggcgttacccaacttaatcgccttgcagcacatccccctttcgccagctggcgaatagcgaagaggcccgcaccgatcgcccttcccaacagttgcgcagcctgaatggcgatgggacgcgccctgtagcggcgcattaagcgcggcgggtgtggtgggttacgcgcagcggaccgctacacttgccaacgccctaacgcccgctcctttcgcnttcttcccttcctttttcgccaaggttcgncgggtttttccccngtcaaagctccaaaatccgggggctccctttgg

SEQ ID NO: 445255 - DNA, 473 bp, Triticum aestivum
  unsure (1)..(473): unsure at all n locations
ggnnnnnnnnngnaacgttactccgncnggcaccggtcaagaaatcccggggtgatggtcacgtaatgggccatcgccctgatagacggtttttcgccctttgacgttggagtccacgtcttaatagtggactcttgttccaaactggaacaacactcaaccctatctcggtctattttttgatttataagggattttgccgatttcggcctattggttaaaaaatgagctgatttacaaaaatttaacgcgaattttaacaaaatattaacgcttacaatttaggtggcactttcggggaaatgtgcgcggaacccctatttgtttatttttctaaatacattcaaatatgtaccgctcatgagacaataaccctgataaatgcttcaataatatttgaaaaaaaganagagatgagtattcaacatttccgtgtcgcccttaatccccttttttgcggcaatttgncctcc

SEQ ID NO: 445256 - DNA, 463 bp, Triticum aestivum
  unsure (1)..(463): unsure at all n locations
ttcnctagccgngacggtaccaatcataaattcccgggccgacgggtggtgtcatacatgcaaacaaaaaaaaaaaaaaaaaaaaaaaaaaaaaagcggccgctctagaggatccaagttacgtacgcgtgcatgcgacgtcatagctcttctatagtgtcacctaaattcaattcatggccgtcgttttacaacgtcgtgactgggaaaaccctggcgttacccaacttaatcgcttgcagcacatccccctttcgccagctggcgtaatagcgaagaggcccgcaccgatcgccttcccaacagttgcgcancctgaatggcgaatgggacncgccctgtnncggcgcattagcncggcgggtgtggtggttaccgcgcagcgtgacngctacacttgccaancgccctnacggcccgctcctttcgntttcgtcccttcctttcccngccaagttcgcng

SEQ ID NO: 445257 - DNA, 431 bp, Triticum aestivum
gggccgacgggccctttgatgtacccgcaataaattagtcgtcgaacgagtgattccgtcccgtgtggctgatgtgatctacaaaatgtgtggcttcttgcagctctggagaccgcttagtaagcggagcgatcaaggcatcatcgacaacatcatgcgggtcttcgtgcctcggctgcgtcttttgctcctcccccgccccctcctgagccagattagcgtctcctagtagtcttatttggggcttgtcttgctgtgccccagcatgattctatgacttattgtacttgtaacttgatgttggatgcttggtgttggatgcttggtggtatgctttataatattaaaccgggggaaacccttttccgtcattttttggggtcaatgtcgagagagtgaagtcatcaccatcgccagagctaaagtcgtgg

SEQ ID NO: 445258 - DNA, 317 bp, Triticum aestivum
gggcctaaactctggctcaaaggtttctttcaagaatcaagagagaacattcaaggagtggattgtttggaaattaaaaccttcagatttcttagaagtgaggttgctttccaactacaattatagcttcacttggatttatgtgaatataagcgtaagatgtctagtggcaatgctacaaaatcattgcaggcgtgactcgtgagtatccggattgcactgctgctggccgtttcttgcaactgcgcacaacaggcttctgacaaagccaagtcttagactcatgaggtcccttttttcagccaaactgaaagcac

SEQ ID NO: 445259 - DNA, 80 bp, Triticum aestivum
  unsure (1)..(80): unsure at all n locations
cggtctagatatcncgggtcgacggggtggttggtatctcttcgcagagctaaaatacgacacgtaaactggccagccgg

SEQ ID NO: 445260 - DNA, 171 bp, Triticum aestivum
gggccgaccggatgctgattgaagagttactaaatctttcgagaggcctgtaccgatcagacctcacacagtctgatctctgtgcatcagtgtcatccctgaatcagtcacgctgagatgcacagtacgtgaatgatttataacacagtagcaatcgtccacgtattacat

SEQ ID NO: 445261 - DNA, 465 bp, Triticum aestivum
  unsure (1)..(465): unsure at all n locations
atcntttagcccnnccngtaccganccaagaattcccgggncgacgggggatacgtattgttgttctggtcgattagggggtgcggaaatagctagaactgaatgcggaaagtatggaaaacatcttgtaatgtatttaaccagaaaatcgattatgcttctgcggaagtatctactgtaacggaattttaggtgtcaaagtgtggatctcatatagtcaaaataagaagggacgtctatatccgaaacgcacgaaatatagtaaatattttaaatgcagatgtagtaggggttggaaccggatggtacacaacttggttttggnagatatggtattaaaagttgtagaactggcgtctttcatatccanccatttgaagcaacgcgtcgggctataatccggacaattccatgtgcctatgaacggacaaattccgaanaaattgtaagatatggggtaagagt

SEQ ID NO: 445262 - DNA, 378 bp, Triticum aestivum
gggcgccgtttaggaatcgcgcgcataggcgtacggaattcgagtagatgcacgcagctaacgatccgatctggcccgacccatttaaacagccagtcgctctcggttttaggtttgggacttttctaaaatttcctgaacaagtttttctgctttacttctttattgttttttatttccttttttcctttttcttttccgtttcattttttcttttttctttttctgtttcttttctgctttattttttattatttatttatttattaacatttcgtcttccttttcttttttatttctcaagtccatttattttcaaacttgaacaaaaatttcaatttttctttggaattccaaatatgttctcgtcctcaaaat

SEQ ID NO: 445263 - DNA, 503 bp, Triticum aestivum
  unsure (1)..(503): unsure at all n locations
ggtggnngcaantgtacttgcncagncccggtcataggattaacgggnctcnacaggatcaagcttaagtacgcgtgcatgngacgtcatagctcttctatagtgtcacctaaattcattcactggccgtcgttttacaacgtcgtgantgggaaaatcctgggngttacccaagttatcgccttgcancagatcnccctttcgccagctggcgtaatagcgaanangcgcgcaccatcgcccttccnaatagttgctcagcctgaatggcgaatgggacnccncctgtagnggncattaaagcgcgagcgggtgtggtgggtacgccgcagcgtgannggctnggacttngcagcgnccctaacagnccgnctncgntttngngtttccntcccttcnntttnncggcaaagttntngnggggtttncccgntgaangnnctanaatnnggggggggccccntttangggtccgaanttnnntgcttttntgncnncntntg

SEQ ID NO: 445264 - DNA, 69 bp, Triticum aestivum
  unsure (1)..(69): unsure at all n locations
tttgnttntttttctttgtctattttgtgttgtacttttttgtcttnnatnttttnnntttctgntgtt

SEQ ID NO: 445265 - DNA, 58 bp, Triticum aestivum
  unsure (1)..(58): unsure at all n locations
gngttgcncgcgcttnctctcncgcgcggtnntcctcctgtntccgcgtgttcngtgg

SEQ ID NO: 445266 - DNA, 421 bp, Triticum aestivum
  unsure (1)..(421): unsure at all n locations
gggccgaccggggagctcactaaggtctcgatggacctcaccatgctccactaccccttgtgactctgccccttgacgcctccagtgtatgaggttcgaatacacctcgtccattcggccgattgagcaaggtgcaggtttcttgattgatgtgttgttcgattgatttctgcagtgcaagggagggcacctggcctgcgtggactgccacgtcgagcgcctcgagaaccagcggcagtgccagaagtgcgagcacgatggtggcttcgacatgcggaacacgacggtggatgccatcatttcgtcgctgaaggtggagtgcccgcacgaaggttgtgggctctgcatcacttaccacaagctcgccgatcaccagagcatgtgtctgctcgcgccctgcanatgccccgtgcctgtctgc

SEQ ID NO: 445267 - DNA, 229 bp, Triticum aestivum
ccgggtcgaccgggatccgcaacaaagtcgcgatcgacgaggccatgctgcactcgccccaggaagacatcgcggagatggctccagtgctgtacgcttcgtaccacctcctcaacctgtagaggatggccacggcgcacgtttcttggttgatgtgttcttcacatgatttctgccctgcaagggatggcacctctgctgtcttcaatggcatgtctaactcctgcac

SEQ ID NO: 445268 - DNA, 417 bp, Triticum aestivum
gggcccggcgacgcggcggtggtctggcccgcgggtcagccgccggaggaggaggcgggggagacggagaaggaggtgtggtcgaggttctacggcgccggcttctggaggagcccctcgtcgctcggcgacgagaacagatgatcgggacaggccggcggctcctgcatgcatgcgacgccctggcttcttctacggctttcttgattcttgctcgggtaggcttccttcgttttcctcggggggaaaccgatgtagaggaggaaatgggaagcttgtgtgtcgtgtttgatccacaccgcattcttgttccaccttgtatccgctcttttttcttcttttctttctggtgtacgtcttctttgttgccattgtatgcaactaaatgtatataccgagtaatgtgattggggaaaa

SEQ ID NO: 445269 - DNA, 72 bp, Triticum aestivum
gggtccatgagttatgaaatgttccttgaataatttttttatattgatgggcaagtatttgacttgtttggg

SEQ ID NO: 445270 - DNA, 360 bp, Triticum aestivum
ggggacgctgcgaatgttcgacagaaggaccaacgtgatctggctaggtcgatgtcatggtagctgtctgctcggcatctgcatggctgtgagcatgccgtcccatcgaacatggtggtgcccaagggctcgggtacgcgccttcgcgttctgcgcactgcacccacggcgccacgatctacaccattgtcgtcgctgccaccgtcattgtacaccaccacagagtacagtcctgagaaggttctgcagtcaaagcgcttacgctcaggacgagcacatacgaacgccgtccatgaactgtgcagatgcaacaggttccgagctgtatcgaaacacgtcatgacatgaagacagcagtca

SEQ ID NO: 445271 - DNA, 469 bp, Triticum aestivum
ggccatgcttgaaagatgacgaactgggttttagttgagttttattgtattttagaacctcggtgatgatggtgatgaaaatttgtaagagcagaacagaataaaaatgttttaggtgtttatcaacggctctgcagaatgcacgagttgcttgtcgaggttaaggcaccgctagataagtgcaacacataataatatcaagtatgtcatgatcttggagataagtgcaacataaaaatgtcaagtatatcatgaccttggagataagtgcaacataaaaatgtcaagtatgtcctgatctttccaggcagaattgctgggatttggttaactgcacaaacattcttgatcagcgcttgatcactagatttatacttaagcacttgataacaaggcactcattggttgtgtgaaaacatatacagctaaagaagaatattattattgacaatctaggtttaacaaccac

SEQ ID NO: 445272 - DNA, 60 bp, Triticum aestivum
  unsure (1)..(60): unsure at all n locations
cnncttattttttttgtgtntngtgggtttgtgttttttcggtcttntntcgttgtnttg

SEQ ID NO: 445273 - DNA, 468 bp, Triticum aestivum
  unsure (1)..(468): unsure at all n locations
tcgccgggaacacgattccggtggaggagattctgacgatcgacgtgaagccggggtggaagaagggcacgaagatcaccttcccggagaagggcaacgagcagccccacacgattgcggcggacctcgtcttcatcatcgacgagaagccgcacgcggtgtacacccgggacggcaacgacctggtggcgacgcagaagataccgctggcggaagccctgacaggctacacggtgcacctgacgacgctggatgggcgcagcctgacggtgcccatcagctcggtgatccacccggggtacgaggaggtggtgcgcggcgagggcatgccgcttcccaaggacccatccaggaagggcaacctgcgggtcaagttcgacatcaagttccccgccaggctcaccgccgaccagaagtccggcgtcaagaggctcctgnggcagtanagcaggtctgtgtgtgttgttg

SEQ ID NO: 445274 - DNA, 461 bp, Triticum aestivum
ggggatcatctatacgacaaagtgttctggcacaaaggaggtcaaatcttgatgcaaatcagttccaaatcacaaagcaggctgcaaacaaggctgctactatgcctgtgcgcggtagggctgacagatggaacaaaccaagtggcccgtctacctcagcacagaggaggcccgtaagcgaggctcttcagaacagcaagggtaaggagatgcagaatgagcctccaaggacaatggatgcgctctttgcacagatgaagcagcaacggatgagggtcatgccaccgcagcaaccaaaagctcctaccaatggccatcagtttaaccagcagcggcgtggtcagcagcagcggcgaggcagagggggatatggtgtccgcagcggtggtggtaaccgttgagcatggcacccatatagaacattatcactggtgttcctcggaaaggagaagcctcacccc

SEQ ID NO: 445275 - DNA, 458 bp, Triticum aestivum
ggggttgtgactgactttccgtcccctggatggatagtatgttcttatatccaatcattgcatgaaagttgcatgatctttgatttcagaattatttatttcatcttctttatagaatgttcagttctgaacttgtgaactttccttacgtaagcgtgcgtgtgcaactcaattgtaatcttaggaattttcttgttcattctagttagcaatcatatatgaacgaagttatgaataagatgtgcacacaacttgaacatgcggcttttcgttattacaattgtgatcgacccctctgtctattattgagatggcccgataagatcaccaactgtagatgtcaagacttaatacccacaataagcgctgctagtgaaaaagatgcccataccagtacaacatagatcgaagctcttcaacaaacataactcgataatttcattaacattggcttacat

SEQ ID NO: 445276 - DNA, 282 bp, Triticum aestivum
ccgggtggccggggctgtgtctcagcgggttgactgcccgtatccctgcaacccgtcctgcattgacaatgaagatgactgagcaattgggtctgaacttcattctcgaaaagaaaaaagagtgggtctgaacttcagttagatgatgcaggaataacatggattagaccacatccatagctacaggtagaataggtgattcttcataagatggttacttacccgttctgtgtttgttgatgcttactgctactgagaataaaattgaggagttgtggtgtg

SEQ ID NO: 445277 - DNA, 432 bp, Triticum aestivum
gggactgcttgagacttttcatccttcacgtggtctcaggcaaggggatccgctatcaccatacttattcctctttgtggccaaagctttgccgttgttacttaatgatgcttcggaaatgggggttatcctagatttccggctaaacagacatgctccaggtatatctcatctaatttttgctgactgatagactcctatttttctaaaggtaacttacagcatgctctaaatgttaaaggtattttgtcggcatatgacgatggaattggacaactattatgtccggataaatgtaccatcttaattggcaaaaaatgttcaaaggaggaccagttgtccatcctgattatccttaaaatcacgatcgatggttttgacgataaatatctgagcttgcctgcaccatcacttttgaaagctttatcttct

SEQ ID NO: 445278 - DNA, 532 bp, Triticum aestivum
  unsure (1)..(532): unsure at all n locations
ggnnnnnnngnantgtttccctggccgtnggccccnnaaaannnnnaaanggcccnnggcccgagctcactagtcngcggccgctctagaggatccaagcttacgtacgcgtgcatgcacgtcatagctcttctatagtgtcacctaaattcaattcactggccgtcgttttacaactcgtgactgggaaaaccctggcgttacccaacttaatcgccttgcagcacatcccccttcgccagctggcgtaatagcgaagaggcccgcaccgatcgcccttcccaacagttgcgcacctgaatggcgaatgggacgcgccctgtagcggcgcattaagcgcggcgggtgtggtggtacgcgcagcgtgaccgctacacttgccagcgccctagcgcccgctcctttcgctttctcccttcctttctcgccacgttcgccggctttccccgtcaagctctaaatcgggggctcctttagggttccgatttagtgctttacggaacctcgaccccaaaaaacttgattagggtgg

SEQ ID NO: 445279 - DNA, 463 bp, Triticum aestivum
tcgacggggatcaaattttcaacgtaaataataagattgtttccaaagaactatctgttggtagagctgccttgtcaagtctacttggcggtattggctacttctacgggcagtcaaaaattgcacttcccaaaggtttttcacaaaaaaatggagataaatatattccatattggcctgctgcactatatacagctgtgcccagtcgctcatttttccctaggggattcctgtgggacgagggcttccatcagttagtcatttggcgctgggatgcccatatatccatggacataattggccattggttggatctaattaatgcggatggatggattcctcgagagcaaatattaggggctgaagctttaagtaaagttcctgaggaattcgttctgcagtatccttccaatggaaaccctccgacattatttcttgcgctgcgtgacttggcaagtggcat

SEQ ID NO: 445280 - DNA, 454 bp, Triticum aestivum
gggatcatcttatggcctcgccggactcagagaggccctccgcgacgacactttacggtcgcccgcgtccggagcggaggagtccggaggaggcgtttcgctctccatcatctctggaagaagatcccccaaagacaagctcatttgagaggggctaaggcccgaactgcaaagatacatgcagcgattatcttctcagaagaaaagacgacatatctgtactattaaggtattttgggtcacttacgactcgtgggagaattgatccccccaaggactttgtgcggcaaccgcgccccccggggtaggaccctctgtgggagacttcttctcccgtttcgaagcttcggcttccgaatccccaaacgcaatccttttcctcttctggtcgtcttccttcatgaagacgctcactccctcggctggagcagccagcgtttggggcccgcgactg

SEQ ID NO: 445281 - DNA, 461 bp, Triticum aestivum
gcccgggtcacggtggcaatggtaaacgcaaggctgagggcggtttaaactttgtggccaacaccaatacgcaaaacaatagtcagtgtcagaaggaaaagccaccccgacttggcgggcccaagttcaaccttgaggcgatgatgaaccagccttgcccaaagcacggtatgcaagagaagccggtcagtcatctatggaaggattgcttcatcttgagggcgtatagaaactccaattttttccagaacaatcacggcccgaatggcggaccaggatccagctctcacgggcctggctttggtggaggcggctcaagttctggtttccagggccatggcaatcaaggtggtttaagtcagcagtatggttaagggaatcaacaggagcaatctggttattagagtaacctgaagcagctaaatagtggaccatatcatgtgttcaccacgagtttatgc

SEQ ID NO: 445282 - DNA, 438 bp, Triticum aestivum
ggccgggaacaatggtacaaattcaactatgtatctgccaaagttgattatgcttaactctaggcattgcattactatatcatggtgaactattctttgaagaatttgtaggaggtactagaaaagtatgacttgatgagggatgccttgattttaaagaacagcctgaaagaatttagtttagtaaaatattgtatagccttctcgtaaaagtttgatacactttttcaagaaaacgaactttggttaatcattaagctataacttttctcatatttgaacaacaaggttatttgagctctgctaaaaaagtggcaatgttaaaaaaaaggttattttgtgtaatttttgcaaactttgttgaaagaagctacaaataattgatttcgctgtcaagtctacagtccaatgttaatctacagggtggaatcttcaaac

SEQ ID NO: 445283 - DNA, 330 bp, Triticum aestivum
ggggacaccccggaggtgcaggggctaggccggctcctccttcatgcggtgactgatctagacgccgcggttgtgccgggtgaggccggctcctcaatcacaagacggattgaaaacttcaattgtgctttccaaaatgaatttaccccaaatttaccccaaaaattaccttaaataattttccacaatttttttccgtcacaaaagttaactcaacctttgtgcctaagttaatgaattggtggtgggtataataccattatatttacacaaaatatgtccccatatatagtataaaaccttctcttatatatctcaaacttatcacga

SEQ ID NO: 445284 - DNA, 449 bp, Triticum aestivum
gacccagttatagccacgaccaaataacacgtagcactacggctatttaagccaccctctgcctctgccatccctcatccatctgcccttcttgctcttcgaccccttctccgtcttctgcatatccctcagccatgcagtacaccggaccaacctactgcttcccacccaccgtgccggagaggctctaccctaccggcgtgtacgttgatcgcatactatgtgtgtgggcgatatcaaggctgaggaccgcaaggaacttcgccgagttcttcctcgcgtccggctaccaccatctcccgaggggatctccaacgatgttccgcgtcgaggaggtcatccaaaaccgggtggtagttgctctccttgcccacttcaccaacacattcgacgccttctacctcctcggccgggtgttttggtgtggctccgagttcatcgctttcacc

SEQ ID NO: 445285 - DNA, 445 bp, Triticum aestivum
ccgggagcggcatactgtgacttcaggtacactgtgacggtcccctcgggagaattctgaaatgtgcgcacgggatccacactgcctgcatcacacctcgtatgcgcgtggagcccccaggccaggtgtgcaaaacgccagccgcctagggtaggacatgagccagccatgcctatgttcgtccacattgatccaaccatggaatggatttacacgggctctcactcaaatcccaggtgcatgacagctagcgaaatagctagctacgatcaattgatccatgcgttagatacacgcgtgatcacacagttgcgcagtgccatgatcatgtccggccacaatcaggccacatattatgcaacctgctagatacctacggcattgacctcacatacagctcgaggagcactctgtatcacatataccagatacactcatacatgca

SEQ ID NO: 445286 - DNA, 359 bp, Triticum aestivum
gcgccggggacgcggccgacaagggcaaagggaaggagaggcgcagcaaggagcagaagaaactcaagcagagaggaggaaagacaggaggcaggagatttgaagtaaagagtaaactgaagagcaagagaagatgaaaatgtatgcgcatctttggaagagattttgccagtttagttcgttttttcggttcatggtgaaattttcaccggagaagaaacatgccttgtgccagtgtagctttgcgtagtttagtgcgaggcggttttcatgttcacacgaaaatgaaatcttggcgcggcattttatcttgtgtgtcattcgaaacaaaaaatagaagggatcttgtgtgtcattcg

SEQ ID NO: 445287 - DNA, 391 bp, Triticum aestivum
ccggggcgccgggcaacggtgaaaagaatttgacaggtcttggagaaaatacataagactgatgataattcattcttacgtcaaactttaaaaagaatttgagaagctccgggaaaattagaagagtcaggtaagatcctgggaaagacctgtaggttagggtcaactcaaaagaaacaccgttgaacaatttaaaagcgaaattgcgccggttgaaataaatggcttgaatgaggtaacatccttaaaagaacttgattgaaatgagaatggaaacttgaaccttctgagatattttcgacactccgaaacaattgattaccaagaattggatgatttagaaggtgcaccgacatgagaaaccatttgaaccaaaaaaaagatatgatta

SEQ ID NO: 445288 - DNA, 456 bp, Triticum aestivum
ggggtgaaaggagaagttcctcgacctggaatatgatgttcaaggctcggtcaagtttggtgatggttcaaatgtggaaatttgcgggcaaggttctgtcctcttcgagggtctcataggagaacatcgcatactcaccggagtatactacatcccaaggcttcgcaacaacatcatctctgtcgggaaacctgacgagaatggatgcaaggtggatattgagaacggagtgatgacgatcttcgacaacctctcaaacgtgctagcccgtgtaaatcgcacacggaacaagctctatatcctcaaccttgatcaatcccaaccggagtgcgagctcgccaagagtgatgatgattcgtggttatggcaatgctagatttggacacgtcaacttctacaccttgaataagatgtcgaagatggagatggtatctgggatgccgtttattcaccatg

SEQ ID NO: 445289 - DNA, 469 bp, Triticum aestivum
gtcgacggggaattttgctgtgttctcatccaacattatttttatttacatgatggcaagcaagcaataattttgttgtataagtcaatcatatgatacttcacaattgctaatacaaaaggttaggatggacatacagcacaagatagcctttcttgctcgtttctcaaaagacatgtttccgttggccaagagtttaacctgggtttgccgtttcatgctcaagaataaggataccacaaaggaatccggtcatataaaagcatatagtaaaaagaagtgtacaagtataatagcgatagcagagaggaatgtgttcctttatttataaacaataaggcgaattatagctatgactgaacttggcgtaagatctgttttagcttgatggctctatgcaaagctccctagtgagcaaccgcggcctttaaccaatcaagaagttcgccattgtcaactctactttttt

SEQ ID NO: 445290 - DNA, 54 bp, Triticum aestivum
tcgacggggtacgataatagtgccccttagttggtgctttataagagaacatgc

SEQ ID NO: 445291 - DNA, 236 bp, Triticum aestivum
tcgacgggaacatgttgcactttgacccggtgcaaagcgacaagttcgtagcattgttacacttttttgcacaaagatagaacctgtagtactgatcaggtgaaacatatcgatgtggcactggtactgaactgaagcaacaatttgttcaacattgatatgatccaaatagagcgcatagtagtttctatcacatggaatcgtcgccggtcttgtgccatacagtcagtacaatt

SEQ ID NO: 445292 - DNA, 460 bp, Triticum aestivum
gggctgtcatccgagttcagtttcctgatggagtaattctccagggtgtattccttccagcggaggctactggttcactatatgagtttgtcgcggacgctttgaagcagccaggtttggaattcgatcttatctgcccagctgttcctaggtcacgtgtgctaccgcattctccaaatacaggagagcgggcacgcacgttgcaagatgaaggcctggtaccttctgctctcctcaaattcaagcccaatgagactgattctgttgtgttcaccggcttgcttgacaagcttctggaggctagtgaaccatttacagctgcatcctcttgattgttggagttcgggcccacattctcccctcaaatcttctgttacattggacttcatactgttgtaactcagtcacagggatatgtcatctgcatactcgataggttgattgatagtctggtacatag

SEQ ID NO: 445293 - DNA, 133 bp, Triticum aestivum
aagcgacgtcggtcactgaagatcacaactcttgacatgcatcctggtgcagataaagcgtcacttgatgctcctagttctcaagtgaaatctgagttcctaaggaaaagcagttcctgaagtcgtggcattc

SEQ ID NO: 445294 - DNA, 137 bp, Triticum aestivum
gcccgggggaaaaaaaagtaagggtggtggcttcggctcattcctcgccggtgccgctagcggtgcagttacggtacttggagctgtattggctgaagatgaagaacagtcttctggcaagttcaaatggaagtgat

SEQ ID NO: 445295 - DNA, 294 bp, Triticum aestivum
tccgagtggacggggacccagtcgattgaccaatcaatgtcatttgctttgcaggcgtcacgcgctcacatgccgatctctgaggggatgctcaatgtgagaacctcgtcacgatgtcctacatgccttagcactgttcgcttactgtgctcggagtctcatgggtcactcgcatgcctacggcaggttaatcatttcgatccttctcctgtgtggaccatgagttcacagactctgcacatcgcttgttaacgtgcaccatgcaccttgtagaagtacatctggtcacatcag

SEQ ID NO: 445296 - DNA, 466 bp, Triticum aestivum
gggagatggtggtagcactgctcgacgagtccgacctgtgcatctccgatagcgcagtcgaggagatcgttgacaatacgttcagtcaagcagactcgaatggcgatgacaggatagaccccaaggagtgggaggagttcgtcaagaagaacccagcatcgctgaggaacatgtcactgccctatctccaggacattacaacggcgtttccgagctttgtgatgcattcggaagccgacgattacagcggaatcagcaaataataaccgggccttagtgccacatgatccgctccggctatctatgaacatgctgctgggaggctggctgcgcgttcaattcagaggcgcgtgagctgcaaccggaaagcccggagctcgaatggggggagaacgcaagggagccgatccggtagccggtgagcgtgagatgatgtccaccggacgatgacttcatgtccatgcga

SEQ ID NO: 445297 - DNA, 438 bp, Triticum aestivum
ggggaccatcatgatcatgaagaatatataggataataaggcggtgtattaccgccatgccccgttgagctagctgatgttgtttcggctagagaaaatcgttacgcccgctcataattcctttttcgatgctctggagaataataactactggtatatcattctatatatcaaggccggcttgtgaaataaatgatcctgcgccccggtttttgtgtcgtcgatcaaaacaaaataaaaaatgaaaaaaatgaaaaaaaaacagaaaaaaaaaaaaaaaaatgtaaaaaacaataaaaaaaaaatataagaatcaaaaaaaaagaagaaataaaaaaaaaagggggccctccaaaagattcgaatttaagattatcgttatgagaaattaaaatctcttaaaaggggcgcctcaatttcgttatgagggtcatcttt

SEQ ID NO: 445298 - DNA, 465 bp, Triticum aestivum
ccggggcacggggaaaaggaaaagacccttcagtcctatttataaagcaagggacatgggtcaggtgcgaaaatcaaggagctgcaagtttggaaacagagttgtcgcctcgattatcgtagatctattaaacaagaaggtatcacagatagtttttttatgatagatgacgtcacgccgatttacagcaatcagagaagataacatcacggcggttcatcaaactataagaagatgttgaagatgaagtttttgctaaggattgacatgaacctgttcaaatcaatctggggcctaatgttggggatattactactgggcgtaaaccggcctatctgggccggattaacttcatcagtagttaagcatgttaaagcccatgaaggtagatgagggctcaagacccataatcggttgagagcctgtagccgtaaaccggtgtcaatatataacttgtattgtaag

SEQ ID NO: 445299 - DNA, 209 bp, Triticum aestivum
ttccggggcgacggggaaaatgacgagacacctcacacggtcatacaatgccaggtacccggttcatcgtacttccatcaaggaaccgcgcatctattaatctggggattcgcacgatcctgtgagctctcttacacaccggggataccacagttcaactctattgtgctaaatgaattccatccctatgatcacaatgagaaatcctt

SEQ ID NO: 445300 - DNA, 462 bp, Triticum aestivum
ggccgggagaattgttgatcatgagatgacactcaaggataagaagagctccacaacaattcaagtggttcttacaaagcttcatgtgatgctcctacagcatcaagtgagaattaagtctcgaatgaagaattgagcttaatgtgaagaacttcaacaagttctacaagaatagaagcaaagagagaagttgcaagtcaaggtcctaaaatgacaaaagatcttctagtcgtgatcgtaattgctacaattgtggaagacccggacactactccaatgagtgtacgactccctacaagaaaatataagattcaccaaaaaggaggagtagaagagatgaatcacctccaagagagaggagtagagatgatggttatgagcgaataccctctcatagaagcaaggattcagaaaggaaggacaagtcatcaaagagctacacaaggcgaagactgcaagctc

SEQ ID NO: 445301 - DNA, 122 bp, Triticum aestivum
tagatagtctcagttggtgttttcttgtactattttttaaactagattagaagatgaagatgggtctgtattgttgcttcggtttggtgtaagatatgttggatttggtgaggagaagctcc

SEQ ID NO: 445302 - DNA, 458 bp, Triticum aestivum
gggcataaggcctaccccggcaacaagacggtgagtgaatttgctggcgagcactgcatcccagacatcgacgcggcatgcaaggatcccagctgcagcgacggtgcttacatcgaatgcggcagtgcggcgtcgagattctgctacatcaaggccacccccgccaacaagaaagccatacagcaaaacttggattgcttcaagagctgttgcgcgcagaagaagagtgaagactgccgtaatgaatgcatcctcaacaagagtagtccggccgcttgaaaaatgaaaatgcatgcattccttccttccttccttgtacttgggggtgtttccttcatttcagagtgcctcattcatgcatgttttcacatgcgcatgtattcatctcatttttttttgttgaacatttattttgtctttttttttgttgcgaaaataaaattcattttgttgttgac

SEQ ID NO: 445303 - DNA, 439 bp, Triticum aestivum
ggggcacggggaggagaggaaggaagctgtgggtaagctcagggacacggtggttcagctcaggtctgccggtggccacgacgatgaggaacggcaacagcgatgactatattttctcggtccgctcggttggaccggttaaagaccggaccagaccgagaacttttcgggcctaatatggcagaccggaccgtccattttatgtagcgagctaggaccgagcgagccaagaccgaacgggccacgagcgggccgaaaagcccgcttggtacgtccagcctgacggacgacgatccaactgacttggttcctgccccaagtggctagatgtgcacgtacaaagctagcaccagtctccgatcgattcctttgtcagagacatatactagtactaactagtagagtgtccgtgcgttacaaaaatcacggaagaagaaag

SEQ ID NO: 445304 - DNA, 467 bp, Triticum aestivum
tcccggggcgccgggcaccatcgtaaagaacaccaagcgaaattagattcctccttagccatggcacacgctgactccccgaagcatccgctcaactccgtcaaacatcctgattttgatgtcacctactccagcgacacgataacccgtgtcatcgcccctgttcaagaattcatccaattaaccagttaacttgccgactaatccctactcatagggtcaccgagccgccgataaaccgaaaaatcgtctgattaattgattaaatggccgattaacttgccgattagccgattaatcccctactcgctagccaaccgagcagctaccagttaacgatttcctcaacaatggtcatcgcccacataggctaaaccaaactcaccagacttgtacgaagagaaccactccctgttgggcgtcgcatgaaaagagcaagctaaatccaacatccatgcttcagtttt

SEQ ID NO: 445305 - DNA, 462 bp, Triticum aestivum
ggggacctggagatacaacatttggagttgtatggtttgcaggagcaaggtgctgcagttagggagcttgagaaccaactgaagataaacaatgtcgagtcacagctatactccttgaagatcgaatccttgcaatctgaaaatcagaggttacaaacacagttgtctgaaagctcaaagttaacttcccagcttgagttgacaaaatcaaaatgcaagctgttgaaaaagaagttgagactggatgcggaacaagcaaaggagaaaatcacttcccttcagaacatagttgattcctttcagtgtaaggagattattgagggagaagttgacggcgaggctgagaagaaattaaagaggctagaggaattggaaaatgaggcaagagagcttagagctgcaaattcaaggctgcagcaggagaattcacaccttactaggcgattggagctcacacgccta

SEQ ID NO: 445306 - DNA, 354 bp, Triticum aestivum
ggggtccacacacagttttgaatcgatttatcttttttgctgagagctgctcagatgtccaaataagttgaaattttaagcgaacctcatgcatcaaattgccaatcacacaaaaaattagatttttttaaatttttttagtatttattttgattttttttgaccgggtgcatgagtctgggcaccgaattgggttttcgtttgtaaaccccatttactggtacaagaggttatcagaagtctaaaactaaatgtaatgtagatctctagagatgtaatttgcattgcatttatagcacaggaagtagtatcctggaacatttggtgacatcaataaaaaagaaagagaagttc

SEQ ID NO: 445307 - DNA, 134 bp, Triticum aestivum
  unsure (1)..(134): unsure at all n locations
cgntngngggnccgnancggnttggnccttccganagttgcgcagnctggttggcanntgggatgnnccctgttgcgggtattaagcgcggngggtgtggtggtacgngcagngtgacgttnnacttgccagng

SEQ ID NO: 445308 - DNA, 450 bp, Triticum aestivum
ccggggggagaatggaagcacgggagcgtccccctccccggcgctccttcttctcctccgcggctcaccaccgccgtggcgcctcatgccggcgccccactcacgacacgggagcgactctgccgcgcagagcgctcacctccttatcttgtgtgccgaggcttgctcgtctattttcctttttacccaggcccaatagaaagtaacggcccaagcgttaacggaagaacgtagaccaagcccgtgagcgaaagaacgttgtaataaggaattttgacaaaaatctttagtgcgtaccccaaattagtaccacctcgtttatattacgattttatctatataaattgtaaaagcgtattatgacatgagaagaaagcgtattgtgacggtgaacccgacaaagtcaatccgtgctttattattagggagagataaatggatgcagttttc

SEQ ID NO: 445309 - DNA, 303 bp, Triticum aestivum
tggactagggcgtacagggcgcggagctgcgcaggtccacgtctttcggggtaagaagcaggacgcatgatgcgacgaggcaggaggacatgtactcgtcgtggatgaacgacggtggcagcgacatgctggcggcgcggtggtcggacctggagcagatggtcgcctagttaattaattcacattttcgtttcagactccagtatataaggagaaaaagaaatatgtaatcgttctttgttttttttcaaacttgttgtgctcgaacactgataaaaagaaaatttcacgcccaaaacaaaa

SEQ ID NO: 445310 - DNA, 302 bp, Triticum aestivum
gggggctacaccaaatccgaagacggtgagttggtggcacgtcacagcgatgggcggaggcgcgcggtggcgtgtgagcctgggttaggctgttggcgatagttgtgggaggccgttggcattctgttgagggaggcccacgacgtgcgcgtgtaagacgcgtcgagggcgtggaccggaccaagcggatcgtggcgtgcaagcagcgtcgtgcatgtatgggcaccggtgttggcctgggtataagaactctcccttgtgtacgcttgtaagttgagccgagatgaagaaatacaagagac

SEQ ID NO: 445311 - DNA, 516 bp, Triticum aestivum
  unsure (1)..(516): unsure at all n locations
gggtgntgggnnnnnngnanntgtctacntggtcgtaggncgtganaagtccgagnngtccggggnccnggggatncnngcnaacgtacgcgtgcatgcgangtcatngctcttctatgtgtcacctagattcanttcactggccgtcgttttacaacgtcgtgactgggaaancccggcgttncccancttaatcgccttgcagcacatcnccctttcgccagctggcgtaataggaagaggcnngnaccgatcgcccttcncancagttgngcatnctgantggctaatgggagtgccctgtaccngcncattnatcgcggcnggtgtggtggttacgcgcagcgtgacngcanncttgccagcgctctatcgcccnctcntttcgctttcttcccttcctttctcgccacttctccggttttccccgtcaagctctaagtcgggggctccctttaaggttccgatttangctttanngnaactcgncncnanttnncttgattttggtgattg

SEQ ID NO: 445312 - DNA, 458 bp, Triticum aestivum
gggacgctgttgattggtgaacgtatggtgtgtttctttaagaccttgtgctctggtaagacagtcttcagaggtcctgtgaatgatcatgcattgcaaaatgtcatttccgagaatctccggttcccggccttcccggttgtcatcaaccatgcctaggatctcatcagaggattgctagtcaaggacctggtcaacaggctgggaacattgagaggagccaccgcgatcatccatcaccctttctttgaacggttgaactggtccttgatacgatctgctgccccaacatagacaccgtcgtgccatgtcctgactcttgcgacggtccgccatactacagaaagcaaatgtctggacttcatgatctccgagtagcagtactttgaacttttctagataagtctttagtacatttagcacaatttcagctgatagtctacaatttttctgttgac

SEQ ID NO: 445313 - DNA, 120 bp, Triticum aestivum
ggggtactgtcgaagttccgcgttggttcgctctccggcgtccgttcttctgttccggcgcttggtttcgctgtggtgcctcttgctggtgttggtttcgggacgccgttgggtctctgc

SEQ ID NO: 445314 - DNA, 343 bp, Triticum aestivum
ttaacccaaccctcccccaaaccgaacccaaccggaaggaatccccccgcccctgaacggtatttccaattataagggcctaattgccttcttccctggtaaatttgatttcttccagatccgagactgaagtttcgtgattttgaattatactcagtgattgtaataatcgggatactgaggatgtttaccactgctcaagaaatataaaaaaggatgacacatattcttggttctgaatttttgaacatgcctgagcattcataagatgcaggaaccctatttgggttggctttggcttatgtcagctattgaacttactagcttataaaccagatcatgc

SEQ ID NO: 445315 - DNA, 430 bp, Triticum aestivum
  unsure (1)..(430): unsure at all n locations
gggtcgacggggaagtagacgtcagagtccatgatgaagaagccagtagtcgcgcagaacgctccccaaaaaccttattacccttctcccgtacaggactcaaagcggtgtggtttcggaggcctactatcctgactcgtggtgcatgctgcaagccgggatgangaagacaacagtagctcagagaatggaaccggtggcgagaggaaggagaagttctggtgcatctctctgggaggaccgacctcncttttataggcgcaagagaaggaggcgagaagctgcgccgggagctgagctgaagggatcgagggagacgaaacgaagaggcagcagccgaagggtgctgcgttcgtattcaatatccactacagcaaaaactttctagctcccgagtggcctttcgtatacccgtagtgcatggcaaaaa

SEQ ID NO: 445316 - DNA, 437 bp, Triticum aestivum
gggggcggttgtgccgacgcacgctccgagagcgacgaggagagcggcgaggaggtggacgaggcatgcgccgaggcggccatcctgctgaccaagctggcgatagcgcggcagagcccggacaacgtcagcgtcgtcgtcgtcaacctcaggaggcgccgcccgagattctgaccgccgctggatccatggatccaccatactatcgtccgtgatccctgactcagcggcgaacgtggcatccatagcggaattcatgaaatacacaacgaaattgtttcgtttattttccgggggtggcaaaggtgttgaggccagacagacccacgccgcccccgccattttcctttcgaaagccggcgatggtttccggcgtgtcaagaagctttctttctcgagcgtcatgagaaactgtactataatccggtggaaacgaa

SEQ ID NO: 445317 - DNA, 474 bp, Triticum aestivum
ccgggggaaggcgaaatcttttctggctgatagataaaaatccccaccacatccgcaagcgcgaactccctccccggatctgcaactagccggcttccctcccgatccgtctcgccgcggccgagatccttccttcctccggcgagagccaagatgtactcgtgggagatgctgtcgttcaacatccacgacgggttcctggaggcgatcgtgcgggggaaccgctcgggcctcctcacccaagccgattacaacaacctctgccagtgcgagaccctcgacgacatcaagatgcacctctccgccaccgagtacggtccatacctccagaacgaaccttctcccttgcacacgacaacaattgtggagaagtgcactctcaagctggttgatgaatacagacacatgttgtgccaggcgaatgaacctctatctacattcctacagtacataacgtatggacacatgatcgat

SEQ ID NO: 445318 - DNA, 349 bp, Triticum aestivum
ccgttggttatagataaacttctagtcatcacacgacagttgattcatctggtgcgtcatatgctaattgcatcattgcctgctactcatatatagtcatccttgctttagacaccttgcgtgatatccatctatcaactgtacattaatatacagctcatagagcttcccctacatcttcgaggcgtaacacatatgctcatactgcggcacttccacatttttatcgtcatagtttgtgcgctagttcatcccttatatattttaaagcattgatgtcgatcgactattgattgactgatgatgtctcacgcttcacttagattattttgagactcctgcacaacat

SEQ ID NO: 445319 - DNA, 453 bp, Triticum aestivum
gggatatatttaaaaataataatttagtactccctctgtcctaaaataagtgactcaactttatattaattttatgagaaaaaatcaccatatattagaaaaggttgagtatgtattatgaaaatgttcatcacataataaaagagctcaccgtatataaaacgatcagtaaatataaagaatatgtatattaataatatattcggccggtgttcggaaaatattgatcgcatatttaaaattgtacttaataaactatatgaatgaaaaagtgcaaagtaaaaaccaaaaagacaaacaatgtgaaacccagacatgaaagaaagagaaaaacccactaacactgtgtattaaaaaaggcaaaagaaaaaataaaagggaaaataaagaaataaaataagacataaatagaaatctacacataaacataaaaccggaactaaattggaacag

SEQ ID NO: 445320 - DNA, 431 bp, Triticum aestivum
  unsure (1)..(431): unsure at all n locations
cgggtcgacgggttgctgtagattaccttgattaggttgctgattgaaaccgccttgattgccttggccctgaaatccagagtttgaaccgccacctccaaagtcgggcccgtgagagcggatcctgacccgccatgcggtccgtgattgtcctgataaaaaccggaatttctgtattccctcatgatgaagcaatcttcccatagatgagtggccggcttatcttgagaaccgtgctttgggcaaggctggttcattatcgcctcaaggttgaacttgggcccgccaaaccggggcattgacgatttccccttacgacgctgattattattctgcgtgttggtattggccacaaagtccgaatcgccgtcggcttgcttgcgcttaacattattaccttgacncgccgtattgtgccgctgcccctttgc

SEQ ID NO: 445321 - DNA, 268 bp, Triticum aestivum
cccgggccgacgggagggtggacgaccggaaagggaggatgacggcggtgaccacggaggtccggaagaaggagtccggcgcgctggtggcgatcggccggcagtggatgaccacctccagaccaaagggatatcaagggagcaagctatgatacagcaacgatgagaacactatctgtccaaattcattgattaactgacaatgttaaatgcttatttgaggagctcttttacggtaccgggtaatgaatacgggccctccattccg

SEQ ID NO: 445322 - DNA, 427 bp, Triticum aestivum
aattcccgggccgacgggaggaagaaacggcgccgtccgttcccctgccatgcctgcacccagcggggccctcaccaggcctccacttcgccggaccaccgtatcctgccgggcaaagggtagcccggccgtggcgtactgcacgctaccggttctgcagctactctattatgtcagaacacttgagagggatgaaagtgaaacagcagcaccagcagcagcgaagatactgctgctccctcctcactcgtaccctgctcccgctggtcctactcctcaccggagccaaccgcaaacagggcagattgtgatcatttctgaactagcaagatacagcacagcgcagcattctgtctatatatccctccctgcttccctgtctgaacttttgtttgaaacagagttcctgaacttcctaattaacatg

SEQ ID NO: 445323 - DNA, 381 bp, Triticum aestivum
gggggcggcaaaactccgaggctggagactcgaggagaacgaataagaagaaatcacgggaacaaaaaggagacgacccttcagtcttatttataaggcaacagagttatatcaaacgcacggatgcaagagctgcagttaaaagaaggtgtgatatatgaaaaatgtcataaggacgtcatgcaggttctacaacaaccacaagtgatgacatcatgacagttgaccaagtaccagcacatgtcgatgatacaagattttgtgacagattgacatgaaccatttcagatcacactggggcctaaagttggggatactaccactatgtgtaagccggcatacttgggccgggttaacttcattagtaggacaagcagatga

SEQ ID NO: 445324 - DNA, 292 bp, Triticum aestivum
gggacccgctccataccaaccaagaagatcaaccgcttcttcgccaaagggacgacggcggtgagcttgagcttgttgaggtaggaatcagctgccgtacagatcaagcgaatatgaaaagggaatgtgagcactgagcagtactgtgatcagagttgtcggttaactggtgtagatacatagcatgtatgtgttgagcgtgggcgattcgatgtacactgtctcacatgaagtccgtccacaatttgggttccattgagaaagattaaatttacatacttgcattgttggg

SEQ ID NO: 445325 - DNA, 373 bp, Triticum aestivum
gggcagcccatccatcatgctacgtgcacctagacaaaggcacaagggccacaaaagttggtttttacttcatggagcaagagaagcaatgtgatgggcctaaggatttttttgatacgctagtagtacaactatgggctgatccatatgtttggcctctgtacgccaaggcgttcgagagatcaacagataaggcagcgtccatacttaataaatagttatttagattagagtttagactcgggttttattgtactccctccgtccggaaatacttgtcatcaaaatggataccaggagatgtatctagacctactttagttttagatacatccctttttagcaaggtttgatgacaggtacttccggacgg

SEQ ID NO: 445326 - DNA, 411 bp, Triticum aestivum
ggagcggaagcaagcctacatagcggagctcgagtcgctggtcacccagctcgaagaggagaacgcccacctgtccaaagaacaggaggaggcaaaccagagacggctgaaagagctcaaggaaaaattgactccagtcattattgcaaaaacgccgtcacaagatcttagaagaacaaactcaatggagtggtagacatgagccaagctcagtagccatccccttacagctatgtagattttgatttgtttgtctgtcattcctctgtttattggagttaactcagttgttgtaacttagtagatatagcataaacagcttaaatggaatcataatgtgtagagcggaaggctgcgtttgagcaaaatggaatctcatcagcagcttatattctgtctgatttgcctttc

SEQ ID NO: 445327 - DNA, 521 bp, Triticum aestivum
  unsure (1)..(521): unsure at all n locations
gggngnngantntttatgtgccctgggtctacaatccgacattcccgggtcgncgagctactagtcngcggccgctctagaggatccaagcttacgtacgcgtgcatgcgacgtcatactcttctatagtgtcacctaaattcaattcactggccgtcgttttacaacgtcgtgactggaaaaccctggcgttacccaacttaatcgccttgcagcacatccccctttcgccagctgcgtaatagcgaagaggcccgcaccgatcgcccttcccaacagttgcgcagcctgaatgcgaatgggacgcgccctgtagcggcgcattaagcgcggcgggtgtggtggttacgcgcacgtgaccgctacacttgccagcgccctagcgcccgctcctttcgctttcttcccttccttctcgccacgttcgccggctttccccgtcaagctctaaatcgggggctccctttanggtccgatttagtgctttaaggcacctcgaccccanaaaacttgnttanggg

SEQ ID NO: 445328 - DNA, 326 bp, Triticum aestivum
gcggagacggagtagaggaggagacatcgccgttggtatgatcggtgacttggatgagctgaacgaataacaaatcagagtgcaggatttggccaagtctgcttttgtgaacctttgtccagtttgtgttgtttgatgtcgtggaactgttttggggattgtaacttgtaagttaaaggaacaaatcagagtgcaggatggcgatgatcagagatggattagatgttgttaatccttttcataaaaaaaacaaaaaaatcaaagctggaacaatgaagaaacacaaaagaaaaaaatgggccaacaatcaaatgaaaaggacaatg

SEQ ID NO: 445329 - DNA, 504 bp, Triticum aestivum
  unsure (1)..(504): unsure at all n locations
tgtgnnggnatgtttactttngccngggncngtacanatcattaaatncccggggncgagagctaacnaatcggcggccgctctagaggatccaagcttacgtacgcgtgcatgcgactcatagctcttctatagtgtcacctaaattcaattcactggccgtcgttttacaacgtctgactgggaaaaccctggcgttacccaacttaatcgccttgcagcacatccccctttcgcagctggcgtaatagcgaanaggcccgcaccgatcgcccttcccaacagttgcgcagccgaatggcgaatgggacgcgccctgtagcggcgcattaagcgcggcgggtgtggtggttagcgcagcgtgaccgctacacttgccagcgccctancgcccgctccttcgctttcttctctcctttctcgccacgttcgccggctttccccgtcaagctctaaatcgggggctccctttaggttccgatttaatgctttaaggggaactcg

SEQ ID NO: 445330 - DNA, 444 bp, Triticum aestivum
gggtgcatgtcatagagagagacctgacagagcctgatagaattgtgggtgaattgttacaacctggaggctacctgaaattgatggaattgggtctgcaggactgcgttgatgaaattgatgcacagcgtgtccttggttatgcattattcaaagatgggaagaacacaaaactttcttaccccttggagaagttccattcagatgtggctggcaggagctttcacaatggacggttcatacagaggatgcgagaaaaggttgcatctttgcccaatgtccaactggagcaaggaacagttacatctttgcttgaagaaaatggtacagttaagggtgtgcaatacaagatcaagtcaggtgaagaactaaaagcttatgcaccattgacaattgtatgcgatggctgcttttcaaacttaagacgtgccctttgctctccaa

SEQ ID NO: 445331 - DNA, 387 bp, Triticum aestivum
gggtacatgtaaactattgactcacataccttcaaatggtgtgtcttatcttcatatagatgaattaatttagcccatatataatatccacctaataatcagatatttggataataataataaacagctggttaccagcagctcttgccatgatacttaaggcacaaacagtttctacaacttccaatgttatcactatgcataatattttgttgacagaaaattcactcccctgcagattggctgcaaacaacaaaaatatgctgacaagttggccaacttaccaatgcatcagttttcgtacttgtcttgaaatctgctaggctttgtagtctggctagtattcctgaacgtttgccagtcttcaaatttgcacggacctttcat

SEQ ID NO: 445332 - DNA, 445 bp, Triticum aestivum
atgcccgggtcgacggggcacttgaccttctagctatagactgattgacaggcatggttcattgttatttccttcctttaatagtattgtaagggaagcaggttctccaaataaatgcggaagattgcagcatcaagggtatcacttcactggatttttctacttcttggtgggcagctaaattagtttccctggtccgtttctcaactatcacagaagaactctttactctgtaattttctctttatttgtgctgaaggcatagatcaagtgctacatggctatgctcttcggagcttagagcatcagtggttggcctcctttctatttgttcttttttctaggatttgcgtgtgttaatcggatgaatatatggaaggatacagagaggccagagagtttgctatcaaattctcaagcagcaagaagatagctagcctaaatg

SEQ ID NO: 445333 - DNA, 51 bp, Triticum aestivum
  unsure (1)..(51): unsure at all n locations
ttcttngtgttcgtcntttgntgttttgttgtttgnttttatnntttntgg

SEQ ID NO: 445334 - DNA, 525 bp, Triticum aestivum
  unsure (1)..(525): unsure at all n locations
ggnnngnngaantgtctgcctngcctaggcctccganattccaaggtngncgagctcacagtcngcggccgctctagaggatccaagcttacgtacgcgtgcatgcgacgtcatagctttctatagtgtcacctaaattcaattcactggccgtcgttttacaacgtcgtgactgggaaaccctggcgttacccaacttaatcgccttgcagcacatccccctttcgccagctggctaatagcgaagaggcccgcaccgatcgcccttcccaacagttgcgcagcctgaatggcgatgggacgcgccctgtagcggcgcattaagcgcggcgggtgtggtggttacgcgcagcggaccgctacacttgccaagcgccctagcgcccgctcctttcgctttcttcccttccttttcgccacgttcgccggctttccccgtcaagctctaaatcgggggctccctttagggttcgatttagtgctttacggcacctcgaccccaaaaaacttgattaagggtgangg

SEQ ID NO: 445335 - DNA, 276 bp, Triticum aestivum
ggatcgtctgcgacagcggagatggcgtcctcgtggagcttgtgaatgggattctgcaaagatcagactgggaggaagcaataaaaatgccaattggggtagttccagctggcacaggaaacggcatggccaaatcgcttctgcatgctgccagcgagacgtgctcagtttcagacgccgtatttgccattatcagaggtcatagtatgctttcaggcacataatataagtttccacggcagtttcaaatagagaaatctgatggaaacaacaact

SEQ ID NO: 445336 - DNA, 60 bp, Triticum aestivum
  unsure (1)..(60): unsure at all n locations
tttngttctttttttcttngtttttcgttttnnttntntgtcngtttttgttttcttntt

SEQ ID NO: 445337 - DNA, 134 bp, Triticum aestivum
gggctctcattgcaatgcatcaccatgatcttgcgtgtgcgtaggaatttttttgaaattactacgttccccaacatagtatgcatctcacactagttgattggtcaatccaagaacacgaaagacatatttcc

SEQ ID NO: 445338 - DNA, 424 bp, Triticum aestivum
gcgaaggtttgcagatcaccgacaaggatcgaccatgagtgaaatcaacccgagtcagatcagttctacgttgaaggagaatagggtgaagaagtttatcttccgtgttaagtcacagcccctccaaccagacgtagccctttggcagaagggtgaactggtctaccaaatatatctgtctccatcaagcaccattggttctatttactctactgcatttccatcagcagtttattttcgtgctctgtgccgatagttttttcgattatttcattcaggttgttatcaacttgtgtttcaatgttcaccctgtttcactgttttcgtctgtattcatgtgttatcatcttgtccctaagattcacctgtgaaatccttccatacattgctatgtctcattctactacatttttttgcatgttgc

SEQ ID NO: 445339 - DNA, 457 bp, Triticum aestivum
gggattgggccgaatccccatccccaaattcgagcgccgctgtgatttcctcgccccgcctccctccttccccggtgagtttccttggagtaggggagatacccctttgcgaccaatggcaggatcttccatcagcaccacttcggtcctccaattcctcccatcttggcgcccgcatcgctgtccatggcgcacccctttggtgtcctccagagtggtcgccggtgctggcacttgtgctcgttggatacaacatgctcttctttgacaaccatggtgcacggcgacgaggtgccttgttccgtgcggttcgttgttcatcggagtcacctcgttttttttgcagtacagagaagctacggtgcagtcccttaacctgagcatgatactcacctccccctgacattgcagttcgctgtagtactccggtaatgccatggcgctggagttcacagtg

SEQ ID NO: 445340 - DNA, 468 bp, Triticum aestivum
ggcaactcgtaaagataatcaaggttcttggaacgccaactcgggaggaaatacgttgtatgaacccgaattatacggagtttaggtttccgcagataaaagctcatccttggcacaaggttttccacaagaaaatgcctcctgaagccatagatcttgcttcacgtcttcttcaatattcaccaagcctccgttgcactgctcttgacgcatgtgcgcatcctttctttgatgagctacgggagcctaatgcgcgcctgccaaacggacgcccgttcccacctctgttcaacttcaagcatgaactggccaatgcttcacaagacctcatcaacaggcttgtgcctgaacatgttcgccgacaagctggtcttgctttcgtgcatgcggggagctaaatatgcgcaccggtgccctcaaccttgcaccttattgttttgccatgggcagaagggtggtggtttaaga

SEQ ID NO: 445341 - DNA, 415 bp, Triticum aestivum
gggtcgacgcgcacgatgacgaccaatgcaattgtttcatagttttgatgttctcaaactttttcaatcttcacgcaatacataagcgtgagccatggatatagcactaaggtggaataaaatatggtgggtgtgaagaacacaccaagggtgacgatattctcatatcaactatgcgtatcaatgggctatgaagatgcacatcaatacatatcactgtgagtgattagggattgccatgcaacggatgcactagagctataagtgtatgaaagctcaaattgaaactaagtaggtgtgcatccaaactgcttgcccacgatgatctatggcaatttgaagaagcccatcattggcatatacaagccatgttctataatgaaaaaaatccactagtatatgaaagtgaaaacat

SEQ ID NO: 445342 - DNA, 162 bp, Triticum aestivum
gggtcgaggcggatggcgacctatatgattgctacatttttttcttacgacaaaggatgaattttatttactcgctccatccatatatatagggcctaatatgtttttcgagattgcctttgactatcgataagattaatagtatatgagatgtataatgtg

SEQ ID NO: 445343 - DNA, 400 bp, Triticum aestivum
gggacgacacagtcataatttcagtttccctagttttccatgtcaagctggcgcgctaagccattatgcattgaattccgatgaccatcgcgctaccttccccctataagtactgtttcccagccttctccagtgccaccgtgacccaactcgccatatcctcataagcccccaccggctcgatgtcgctcgccacgtacgccatgcccccgcccgtccacagtaggcgacgccaaaggcggtcactgccggaactagtgtttggtttttcactggaaggcagacggagggaggaggcattctatctgtctttagatggcaatgcgtagaccgaggagttgttggagcgcgaccgcatggcggaggagcaggagttgttggagcgcgaccgcctggcgga

SEQ ID NO: 445344 - DNA, 369 bp, Triticum aestivum
attccgggtcgacgggcgatgctaccgtgcccggagaagaagttgatccagcaggtggtgttcgccagctaccggaacccgctggggatctgcggcaactacacggtgggcaaatgccacacgcccaaggccaaggatattgtgacgaaagatttcgtggggaacaggagctgcgtgctggccgtgtcgcacgacgtgtactctggagaattcaactgtacgtgcaccacggtcacacatcacatccatgcaatagtgatcaactaggcataggaacgtggacctcacatgtaaactatcctcacagatataccgctagctttatcatcccaacaccttctgcatcacagcccattttcgctatcaggc

SEQ ID NO: 445345 - DNA, 383 bp, Triticum aestivum
ggggtggtttatcagatggggtcagccaatgtgatagcaggacctgaatcacccaccttaaaggtggtcgtggtagactatgtgtattcattcttgaggaggaacttggcagagggtcacaaggtgttgtccattcctaaagatgagctgctcaaagttgggatcacatatgagatatagagatgttttttttttgtttttttttttttttgaaacggaacacagattgcattcctcctacatatcattgctgggcaaatccccagctacaaggttctgaacaaactctgggaattgtcccaaccaagtaatacatgcaccagagtttaatgttgctccgaaaaaataaaatccatttaaaacaaaaaaaaagcggccgctct

SEQ ID NO: 445346 - DNA, 361 bp, Triticum aestivum
ggcgagcacttaggtgaaggcatacttcgttgactgaggaagtgtataaagatgttgtctgacggtggttgtatatcaatctttgcttgctaaacttccgagttccactgggtcacgtttcatgcacatgtagtcggtggggaattacttaccatcatctactagtgagccttgattacagcatatgtttcgcgacgtacggtctccaaatagatgcagctccctactatcaggtagcggcaactcagtttacatcaggcggtcagttacccatcagttattgggtgctgataacctgacatctggatctcacgcaggataataatgcgtagggtgaccctgagacaatattcccctggat

SEQ ID NO: 445347 - DNA, 454 bp, Triticum aestivum
gggctactgacatatataatcatcaaattttctcacccgtatgtcttttacatattgctctgtggctctggctagaccattttgagcggcacggaggtacgcatctcccgtattgaaggcatccaatgcctcttgggagaaacaagcatcacgaagaattgtccggcgacgcctgtggttcatggaactctccacctcggaattggtggcagacagcccgtccgcatcctctgtcagaggagcgtccggtgcatgcctcgtgttcgtctccgcttctggacccggccttggagcctggctggtggaggcgcggttggcaacctctccggatgtagtccggcgagcgctctttttcctaaaaaaagcacgggcgttagcatgccttgaaggaataaaacctgggaataaaacggcacgccatactgttgtgtccgcatctcaatccggaccgcac

SEQ ID NO: 445348 - DNA, 397 bp, Triticum aestivum
  unsure (1)..(397): unsure at all n locations
cgggtcgacggggttcaagacgaaagtgcggtctccggcgaggaagagtagaacatgggagacggaccagccagttggcacaccatgcccagccgcctcccatgccctactcatcctcgaaggagtccccaaccttagcagtgccggacattggacggcggcaagtaggacgcgtggctgacggtgctcctgtcctcggccgccatcgtgtccactgtttggcagtcgcgtccgcgtctggctacgctgctattgcatcgcgagcgacgacttgagcgagggcagcgtcctcgagcttcatccccgaagacaaagctctcctgtagagcgttcacgctcgcggtcatggcggatgtggtgccaggtagcaggacgatgcgctatgggggaaaaanaa

SEQ ID NO: 445349 - DNA, 423 bp, Triticum aestivum
  unsure (1)..(423): unsure at all n locations
gtcatcaggatagaatcgatataatctggaagggccaggagctcatcttccaaagaacgatccggttattgaccggcatcgatctgtcaggcaacctcttgtctcagtgcatccctgacgagctaaccaacctttacggcctccgatttctgaacctgtcaagaaatcatctgtcatgcggcatccctggagatgtcggtagtttgaagaatctcgagtttcttgatctatcatgtaatgagctttcaggacacattccacagagcatctcgttcttgtcaacgctcagcatattcaacatctccaacaatcatttgtcaggcangatacctggtgggagccagatgcagacgttgactgaaccttcgttttaccggaacaattccggcctttgcggatttcctctagccgattgtccaacta

SEQ ID NO: 445350 - DNA, 343 bp, Triticum aestivum
gtcgacggggaaatcgacgacttcgactccggcgccactgtctatggcgacaaacgacagagcattaagtctgccctcatcagatgttccagcgtagtacacacatctgccgttcaggacgatgtcggtgacactactaaagtggacagtggtacatcatatcatgaatacacaatgggaaaacaagcacgatacctgcgtaatgactaatgttgtctacgtgtcgcacacttcatgcataccagatcggaggatttctggactgatgtatgctgtcatgtctgttttgctgatgcatctacttccttagcacatctgtgaaatcttgtcttgctcgatggca

SEQ ID NO: 445351 - DNA, 472 bp, Triticum aestivum
ggtactttggatagattaacacatacgagtatctcacatggttacatatatgcatatactccctgcgtccgaaaaaggaaaaatctacgtaggattattgattactgatataagccagcctcttctaaaaatgtaatacatatttaattgggcgtggctatatgtcaatcacgtgaaaataaatttagggtcagtcactttttcttttagggcaagcaggcacgaaggaacgctagccatatgtaagtagtattagcgtaaagtggcagtgctagctaattcacgtgtgcacgtctattttccctttgtgtgcgcgcgagtgtgtctgcgcgtgcacgctgccacatgtgcatgtgctcgcatgcgtgttactccatctatttctaaatatttgttttcctagagatttcaacaagtgactacatacagaacaaaatgagtgaatcatactttaaaatatgtctatatatat

SEQ ID NO: 445352 - DNA, 303 bp, Triticum aestivum
ggggacgtaaatgaagataaatggcagtggctgtacacacagatgaacgttcgtgcggtagggcgctcggagactcaagaactgctccgcgtccatcctcgacatcaccggttgtgtcaccagcaatgaccggctgattgtatcgctgactggaactgcatgcacccatgggatacgcaagcgagtatgacactgggaacacacgctaataataatctgctggaggtagctactcacatctgttacacgagacatgctagatgaccatgtaaacgtatccgtgggcaatatcctgatgctgga

SEQ ID NO: 445353 - DNA, 223 bp, Triticum aestivum
gatgggcaacggtagaatgtgtcggcggccttcttaaggttttggcacttggtgatttggtgcagtcgattatgtggtcatcgatggcattaatttaagccccaagtttgtgtccctgaacggctagcgttccttggcctctcataattgaggttgcgaaacctttttcttgaatccggttgcccaatgggatcaaaactgatgtaagcttacgtgtcacata

SEQ ID NO: 445354 - DNA, 360 bp, Triticum aestivum
ccgggtcgaccatcaagcagagagacttcctgctgaatcgcatacagaagctgtcgcgagtcattgacctgtaggctttctttgtgttggaggtttggagcagctccttggcacaaccctaccctactcaagcttcccttgcaagactttgctttggctcctgtggagtactggcagtattgcattctgcgtttcagatcggtcaaaaggaaaggggtagtttttttttttttcaatctgaggatttgacttgtaacctaactatatggatcgagggaattgcagaccattgtttctagatggttgtttccacgatgaattcatccattttttataaaaattgtgtgaccagcgttttac

SEQ ID NO: 445355 - DNA, 448 bp, Triticum aestivum
atgcccgggtcgacgggtaagaaaatagttcagagccacatgcaaactttcaaaattattgggcttatatctattttatagtaaatataaacccaattcaaatagctagtgaattaattcaaaggcccaagaataattatttctgtgattccaaaaatattggtttgagttttagctcttgccaatattttcagagattagcaggaacattttgttggggtcatttgaaaatattttaatgttgatcatttttaaaagatttctgaggcttgagaattccctcaattcaatttccttgaatttaagatgatgcatggatgcatatgcaatgacaagcaaaggccaaagctagggctgtgacagccatgctggagtccggaccgcttccggagcctgctctcaacgccctggcctctctagacgccagctgcccgcggcatgcatgcat

SEQ ID NO: 445356 - DNA, 328 bp, Triticum aestivum
gggcacaggcacgagccttcaccatggaaaagactgagacgggagacgtgtaggtgcccatacacttctcaatgtcccatcaccaggctcggaactgggactgctgtccattcaagaaatcagtgcgtccagctcctaacagtctggcatcttcgtgatgctacattacatgtagcaatgtcaatttatatagttatgcagacgattcgttatgataaatcccccgcgagaccaaaatgcgatacggacacgcgagatgatacgcgcttacatgatcgatcatacaacatgcagtctctgcaatacatgtcattctggtgtccgttac

SEQ ID NO: 445357 - DNA, 68 bp, Triticum aestivum
  unsure (1)..(68): unsure at all n locations
tcagtnatgctaangttaaangtaaaaatattanatttgaataaataantngattaatnttttgnaaa

SEQ ID NO: 445358 - DNA, 58 bp, Triticum aestivum
aggtgacgtacgttcttatccttaagttcgggtactctctgcagtggcataaccatgt

SEQ ID NO: 445359 - DNA, 280 bp, Triticum aestivum
agctaattgagatgagggagaagaagggcggacgcggcattaatctggggaagatagcaggagctgaagctggcgcgatgcagcgttggcatgaggcggagcgcggacggcggcagagagcgacatcgtccagcttcaaagctgagctcctcgagctgatctagggtgggggataagaaccactcgtcgaacttgggttggaccttgcagttggtactgaacatgcggatgtcaaggcctctggctggcccaggggaaaaacaaagaggcccgcaccgat

SEQ ID NO: 445360 - DNA, 61 bp, Triticum aestivum
gacgggtagaatgatcttttgatccacagggatgcggagaagtctgggcacaaccagtaag

SEQ ID NO: 445361 - DNA, 422 bp, Triticum aestivum
  unsure (1)..(422): unsure at all n locations
gggtcgaggcgatcgtctacgtcagcggcgatggcgtcctcgtggagcttgtgaatgggattctgcanagatcagactgggaggaaacaataaaaatgcaattggggtagttccagctggcacaagaaacggcatggccaaatcgcttctgcatgctgccagcgagacgtgctcagtttcagacgccgtatttgccattatcagaggtcacaagcaggccttggatgtttgcactatagcgcaaggggagaagattgttttcagcgtgctgtcaaccacctggggtttggtggcggatgttgacatcgagtccgagaaatacaggtggatggggagcgcgcggttcgacttttatgctctggttcgcataatgaacttgcgccgataccgcggaagtgtccacttcgtgcctgccccgggct

SEQ ID NO: 445362 - DNA, 494 bp, Triticum aestivum
  unsure (1)..(494): unsure at all n locations
ttnnntgccnnggccctcacagtcacgnnaggtcccgggncgacgntnaagcttacgtagcgtgcatgcgacgtcatagctcttctatagtgtcacctaaattcaattcactggccgtgttttacaacgtcgtgactgggaaaaccctggcgttacccaacttaatcgccttgcagccatccccctttcgccagctggcgtaatagcgaagaggcccgcaccgatcgcccttcccacagttgcgcagcctgaatggcgaatgggacgcgccctgtagcggcgcattaagcgcggcggtgtggtggttacgcgcagcgtgaccgctacacttgccagcgccctancgcccgctccttcgctttcttcccttcctttctcgccacgttcgccggctttccccgtcaagctctaaaccggggctccctttaagggtncgaattaatgctttacgggaactcgaaccccaaaaaacnaataagggtgatggtcacgta

SEQ ID NO: 445363 - DNA, 123 bp, Triticum aestivum
ggggaacacaaaaaggacggcgagcacaagaaggacggggagcacaaggagggcatgatggagaagatcaaggacaagatcagcggcgacggccacggcgacggcaagaaggacggcgagcac

SEQ ID NO: 445364 - DNA, 421 bp, Triticum aestivum
cgggtacctgcacaagtgtcaaaggctttgaggtcgttcctgatcgatcgaattctcagcaaaggatacctacaagcctacagcattactagtactagcatccatgtgatgcacatgcatgctgcatatatatgcatgaactttcaactggagataactcagatgacatgcatgcaggttgcatacatggaacttgagatagggaaaatgtttcgtgttttcttctgagtctatgtttttttcttctgcgtttatgtactcggtttccttacggccatgctcgaaactttttcaaggggagaccgggctcccataactcttttctggaccgtccttttcctgctgggctctttcggccgtctgaggacacttgctggacataaggccttcaagataatattctctgtgcagtgggcctggt

SEQ ID NO: 445365 - DNA, 399 bp, Triticum aestivum
gggtaacactgttagacgacgatttgactgacgtacgtttcgatgctgaattttcagtatctctctgcatgctcactaaatacgtccacaacagcatgctgacacgcgctatgacgtgttacattatattacatgagtctcgattagtatcatctgtctagaggagtatgattcacttgtcatacactgccatcctgcccattaaggagtagttgatgcaaatatatatgacggcatatgctcgaacgaataaggatgctgacgctaagtaagatgattacacaacttcaaccaattagtactaaatgcagtaacatgcaccaatcatggccaattgatttggacacacacagtgacaaattggtcgaagttgaacatcgacttgactaaaccacatca

SEQ ID NO: 445366 - DNA, 499 bp, Triticum aestivum
  unsure (1)..(499): unsure at all n locations
ggnnnnnnngtactgttanactggcngnctcannnctanggnctcntgtggtcgangngtnnccaatngnnagtcgnactagaggatccaagcttacgtacgcgtgcatgcgacgtcaanctcttctatantgtcacctaaattcaattcactggccgtcgttttacaacgtcgtgatgggaaaaccctggcgttacccaacttaatcgccttgcagcacatccccctttcgccagtggcgtaatagcgaagaggcccgcaccgatcgcccttcccaacagttgcgcagcctgaaggcgaatgggacgcgccctgtagcggcgcattaagcgcggcgggtgtggtggttacgcgaacntgaccgctacacttgccaacgncctagcgcccgctcctttcgctttcttcccttctttcttgccacgttcgccgggtttcccccgtnaaagctccnanatcgnggggntcccttaaggggtnccnacttanttnctnnaag

SEQ ID NO: 445367 - DNA, 60 bp, Triticum aestivum
  unsure (1)..(60): unsure at all n locations
gngttgntgttnttcgttnttcttngtaatnctgtnctntntttgtgtgtttgttttttt

SEQ ID NO: 445368 - DNA, 493 bp, Triticum aestivum
  unsure (1)..(493): unsure at all n locations
gcgngnngaacgttattcgnccgccccggtccaaantaacncgggtcgaccncaaanaaatgattagggtgatggttcacgtagtgggccatcgccctgatagacggtttttcgcccttgacgttggagtccacgttcttaatagtggactcttgttccaaactggaacaacactcaccctatctcggtctattcttttgatttataagggattttgccgatttcggcctattggtaaaaaatgagctgatttaacaaaaatttaacgcgaattttaacaaaatattaacgcttaaatttaggtggcacttttcggggaaatgtgcgcggaacccctatttgtttatttttctaatacattcaaatatgtatccgctcatgagacaataaccctgataaatgcntcaataatattgaaaaaaggaagaagtatggagtattcaacatttccgtgtcgcccttaaatcccctttttgccggaattttgccntcc

SEQ ID NO: 445369 - DNA, 204 bp, Triticum aestivum
acaaggttgtgggagctatcaaggaggaactgacgaacaaggttgggctacacgcggcggcccagtaatcacctagcggagtagtattcgcctaaataaaattgtggctcaagaagcggtgcctctaatggcaccttatatcctgtgtactgcttgttacttgttggttggatgatggtgaatcaagtgtgactttattcggtg

SEQ ID NO: 445370 - DNA, 486 bp, Triticum aestivum
  unsure (1)..(486): unsure at all n locations
gggnnngtnctttanattggccagcccngtccaaccanaangggccggccgacgagctcctaatcggcggccgctctagaggatccaagcttacgtacgcgtgcatgcgacgtcatagtcttctatagtgtcacctaaattcaattcactggccgtcgttttacaacgtcgtgactggaaaaccctggcgttacccaacttaatcgccttgcagcacatccccctttcgccagctgcgtaatagcgaagaggcccgcaccgatcgcccttcccaacagttgcgcagcctgaatgggaatgggacgcgccctgtagcggcgcattaagcgcggcgggtgtggtggttacgcgcaggtgaccgctacacttgccaagcgccctancgctcgctcctttcgctttcttcccttccttctcgccacgttcgccggcttccccgtcaangctctnaatnggggggcnccctttnaggttcccgatttagtt

SEQ ID NO: 445371 - DNA, 374 bp, Triticum aestivum
  unsure (1)..(374): unsure at all n locations
agctccctctacgacggggattgcaaatgcatggccgcagtctccaagatcctttcatcgtaccctgggccagccagacgccttgacatccgcatgttcattaccaactgcaaggtctaagccaagtacggcgagtggttcttatcgccctcccttgatcaactcgaggagctcagctttgaagctggatgatgtcgctctctgccgccatccgcgctccgcctcacgccaacgctgcaccgcgccagcttcagctcctgctatcttcnccagccgcgcctgtccttcttctccctcaactcaagcagctcgacctcttcgacattggcatctcgaagcaggctatggagcacctgctccgcaactgtactatg

SEQ ID NO: 445372 - DNA, 112 bp, Triticum aestivum
gggtcaacattatagagcattgccccataaaaaacaaaaagaaaaaaagaaaaaaaaatggggggaaggccaaagaagcctaaataaaaaagggggccaaagaagcccaccc

SEQ ID NO: 445373 - DNA, 69 bp, Triticum aestivum
gggttcacgacagaagatcgtgtaagttgttctggtgccattcgaaatggttcaaaggtaatggattga

SEQ ID NO: 445374 - DNA, 453 bp, Triticum aestivum
cgggtcgaccggtcacggtaactgcgacgagctcattgtatgccaatctcacattgcatggtacgatctatgtaagataaaaacaaataacagacacaatacattagtggaaatagcataaaataacaaaaagaatgtactgtcagaaggttcatataaattgttaccgctgcaaaaacaaaagaaggctggaagtagatgccgaacagcgtggcagtagaaaggctggtccggcaccgtgagttgcagcatccacattgtgcttcctccattctacacagaacgtgttgaactctaagttgaattgtacatagtacaatacacagatcatacatataatacatcatagtgataacctatactggcaatacccaatcaatctattttctatcatctacgtaatacaacaatgccaatgacaatggcaatgcccgtctaatctaaacctgggaa

SEQ ID NO: 445375 - DNA, 398 bp, Triticum aestivum
gggtccatagaatgtcaagctcctctttcagcagccccagatacagattgatgtcgttccctggttgttttggcccttcaattagcatactcatgtgaatgtacttcctcttcatgcacaaccaggggggaaggttgtacatccacacaaacacaggccaggtgctatgtgtgcttctctggctgccaaatggattgactccatcggtgctcgcgcccagcacgatgttccttggatcgttcccaaattctgggtattcgaagttcaacgcttgccactggctcgcatccttacggtgactcagcatcttgtcttttttatctatctccggatcatttgcgtcaacttctcgcttcttcccctccctacccgcctgccaacgcaggagctttgctacc

SEQ ID NO: 445376 - DNA, 361 bp, Triticum aestivum
ggttgatacacacttgattgaaggagccggtcacttccaaatggaaggtcctgcttttgatgcccagatggtagatctcattgtcaattttatcaaatctttgcccaaatagtgtactgtaactgtgtgaaagtgcgcaaagcgtgtagtgatgaacatcgaaaacatacgatttggatagtgccttcatggtttgtattttctcgtgttgtatgtgtacactgggtgttgtgttcgagatagtaatcaaatcttagtttccatttcatatgagttttagactcagtgatgcaagccgcatggaaaatcttattgtcatcacgacattgtaatccaatcttattattgtttgtatagccat

SEQ ID NO: 445377 - DNA, 426 bp, Triticum aestivum
gggatcttcctagatgatgataggcgcttcagcatcaagctggactagaacttcaaagtggatacagtaagtcacaacgacaagtcttttttcgtaattaagcatgacatctgcttcatttgcttcaacttatattttttactattctactagcgtatcccctgccatgcaagagtttttgtattggataagataggtttcagtcatagtatggaggaaaagaaagtttacttgaagaccgagcatggttatattttccatgcgaagttatacaattcagacgactacacctattttggatgcaaaacatggcgagcactatgcaagacttatgcaattgagccctgataagggttatcaccctttgaatatccgtcgggaagatgatattgaaggtaataccgacatctgggtcaatgtgcaaat

SEQ ID NO: 445378 - DNA, 98 bp, Triticum aestivum
gacgggaaattcaccatgatgagtagcacattatcgtcatgcagttcacggatgtccatgtgacgctcgtcagtctcaagcaccatcgtagtctgctt

SEQ ID NO: 445379 - DNA, 414 bp, Triticum aestivum
cgggtcgacgggcaaaacaaatcactggatactttcagcgacgacgttgatgagctgaacttcagagtcaaaggtgcgaaccaacggggacgccggttgcttgggaagtgatatcagagtaggagtcaggctgtgtggaaccactgtgctgcccatgcctttgacagttaattttgactatgctgtggagcctatagtgtgtttctgctgctatattcctatttcataactgttgtttttttggcaaatagtcatattcttgtattgtattgtactgtattgtattcgggtccattgtattagtatgttgatgtttcctgattttccttgggttgtatgacaactaggtcagttactggtgttactccacatagccaccttcttttttggacatgtatgttttgctgctgtaat

SEQ ID NO: 445380 - DNA, 432 bp, Triticum aestivum
gggtcgacgggagcagcggtcaggaccacgggcatggctgggtagtgacatgtgcgtaagcaatgtcgagcgtggcggatgacgccaagatgagattctccatatcgttatttcctctctctctctctctaccaatccttcttgcttcccctctgtctctctcaatgccactatatgcaggttctgacatgtgcttttgtttgatcccggcttgattttttctttggtaagattcaatgatggttgatgcaagcccatgcttctcacaagttggattgaagtttgtcgttcctctatttgtactattgtttccttaccaagtactatcagtactggggtagaaaacacttacctattacatagttctttgctgacagccgaatgtgatgtttgaacggtttcccctatatgcaggaagtacaatttgcatgt

SEQ ID NO: 445381 - DNA, 242 bp, Triticum aestivum
cgggtcgacgcggaggcgagagcgtaacctcagtcaatcgtgggttcgttctcgtggctcggtcaccacagtagtcgtgaaatacatcagctactactgatgtcatcggtgatgtgcatgactaattagtgacaaataatgtggcggaagtcactaatgaactcaatcgactttgataacttagtaccctattcatttacacctgttcatactgttcaagccatacccactaactgttcact

SEQ ID NO: 445382 - DNA, 398 bp, Triticum aestivum
gggggacgagaacttcaaagtggatacaataagtcacaatgacaagtcttttttcgtaattaagcatggcatttgcttcatttgcttcaacttataatttaagcatgacattaagcatgacaagtctttttttactattctactagcgtatcccctgccatgcaagagtttttgtattggataagataggtttcagtcgtactatggaggaaaagaaattttacttgaagaccgagcatggttatattttcaatgtaaaattatacaattcagacgactacacctattttggttgcaaaacatggcgagcactatgcaagacttatgcatttgagcctgatatggttatcacctttgatattcgtctaaaagatgatattgaaggtaataccgacatc

SEQ ID NO: 445383 - DNA, 322 bp, Triticum aestivum
ggggcagtagagttggcctgaggccagaccatataatagatacgggcgtgttctacacaggagttcttgtagaacatgttccagtcaaacctcgttcccttcgtctccggttttcaataccaacacctgtcatcctcgtctcccatcgtttggatggaatagccacatggagctgaccttcactttacagagacaggggcaagccgataatttgtagcctccctggttgtattctggaaatttcagtagaactgaatccctgtaggagctcactaaagactctagctaagacctttttgagacgctgggtgactcgcgtgga

SEQ ID NO: 445384 - DNA, 239 bp, Triticum aestivum
gacgggaaggttaacaagctgattggcctgatagtgaagtggctgaaacccggtgggcatatcttcaccagggagtcctgcttccaccactctggggattcgaagaggaatgtgaacccgactcactactaggagccacggttttacaacaacgtgtctatggaatgccactcctatgaacgtgatgggacttccttcgagccttacccggtactttccatgtgcatttgagtttatgt

SEQ ID NO: 445385 - DNA, 296 bp, Triticum aestivum
ggcgctttccggatgaggaggcggagggattcgtagagggtgcagatctagctgaagaggactgaactggaagtagttccattgcactggccactgggtgaagtgggggatcaagaaaaaacctgtctgttttatgtttttattacctatctatgggtttctgctaatgtacatatgtagaccacatgaattcatgccctttcatgaggaaataagaacttaactgaattcgtgtaaccttttcttgtcatgtgcaacactcatcaatattgagatcagtagtactgcgtttaccg

SEQ ID NO: 445386 - DNA, 321 bp, Triticum aestivum
acgggacaactagtgtctcggagggcacgttgcgcctcaagtgcttcagtatcacgtcgctgttgttgttgacggagagcatcagtgtcttgcccgtcttggtgttggcatgctcgctcttcctcttattggcatatgcatttccgttcttgtgcttgccaaacgtagcttgattttggcgatgtcgatgttctttctcttcaggttgctcttgtgtagcattgccatgtagagaagtgcactttggttgatggtcttggcatgctgctcgacgtatatgttggtgtgcttgatccagatatggtgttatcggacatgttg

SEQ ID NO: 445387 - DNA, 119 bp, Triticum aestivum
tcgacaggggagttcatggccggctgattccatcctactactgtacctactatacctgtagttcaccagcactgctgctacttcagtagtcatccttgaacactattggtctcaatatt

SEQ ID NO: 445388 - DNA, 350 bp, Triticum aestivum
gggaggttcaaaggagagaagcgacagagttagaagttgtaaatatgcattgttgtatcgcgacctgaatgaaataaacgaaataatgctcttgttcacaaaaaaaaaaaaaaaaaaaaaaaaaaaaaaaaccaaaaaaaaaaaaaaaaaaaaaaaaaaaaaaaaccggccgcccaaaaggttcaagcctaacttacccttcaaggcaagttaaaacccctccaaaatttcaaccaaaatcaatttaatggccctccttttaaaaacttcttaatgggaaaaaccctgcgttaaccaaactaaacccctttgaaaaaaatccccatttcccaagcgggctaaaaacaaaa

SEQ ID NO: 445389 - DNA, 323 bp, Triticum aestivum
gggccgtgagagggagatcaaattctttttgctgtgctctttgctgtttgcaggtgatagtttgagagagggtatacggccggcgggagagactgatcccggagagatcatccatcgccggcgcgccattgacgcgaaatgtttggtttctttttgtgcgtggtccggagaatccagccatacacatgcagtcttggtataggagaggaaaaagaagaaattggtgtaatcctgtatttgaccggcaaaaatgatgctgtttgtatatagattttttaatcagagcctgatttattagcaatacggcgcactggctcacgtac

SEQ ID NO: 445390 - DNA, 80 bp, Triticum aestivum
ttcgcgggtcgacgggataatctagagtgagtcgttgtagattcttctgacatgtttgatcattatgcgatccttgacac

SEQ ID NO: 445391 - DNA, 336 bp, Triticum aestivum
gactgaaactccagcaactcctcttaacacgacgcacctacggatgccttgacgcgtcatcgctagctgctccgtttgcatgttgccaccacgccggctcatcttcgcgaacattgattgagacgagagtcccttagtatgtgcttctccgtctacacaaggttgcacctgcatcgcctgtggtcatcatcgctgacaactacatcgcctcccagcattgtcgccgccaccaccgctcatggtcttggttaatgccaacgggttcttcttcgcagccactagcgctgccatgcgactacatgtggatgactcatgtttaatccgccacatcgagta

SEQ ID NO: 445392 - DNA, 417 bp, Triticum aestivum
  unsure (1)..(417): unsure at all n locations
cgggtcgacgcggtcgtgatgtattagtgataatattcgacgatgtactgacgcatgagatgatttacttttgcttattgaatgcatgctaatttgagtcctataagatattgtgaaatgtatatcttgtgttgctcaatatccaagtggccgttcatgtttgcaggttacaccttcgagtggcctatgttttgccggagtgttgattcatttccgttccggcaaatttcaggcgctcgatatgtcctattttagcaaaggtcatgtcggatttttccatgaattttggcatgacttgtgtcagaatatgtaggaaatatcgagtgccctggatttgtttgagtatcttggtagttgtcttcgattgattttcaattaatgttttaactatgaacatangaaatgtctgacgacgag

SEQ ID NO: 445393 - DNA, 426 bp, Triticum aestivum
gggagaaagtatgcaatagattgaataaatagatagcaaataaaataaagtgcagcaaagtatttttggtttaatagatctgaaaataaatacaagaaaaagtagatcgcaaaggcaaatatatgagaaagagacccgggcgccataggtttcactagtggcttctctcgagaaaaatagcaaacggtgggtgaacatcaaatactcatgacgatatccaggcaatgatcatataggcatcacgtccaagattagtagaccgactccttcctgcatctactactattactccacacatcgactgctatccagcatgcatctaatgcaataagttcaaggaaaaattggagtattgcattaggaacgatgacatgatgtaaacaagatctatctatgtagagatggaccccatcgttttatccttag

SEQ ID NO: 445394 - DNA, 70 bp, Triticum aestivum
agtcccgggcagacgggtaagttatacattcttacgaaacgcaaatgggcaataagtactctgccaaaca

SEQ ID NO: 445395 - DNA, 408 bp, Triticum aestivum
  unsure (1)..(408): unsure at all n locations
ttgacgggtccaacgctaaactttaaaacagacactatttgcttgtgcaccggtccggaacagtccgcggacaatgatacagaaatcggcaatccaaccctgtctttaaacgtttgtccttattttctcttaaatacacaacattcaacataatcatagaaaatggcataattcatacataaataacatgcaaatatccataagggcatctccaacgtaggcctcaaaacgaacaatatacttgcccgtggactggtctggattgattcatggacattggtacgggagccgtccatccgaccatgtcccctagatgtctgcttctgtttctttttttaagttttcgagctcaaaataatagcatagcaaatctgcgatcagagagnatattcagatgggacaattttt

SEQ ID NO: 445396 - DNA, 68 bp, Triticum aestivum
gacggggataaatagactgtgtactacaatgttatagccatatagtctggcaatactattgtactggc

SEQ ID NO: 445397 - DNA, 337 bp, Triticum aestivum
ggggattttaaccatgatagcgtggctcgccgtgcattgaaaaatacatgtctcgcttatcttgcatccctgaatgagcgagatgtcactgaacttgcattaactgagtacaagtctgctacgatcatgaccgagcagtttgctgcattagcagcattgtctcaaaatccaggtcaagtccgtgaggatgcccttttggacttctataacaaatggctacaagattatttggttgtaagcaagtggtttgctcttcaagctacctcggacattcctggaaatgtagtccatgttcaaaagtgactggctcaacctgcttttgacatgccgaatccgg

SEQ ID NO: 445398 - DNA, 484 bp, Triticum aestivum
  unsure (1)..(484): unsure at all n locations
gggnggaatttattcggcgncncggtccaaaaaacccgggtcgacnagctcactanncgcggccgctctanaggatccaagcttacgtacgcgtgcatgcgacgtcatagctcttctaagtgtcacctaaattcaattcactggccgtcgttttacaacgtcgtgactgggaaaacctggcgttacccaacttaatcgccttgcagcacatccccctttcgccagctggcgtaatacgaagaggcccgcaccgatcgcccttcccaacagttgcgcagcctgaatggcnaatgggcncgcccngtaccggcncattaaccgcggcgggtgtggtggttacgcgcagcntgaccgnacacttgcaagggcncnaacgccngtnccttnnngcttnctcccttcntntcnncaagttnccngggtttcccgttaanngctnaaancgggggggnccccttaaggggtccnaatttaaggccttang

SEQ ID NO: 445399 - DNA, 89 bp, Triticum aestivum
gagcatggcatatactttgtttgtatagttaatagacttatgcaatatgtatgtgagttctttatgactgatgttgagtacatggacta

SEQ ID NO: 445400 - DNA, 424 bp, Triticum aestivum
  unsure (1)..(424): unsure at all n locations
cgggtcggccgggtgacggctcaagagcggacggacgcggtgcctccggcgacaagtccgacgacgacgaatgacctccgtaagatactgctgactgcaacatgaacacgaaccgtcggaggagccgtagtccagttgaagtccacgatgaccactctaaagggagtgacggttatggacggaaagagaacatgagagatctacagaatgatagtcatgccagaccaggcagaggtcatgaacttgtcaggcattctgatatgcatgcctatggggcttcacgtgaatccangatgcatgatgattataggacgtaccatgatgtacgtgctgatgatgaaaggagccctccttagaacttcccggccaaatcgggagtcaagggctgacacttactatgattcctcaaaccgtgatggcacat

SEQ ID NO: 445401 - DNA, 411 bp, Triticum aestivum
cgggtcgaccggggtagagatcgcaacatagtctatcaattcaatgcccggggcagaaatacaaatggtagaggagggcagcgcactgggcgcggtcacaattcggtctaccgtcaggttgatgttggaggaggcaaaactttaaaccgcaagatactgagacagtgatcaagaagcgacagagtgaggagaatgattcttcagggtccaaagatgatagccgtgactcaaagaagaaacaggcagagaaggatgttgctaagactctggcggaggctgagcatcagccccgcggatcacaatgaatttcttttcatggaacaatcgcgggcttgggaacccggagacagttcgagaacttcatagccttatgaagatggaagggcccgccttggtcttcatgtgtgaaac

SEQ ID NO: 445402 - DNA, 351 bp, Triticum aestivum
gacgggtaaaacaattccttcacataccggacacgttctctctcgatagccatatactacctcggagatggtgtagtttacaagcgacctctagtcagtcttctgcgacacatgcgcaacatttcaccacaccctacaaggaccatacgactatactgtgccaggtcccgagtatttccagcatcatgtgatttttgtttgattttaacggctggatccggcatgccgccaaggtacattcacctccctggggtggggcatgcccctccttgggttgcactaggcctactcatagctcaaatacatcatatatgatttgacaaacgacctctggacatcatttcaggtggc

SEQ ID NO: 445403 - DNA, 419 bp, Triticum aestivum
gggctagactacggtgttgaggaaggtggtgcctgtcttgtcgaagatgagagagggtgcatgtgtcataaccttttggtttggataatttatcatttttcttataaaattccctctcattattgaactacaattagttacatcatctatctagtaagagacgaatgagttcaacaggaagttagtacaatatgggcccttggacattaatttgcgctagctcatgggcaacctcatttgattctctaaagtaatgcacacaattagtactaggaaagtcacaagctagatggtagcaatcagccacaaccgcagttgcaggttccattgatctccctctttctttttttttgcgggaccattgatctccctccatcattcattgagtttactagttcaaattatccgaatttaccaaa

SEQ ID NO: 445404 - DNA, 181 bp, Triticum aestivum
acaggctagattagcacatggtatagggggtcgtgtatagtttttgttgttctagcctttgatctgatttaacaactaggcttgggagtctagtgcgggatcatctgagttcgctcccgtgggaaatcaactccggagtcacgtctcggatgcatctgactgattttagatgggagagaat

SEQ ID NO: 445405 - DNA, 304 bp, Triticum aestivum
gacgggaacatcaacttttctgaccgtttggagctgcggcctaaaccttcctgtaatccctggagcttcgtcagagccttttccttccccacaggccagagctcaatttaccttcgccagagctctaagataaggagaatcagctcaggataaaagggctcgcactcaattgatccgggtcaacacttcctgtatctggtttcggcttggttttgactccttgtaggggctcatgacagtcctgtaggggatacaaaagctttccgagcagtagcggcagctgggcgggagagttggttattca

SEQ ID NO: 445406 - DNA, 488 bp, Triticum aestivum
  unsure (1)..(488): unsure at all n locations
tggtgnttggatgtaacttncncngctcgncannagtctgaannncccgggccgangngtanccaatngnnagtcgtactagaggatccaagcttacgtacgcgtgcatgcgacgtcaagctcttctatagtgtcacctaaattcaattcactggccgtcgttttacaacgtcgtgatgggaaaaccctggcgttacncaacttaatcgccttgcagcacatccccctttcgccagtggcgtaatagcgaagaggcncgcaccgatcgnccttcccaanagttgcgcancctgaaggcnaatgggacgcgccctgtagnngcgcantaagcgctgcgnggtgtggtggttacnncagcgtgancggtanacttgncaanngcctangtncncngnnnccttcggctttngttccnttcngttngnnggcaacntttgcgggggnttnnnccnnttcangcnnntanaatngggggcttcnctttnttg

SEQ ID NO: 445407 - DNA, 78 bp, Triticum aestivum
ggagtctcgaggagcccacgagatagggggtgtacgtaggtttctgttgctctagcggttcgtcagggcgagcagata

SEQ ID NO: 445408 - DNA, 491 bp, Triticum aestivum
  unsure (1)..(491): unsure at all n locations
gtgnngcaacttnnatctggccgtaccgtgtccaaanacaccgggtcgnccgggcttacgagtgngatcttaccaaaaaaaaaaaaaaaaaaaaaaaaaaaaaagcggccgctctagagatccaagcttacgtacgcgtgcatgcgacgtcatagctcttctatagtgtcacctaaatcaattcactggccgtcgttttacaacgtcgtgactgggaaaaccctggcgttacccaattaatcgccttgcagcacatccccctttcgccagctggcgtaatagcgaagaggcccgcccgatcgcccttcccaacagttgcgcagcctgaatggcgaatgggacgcgccctgtancgcgcattaagcgcggcgggtgtggtggttacgcgcagcgtgaccgctacacttgccancccctagcgcccgctcctttcgctttcttcccttcctttctcgccangtttngccgggttcccccgnncaagcnctaaa

SEQ ID NO: 445409 - DNA, 244 bp, Triticum aestivum
gggctacgagaggacgacgagatcaacatagtgctgcggcgttgatggctgggctagctccatggtcaagcggctcgctgcattcttttccagaggttgtatatgtagaatatcagaaggagcacacatgggaagataggtcaacaggattgtggccgcccttccacagtccgatgctgattccttcttttaagactcgggaatctgaaataccaccgagaatgttttccgtttcctgtagttc

SEQ ID NO: 445410 - DNA, 432 bp, Triticum aestivum
attccgggtcgacgggttcgcttataagccatgaatcttcacaaattatagctcgtttctaagaacactttttttaaataattcccgtattacaagtttattatttttcctggaaacttggtcacatatgatgacacaatgtgaaggttttccaattttttgaattttttatgcccgtttcaaaatgcggtcaaaacggcgggcttgaccgttcctagctagtggttgaatcttggaaaaaattggatgtttctcttattaaatagatacttatgtacctagaaatgatttttggaaaaaataaatagcaaactatgaggcagctacagttcaaatttgacccgcttcctactgaatcggccgaaatttgtcttttcaccagagatggaccaaagcttttgacacccaaccattttgttaaatgtgcaataa

SEQ ID NO: 445411 - DNA, 316 bp, Triticum aestivum
gacgggtcatactatattaagtctttcaagaattgcatcattgaccaatgctatgcttgtcaacttttaataaattttactatttgtacttttccgtatgtgatgtcattacttaccataagattagcctatgatatttctcattattttcttttagttggttgacataagaaagtatagaagcacaaactcatactaagccttattatataactctcactcgattacatagatagatagatcacgagactaagacttgacaatagatcagactaagcctttattcaacttgtgatgatcatcattattcattatt

SEQ ID NO: 445412 - DNA, 360 bp, Triticum aestivum
gggttaatccacgtcaatttggaatctacaggactttccacaagttctgctgttaagtaccaccataatcagtggctgcgttcatgggcatattcaccagcgcggcgtaccgctatagctgacagaaagtgtgctttctcagcatgaagataatataatgggaaggaatattgcgtcaagaagaacgatcgggtagagcttatcacggcaagctacaggtcgtacctagcagacaagcattgtctcatgaaagtttactttttgtagatgtacaaattgatgtagaataggtgaatttaatttcatctatacatgatcaattgcttgctgtacatttgactaaataaagcaataaatcag

SEQ ID NO: 445413 - DNA, 303 bp, Triticum aestivum
acggggactccatctttgacatgggcttcccaccttacacgggaggggtcatgttatggggatattccatcggcgcaaaatacatccacggcaagttgcatgagtgtgcgaagcggtacggcagcttcttcgagccttgctcctacctcgccgaaagagcatcaaaggggattcctctgagtgcattagcatcaactcaagtcaagtcgcggctatatgtgattgtaggcctggtacttctgtcagctgaatgaaattatgccaccgagttatactgcgcgatgaaggttgtgaactggtgag

SEQ ID NO: 445414 - DNA, 265 bp, Triticum aestivum
acggggatgacaacggtgagagagagatagagcacggcagtgggaaactagctgtgtagggctcagccgtgggaagctatctatgtagggcacggtggcattgagatcccattcggcttcgtgctccatctctgcctcacgcttccgctaccattcgcagatgcagatcccggcgcgtgtgcacatgtccgtcgtcgtcggtctgctctgcccggcgggcgttgataggagcgttactcatccacggatgagccgtattcatccg

SEQ ID NO: 445415 - DNA, 385 bp, Triticum aestivum
gcccttagtggaggggtccgaaatcaaccctatctcttgtttccccacacatacggactctaaaaatagcctatacttatgtatttcgaaattacatgggcctggcccaataataaggcgacgcagcacctaaaatagcctcagaacgaaatttatgaagtggcatgatgaggacatgactaccttggatatgaccaaaaatattgcatatatgcatatttgtcaggtgatttctagtgcaaactattcaataatctatttatgttatccagaacaaaaatacttcacacacttttgtgttttgtctaattgcaggtgtatgggacatttgtacaatccacatatgaagataaggaaccacgaaattttaatttccgtccaaaaa

SEQ ID NO: 445416 - DNA, 384 bp, Triticum aestivum
cgggcgtaatcagtatttccgggtgcactcatcgaccactgagttaggattgtgacaatcgctcgctccttgatcatatcgtattgccctgaaaagcaagattgttctcgagcttaataacagatcggtggtttgtgattttccggatatcttctctggaagtgttactatgttgtcagctgaccgctatgttgagttcgtgatcaagttggatttcctccaaaccacccttctccgtctgtcctgcttggtttgctcgtcgtcttagagggtgtgcgtgtgttcatgttggagtgtgatgtctgggcgcgtgcgtgtgtgtatgtataggtctcggtggtgtgggaggtgtccagtacgtgcgccagagtgccattccttgtg

SEQ ID NO: 445417 - DNA, 247 bp, Triticum aestivum
gtgaattcagtcttaactgatgtatcagcagatagatcgactccacaattatcctatacttatgtatttcgaagttacattggtctggaccataagtaaggcaacgcagcatgtaagttaccgtgagaatgatctttatgtgagtggcatgttgatgatatgactatcttggatatgaccaataatattgcatttctgcctatttgtcaggtgatttctattgcgcacgattcgatactctatttat

SEQ ID NO: 445418 - DNA, 322 bp, Triticum aestivum
ttcccgtcgacgggtgacatcactacagctattgacacccatgttgtacccactgaagaagtatccaatgatgactcattatctacacgcattctcaatgaaactacccttcaactatacacatttattgcaacatcaactcatataatcatctacatgtacataaaaacgatcaaaacacaattcataatgataataatgagaatgattagatctacattaaatattgctaatgctcatatatggacattgccacgatcagaaaagataataataccgatagcaaacataatgataaaaatacctccaacgagactggacc

SEQ ID NO: 445419 - DNA, 233 bp, Triticum aestivum
acgggtaacactatcatctgactcgtatcagggttggtagattttttgttcctggaattcgccatcgaatttcggttttcttatgcaatgtgccaatgttgactatcccgttcaactgttcggcggtgacctgggaccgtagctcaattgcaagcggcactctgtttggtgattttgaagtaaatgctggtacaacagatgccggtttattaatcattcagtaggggtataca

SEQ ID NO: 445420 - DNA, 475 bp, Triticum aestivum
  unsure (1)..(475): unsure at all n locations
ggnnnnnnnnnnnttttnnnngcccgtaccgggtccaanaattcccggggtccgacgaactcactaatcggcggccgctctagaggatccaagcttacgtacgcgtgcatgcgacgtctagctcttctatagtgtcacctaaattcaattcactggccgtcgttttacaacgtcgtgctgggaaaaccctggcgttacccaacttaatcgccttgcagcacatccccctttcgccactggcgtaatagcgaagaggcccgcaccgatcgcccttcccaacagttgcgcagcctgatggcgaatgggacgcgccctgtagcggcgcattaagcgcggcgggtgtggtggttacgccagcgtgaccgctacacttgccaacgccctaacgcccgctcctttcgctttcttcccttctttctcgccaagttcgccggctttccccgtcaagctctaaatcnggggctcccttaagttc

SEQ ID NO: 445421 - DNA, 109 bp, Triticum aestivum
  unsure (1)..(109): unsure at all n locations
tgtcncctaanttcaattcacnggccntcgttttccaccttcgtcacgggnaaanccntgcnttacccaccttaancaccttgnntannatccccctttctcnncnggg

SEQ ID NO: 445422 - DNA, 491 bp, Triticum aestivum
  unsure (1)..(491): unsure at all n locations
gnnnnnnggnnnnnnnnngnttcgttagcccggncggtaccgntccaaaattcccgggtgacgagctcactagtcggcggccgctctagaggatccaagcttacgtacgcgtgcatgcacgtcatagctcttctatagtgtcacctaaattcaattcactggccgtcgttttacaactcgtgactgggaaaaccctggcgttacccaacttaatcgccttgcagcacatcccccttcgccagctggcgtaatagcgaagaggcccgcaccgatcgcccttcccaacagttgcgcacctgaatggcgaatgggacgcgccctgtagcggcgcattaagcgcggcgggtgtggtggtacgcgcagcgtgaccgctacacttgccagcgccctagcgcccgctcctttcgctttctcccttcctttctcgccacgttcgccggctttccccgtcaagctctaaatcgggggctcctttaaggttccgatttaat

SEQ ID NO: 445423 - DNA, 402 bp, Triticum aestivum
ggggggctgaaagaggttttatatcaccctttctgggaacaactgatgcatcagccagatataacctggacaaaaaggctttcttctcttcagcactttctttgcgcgtgccagtatctgaggatttcttgagtaactgaagtactgattgcagtgtctcaatcttttcaggatttatccctggggagcaacgatgtttccagaagtcaacttccctgtcacggtgccatgcacttcgtctccttcctgtggacgatgcatacaacttcttggtcagattctcacgtatcttgcccttttgaagcagtgacttccttgcgagtgaaaggttgggttttttggctggtccatccatggacttcccaattgctgaacggaatgcggtcaaaagtttttcgtcaa

SEQ ID NO: 445424 - DNA, 477 bp, Triticum aestivum
  unsure (1)..(477): unsure at all n locations
ggnnnnngnaatttacgcggccngccggngtcnaatcanncaattcgccgnccnacgggananccanagggcgctctagaggatccaagcttacgtacgcgtgcatgcgacgtcatagtcttctatagtgtcacctaaattcaattcactggccgtcgttttanaacgtcgtgactggaaaaccctggcgttacccaacttaatcgccntgcagcacatccccctttcgccaagctgcgtaataacgaagaagcccgcaacgatngcccttcccaacagttgcgcagcctgaatgcgaatgggacgcgccctgtaacggcgcattaaacgcggcgggtgtggtggttacgcgcacgtgaccgctacacttgccagcgccctagcgcccgctcctttcgctttcttcccttccttctcgccaagttcgccggctttccccgtcaagctctaaatccgggggctccctttanggtccga

SEQ ID NO: 445425 - DNA, 448 bp, Triticum aestivum
cggtcctagaatcccgggtcgacccgagactccaacactgctcatttcatgtctttgccattgtagccggccatgaactacaacacattggcgggctcgctcacatgcaatgacggcggccgacccattgtacacaacaacgtctaggcatctccacgacacgtgcgaccgcctgtgttttgctttagacccgatggcacacctgataacaaattctttccaccacgacaagcaatcatacttggttttctccgatcgttttatgatgagacacaagtacatgggcttaagcaccttagattgattcttctcggtgtagttgtgtacgtatacaaaacctaatcacatatgtatacaaaacaccctgatcctttagattaaacatttcctttggctacacatcacgtccacatgagactatatttaatggcaataaggtgttggtcct

SEQ ID NO: 445426 - DNA, 336 bp, Triticum aestivum
gacgggcaaatcgaaagaacaacaaaggaccgcgaagaacggtcagtcgtcgccgaacgggatcatgatcacgagaaatatctatatacgataataaggttgtgttattgccgccatgtccgttgacctgatgtttgtttcagctagagaaatcgttaagcccgctcataatttttcgacgccatggaaaataataactactggtatatcactctatatcaaaccggcttgtgaaataaatggttgcgccccggttttttgtcgtcaaaaaaaatgaacaaaggagttgtaaaaagccaaaaacttgcgaaagcgcataatataccaacgggctgt

SEQ ID NO: 445427 - DNA, 366 bp, Triticum aestivum
  unsure (1)..(366): unsure at all n locations
ggggcggactcctcccccgaagacgaggaggaggaagaagactctctcccggaggagggagagaggaagaggaaggcttccccaatangggaggctgaagggtccaagagggggagaactattcccccggacagctctgccaacaccaatgttggcgaggaggagtgcccttcaagggccaggcctcctgcgagatcgtaagtatccggatccctgtatattctaaaatttctttcgtgccacatagtgcctttctaatgccgcatagtatccgcagtccggccgatgatgatctccccgctttttcgagcgggtcgttggccccgtcggatgtggattcacttccgacggcctctactccccgcg

SEQ ID NO: 445428 - DNA, 393 bp, Triticum aestivum
attcgcgggccgacgggaccatttaccgggaccctctcaactttcttgcacatgctctgtggatgaaatgatgataccatgccaactttcaaccttttcagagttcattttgaaatgctttccaatttaagggcctaaaaccccaaattaatataaaatgcacggaaaataacaaatgaagtcacaaagtattgaaaattgatgatgtggctttgaatggtgcattttgaacacacaaaaagtcacgagttcaaataagttttaaaaaatcaaatccctatgtaacagacgagtttccgtatgaaatcctgatactttgaaagagattgtccgttttgtacacgaagtgcatccaccttttgccgggagcctctcaactttcttgcacatgct

SEQ ID NO: 445429 - DNA, 394 bp, Triticum aestivum
gggtcgacgggggaaagcgacgagcatagtgcgccgtgcactgtatcgctggccagaccatgcccgtgctctctacggcgagctccggcgtcggtgagcgccagggggaagttaagggggtggagacgacgatggtggcgaagcatggcatgcttgggccggttgggtaaccagcacgcgctcaacagagcactacgcggcacacagagcgcgtgttttgcatgccagcacaccgggacgaacgtggtcaccgcgtgaaccgtgacatcaggccaccctaagcgctaacctttatgtctggcgtgtagtccttagtagtttgaagtgttaccatggtttggcttggatccaggtgcagttgaaatagatttgtactgctggcaagtttctgggc

SEQ ID NO: 445430 - DNA, 430 bp, Triticum aestivum
ggggacttcctttctcaccacagaattactgacaagtgacagcagatggcacgataaaagactggtgattattatccatttcgtagggctagtacgagggaatgggagatcccgtcgtgtttagctctcactgtgctgccctcgacatatcttgtttttggagatctcccttgtcatttataccttagatcaattttgtttggtgaattgagatgttgcttgttcgagtaaatacgatgacacacttctgacacttccatcttacaatgggaattgagctgttgcttgtacaactttgttccatggaacaaatgtaactgtgttccatgttacaatgggagttgagctgttgcttgcaaaaaacattaactccacaatgagaacaacactcttaattaacaaaaaaagctacaaaatattccccaatacc

SEQ ID NO: 445431 - DNA, 227 bp, Triticum aestivum
gggaggaggaagacgaccgaaggaggagaatgaaaaagacctaagttgtacctatttataagggagtgcatgaacaagcgggcgcgagaatcaaggagacccgaacaatgattatccaaataaatggatgccttgattctcggaaggcattaaaaaatgaaagatccattggaagatgatgtcatgaaagttttttgtgttttcagaagatgatgtcacggcgggcc

SEQ ID NO: 445432 - DNA, 177 bp, Triticum aestivum
gggtggtaagaagagtttttgcagtaactgggggtgaaaggagaaaaccaaagaagaatgtgtacatatacctacggcttggatgattggttggtgaaatggagatattgttggttaattgatttagtgctgaaaaaaaaaaagaattttaaaaaaaaaaaagcgggcgctccaaaa

SEQ ID NO: 445433 - DNA, 76 bp, Triticum aestivum
ggggtactataatgcatacgagtacaaatgagtactgtataattcgatttggatcagtgctatagctgttcacatc

SEQ ID NO: 445434 - DNA, 425 bp, Triticum aestivum
  unsure (1)..(425): unsure at all n locations
ggggctggtgatcaccgggtgggcgccgcagctggagatcctagcgcacagcgccacggcggcgttcatgagccactgtggctggaactcgaccatggagagcatgagccacggcaagccgattctggcatggcccatgcactgcgaccagccgtgggacgcggagcttgtctgcaactacctcaaggccggcgtcctcgtgcggccatgggagaagcacggcgaggtggtcacggcgaaggccatacaggaagtcatcgaggaggccatgctctccgacaaaggaatggccatgcggcaacgggcaagtgcgctcggggaggccgtccgcgcctccgtggttgacggcggttcgtcgcgcaaggacctagatgatttcactgcttacatcacaaggtgatcgacanaatgccatcctggacgat

SEQ ID NO: 445435 - DNA, 363 bp, Triticum aestivum
ttcgcgggtccacggggccttcgtagacgtgccgaccatgctccacaccaacgacatcaacatcggcgaccaactggaggttatcatcaacaggcggcatattaacatgatgcagcacatgctctagctcaagtattcgcaccttatctcgatctccgccttcaaaaacccctgcgccaattccatcatactccaggcacctgtctctctgacacagtctgcactcgatgatgattatctacgtagattaaggcatcgacgtatacccaaggatcgtattcgacgactacatgttcctgtacatgcgccaaatctacgaggccaaagttacactgttcacagccaagtacgtaaatgccgcat

SEQ ID NO: 445436 - DNA, 293 bp, Triticum aestivum
acggggctaacgtagacgtgtcgaccaagttctacaccatcgtcatcaacatcggtaaccaactggaagttatcatcaacaggctgtatatataacatgttgcattacatgctctagctcaagtattccaaccttatctcgatctccgcattcaaaaaaccctgcgacaattccatcatattccaggcaccttgtgctcctgagcacttctgcactccagatatgatttacgtatattaaggcatcgacgtataaccaaggatcgtattcgccgaatacatgattcctgtaca

SEQ ID NO: 445437 - DNA, 483 bp, Triticum aestivum
  unsure (1)..(483): unsure at all n locations
gnnnnnnnnngnttcgttagccgncggtaccggtccanaattcccgggtcgacgagctcctagtcggcggccgctctagaggatccaagcttacgtacgcgtgcatgcgacgtcatagtcttctatagtgtcacctaaattcaattcactggccgtcgttttacaacgtcgtgactggaaaaccctggcgttacccaacttaatcgccttgcagcacatccccctttcgccagctgcgtaatagcgaagaggcccgcaccgatcgcccttcccaacagttgcgcagcctgaatgggaatgggacgcgccctgtagcggcgcattaagcgcggcgggtgtggtggttacgcgcaggtgaccgctacacttgccagcgccctagcgcccgctcctttcgctttcttcccttccttctcgccacgttcgccggctttccccgtcaagctctaaatcgggggctccctttanggttcgatttantgg

SEQ ID NO: 445438 - DNA, 425 bp, Triticum aestivum
gggttcgagtctcttatgatactcccacatattctgatatgaagaagacattttgcgttaatatgtgagcagttagtggactttttcaatgccaggaagttcaggatacgaatggcttaagggctggttaaaatgatgagttcactcaggacgctactgaagattactatgaaggaggaacatatgcttgtaagaattgcactaatgtcaagtttccgctctatgtgcttaacgttttgacgttatgcatgtgttcccttcctatgctacttgatttttgttcccctaagttgtttgctcacaaaatcactattcatatgaagtgggttaggcttaaatgtgctactaatatgcttcatgatgctctcattctgtctcaattcgtatcgtttatgcgagcatcattgaaatcatcatgccttagc

SEQ ID NO: 445439 - DNA, 111 bp, Triticum aestivum
tcgacggggttgtaatcattgagttgtaatcaatagaagtgtgatgatcatcattattagagcattgcccaaattaaaaaaaaggagaaaggccaaaaaaaaggaaggccc

SEQ ID NO: 445440 - DNA, 144 bp, Triticum aestivum
aagtcgacggggttgaattcagttaattgtaatcaatacaagtgtgatgatcatcatatatacagcattgcccacattaaaaaaaaggaaaaatgccaaattcaatgaaggcccaaataaaaaattacaataaagaaagaataa

SEQ ID NO: 445441 - DNA, 54 bp, Triticum aestivum
  unsure (1)..(54): unsure at all n locations
tctaacangggagagatggcganttcngttttggttccagcatgntnntcnccc

SEQ ID NO: 445442 - DNA, 419 bp, Triticum aestivum
  unsure (1)..(419): unsure at all n locations
ggggtcgattgctgacctgacaattaaacgtggaaagaaggttgtagcttcaagtaatggtacatcagttcaagaagctgaacagcgtacaattgaaagcatatgtaatcaggacaagacagcagcctcgcttatatgccagctcaagaaacgtcattccacacaaatatcaacaatgccaatgatgaaagatgtccttggtgttgtggctaccttaggaaaaacaaatgatgataatctaagcagcctactctcagagtacttgggaatagacaatatgcttggtctcgtttgcaagacttatgatggcataaagagtcttgaaacatatggcacagaaggcaacattgataagaaaagtggtattcatggactgggtggctcaattggnaagattctgcatgggaggtttacgtgtt

SEQ ID NO: 445443 - DNA, 425 bp, Triticum aestivum
gggtgccaacacaaatggctcaatggtcattgccactcacaggcgtcacctgcttgatggtcgaagacgagggaagggcgacaacatctaaaactccgcgttccacgacgccgagaggtaggctctctgacgcatgacaaggctccacgggggcttggtgatgccaggtccacctccgaatcctgaagagaccccaacttgagctgctccatcgatagaggtgaaacagataccacaatacatgcacacacccaaggcagaatacatgagctgaagattagcaacaacgcccgatacaagtccaagcaaagcacctcgctcgtcaccttctatatacataaatattatagaggttgtaatacagagaatctgaaatagctcttcacaccaaaaccttttaaaatagttttgttacctttttttgc

SEQ ID NO: 445444 - DNA, 423 bp, Triticum aestivum
  unsure (1)..(423): unsure at all n locations
ggggaaggagaagaagctcaagtcaaaaaagcacaggaggcgaagctattcttcctcagaatctgacagtgaatccgagagcgacagcgatcggaaacacaggaagaggaatgaccgcagaatgcacangaaacatggccactctgactctgatggtgccaggaggcgcaagcacaggtcaaagaggaggagctcagactctagcgatgagagcgacagtgatgaatatgatagcgaatctgaagaagagcgccgaaggaagaagcactcgcacaggaggaagcatcgccgtcactcttcaaggtcagagtctgatgcttcagattacagcagcgatgatgatgagcgaaggtcaaccaggaaggaacacactangagccggatgcaccgccaccgatcatcagacgatgaatccgangacaa

SEQ ID NO: 445445 - DNA, 469 bp, Triticum aestivum
  unsure (1)..(469): unsure at all n locations
gggnnnngnatttctaggcggcggtaccgaacagaaattcccggggctctagaggatccagcttacgtacgcgtgcatgcgacgtcatagctcttctatagtgtcacctaaattcaatcactggccgtcgttttacaacgtcgtgactgggaaaaccctggcgttacccaacttaatgccttgcagcacatccccctttcgccagctggcgtaatagcgaagaggcccgcaccgatgcccttcccaacagttgcgcagcctgaatggcgaatgggacgcgccctgtagcggcgcataagcgcggcgggtgtggtggttacgcgcagcgtgaccgctacacttgccagcgccctacgcccgctcctttcgctttcttcccttcctttctcgccacgttcgccggctttccccgtaagctctaaatcgggggctccctttangggttccganttagtgcttacgggcaccc

SEQ ID NO: 445446 - DNA, 104 bp, Triticum aestivum
  unsure (1)..(104): unsure at all n locations
aannccacnatnncctgccagtgnaangctttctgcgttcagtcnatcnactacaaagtaatcngtccctacngaaccnccgaaanggctgccgtccgntnggt

SEQ ID NO: 445447 - DNA, 402 bp, Triticum aestivum
  unsure (1)..(402): unsure at all n locations
gggcatatgcatgaggcaacagctgatgccgccgcgtcctgtatctgccagcccttcgtaggtcctgggcggtataagtacatttatatagcacctaggtagtaaaacagatggtctagccgatgtctacttctagtcctatctcaaatattttcttttctctcctctccatctgtttctcttttctgagatgagaaaataaaaaccttcagcagtgctaggccggcccaactctccttgtctctctctctctctccctagtttttcctccagcccagctgggcctaccagggcctgccggcccatcccctaaccaaggcccgcctaaacccttctaaacctagctgcacaggagccatcgctccatcncctcacagccactcgatcccaactctttgccgc

SEQ ID NO: 445448 - DNA, 297 bp, Triticum aestivum
gggacgtcagtaattagcacaaggcgagtgatgggcgccggtgcgccggcggaaactttgggccggtcctttttaaaccattagattaatgcgctgatgagcgttagataaccacgccaaagtcatcgtctccacgcacaaattctccctacgcggaaaaagtggatcgtgaacgaagtgcggcccacacgcaccagctgttgtgccaccgggcgtgcgtcgccagctccaacaccatcagcccccatcgtcgccgtcacagacctccggcatcacgggttcgcatcacctcatcgc

SEQ ID NO: 445449 - DNA, 435 bp, Triticum aestivum
ggggatgatgagtacattggcctgaggtccggagtccgtcagccattggtgaataagcaaactgctaccgatcccagggtgcccaatcttgactaccgtccaatcaggaacgatgcatggagccaaagaatgagagacaagtatggggtggattcctttgatccaaacaggtttcaacaggcgacgatatctcccgcagaacatagaaacagatgcacaatcctctgatgcttggtcgatgcagttcagtaccggtctccgaatttacagccagctgtgcaataacatcgactcgcatgtagcatgtggctgggtgatctgatgtttccaagttgtgttggatgtggcgagcccttgcaatcgcccgtcgtagttctttcagttacatactcagaaatctctgcatctttcagtctttgcaataattgaaactaa

SEQ ID NO: 445450 - DNA, 416 bp, Triticum aestivum
  unsure (1)..(416): unsure at all n locations
gggctcgcacagaggccaggatatattcgagcatggttggttgatcgatatcattcattacatgttgggctgccgttttccgcccttctccggaataaacgtgtactttatcagagataaaaaaaataagagtacagacgctccaccatgcggttctagtagtagtactactcgtactaccgcgcttggctctttgcctcttcgtgaagtcgaacaatgatggtactccgcatgttgggtactacagtgtatgcctctgacaatctgacaccgaatggactgatgcatgtccaccgagggtaggttgcattagtcaaaaggcgtaagcgagcttcaccttgtcctgcaagcttctcctcgttctgcgagttgacgggacacaccanaaagtagtgctagtccatactccctccttt

SEQ ID NO: 445451 - DNA, 317 bp, Triticum aestivum
tcaatgtaacccgtgaagaacatgtgtgtcttaacttcactatgggagacagtatctagccatgcattttgatgacttgtatcggccattcactattgcatctccggcatatacattatcattcttcaccactgtcgtctctcttattgcgtttgtagagcacactttccacgttcaagctttccattaccatctacaccaataaatgtaacaccaatagtacttgaacagttaatccatgttcaatacgacttctaaattaactgtgcacatctttggggtatactgagaacctccttgtgaagcagcattatgta

SEQ ID NO: 445452 - DNA, 438 bp, Triticum aestivum
attcgcgggtcgacggggaccctgaagtagtagcagcagctccatcaccatctcccccctgcttccttcctcggatcggagggggagagcgaccggccgaccaggaggaagcggcggcaggatgagtctcttcggcctcggacggaatcagaagacgttccgtcccaagaaaagtgctccatcaggcagcaagggggcacagctccgaaagcacatagatgcaaccctcggtagtggaaaccttagggaagctgtgaggctgcctcctggagaggatatcaatgaatggcttgctgttaacactgtggacttctttaatcaagttaacctgctgtatggcacactcacagagttctgcacatccgaaagctgcccaacaatgactgcaggcctaaagtatgagtaccgatgggctgatggtgtacagataaagaagcc

SEQ ID NO: 445453 - DNA, 422 bp, Triticum aestivum
ggggtcagttatgtagtgggcatgggcagtgtactgtaggcctgtaggtcttccttggcagtagcactttgcaaaaaggatccttagtcagttgcaacccttaattaagtactccaacttagcataagctctgttcccagtccttaggttagaatcatcaccgagtgttggccaaggacatgtttctttgcttttctttctctttacaagtcattgtcctctgatttactccaactattttcaccaacgcctgctggagatgttggatgatgtagctgacactgctgtgtgttggtgctctattctttgggtagagatgtgttgcctgcctggaggatgcttgaagcagagtatcccggagactagcagatatgatgatcgaaacttttatcttagctttctgtctctactacttcctgatg

SEQ ID NO: 445454 - DNA, 410 bp, Triticum aestivum
gggcacagaggtatcattgatacccgtgaaagatgttcgtacctttacgtcagtaggtgaaacaatatctagccaatattttgatgacttgtactggccattctccatcccaactccttcacctacattatcaaattcatcattgtcgtccctcttattgggtttgtacagcacaccttccatgttcaacctttccattaccatctacaaacacaaatgaaacacgataagtagttgaacaattaaaccatgttcaatacaacttctaaattacctgtgcacatctttggggtatattgagaacctctttgtgaagcagctttatgtatgtcatcacacggtccatactacaagtcatgttcgatgaaaccgtggacgtgcttggctttctactcctgacaccacctttc

SEQ ID NO: 445455 - DNA, 315 bp, Triticum aestivum
acgggacagtaggaagcagagacagcagctgagcggttgtgatggacctggttttgacatatttttgccctggactattaattttgcttgctcctccctttgtctggttccaaactgtctgtggaattgacttgattagtcagctttgaaatggtatacgtggcacgtgcacagcacaatgcaattttccaaactaaatataatatttatgtcctgatggaatgtcaagtctgctctattgtatgatatgaacctaggactgtatcttattgggaattaagagtcacggagccaaaattgtactctgtttcgagc

SEQ ID NO: 445456 - DNA, 469 bp, Triticum aestivum
  unsure (1)..(469): unsure at all n locations
gggnngnangttatccgccgntaccggtcnagaattcccgggtcgacgggtctgccgctagttgaaagctatgaaacaagtctgcggtagtttaaaactggaattggcacaatatcgcaagtggccgccttcgctcaatttgggtcagaccttgatgctgcgactcaggcattactcatagaggtgcaaggcttacagaagtgctcaaacaaccacaatatgaaccacttccaattaaaaacaaattgttgtgatttatgctgctgtcaacggcttctgtgatcgaatgccactaacagaatttctcaatatgaaaaagccattctaagtactattaatccagaattacaaaaaccttcttagaaaaaggtggcttaactaacgaaaaaaaaaanananananaaaaaaaaaagcggccgctctaaangattcaagcttactacgcntgcatgcaagtcatancncttc

SEQ ID NO: 445457 - DNA, 422 bp, Triticum aestivum
gggatgttggaacgttaaatttggagggtttaattgccaatgatgtggtgtctccccaaccatggttgaattggccggttcccatatggatcactccaagttttaataagatccacaaataactaggtttccagtataaggacgttactgggaagggaatgctcttgcttctcatcaataatttactacagaactattctgactggacatatccgttgagctgttgtttttgttagggcaagcaagcagaaagaattaatttatctggtggtcagcctggcgaaggatttgggaaaatgttccctaggggaaggagaaaataatgtttatggtggctgaaatcgaagttgctctgcgaagaagaccagatatcagtgggaatagaatgctcttgcttctcatcaataatttactccagaact

SEQ ID NO: 445458 - DNA, 407 bp, Triticum aestivum
  unsure (1)..(407): unsure at all n locations
cggtcctagaatcccgggtcgacggggggcgcaagtgaaataccactacttttaacgttattttacttattccgtgggtcggaagcggggttcacatcatcctgcgtaccgcataacgagaatgaaccccacgccctcaccatcacaacaacctgatgttatttagcccttttccttcttccagggcctgcagctcttctcattccggcagcctgaaacttgagtgaataaaatgtcttgtatcgtctaaccgttttgctacggccatttgagatggttgatacatacttacatcacgggtcaatgtatgagcttatgatgtcttgatcaggacatgttttctgtgtgtcattccatttgtgataaatcatttcaaatgaatgttgtatgcaccatggancaagctc

SEQ ID NO: 445459 - DNA, 423 bp, Triticum aestivum
  unsure (1)..(423): unsure at all n locations
aactaaccaaacgatgaagaaagaagacataccttcgagcatgtcgtcaatcaccgagtagccatttgataggtgcttctccctgtcgggccagctcgagtgctgggactcgaacttggccttgagctgctcctcctcggccttcagaagccagacctgctccatgtgccgggttgcttggtccgccagctccgtctcgagccggtcgcgcgccatggctgcctggctgcattccagctccttagcctggagttggctctcgagctcatgcacgcgggtcctcagccgggcggcgacctctgcaaaagcaagcaagaatcatcaacatctacatcagcgaaaacaagaagctttcagagaagattctgcctgactactcaacagtcggcccgaatctcggngggctacaccagttggtgcgct

SEQ ID NO: 445460 - DNA, 436 bp, Triticum aestivum
attcgccggtcgacgggagtatcaattgggcttgtctggacttcttttggtggggaagttcagtttgtagaggctacagccatggtgggtaagggtgacttgcatctgacaggacaacttggcgatgtaattaaggaatcagcacagttagctctgacatgggtgagagcaagatctgctgaccttaatctgtcacccacttctgatattaacatattggagagccgtgatatccacatacattttcctgctggtgctgtgccgaatgatggtccttctgcaggagtgacactggtaacatcactggtgtcattgtttagtaaccgaaaagtcagagcagacactgcaatgaccggagagatgactcttaagggcctactgttgccagttggtggagttaacgataacgtgcttgctgcacatcgatatggcatca

SEQ ID NO: 445461 - DNA, 422 bp, Triticum aestivum
  unsure (1)..(422): unsure at all n locations
gggggagaacatgagtattaacctagatcatcctaaactcagtggtgaaacaactgttcaaaatgctgttacagaagtcgctgccatggttggggagaatgtaaaactcagacgaggtttcatgttgtccacgactggacatggtgtcgtttcatcttatctgcatacctgtcctcagccaggtttgggccgcattgctggattgattacattagaagcagaagatagcagtgcttcccttgatgctctcaagagagttgggtcgtctatcgcaatgcatattgttgcagcaaaaccattattcttatcaaaagaattggtttctgctgcagctttagaaaatgaacgtgacgtgctccgaactcaggctgaaagttcaggtaaaccccaaatggccatagagaanatggtggaaggccgat

SEQ ID NO: 445462 - DNA, 371 bp, Triticum aestivum
attcgccggtcgacgggagacatgatcgcacgtagtgatgttgctataaccagtgacagtaagtagcagtttgctcgcggtacatctcaacagtagcaatttgaaccttgtcatgaatgtcacaaagtcagcgtcgagttgcgtcactgggacaatatcaactactcacatttgggaatcatagacttggaactaatgcagatcataaattacgatgtgtcgcgcatacgttgtgaatgtccatcagcttgaatatgatgctgtggaaggcctaccaagtgtgcctgacatcaaatcgactattggtgtgattaacatctatcccggctcatgtaccagcagtttataacatttagttaccatatgttttt

SEQ ID NO: 445463 - DNA, 356 bp, Triticum aestivum
ttccgggtcgacggggtccacatacatgacatactatgttaccatgatatcataccgtgcacataggtggaaactgacacagcactgaatgttgcctcaggaaattttcaattgcgttgaaacagacaggacagttctcatttttcacgaccacaaaatgaagttttatgtaaatgacctatcaaatacatgttgtaacatagcatcagatcattttcacacactatgaagacatatctaacgcatatatgacaacatggttgggtgttatcgaatatgatccaacgctagatgtaaacagaagattgagtcagttcattaggaatagagacacattttaactacatccgcctcac

SEQ ID NO: 445464 - DNA, 435 bp, Triticum aestivum
gggggattctcaggtgtttcagcaataggttcactagaagcatgcaaagtcctatcatttttctttttcttctttttagaaggactaggtgcctcaatattatttctctgagaatcttgctcaattctattagggtggccttcaggatacaaatgttcctgagtcattctaccagttctagtagccactctaacagcataatcattattcttactattcaattcattgagcaaatcattctgagctttaagtacttgtcctacttgagtggtaaccatagaagcatgtttagtaatgagtttaagttcacctttaactctagacatataatcacccaagtgttcaatcatataagcattttgttttaattgtctaccaatataagcattgaaatcttcttgcctaaccataaagttatcaaactcatccaaacat

SEQ ID NO: 445465 - DNA, 430 bp, Triticum aestivum
tcccgggtcgacatcgacttcgacttcttcgtcggtgctcgaagctcgccgccaacgattcaccgcctcctgcagctactaaactccaccggcatttcttgcgcctcacggtgagctcccggtcggaaaccctctcctctagacttggttcgttgtttcctgctgatactaccatcgccaccgaagctctgtcgtcgtcgtcgagctcgtcaccgtcagtatcgtgtactctagggccaggcaagcacgtcaacgtgctcgtggcgtccctgtggtaccgcctgagccgtttgtttgatcattctccccgcgtatccccgtatccgttgagctcttgctccggccgccgcttgccgtcattgcttcggccaactccggccatctctgctcgtgtcgttgatttcgttcaacgcgcgacgtcccgcccgat

SEQ ID NO: 445466 - DNA, 137 bp, Triticum aestivum
cgggtcgaccggcggccggagaacctcaagatctggcatatgcgcacaatgcctttttttccttgtttcctgtgcgtgtttttttttttctgcgtgtttgacttttaaaacaaagcaatcagacggtggggaacgac

SEQ ID NO: 445467 - DNA, 417 bp, Triticum aestivum
  unsure (1)..(417): unsure at all n locations
gggaaagaggatctagctgggtggcggacggagtagggtgtggggtttcatcatgggttttcgcggcctcggtgtacgaatgggtgggcggatgggatggtagtggggaaccatggcttagagacgcgcttgtctgaaatgtggggtaagttacgaaagtacccccaccgatttgaggaggttctttcggttcaggggtaccacgggcatttcgcgtgtcgggatttcacaggaggtgggagttttcgcgcgcgttgtaatttcggaatagcaaggcacgggttgagatggagggagttgtcggagcacaacaagacaaagatatatcttaaatatttcgggctaacaaggcgcgggttgaaatttccggacaagcctaacatgtacntgtacanatcaatgcgccctacanatgtc

SEQ ID NO: 445468 - DNA, 468 bp, Triticum aestivum
  unsure (1)..(468): unsure at all n locations
gggngngcatcnctcggcgccagggtcgaacaagaattcccgggtcgacggggaaaacgggttcgaacccgcgacttctggcgtgacagaccagcactctaaccaactgagctatttcccctttcgtaactactgtcgattcaacagtcacctaccggttacctttggaactataccaagtagctgtacaacagaatgcccttcgcctttagtacttttctttttcttttgacgacgtagaaagaaatggctctgctcgcttagagaaggggctccgcgctctatcagctatcagtagttggcgctacgcgcgacttcagttgacaaaagcgaacaagatagcgctagcgcccgggagaactttcgtttgttcgccttctaaaaggcctactgacctgccggtgaaaagccggtacaaaacaaataataagacgtagtgaaaaagtaccaaaacaactgaagcctaca

SEQ ID NO: 445469 - DNA, 423 bp, Triticum aestivum
aggcgcatacggtgactttgtaaatcttaagatgatgtgccagctcagtctctcgaaagtgcttataaaaatagggtgtgtgtgcattcataggggtgaatgtatgtgcgtatgtatgagcgcttgcatctgataaaaacaactactctcacgacaactcatcataatggtcaagggcgagacggtacacgctccgcactaagaaaatcctgcgcggatcggtacgacgtgatgtattacaccactcaccggctaacccggtcagtgataactatcaacatggaataacaattgaagttatcactgaccgtccgctagctgaaggcatgtgcaacaaagaataaacaacaacacacaattacagaggcaacacagaagacatgaagacatgcacatataaacattggtgaacattcgattatc

SEQ ID NO: 445470 - DNA, 488 bp, Triticum aestivum
  unsure (1)..(488): unsure at all n locations
ggnnnnnnnnnnggatntgtcnaggcctgnacggtaccggtccaggaattcccgggtcncgagctcactagncggcggccgctctagaggatccaagcttacgtacgcgtgcatgcgagtcatagctcttctatagtgtcacctaaattcaattcactggccgtcgttttacaacgtgtgactgggaaaaccctggcgttacccaacttaatcgccttgcagcacatccccctttcccagctggcgtaatagcgaagaggcccgcaccgatcgcccttcccaacagttgcgcagctgaatggcgaatgggacgcgccctgtagcggcgcattaagcgcggcgggtgtggtggttcgcgcagcgtgaccgctacacttgccagcgccctagcgcccgctcctttcgctttcttccttcctttctcgccaagttcgccgggntttcccgtcaagctctaaatcgggggctcccttagggttccgatttat

SEQ ID NO: 445471 - DNA, 376 bp, Triticum aestivum
acggtccacgaatcccgggtcgacggggagcacaagaaggacggcgagcacaagaaggacggggagcacaaggagggcatgatggagaagatcaaggacaagatcagcggcgacggccacggcgacggcaagaaggacggcgacagcgactgagccagctccggccgcgtgcagtgcaggggagatgaacgcgtgggttaatttggagcgtgtggtagcatatgtatgtaatgcttgacatgtctcatggatcttgtaatgtaataaccggctgcactgcatggtgcttgtaataataacgttaaggaatttccattggtaatttggtaaaaaaaaacactcaacaaaaaacccaacaccaaccaaactaccactc

SEQ ID NO: 445472 - DNA, 479 bp, Triticum aestivum
  unsure (1)..(479): unsure at all n locations
gtgnngnaattctttccggcgctaccggtcagnaatcccgggtcgacgagctcactaaacggcggccgctctagaggatccaagcttacgtacgcgtgcatggcgaacnttnataactctncaaaagtggnnaccnaaatnnaattnactgggcngncgtttnaaaantncttgacngaaaaacccnggggttaccaaacttaaccgccttgcagaaaatccccctttcgcaagctggcggtaatagcgaagagggcccgcaccgatcgcccttcccaacagttgcgcagcctgatggcgaatgggacgcgccctgtagcggcgcattaagcgcggcgggtgtggtggttacgccagcgtgaccgctacacttgccagcgccctagcgcccgctcctttcgctttcttcccttctttctcgccacgttcgccggctttccccgtcaagctctaaatcnggggctccctttangttccga

SEQ ID NO: 445473 - DNA, 434 bp, Triticum aestivum
  unsure (1)..(434): unsure at all n locations
ggtcgacggggatgttgaaaccatccggtaaagaaggtctttgaagcgtttgaaaaggcggacgtccggttagggaagtcaaaacccacaggcaacattggaacggtattgcattccttcatcatcaagtgccctggctccaaacagcaaacgagagagaaagtgatcgctgcaatgtctcgcgccatgagctcagtgtanagtcggttgangggagtcggtgcagtagaggttggttactctgctggtggcatccaagtagcaagcagcccctgaaaccttccattctgttgatagaagttgtaggtcgagacagcaagctgagatttctgacttagcaatgcaagaaaagcacaagctaaaccgccattgttgtaacggtaggttcttgtgctccttgtagttttgatgtttttttgggaagaaatacatgc

SEQ ID NO: 445474 - DNA, 418 bp, Triticum aestivum
acgggcggctgctgctgccgccacttcccgagaacaaccgaccggtgcagtcccctgaagaggttggccggctggattgcgtgccagccatcttcgatgagctcccagtccgggacaagatgtgtgttttctccgtatcagcagcaagagcttctctagatgaactgaatgaatcagcagtgcttttgtgcctcgaatggtctccgtgtccgtggcgaccggagctcgagtttcttctggcaaatgcctccacggcaccggtgaatctatcccggatctcttgtcctactgaaagtctttctgttctctcaacagatggcccaactccagccaatcttccactcggttgtcgaacaagcttgttactggaactcatatgaggatacttgagtgcggtccagtcaaatacataatcaaa

SEQ ID NO: 445475 - DNA, 401 bp, Triticum aestivum
ggtcgacgggggagaaagcctgccgccgtgtcgtccggagaggacgcgggtgccgatccgttttttttgggagagcagtttccgtgattctgcttgtgcgaaaaaatagaaatgaatgtatttaaaactaaaatacgtctagatacatctatttctccgatggctaacactccacttcatgatacatggactcgtgtttttaagaaaataaaaaagagtagcaaataatccggcgtgacgagacggagggcgagcgtatggccgacaacttggctgctcttttgaggaagggacgatggtgtccagacagcggttgcttgggagcttgcaaggctcgtgtttggctcctacgccgagttcagtgccctgcaggttcaaggtaactctgacatccttgcacg

SEQ ID NO: 445476 - DNA, 311 bp, Triticum aestivum
ggggcctctgattgcgccgacggtgcagtgccactgccatggcttggtctcggctagccaattttgttcgatcttattggtgatgctttgtgttgtgtcagggcatgtcttccctctttgttctcccttgtttatatgttgtggtgtgtgtggttttttgttttatctgttctcctcctgtggccccggtaattctggttcacttgaacacatcctgcaaaaggctgcgaagccttataggcaaatgaatacaattcaggtggggggtttctctccctccccaaaataaaaaaaaaaaaaaagaataaaaa

SEQ ID NO: 445477 - DNA, 69 bp, Triticum aestivum
ccgggtccacgggatccggctaagcagtttttagaccatttgtagacttttctgaaaaaacttgttgcg

SEQ ID NO: 445478 - DNA, 439 bp, Triticum aestivum
atccacggggggtgttcaatctttcgaagatgctcatagggatagggtatgcgttcataggggtgagtgtatgcgtgtgtatatgagcactcgtatttgtaccgtgttaaaaaaagattccaaggtcccaaagataatgaacttgattaaaaatttgtgtatataaattcattctttttagataaaagtttgaatttaatttggttggtgtgcgccaaacctaggctatagtgcaacgcctagacgacacatgggagcctcagcagcaagccactgtgatggactctttccaacaaaaaataaatctaaaatctttgtgaacatataatccaaatatcagataataaacttgatataacagattaaaggtaattacacactggtgctagaacttgccatgaatgtgcactttagtgcctgaacttgcaaaatacattta

SEQ ID NO: 445479 - DNA, 514 bp, Triticum aestivum
  unsure (1)..(514): unsure at all n locations
gnnnnnnggnaactgtctcgcctggntgtaccggtccacaattctcgacngcnctagagntccaagcttacgtacncgtgcatgcgacgtcatagctcttctatagtgtcacctaaatcaattcactggccgtcgttttacaacgtcgtgactgggaaaaccctggcgttacccaactaatcgccttgcagcacatccccctttcgccagctggcgtaatagcgaagaggcccgcacgatcgcccttcccaacagttgcgcagcctgaatggcgaatgggacgcgccctgtagcgcgcattaagcgcggcgggtgtggtggttacgcgcagcgtgaccgctacacttgccagcgcctancgcccgctcctttcgctttcttcccttcctttctcgccaagttcgccggctttcccgtcaaagctctaaatccggggctcccnttaagggtccnaattaatgcttacggaactaacccaaaaacttgataaggtgatggtcacgtantggccanc

SEQ ID NO: 445480 - DNA, 286 bp, Triticum aestivum
tcggtatgatgaatgctacaccaggatcaggacggtgaatgttagcgctattcgtgataattgtattagcatgtttggctttcgcatgtattctgatcgaatgtggtcttctcccgacggctgcttcacgtgtgctcaccaacgaagttcaatgctagcatgtcgtgtgaagtggctcgcacagcgacaatccgatggtgctgcataagactcggcaagacctatcatatgctgaagtctttcagtactgtcacagattgggtcaggtgaatcagccggtcgctct

SEQ ID NO: 445481 - DNA, 525 bp, Triticum aestivum
  unsure (1)..(525): unsure at all n locations
ggnnnnngnanngttgnaactgnccacgccgntcggnaacggtccacnaaattcccgggtngcgcccgctcctttngctttcttcccttcctttctcgccacgttcgccggctttcccgtcaagctctaaatcgggggctccctttagggttccgatttagtgctttacggcacctcaccccaaaaaacttgattagggtgatggttcacgtagtgggccatcgccctgatagacgtttttcgccctttgacgttggagtccacgttcttaatagtggactcttgttccaaactggaacaacactcaaccctatctcggtcnatctttgatttataaggggatttggccgatttggcctattgggttaaaaaaatgagctgatttaacaaaaaatttaacgcgaattttaacaaatattaacgctaacaatttaggtggcacttttcgggaaaatgtgcgcggaaccctattgttaattttccaaatacattcaaataagtaatccgccaatgagaaaataaccc

SEQ ID NO: 445482 - DNA, 442 bp, Triticum aestivum
cacgacggcctaaacgctgctcctcctcccctttaccgacggagggggatacgtccggatctgtaaccagcggtgaggatagaaagccagtgttttttgaagggagaaagacagtgttactacccttatcttgtttagatctggagaggatgagagtgtgtgaatagagcaatcctagcaagcaagcgcgaaggctccggcctatatatacgtagtggggtagttttcctttttcactccatcaaaacaatcgtttaaaattgtgtactactacatgccaggtcgcatttttttagttgttgattgttttttgagatagctacccgcttgttccaagtggtgttacggtgtgccaagtcgcactttgtatcgttcaagtctggtactacaagtccctccattaaatgaacaacaacccctcgtaaaattgtgagcaagccac

SEQ ID NO: 445483 - DNA, 448 bp, Triticum aestivum
cacggggagatctaagaggagaaccaccgcttcgagaggggtcgtctggagcggtagagggcgttcgaggtgagcatcgctgaaggtgcagcagcggcaggcaccgtattgcagtagtctagttcgtcagtagcctcctcctcctcttcctcttattgagcgcgcttggcagaggagaggctaccggaaatagtacaaagcccctccgtagtagtatttaggggctattttgttcagttcatctgactatagatgtggtggaactgtacaacatacttaaaagtagctagtatatatagttgaactagctatttcagtacgtggttggcaacaattggggaaaaattcggtcgattcagctataaagttgaacggtttttaaaaattaagcacgactacttaatctatgaatggaatctatgcttaattactgaattttagttgcaaa

SEQ ID NO: 445484 - DNA, 253 bp, Triticum aestivum
ggtccacggggaagaagaagaagaagaagaagaataagaagaagaagaaggagaagaagaaggagaagaagaagaaggagaagaagaaggaggagaagaagaaggagaagaagaaggagaagaagaagaaggagaagaagaagaagaagaagaagaagaagaagaagaagaagaagaagaagaagaagaagaagaagaagatgaagaagaagaagaagaagaagaagaagaagatgaagaagacgaagaagaa

SEQ ID NO: 445485 - DNA, 59 bp, Triticum aestivum
  unsure (1)..(59): unsure at all n locations
attctngnttttttngtnctgctncgttngtncctttttcttgtctttttgtttntttt

SEQ ID NO: 445486 - DNA, 462 bp, Triticum aestivum
ggggctgttttcatgtttcgtgtactccaacgggtcaatcttccgggaaatctggacaaagcatcaccaaatgctggctatattttgctaatgttttacaacctctatgatggcaagtcccgaagagaatttgaaagtgaattatatgagcgttttggctctttggttaagatgcctctcctgaagccagagagagctccattgcctggtgatgtcaaaactatcttagacgagggaatgagcttattcagactgcatcaaagcaggcatgggagagcggagccatcaaaaggttcatatgctcaagaatgggctcagtgggagaaaagactacgtgtggtcttgtcaaggaatgctaattatcttacctcaattcaggttccatttgatgttgcggtgaaagaagtactggaacagttgaaggctgttgcaaaaggtgatgtcaaaactcctgatactgca

SEQ ID NO: 445487 - DNA, 460 bp, Triticum aestivum
ggtccaagatctccgggtccacgacgaaggccgggcactcgtcagcggcacagcgaaggacacagaatgccgagtgacatcaccaccttcttgaaccagtacctcgggcactgatgcagttcgagtggccttgccaaccggcgcctttctattattcctcgccctcagtggcacctcgtcttcatcatcagggagatcaatgacatgatgaggagctgcagcatgaatccagagttagaaacgaaaatccaatcgaccaaaaggaaaactacaagagagcgtaccagggttggaggtggcagcatcttccatttcttggtcgtctttcttggcggaggtctcggaggtagcagcactgcagatttcagaaaccagtcggtaagtcgatgagtcaaccaagagtttgtccgtgctaaataagaaaacacaagctccgttgttacccggagatagtgggaat

SEQ ID NO: 445488 - DNA, 529 bp, Triticum aestivum
  unsure (1)..(529): unsure at all n locations
ggnnnnnggnnnnnttgnaacggtttacgccggccngaaccggtccananattcccgggccactaccgtgctagtgctgtacaaatcttaagccgttaaaaaaaaaaaaaaaaaaaaaaaaaaaaagcggccgctctagaggatccaagcttacgtacgcgtgcatgcgacgtcatactcttctatagtgtcacctaaattcaattcactggccgtcgttttacaacgtcgtgactggaaaaccctggcgttacccaacttaatcgccttgcagcacatccccctttcgccagctgcgtaatagcgaagaggcccgcaccgatcgcccttcccaacagttgcgcagcctgaatgcgaatgggacgcgccctgtagcggcgcattaagcgcggcgggtgtggtggttacgcgcacgttgaccgctaaaactttgcaacggcctaacgccggccccttcgcttccttccctcccttcncgcaacgttccgccggttttccccgttnangctcctaaatncgggggctccct

SEQ ID NO: 445489 - DNA, 488 bp, Triticum aestivum
  unsure (1)..(488): unsure at all n locations
ttgnaaaggtctacgccggccngaaccggtccanagattcccgggccgctctagaggatcaagcttacgtacgcgtgcatgcgacgtcatagctcttctatagtgtcacctaaattcattcactggccgtcgttttacaacgtcgtgactgggaaaaccctggcgttacccaacttatcgccttgcagcacatccccctttcgccagctggcgtaatagcgaagaggcccgcaccgtcgcccttcccaacagttgcgcagcctgaatggcgaatgggacgcgccctgtagcggcgattaagcgcggcgggtgtggtggttacgcgcagcgtgaccgctacacttgccagcgcccagcgcccgctcctttcgctttcttcccttcctttctcgccacgttcgccggctttcccctcaagctctaaatcgggggctccctttagggttccgatttagtgctttacggcacctcgacccaaaaaacttgat

SEQ ID NO: 445490 - DNA, 445 bp, Triticum aestivum
  unsure (1)..(445): unsure at all n locations
cctgcctgtaccggcacgagattcncgagtccacttcggtacattgcgccaagggcgaatcaccgggcaccaccgcaataaaccggtccaggtataaaggcgtgaatgccagggacgaaccttcggatggctcgaacgccacgcccagctccacttggcgatcgcggaccatttccagcacctgttcattgatcaggtcatgcaccgtcacattcacctgcgggtaacgtgcgcggaatatcttaagaatcggtggcagcaggttgcccgcaaacgaaggcatcgccgccacggtgacgcggccacgctgcagggtgaaacgctgacgcagttcgtcttcggcattgtcncagtcggcaatcaaccggcgcgccaacggcagcagcgattcaccttcaggcgtcagtgcgacgttgcgggtattgcggctgaacaggcggccgct

SEQ ID NO: 445491 - DNA, 445 bp, Triticum aestivum
gggatccatctcatcttggaaaagatctcttgattcagtgaagcaatgaaactgacaccataatattttgaattaaaatcagaaatcattttcctctcttggctaagtaaaaggaagcttgtatgtaaaacaattatttggtaactgatatcatcaagaaagctgtgtttctatcatgttttcacctgcatacgtgatgcatagcagtacaccattatgtaagaactagagctcgaatttacatgagtccattagtctccagatctagcaatggctcctataagtatgcaattcctataatgcagttatattctagacaaggtcctgataaagaacttgattactaccaggataacaaggtgctaatgaataaaaatagaaggtgccaatgaactaaaataatagaaggtgctaatgatttatgtttcttaactaaaatgcaaaa

SEQ ID NO: 445492 - DNA, 363 bp, Triticum aestivum
tccgagtccacggggtaccgcgaatgattcatcatactgaggaaatttagtctggcatcaaattttatatggtctgatgctcagacaccaatggaattgttcaaatcttacccagtggtgatcattgtaggctccatttgttatcaaaatacgctaattagtgcgtgctcatacaccaaaggaacagttcaagtcttgtcgcctgctcagtcaatcgtgagttacagtaaaagctataaatgtctagctttgagctcagtttagttttgaaatgcataattagcttttacattacatgtttgaaaggtttctcttctaatttatacttaaataaaattggagaaattctcatctcgctaaaaa

SEQ ID NO: 445493 - DNA, 467 bp, Triticum aestivum
  unsure (1)..(467): unsure at all n locations
acgcctgcccgtacgggcccgaaattcncgagtccacgggcgccattaccagccatattctcgtgaatgaggagcggagtccactcccttgggaataacccacctagcatggaagatacaaatagacctagttgaaacatgagctgctcgagtatacaaaacagcatttcatttgaaggtttggagtttggcacatacaaatttaattgggacggaaggtaaataccgcatataggaaggtatggtggactcatatggaacaactttgaggtttatggagtttggatgcacaagcagtattcctgcttagtataggtgaaggctagcaaaagactgggaagcgaccaactgagagagcgacaatgctacgtcttgagcttgtgttggttttccccgaagaggagaggatgatgtagcacagtagcgttagtatttcgctcagtttttgagaaccaaggtatcaatcc

SEQ ID NO: 445494 - DNA, 70 bp, Triticum aestivum
  unsure (1)..(70): unsure at all n locations
ttcngcnttgttcncatttcgtttttgntcncgtgctgcncttgtacttcggtttttccntntnttgcnt

SEQ ID NO: 445495 - DNA, 455 bp, Triticum aestivum
  unsure (1)..(455): unsure at all n locations
cacgggtctttcttgtaaaacatcattattttgatttttcttgatttcatttcctttcttctttgagggcaccaatgctgctaatacattccttcatcgaaaacttcctttttgtgaaacttgtactattatgtgcttattattgtatattataataagcttattgtatattataataagcacaatttccgtcttaattgagtgcaaacgttgtccttgtgtttttttcatgttctttcttcttaaatggtaataccaatgccattaattcattccttcttagaaaactttgttattttaatttgtttcagcatttgttttattttctttctatgagggtaataacactcccactacttcattcccttgtgagaaactttctttgcgaaaatttcattattatatgcttatacttgcatattatanaggtcacattttttgtgtaaactgtgtgc

SEQ ID NO: 445496 - DNA, 459 bp, Triticum aestivum
  unsure (1)..(459): unsure at all n locations
cggtccgaanattccgggtccacgggtccggatatcttgtggagctcggcccactgggccatctgttcgttcagcaacagtggacactttggcgtgctgaattgcgaccagaaaagcttctctgttgcatgcccttctttcgcttggaaaaaccgcgcctcatcagagacactcttcggcaagtccaagaatgcatctggagaactccacttttgattaagcggggcatacttcggatcaacgaatttagtctgtaataagaaaggcttaccggccgctatctccccagcttgccggatcttctctcgagccgccctagacacggatcatgcttctctcgcctcttgtaaggccttgtcgagatcgacctttttggctttgttatccttctcgaggaattcgcaccggacagtggcttccttttgctcgcgcgccatggtagacattctctcctcgcac

SEQ ID NO: 445497 - DNA, 489 bp, Triticum aestivum
  unsure (1)..(489): unsure at all n locations
acgcctgcctgtaccggcccgagnattccgagtcgacgggaaaggttagaattttcaccccacccaccacccatctcgtcgccaatgtggagaacctaaccaaagtcctcgcaagcggatccgacgacaccgatgacatggacgaggaggtcagtgagtcctcggcccgcctgcaaacaaccaccacaccaacgaggaagtggatgacaacctccacctacgacatctacgtggtagatactccccacgacaacagtggcagaggcgataatgataacaatggccgggggaggcaacggtagcaataacggtgggaatgataacatggcaccaatgccaacaaccccaacaacaaccttggtcccgatcacaaggacaccttaaacaagtcacttggcagtcccaaccacgatgcattaaagctaaggctgctcgacaccgccaacaagataaccgatgaaaagcaacgacttcgtgacaaagagaaat

SEQ ID NO: 445498 - DNA, 441 bp, Triticum aestivum
gattttgacatgggaggagtccgttaagagagacctgaaggattggagtatcgacaaagagctagctatggacaggggtgcgtggaagcttgctatccatgtgccatagccatgagttggttgcgagatcttatgggtttcacctctagcctaccccaacttgtttgggactaaaggctttgttgttgttgttgtttcatttttttatgaatgtactgttcatgagggtgtaggggcacccgggagctgttagacatttctcgaaactgtattgatttttttattttaagatttggcttaatctgaccaattagattaacacattcttttttaattgctatcagaattgagagatccagcaaagatatatgtcaaattgtttattgtctagctattggtttctattgatattcatgtcaaatctctattgatgatcatttt

SEQ ID NO: 445499 - DNA, 399 bp, Triticum aestivum
  unsure (1)..(399): unsure at all n locations
gggacctgggaggtgtcgctgccggcggaggaggtgccgcccgagctgcccgagccggccctcggcatcaatttcgcccgcaacggcatgaaccgccgcgactggctctccctcgtcgccgtccactccgactcgtggctcctctccgtcgccttcttcttcggggcgccgctcaccgccaacgaacggaagcgcttgttcagcatgatcaacgatcttccaaatgtgtatgaaagtatggttgacaggaagcacagggacaggtctggtgttgatagcagtggcaaatccaggcactcatcanagccaaagcagcgaactgatgatgtccgccaaagaactccagggcagttgcccgagaagaagacgaggacganggacaagaagaacacagcgaaa

SEQ ID NO: 445500 - DNA, 311 bp, Triticum aestivum
tccacggggtggccaagaacttcgattgccatggccaggttgttgcggaagcttgtgcgttgaagagtggaaggagctgttaaagctttttctttcggcagttggcttattatgctctggttccctgcaaaaaaaaagaaaaggcttattatgctctggagctgtcttgcatttttccttcttgcaatgctgcgttagcggtatgtaatcctgtaaccatattttgagtactctctggtgtttcaaaaaaaaaaaaaaaaaaaaaaaaaaaaaaaaaaaaaaaaaaaaaaaaaaaaacagacgaacaaaaa

SEQ ID NO: 445501 - DNA, 79 bp, Triticum aestivum
cacggggttagaagatgtaaatatgcattgttgtatcgcgacctgaatgaatgaaataaacgaaataacgctcttgttc

SEQ ID NO: 445502 - DNA, 70 bp, Triticum aestivum
  unsure (1)..(70): unsure at all n locations
ggngtaanancaaaaaggcccgcaccgntcgcccttccnaananttgcncaccctgaatgcaaanggnac

SEQ ID NO: 445503 - DNA, 478 bp, Triticum aestivum
  unsure (1)..(478): unsure at all n locations
ggtccgaanattccgggtcgacgggacccaaggacttctattcttaaggattggagggaaaatattgtgacaactatttgatccaccggaagtttcatgaggttttactctgtgtgattaagatggcagcagattacctcaaacctaaggacccaaactttagtgtgcacccaaagattcgaaaggatagaagggcttatccccatcttaaggattgcagtggtgcactagatggtactcatgtcagagcttctattcctgttgacgaccaagttagatacattggaaggtcaggatcaacaactctgaatgttctggcaatatgtgattttgacatgaatttcatgtacacctcagttggtcaacctggttttatgcatgatacatgtgtcttgtatcatgcaattgaagctgatanagataccttccctcaccctccgaagggttagtagttcctataataattttgttactcaaa

SEQ ID NO: 445504 - DNA, 447 bp, Triticum aestivum
  unsure (1)..(447): unsure at all n locations
gggaagaaggacggcgagaagaaggaggagggcgacggcaagaaggacggcgacgggaagaagggttgggcggcctacatcgagtccgtcggcccggccaaggagcccgagaagaaggaggagaagaaggaggaggccaagaaggagggcggcgacgccaagaaggaaggcggcgacggcggcgacggcaagaaggacggcgatgggaagaaggacggcgacgggaagaaggacggcgagaagaaggaggagggcgacggcaagaaggacggcgacgggaagaaggacggcggcctacatcgagtccgtcggcccggccaaggagcccgagaagaaggaggagaagaaggaggaggccaagaaggagggcggcgacgccaagaaggaaggtggccccgctgtcgttcncgcaccacatgccgctgccgcaccacatgccgccgccct

SEQ ID NO: 445505 - DNA, 409 bp, Triticum aestivum
ggggtggcgaccttgagcacgaccagttctgggcggcggcggtttaggcagcggctgcgacggcgattcccgcatgggcggtggtgattgaggctcgcggttgctggttgagcctggtggcggctgcgctgtgaactccagttcatcctttactgtcaacgttaccctcagcccggcaagttcccaagttggcggaaataaaagagcaaagaaagtgccagcaaagctaccagactagtgcttgtttgttgctgtctgttcttatgtcagaccatgtgagaattcatggttatcgttgattgtaagctatattcagtattatttccctttcccatttagtactttgtcagactatgttcaactaaattgggctcagaacatgttcaactaaactcaatacaatgccccc

SEQ ID NO: 445506 - DNA, 432 bp, Triticum aestivum
gggaggcctgccagcccaatcagcatcagagaacgccgaaaggtcacaagatggtgcagactgaaggagcagaccatacgaagcagtagaggaaacataacgcaggatgcgcttaactgccgagagatgagtggtacgaggtgcatgcagatactggcacacacggttgactgcataagagacatcaggtctggtgatagtgagatattgcagaccaccaacaaggctgcgatactcagtggcatcatcagtggaaagaagatcccatcaagggcagacaaccggtcagtggcagacatcggagtgatagcatgtttgcattggagcatcccagcacggcccagcaaatccgttgagtactttttctgactcaaagtccaaccagtagaagaccgtgacacctccaatccaagaaaataatgcaaagcacca

SEQ ID NO: 445507 - DNA, 66 bp, Triticum aestivum
ggggtgtatacaattaaggatgtgtacccctaacagttcggtagatccgaacatacactgggatat

SEQ ID NO: 445508 - DNA, 351 bp, Triticum aestivum
gtcacgggatgaccgcaatgttctcctacacccttatcctgcagctgctagccacgctccaaatctacgcagtgccattcatgacttttgtcacaacaactaagatcttcacgtacatttgtcgctccttttagatcctgccaacaatcagttctgacatctattattctgacaattcttctataaatattattttcatgccacaattcaacttcgcgcttcgtagaagtggtgcgccattaaatagctcaactactaacgtcgcaccacaccaacggtgcgctataataacttgtgcaccacgttcctagtgtaacaccgtggatgtggtgcgccattccttttcgctca

SEQ ID NO: 445509 - DNA, 445 bp, Triticum aestivum
  unsure (1)..(445): unsure at all n locations
cacgggtaccacactatggacttctgctagccagagtggccggcctacctacttcagtgatcgacaccgcgaccagcatcacttcacgtatcacagagcaggaaatggttaggatggacgcgaactgcgtgcagtaccagccgctgaggatggcgtaccaggccgcgcaacggctcatctgcttgaagtactcaaaccaaggggacgactacatccgtgaagcattgcaggacctcaaggagagttacgctgcaggcaatttgatatgaaacaacaagagattacgtctccaggaatttgatagaggtctgtttgtaggtctatggccgcagaggatccatcagtcttatttccatccgccgctgtaattatatattagtcagagtccgatactgaaagtggcgatancggagagatcccttattacacacagcacacctggagt

SEQ ID NO: 445510 - DNA, 280 bp, Triticum aestivum
gggatcgactgcatcgagaccatcgtgtgccactgatcagcgagtgaatcacgagctgctctgctcgtggtccagccgcgcgtgtgtgcgagactaattatttcttcgtctgatcaccgtatgatcggcgtgttcatttgttgttcacttgtgcttctgactgaagccgcgtgttgtacagaatacagagctatgaagaaacccatttcgccgtgattatttggataaaaaaaaaacaaaaaaagaaacgcaagaggcgcaaagcgcaagcagacgcggg

SEQ ID NO: 445511 - DNA, 519 bp, Triticum aestivum
  unsure (1)..(519): unsure at all n locations
gnaactgttaccctgcctgtaccggcccgaaaattcccgngtccacgggtcatgcattggatggatgcccgggcattgagaaggaaggacgctttcagaggcgaaaggccatggggaggatttttctgtgatccatggatctccgatcgggaaaccgtatccaagctccgtggctagctgcgctctttggacttttcaaacttagcgaactgaaacatctgagtagctaaaggaagaaaatcaaccgagacccccgttagtagccggcgagcgagagcggaacaaggggttttcacaaaagaaatccgaagcggtttcattcnatttgttgtggattggatgatggaaaaaccacaagcagcaagcgtagttagaaaagttgccgtaacgcgccctacggagttgtacaaagtagcaaccgttttggggcgcaagcataagcaacacaggactgatgacngggtngggcnccaatnaactgggtttccaaaaaagantgggaaattccggcaaagaaag

SEQ ID NO: 445512 - DNA, 507 bp, Triticum aestivum
  unsure (1)..(507): unsure at all n locations
ctgttacgcctgcntgtaccggcccgaaaattcccgggtcnacgggtgtgccatgttgaaatggatgaagagaaggaaagctttatatgcggaaaaaaaaaaaaaaaaaaaaaaaaaaaaagcggccgctctagaggatccaagcttacgtacgcgtgcatgcgacgtcatagctctctatagtgtcacctaaattcaattcactggccgtcgttttacaacgtcgtgactgggaaaccctggcgttacccaacttaatcgccttgcagcacatccccctttcgccagctggcgtatagcgaagaggcccgcaccgatcgcccttcccaacagttgcgcagcctgaatggcgaagggacgcgccctgtagcggcgcattaagcgcggcgggtgtggtggttacgcgcancgtgccgctacacttgccaacgccctaacgcccgctcctttcgctttcctcccttcctttctcccaagttcgccngntttccccgtcaaactccaaaa

SEQ ID NO: 445513 - DNA, 459 bp, Triticum aestivum
  unsure (1)..(459): unsure at all n locations
gggagtacttagtgaaatacgtattgtcggctataaaggagaagtggcctgagagcaatagatggaataccatctacgtacagcaggacaatgctaagactcatataaaaccagatgatccactttttttgcaggaagctgctaggggtggttgggatattaggatgatataccaaccacctaattctcctaacacaaacatattagatcttggttggtttgcctcaattcaagcaatgttccatagaaagatgcccaagaccctagccgagattgtccaaaaggtattgcactgattagatcttggttggtattctttttatgttctatgtgatatatacctatttgtgtatgaactgttttgagtttttcatgtcatgtgtcatangttaattaatccctagctgagtaccccatcaaaggctcaataggatctggttgagtcatcaagcgtgcatg

SEQ ID NO: 445514 - DNA, 217 bp, Triticum aestivum
  unsure (1)..(217): unsure at all n locations
tcgacgggggcaacccaattttattttgtgttctttgtttttgttcctgtttagtgttaaattttgtttctactttctgtatanatgtggntttgtgttttaattaatgtttgtgccaagtaaaacctataggataagctatgatgatagttaatttgattctgctgaaaaacagaaactctgcactcacgagaaaaaattaaattaatcacaggaa

SEQ ID NO: 445515 - DNA, 488 bp, Triticum aestivum
  unsure (1)..(488): unsure at all n locations
ttnnnaangcntacgccngccggaaccggtccanaattcccgggccgctctagaggatcaagcttacgtacgcgtgcatgcgacgtcatagctcttctatagtgtcacctaaattcaatcactggccgtcgttttacaacgtcgtgactgggaaaaccctggcgttacccaacttaacgccttgcagcacatccccctttcgccagctggcgtaatagcgaagaggcccgcaccgacgcccttcccaacagttgcgcagcctgaatggcgaatgggacgcgccctgtagcggcgcttaagcgcggcgggtgtggtggttacgcgcagcgtgaccgctacacttgccagcgccctgcgcccgctcctttcgctttcttcccttcctttctcgccacgttcgccggctttccccgcaagctctaaatcgggggctccctttagggttccgatttagtgctttacggcacctcgacccaaaaaacttgatt

SEQ ID NO: 445516 - DNA, 447 bp, Triticum aestivum
cacgggaattttggacatggcaggctcagtcgtgttggcgaggcaggccccagactgcgaggtggttggttggtaagctcgaggatgaacagtggaaggcaggggaggagacgaagaggcaagtgtgaatcgaggctgaaaatttgggaacttgccctctgagagctgtctaaaagaggaaacccgaatcgctggttgggctggtcctatagctcaagcctcaattggtggaaaaggaaaagttggtaactaaaaaaatgggcacaggtctataagccgaggctcggggcaggcccaggccatgtgacccaagttgccacacccatagcaagtaattaacctgtttgaaaccctgggttggcgccctcaactccctaatcatagcgatcattaacctgtgtcgaagcacgagcattacctcctggtcacacagtcaaagcactttgc

SEQ ID NO: 445517 - DNA, 391 bp, Triticum aestivum
gggtggccgagaataatcaacggcccagtactagtactactcgagatgatgagcgcatgcatgcatgcatgagacctttaggtaaagtttctttttttactattacgatacaaggtgtctccgtgaaacgcctacctaaacttatgcaccatgcgtaccaagtggtttatggagaatggatggaccagatgcatcacaaggtaagagcaactccagcagttggacccccgggttcttaaaatcgccacctgggtcatcccgatgctaattattttgaagagaagagagactaaaattaggcaaacatgacacagttttggcgaacagggcgttcaacattttcttacatagaaaaaggcagctccaaaggataaaaaaaagcggccgctct

SEQ ID NO: 445518 - DNA, 320 bp, Triticum aestivum
cacggggatcgccaaggagctgcggaagctgcacagggaagcggttcagaacaccatcaactcggttactctggtggcaaccctgattgcgtccatcgcgttcgtctccatcttcaacctgccaggccagtactaccaggacactagcagcgggggagagatcggggaggcctacatatccaagctcaccgggttccgcgtgttctgcctcctgaacgccatcgccctcttcatctcgctcgcggtggtggtggtgcagattacgctggtcccctggggagaccggcgcgcagaagcagatcatcaagattgtgaacaag

SEQ ID NO: 445519 - DNA, 442 bp, Triticum aestivum
gggttatcggaaaattcaaatgcggcacttcttttctactggaatgagatgaaccgacaggttagagtagaagggtcggttcagaaggtctcagaagaagaatctgagaagtatttccacagccgcccacgtggaagtcagcttggtgcaattgttagcaagcagagcactgtcatttctggaagagaagttctccaacaagcatacaaggaattggagcaaaaatattctgacggtagcttcatcccaaaacccgattactggggtggctacaggttgacatcaaatctttttgagttctggcaaggccagcagtctcgtctgcatgaccggctacagtattcacagcgagaattaggtgggagtacagaatggcacatccaaaggttgtccccttgatcagtaacctccttaaagctctcgcctcgtgggtaataaaagg

SEQ ID NO: 445520 - DNA, 448 bp, Triticum aestivum
ggtccaggactccgggtcgacgggagcgcggggcagaaggagcgggtgcggctgctctaccgccgcgcgctcaaggacaccctcaactgggccgtccaccgccacctcttctaccaggacgcgtccgagctcagggacaagttcgaggccaacagaaatgtggagaacctggacgtgatcgataggctcatcgaggacgcggaggcgcagcagaggaacttccagcacccggatccttacattgttccatgggctcctggtggcactaaattcacaaggaaccctcctccacctgaagggattgagattatctacaactatggcaaagaagaccaatgaacaagaatcatgcatttgtgagcagagcctggcaccggcggagtgcagaggacttacttttgcttttccagattataacatgcaactgagctgctggtatgttaagaac

SEQ ID NO: 445521 - DNA, 455 bp, Triticum aestivum
  unsure (1)..(455): unsure at all n locations
gcgaccgttgtagcgcgatgcggagggccagatactcctcatttgtcaccttcgccactgccggtgcctgacattgggatggagggggaggggaacaaacagggagcggagtggaagcggcgaagatggaagcaaagagtgaagtggagctagggtttgctccgggtggggattttagtggggatagagtgggtaggtatgggccatggtggtcaggctgacgtggcagacgcgtctaggccaccccatacccgccctagatttaggctgggtttgaggggtgcctgtcagctcgaatggccatgtttggtatanggagcccgactcggtcaaattttagtgacagtgcattgatcaggccatctacccggtcagttttggcacggaccgggccgtccaccatgacgtagttgccacggtaggggttgccgggcaccatacacgacactagagag

SEQ ID NO: 445522 - DNA, 144 bp, Triticum aestivum
  unsure (1)..(144): unsure at all n locations
acgcctgccatgtacggtccgagattcncgagtccacgggagataagagggggaagaaacaatgaatacaatgcaaacataaacacgacgatgcgtgacgtgacaatgagcggtgctaggtgtgccctaacgtggtatgaggcc

SEQ ID NO: 445523 - DNA, 319 bp, Triticum aestivum
cgacgggaggcgctggtggagcaggaggggctcttctggttcgggagcttctggggccggacggagcagggggaccccgtgtccgcggaggatcagatgtacgcaggcttgagcttgccggtagtcctagagagagtgcgcgattaggcaccgacgacgatgcagtttgatgcaagcggcttgcattgcagcttctagatgaggtttctacttttccatccgggcatcattcggtcattgcactgatgattccattccttactgtacatatgttatcatcatggtacgcctatcaatcaaagggacaatcctgaacaat

SEQ ID NO: 445524 - DNA, 473 bp, Triticum aestivum
attcccgggtccacgggctgcataaaaaaggtccctatcacaagtggcaatataaagtgacgttccctcgcattaagattttgtgcatccaactataaaagcgcatggcaacctctgcttccctctgcgaaggggctatcttttattcttgtcttttaccttatgcaagagttatggtgatcttcaccttttcctttttacatttatcctttggcaagcacattgtgttggaaagattctgatatatatatatatatccaattggatgtaaggcatcatgagctattattgttgacattacccttgaggtaaaaggttgggaggtgaatctataagcccctatctttctctgtgtctgattaaaactttgaacccataaatatcgcgtgagtgttagcaattgtgaaagactaaatgatagttgagtaaatggagtttgctaaatcaaagctctgacataaactcctcctgaa

SEQ ID NO: 445525 - DNA, 457 bp, Triticum aestivum
  unsure (1)..(457): unsure at all n locations
gggtccacggggttcgaacagcggccagtcctggcttacttccaaggagccattcacaaggaaaagatgggtggaaaaggttcgtcagaaagctgttacagcttctcaaggacgagaaagacgtgcacttcacctacgggagcgtccggcagaacgggatcaggcgcgccaccaaaggcatggcatcgtccaagttttgcctgaacatcgccggcgacacgccctcctcgaaccgcctcttcgacgccatcgtcagccactgcgtccccgtcataatcagcgacgagatcgagctccctttcgaggacgtcctcgactactcggagttctgcgtgttcgtccgtgcgtcggatgctgtgaggcaaggctccctgctgcgcattctccgangcgtgaccagggaccagtggactaccatgtggagaaggctgaangangtggctcatcactttgagta

SEQ ID NO: 445526 - DNA, 59 bp, Triticum aestivum
  unsure (1)..(59): unsure at all n locations
tcttnttttttttnctttcttnnttttggtttttggtttgtttncttggncgtcntggt

SEQ ID NO: 445527 - DNA, 53 bp, Triticum aestivum
cgtagcgtgctccccagcaggcgtccaccggtcgggcgtctcatcctgttgtg

SEQ ID NO: 445528 - DNA, 341 bp, Triticum aestivum
cgcctgcttgtaccggccctaaattcccgagtccacgggggtactctgtctctaaggttcgttccaatctcaccattttatttgattgagatgagagaggggtcaggtggcacgcggtggctgttcgtggttgcgtgctgcttatgtactgtgcaattttattttttatttttttggagatagttgctgctctgtgctagaaggagggatgaacagaggagaaacaggacagggctgggtgttgtctgcacacagagatattgagataattggtactattgttgtaaaatgttttaatggaaaaaaaaatcctccattcccttgcaaataagtttggttta

SEQ ID NO: 445529 - DNA, 458 bp, Triticum aestivum
cgggtcgacaggaaaaaatgacgtaatgagatgatggtgccatcaagaagttttcgacgaacgtagtagcggccaaaaatgaaactcttgcatgaaagaccggatttgacgcaagatgaatggcgttggggtttttcaaatgaaacccgtgatcagaaagtcaccaacggagccatacaatctatctagtagtgtgccatggcacggtactccgcttcggcaatggaaggagcaactgtctattgctttatctcatccaagatagtgtctcgtctccccataaaatagataagcctgtagttgagcacctatctgaaggcccaatcggcatcagtagttgcacgcaactctaaagaagacgatgatggaaaaaaggacggctcgagaaaaggtacctcgaatatatctaagaatctgatgaactgctgcaaagtgaactgaccggggggcagccatgg

SEQ ID NO: 445530 - DNA, 161 bp, Triticum aestivum
ctgtaccctgcagtacggtcgaaagctccgggtcgacagggtatgacggctactggcaccttttaatagacactcacatgatttcaaaattattgacatactctaatgtacatcagcgtaataacttcatgatacgaaaaagtgtattgtgttactgatgt

SEQ ID NO: 445531 - DNA, 422 bp, Triticum aestivum
gggtcgacggggatagtaaatgttatcgacacccgtacgaggagaattttgaggggagcagtgaggaagggacacctagtaagagcaaattccaattgaaactcagagatctccggagaagcacttcctcgtttgctttattggacaggaattatctcactcccatttttacctctcaacacgaggacgatgatgacgatgacgacaacgacgatgattcttgtgaagtgttggcgatacccaggcccagcgcctagatgttgggaaggctatagctaatgactgcaagcacaaagtgaccggtttttggcggatttacacgaagaagctctcagggctggtaccagttctgggttcgtcggagttttgacaaaaactgttctgtctgcgttgagataagctcttctgatttcttctgatgc

SEQ ID NO: 445532 - DNA, 241 bp, Triticum aestivum
attcccgggtacacggggatagttgatgttatcgacacacgttcgatgatttctttgatgagactaggaaggatgggacatcaacatcttccatacactagttgcaatgcagatatcaccggtaacgtatatccgcgtctgcctcagtagtgaagcatcatcaatccgcatgtttactacacatcagtaaggtgttttagactatgacgacaacgacgatgattcatgtaaactgttgcgt

SEQ ID NO: 445533 - DNA, 425 bp, Triticum aestivum
ttccctagtccaccgcgggcgcgaacagctccaagtcgcccgcaagcaccagaagagctcccgcaagtggacgtgcatcggcatcggcatcctgctcgtcgtcatcctcatcatcgtcatccccatcgtgctcaagaacaccaacaagagcaacaacaacaacaaccagcagtagtaggaatagcttgtgatgatatgatcctggcttgcttgcatgcttgctgggtgttgttgatcgttttttgtggaattttttgcgattgtaattactccatccgtgcggttcgttgagccaatcgattatgttatataactatatacttttcggcgattaaaaaaaaataaaaaaaaatagggaaaaaatttattgaattaatagataaaattgaaaagattttaaaaaattaaggaggagtaaataaaaa

SEQ ID NO: 445534 - DNA, 288 bp, Triticum aestivum
ttcccgaggtcacgggcaactgcgaattgtttaatccgatctattagaaaaaatagagagaagaccatgacccgaagagggacgtggacgttggcacgttttctatccgcggtttccatcctgggccaagctggccttggatcgcctccgctgtagaagagccgccgtagagattgatgtggtcagattgccccaacgaagttactggtgttacaactactaccatcagtactgctgctatgtgcaaagctccatgcatgatttccaaacttgaattaagcttttttc

SEQ ID NO: 445535 - DNA, 119 bp, Triticum aestivum
gtgaggaagccggcgggaggttcacgtacgggagagaagcgacggagttaggagttgtaaatatgcattgttgtatcgcgacctgaatgaatggaataaacgaaataacgctgttgttc

SEQ ID NO: 445536 - DNA, 442 bp, Triticum aestivum
gggtccacagggatggtccgcctacgcagctcggacggtcaggagctcgaggtgatggaggaggcgatcgccgccgcgtctaagacgatcaaggacgcgctggagaagggcggcgccgccgacgacgccatcccggtccccgacgtcaccggccgagtcctctcccgcgtcctcgagtacgtcagcaggcacttctccgacccggccgcggccgccgacccgttcgactacatccccaacttcgacaacccgctcaaggccttcgacgacgccttcgtccaggtcgaccaggacacgctcttcgacctcatccacgcggccgagtgcctcgacattgaggggctgatggacctggcgtgtaagacggtggcggaccagatgaggggcaagaccatcgaggagatccgcaaaaagttccacgtcgtcaacgactacaccgcac

SEQ ID NO: 445537 - DNA, 451 bp, Triticum aestivum
attcccgggaccacgggtcatctaaacgatgaactcaaagtggacaggccattgtcctgcctgctataccttcgtctgagtgactgcagggtaactacgatagaactcaacgcccccaagctccaaacctttatattccaagggaggctggtgcctattcaccttggcgaatcttcagaactgcacaatattgttattcattcttatacactaacactagagcaagctatttgttcatttgctgatgcgtatccactagtgcaacgcctgactctgtgtcacacttgtgcactaccgaagttcccctggcgattggacaatacttctagcttttctcatttgagatatttacaactgttgttgaatatcttctctgaacatgccaacgacattctctctattgcatattttctagaggctgctccattccttcaggagtttgatttggagt

SEQ ID NO: 445538 - DNA, 441 bp, Triticum aestivum
gggaagcagcaaagttgagcatgcggtgtcgcgcttgtgatgcacagtgcttggctccggtacatcacagaggccggcagcaaggaacacagcttcctgcccttgcctctgtaaatcatcaaggaggaaaaatgtgcaagatgcttgaagtttccccttgaaacgaaggtcttgggcctttgtttgtacatatattcccttgatttgtactgactctccaattaattattcagagagctatggccatacaaggaaatcaaaagtttcagttgcatgtagcaaggaaggtcaatttgacacggcggtgctgccatttgcccctcccttctccctcgaaaatgtggttgacgctccccagatcttcaggttgcatgacaagatttttttcctgtggaacatattgtgtatcttccatcggtcatgagtaaattcaaatcaaaa

SEQ ID NO: 445539 - DNA, 437 bp, Triticum aestivum
  unsure (1)..(437): unsure at all n locations
ggggggcaagtaaggaactattatctagctctgcacttgattcaccttatgttttgagtaagcttgcaacaccaccacatgctattaatcctgatatgtcgcaagtaattaatgatgctacttctgctatgaatgatgttgatgatgatgctagtacttttcttgataagattgtgccactgggtgaatctcttgatgaacaacttgctagatctaaagaaattgagaatgctgaaaccaatgaaagtacttaaactgatgaaattattgaaactggaaattttgattcacctattggaactagtgccactagatatgaatttcctgagatacctgagggtcatgttatggatggagaagtagctagagactttcttgcttgtaaggatanagatgatcttaaaaaattactacgcaggctgaaagaaaaatctttg

SEQ ID NO: 445540 - DNA, 540 bp, Triticum aestivum
  unsure (1)..(540): unsure at all n locations
ggnnttacgcctgccggtaccgttccgnacgntccgtagcgntccanggnttccngggagangngngncaagcatggctgtatgatcnagcaccttgagcggctccacgataactgcccgacttttagggtggaaaagtgatattntagtaaaaactatgttttgaaagggttgtnatacctgtatctccgcaacgtccgggcaattcnactttgatgaatttttggggggttccaatcttngcgctatgctangacattccctacagaactgttctgcattgntgacagcattcggtttttccctacnntgtttgcccnctttgatcanncnangtgctnctntgggtntnttatnaancccctaagatanntgngaatacngtatggtatnccaccagacanaatgttgatcngagntcattacantacctnnaanctggnncnnntaagctntnntcgctancgggcngtcaccatatnntcgactnaaaanttccggccatggtgnccttcctcaaagttttgggngaaaattnna

SEQ ID NO: 445541 - DNA, 104 bp, Triticum aestivum
ttcccgaggccacggggcacggatttgcaagagagagacggtaccaactatcaatccatgtaggagcaaaggaaacccaaacacatataacaatcgaggaatcc

SEQ ID NO: 445542 - DNA, 365 bp, Triticum aestivum
  unsure (1)..(365): unsure at all n locations
ttcccgagtccacgacggtggtgttggtgagcatgccgatctcgagcggcatgcagccctcgagggtgttgttgaggaagatgatctcgtcgagcgtcttggccatgcggccgatgctcttggggatgcatccgacgaacttgttgtttgcgaagacgacgacggaggcggtggagttgccgatggtctccgggatggggccgacgaagcggttgctgttgacgaagatggcgtcgtatggcttgtcgaagagcgcgggcggcagctcgccctcgaactcgttgaagcggatgtcgatgtacttgagcgtgggcatctcgaggcagacgtangggacagggccgacgaagcggttgttgctgacg

SEQ ID NO: 445543 - DNA, 301 bp, Triticum aestivum
tggatgcacaggcgctacgaatccatgcttaatcgatatggatcccattggttcagcacgtttcgtactacatcttgatgatatttggcaggaaacattttgcgcaggtttacaacgtgaggaaactcttcaacacatctagagtatggaccattcacacgccattggtccatcatgcagtatccgcgcttgggactggaacttcagctcacccgtgcattataggcccgaccagtcagtacaatatcctaccataacacgtgacgacaccaccgggtcattactctaaccctttggttaa

SEQ ID NO: 445544 - DNA, 490 bp, Triticum aestivum
  unsure (1)..(490): unsure at all n locations
ggngttancctgccggtacttntacnanggcccgcgggtcnacaagctcactagncngcgccgctctagaggatccaagcttacgtacgcgtgcatgcgacgtcatagctcttctatatgtcacctaaattcaattcactggccgtcgttttacaacgtcgtgactgggaaaaccctgcgttacccaacttaatcgccttgcagcacatccccctttcgccagctggcgtaatagcaagaggcccgcaccgatcgcccttcccaacagttgcgcagcctgaatggcgaatgggaccgccctgtagcggcgcattaagcgcggcgggtgtggtggttacgcgcagcgtgaccgctcacttgccagcgccctagcgcccgctcctttcgctttcttcccttcctttctcgccacgtcgccggctttccccgtcaagctctaaatcgggggctccctttagggttccgatttagtctttacggnacctccaac

SEQ ID NO: 445545 - DNA, 443 bp, Triticum aestivum
ggggtgatgagtaagctctttgagaaggacactgagcaactcgattcgtcggaagtgcagaaacaagatgatgttgttaacatcatggaaccgtctgatgctgagacagaactctctaatgctgagacggaaccctctgatacggagacagaaccctctgattccgacaatgatttgccaatggaagaaacaacagaaactcctgaagaagatttggatgacctccaaatggaagaaacagacgatccttctgaagaagaattcgatgatgaccttgtgatcaacattgctcctcgcaaggccaacaactcagctgcccagttaaatagggcaaaccaagcagtgaataaggacgagcggttcagaaaacgtcagcactttgatgagatttctccacaaatgaagagacagaaacctgaggatttatctgaacctagaaacca

SEQ ID NO: 445546 - DNA, 444 bp, Triticum aestivum
gggatagcgcaagccaaggaagacctggcggcagagaacactaggatgactatggaacgggccgctttggatgctcaggcgcaacgaatccaagctgattccttccggctctcattggatcagaacgcttcaaacgaagtcctgaggagaaggcaccggagtcgtctgccgccggtttacaaggtgaggaacctcttcaacacacctagtgtagggaccagtgacccgccaggggtaaatcaggcagtagccgcgcttgggactggagcgccggctcaaccgtgcatgacaggcccgcccagtcagaataatatcctaccacaacacgtgccgacaccaccgggtcattactctaaccctttggataacatgatcgttgtgatgtcgtgactggcggatctcccagttgaaggcgagtctctagcggcggttgaaacgcggaag

SEQ ID NO: 445547 - DNA, 440 bp, Triticum aestivum
tcctccagccaccacctgtgattgttcatccacgggctcctgttcatcgagcctccaccgcgcgctactccacgggctactgttcaaccagccctctccacgggctcctattcaaccaccccttcatgggctattgttcatccagccctctaccgtctactattcatccagacctccacggggtggtcctgttcatcctgccctccatggggtcctgttcatccagccccaactggctcgatcgatcggggtcctgttcatccagaggcaacaccacggggtcctattcatccacccacaccaggaactgttcatccaacccccccagcaacgctcactgttcatccaaaggcagtatcgatcggcttcagttagcagcagtagcgaaggaatcgttcgatcgagttcagttaacagccatcgattaatcgctcgggttc

SEQ ID NO: 445548 - DNA, 462 bp, Triticum aestivum
ttcccgagtcgacgggatgcggctgcggctgcagccatagccgtgaaccatgtgtggatgaggtgagggagatggagtcgatagaatccctaaggaaagctttttgcaagcagatcaaacaaactggaggggtggcgctccatgctcggtagggtaggcagtcatgatgcttattagggatgggagttggtagttgggacccaggatcgtttatgggctgtgtgggctgactaggcccgtttcttgctttgcctattttccaatgcttctgtgtgcagaaccatgtgctactttagtgtttgtgcctaagatctattgttcacgaaccccaaccttcgatttgccgaaccctgatctctgatttgccgaacccgaccttcgattcgctgaaccccaatctctgatttgagatctgccaaacctgacctttgattcgccaaatcccgatctctgattcgccaa

SEQ ID NO: 445549 - DNA, 448 bp, Triticum aestivum
gggtcgacagcaggttaggtgcagcaggggaagttctttgtctgctgatgaatataatactttcatgaatatatttgaaagggattctcttctctattgcaatatgtcatttgatgcactgttaagtgttcgaaagcaacttgaagaatttgaatttccttgcaaagctgtaaacgatggtctttggctccagatgctcctgtgccacagagtgcaagcaatagttgctgatacttgcagaaactgttgccttacaagtaattcttgtgcttgtaaacaagcatatgttggtacacacagccactacaggcaggagcatgataggacaagtgcttcaggaactgcaggtagtatctaccttgcagatgcccaaggcgatgggaatggtatgtttagtcctgtgcgtgttaacgtaagaggagcagttgatggacttgctggcattggg

SEQ ID NO: 445550 - DNA, 432 bp, Triticum aestivum
  unsure (1)..(432): unsure at all n locations
ttcccgagtcgacggggactagttgagattctagaacagaagaatgcccgctacgtgccctttgatggctgggagaagatcgactccaaagagaagacggccggcgagctgaagaacaagcctagggagaagatcacaagatggaatgagctcctggaagctgcaagggagggttagttgaagggccacacatatgcatctgacggagctgctggttcatgcgtaaactgaatcaaagaaacaaactacgagggacaatctgaatactgacacaacagaaagaaagtcaagtgctaatgtgtcttagcaatgaatcatgcgtaccaatactggttaaaatcccaaaaggctcgatcactgaagccacatgaaactactgtattcgtgagatgcanctcgtctaaatcatgggcattcctttggaaaaaaaaa

SEQ ID NO: 445551 - DNA, 388 bp, Triticum aestivum
ttcccgagtccacggggaggaggaggaggtagggaaggaggcttctctcggagacatcatcaacctcaagttggtggagagcggcgagaaggagcggctgatggagcttctccgggagcggctcgtagagtgcggctggagggatgacatgaaggctctctgcagggcttatgcaaggaaaaagggaagaaataatgtaacattagatgatcttattcatgttattactccaaaaggaagagcctcggtgcccgatgcggtgaaggcagagctgctgcagcgcatccgatcctttctcatgtcttcctcgctttggtagcccatgaatcacgccgatcggaaggcacgtgtaggaagcttgaagcatcgatcttgaacgcgtgacact

SEQ ID NO: 445552 - DNA, 303 bp, Triticum aestivum
atagaaaattaccgtgggcgagatgctcgggattcacctgccgagcgatcacttcaatctgcagagcatcatactcatcgagtacctacaggaacggatcgtgatgcaatgcgctttcgtcaatgatatgcatgatagccaaatgcacctctacctatgcgtctagacgagacatactaggtacttgggattccttttgcagtagtaaatatatcgtcgcagcgagcgtattccaaaatatattaacggtacctcgagtcgcagaccaatgagcagtgcactgatacaatcatctcaaatatc

SEQ ID NO: 445553 - DNA, 448 bp, Triticum aestivum
gggtcgacagggatgtaggacgaaggcttttctcgccaactgaactccaataggctattttggactttttgcacataattattaaagatagattttcgtgccatgcgtaaaccaagctgctgagagtctaccccagccacaagggggagctgctccagtagttcaggataccccacccagccccacaagggttgacggaccccctacctatacctatacctgatgattacctatacctgatgattttcaatccacagctcattttcttgaatatgtgacaagccttgcaaattgtgataatatgtatcaaattagtggtccgcataacccaatatttgaaaattatggaggtgcaggcccaagtacttcgaatcatcaacaagaaatccaagaaagaacagcgaaggaaaaacgtgacaagaaaagtgttttctcgactcgagatgtt

SEQ ID NO: 445554 - DNA, 439 bp, Triticum aestivum
gggagaagtattgggccttattgggccatacgggaaagagagagggtctgcctagggcaggccgcgcgccccccaaggcctagtccgaattggactagggggaggggccgcaccccctccttccttcccttctctcttccctttccttctctcctactcctactacatggaaggtctcctagttggactaggaaaggagggagtcctactcgtcctactcccggtgggagtaggactcctccctggcgcgccctcccttggccggccgccccctcccccttactcctttatatacgggggcaggggggcaccccataacacacaagttgatctacggatcgttccttagccgtgtgcggtgcccccctccaccatattccacctcggtcatatcgtcgcagagtttaagcgaagccctgcgccggtggagcatcatcat

SEQ ID NO: 445555 - DNA, 433 bp, Triticum aestivum
ggggaggtcgaagccctccggagagaagtagagatgctcttccaacagaagctcaagccgggtacggctaccgcggcgttatagacactcggatgaacgcaagggaaacaggcaggcgtttccgatccagtgaatcagtgctggctgccaaacttttgaaagagtagattgttttcagaagagtctggctgttgagctgagtcccttcttacttttgccggagggttatagtgttgtaggattcgatggaacataggttagagacacttgatatgatgatatgggttagttttcccatttgcacagcaagctatgacacccccctgtgtttcttggaagatttccttttttattggaagacacgatgatcctccattcctcctgttatagaagtgcaaagacgtcttaaaaaaaacagagaaaagtgaaaaca

SEQ ID NO: 445556 - DNA, 498 bp, Triticum aestivum
  unsure (1)..(498): unsure at all n locations
gnaactgtgtacgccgggtngtaccgccccannaattcccgangtccacgggaaccaacaaaaannncaaaatgannaaaagcggccgcncnaaaggatncaagcttacgtacgcgtgatgcgacgtcatagctcttctacagtgtcacctaaattcanttcactggccgtcgttttcaanatcgtnactgggaaaaccctggtgttacccaacttaatcnccttgcagcacatcccctttcgccagctggcgtantagcgangaggnccgcaccgntcgcccttcgcaacagttcgcancctnaatggcgantgggacacgccctgtngcggngcattaaccgcggcnggtgtgtggttacncgcagcgtnancgctananttgcnnnangccctagcncccgctcctttcgnttcttcccntcctttctcgccnngtncgnccggcattcccngtnaagcnccaantctggggctccttttaanggttcccattta

SEQ ID NO: 445557 - DNA, 441 bp, Triticum aestivum
gggtcgacaggtatatggagcaagcatcaagggatgagtaagagctcttcagaggtataagacgataaaataaccttgatgtccgtgagatggcagttgcaaatcaaattacgagcggctatgaacgcccgagtagcgattattaaatgagcaaaggtctaaggaatatgaagaaacttctatggattactacgatttgagagctgacaatggtgtaaatggacaaaaaataccagtgtaattcacaatttgacaagtggtgaagccaagtccaggtcaaagcaatcgaaaacagaaaatgttcagatttggttacaactatagatctggaaaatatttgaaaaagaaaagaaaaacctaggtatggtggagctgctaggtgaagaaacggcaatggagtccacttggtgcaacaagagggatctaaaacgtgatcaattt

SEQ ID NO: 445558 - DNA, 137 bp, Triticum aestivum
tgagttagatctcaagattaagaataaggacaagtcctccggtgaatgaggaggacgagaaggagatcgagatagaaatcgacgccaaggttgtggagaaggaagaggtgtccagtggtggttcaaagtctgcaggc

SEQ ID NO: 445559 - DNA, 228 bp, Triticum aestivum
  unsure (1)..(228): unsure at all n locations
acngtnactgaacntcattcgactncttgtcatgntanggaganntgtgctttnngnatatnctngnagtctgtcngatncnatacnatnttttttncatgaccactgtctcannggatctatgtnaatgttatcacccggttgcactgccatggtgcntgtcanaattaanntntaagaatttccattnggtaattttggtaccnatccgtaaggaanaaaaanttg

SEQ ID NO: 445560 - DNA, 197 bp, Triticum aestivum
acgggtcaacgaactcattggcgcaatgatgaaattgctacttgaaaattgttttagtatatggaagtaatgatattaatctcatgcaaattgggtgattatgacctgatacaaagcatgggttgaagtttgcacgtcccgttacaggcacgtgtcgataaagttgtgtcacataattagtgcatgaagtgctacca

SEQ ID NO: 445561 - DNA, 71 bp, Triticum aestivum
  unsure (1)..(71): unsure at all n locations
antnntccctctttctccactttcttcctctcttcttntnntccnctttttgccccctggcnnttttctnc

SEQ ID NO: 445562 - DNA, 443 bp, Triticum aestivum
gggccttatcaacgcttgcctcgtcggtatgggcgcgaacgtgttctacggataacagccggccaccccgcgacggttgcccatcttgtgcgggagagacactcgcacttgggctccgctttccatgcgccgatacatacatagatggcatcgcgggttagggaaactccaacgaggcacaccaattctgcatccctaaatatccggaccgaatagtctggaagaccgtttggtcatcaatccaatgggagtcaccaaatatccacggaccagttcggatgtccggaatcccacataaaccgaataggattgatgggtgtgggggtctcgccaaaaaattgcttaacgggtcaacggtacaatcgcatactcatattaaccactcgattacaaaaaatgctatgggagtagcatcccattaggacatcgggctcaattcacga

SEQ ID NO: 445563 - DNA, 182 bp, Triticum aestivum
ttcccgaggtcacctgaccctgataaacgcgacagttaacgctgcatacattgttgatttcacgtgtttttctacaaatttttcaagtgacgctcatcttgtttaccggtgagatgtctatattacacggtcttgggaatgggacgtgatttaaaatttgtatctaagttcaaggaaaatct

SEQ ID NO: 445564 - DNA, 501 bp, Triticum aestivum
  unsure (1)..(501): unsure at all n locations
gnnnnnnngnaattctacgccgggcngtaccggcccanaattcccgngncnctctagagatccaagcttacgtacgcgtgcatgcgacgtcatagctcttctatagtgtcacctaaatcaattcactggccgtcgttttacaacgtcgtgactgggaaaaccctggcgttacccaactaatcgccttgcagcacatccccctttcgccagctggcgtaatagcgaagaggcccgcacgatcgcccttcccaacagttgcgcagcctgaatggcgaatgggacgcgccctgtagcgcgcattaagcgcggcgggtgtggtggttacgcgcagcgtgaccgctacacttgccagcgcctagcgcccgctcctttcgctttcttcccttcctttctcgccacgttcgccggctttcccgtcaagctctaaatcgggggctccctttanggttccgatttagtgctttacggcacccgaccccaaaaaaacttgantaagggtga

SEQ ID NO: 445565 - DNA, 376 bp, Triticum aestivum
cgggtcgacaggctatccgagacaggtcctcaaaaatcaaggccaatggcaccaacaacaacggaatccggaacaacattcccaattccggccaggtaaaccggttgctgaaaacaaagcattgcactgcaatttggaaatggttaaccgagtgcatgtcccggtcaagcgtcgttgctgcacgcaggggctggccctgcatggattgatgtatttttacactcaagctcgcaatgtaacaccgacatttgttgttctctagcatctactactatacgtgattgcaacgaacggaccaagacatctgatgaacacttgtcatgtttccctgtcgaaaatctttaatatatcaggaagcgttgctgctctgcatcta

SEQ ID NO: 445566 - DNA, 371 bp, Triticum aestivum
aaaagccggtggaatcgaaaaggcggagaaggtgatgggctggattaatttgatggaatttccacacggatatacaatagccttctagtctgaggtctgtggtgttgtttgtggcagtctgtgaccccttctaatgtcaggcatgcagtgtacataacgtgcaacctgagattgttgtattaggagaaaatagaatttggacgctagtgtccgagtttgagcagtatggcaccatcaagatcccttgtgatcttccctcaaaaaaaaatcccttgtgatccattatgcagtggggcctgaccagccttttacgtttgtgagagtcgaatcttgtgttgccatgtggaatgtttgtgtctttgtttcagagc

SEQ ID NO: 445567 - DNA, 444 bp, Triticum aestivum
gctacgtaccaaacatacatacgtatacagaggactagctagacgcgctagctacctagtacgcagacaggatatcggcatgaacaaatatgcatacagagagaagtgatatcgaccacctctccttctccgagagattggtcgaacagacaagttctcgtatatctatcggagactaccggctagatatagacaatagatatataatcgcctacagtacggacgcgtggtctacatactattctccgtcttcagcgatcacgtggtcaataaagaatgccgccaattcctcttgaattgctcgcatgcgatctggtgctacgagttcatcccgcatcagagacatctaattttaatacgggggtcaatacatagatatatatatatggatgaatgagactcatcacaaatgatggtaactacatgaaactgtgaatactgtta

SEQ ID NO: 445568 - DNA, 500 bp, Triticum aestivum
  unsure (1)..(500): unsure at all n locations
gngttannnggccgnaattctacaaaggtcggtaccggtcacaaattcccgggtcnacggctcactagncggcggccgctctagaggatccaagcttacgtacgcgtgcatgcgacgtatagctcttctatagtgtcacctaaaattcaattcaactgggccgtcgttttacaacgtgttgactggggaaaaaccctgggcggttacccaacttaatcgccttgcagcacatcccctttcgccagctggcgtaatagcgaagaggcccgcaccgatcgcccttcccaacagttgccagcctgaatggcgaatgggacgcgccctgtagcggcgcattaagcgcggcgggtgtggggttacgcgcagcgtgaccgctacacttgccagcgccctagcgcccgctcctttcgcttcttcccttcctttctcgccacgttcgccggctttccccgtcaaagctctaaatcgggggtccctttaagggttccgaattaatgctt

SEQ ID NO: 445569 - DNA, 264 bp, Triticum aestivum
ttccgggtccacgggccatgttcacatgaaaggccagcccatacagcagcagaacagcagctgctgctcctcataagctcagcaagtcgagcagtgaattggatatactgaatacagaatttgtatacaacagagcgtgtgttaatacttactgtttaatatacttgtcacagtttgagcttgttctacaatctcattagtcattacttcgtcagtgttttaggcgcatttgatggatgttaggttacaaaaattgtatgaaaa

SEQ ID NO: 445570 - DNA, 387 bp, Triticum aestivum
  unsure (1)..(387): unsure at all n locations
cgggtatcggcaaaggggtgcgagagtgagagtgtgagtgagggccggatgatacgccatgggacggaggcacgttcaagcttaccttgcagtttacagaagattaccccaacaagccgccaactgttcgttttgtctctaggatgtttcacccaaatatttatgcagatgggagcatctgcttggatattctacagaaccagtggagccctatatatgacgttgctgccatattgacttctattcagtccttgctgtgtgatccaaaccccaactctccagcaaattcggaagctgccagaatgttcagcgagaacaagcgagagtacaaccgcaaagtccgcgagatcgtggagcagagctggactgctgactaaggcanggcga

SEQ ID NO: 445571 - DNA, 497 bp, Triticum aestivum
  unsure (1)..(497): unsure at all n locations
ggnngttacgcctgccggtacgtttncgaagggtccgtaggnntncaaagctcactaggccgcggccgctctagaggatccaagcttacgtacgcgtgcatgcgacgtcatagctctttatagtgtcacctaaattcaattcactggccgtcgttttacaacgtcgtgactgggaaaccctggcgttacccaacttaatcgccttgcagcacatccccctttcgccagctggcgtatagcgaagaggcccgcaccgatcgcccttcccaacagttgcgcagcctgaatggcgaatggacgcgccctgtagcggcgcattaagcgcggcgggtgtggtggttacgcgcagcgtgacgctacacttgccagcgccctagcgcccgctcctttcgctttcttcccttcctttctcgcacgttcgccggctttccccgtcaagctctaaatcgggggctccctttagggttccgattaatgctttaaggnanctcnacccc

SEQ ID NO: 445572 - DNA, 177 bp, Triticum aestivum
gggacgggagtaaagttacgtggccaacttcttgttttcaaaaggtttccaaataaaagttcagtgtcatgacgttgggaagaaaaaaaatttgctgctcttaaggctgcgatgacagtattgttgttagttgtcagcatgttgcatcactgtgtggtgtatgttggatgttgttgg

SEQ ID NO: 445573 - DNA, 199 bp, Triticum aestivum
cgggactcgagtaaagttgcgtggccaagttcttgttttcaaaaggtttccatataggcgttcagtgtcatgacgttgggaataaaagtctattgctgttcttattaatgcgacgacactagtgtagtatgttgtcaccacgctgcatcagagcgtggtgagtgttgtatgttgtcggtcaggcaaaaaggagatgggg

SEQ ID NO: 445574 - DNA, 407 bp, Triticum aestivum
  unsure (1)..(407): unsure at all n locations
agtcacggatggccggcagctcgagcactcctggagtttgcagctgccgtcgtagcagtagctacagccctgtcggctgccgtagacgccctctcggtggaagcggctgcgctcaatgcggatgtggcggcactctcggtgtaggcggccgagctcttggtgcaggcgcggcgctcgggggggggggggcgcggccatcgtactggccttcacgaagcgtttccacgacgtcatctttgcaagaagggggtgcgggaatggggatcaggattcatggattcgggggttgccggaacaggagtanacgagccggcgaagcttaaagagggagacttaaatagacccagatattttcatcgcaaacggttcctagaaaagaactgtgtgtgatgtcgtagataattttt

SEQ ID NO: 445575 - DNA, 449 bp, Triticum aestivum
cccgggtccaaggcgatcacagtgttgaattttggatttagttcactattttgacctggtgaacgagctatttcattgaatcgagatatttcattttgtgtttgattcccattttttagtgggtcaactatttgtcatatagtaaattgctagcaacgagcatgtaaaaacacattactcccgagcatcatctctccgtctaaaaaagaagtggcaagctaatatttcaaaatttgattcacatcgacttggtaaggtatacatggatgctcgttctcccaaattttgaatgatctgttaaacatcctctgctcggtggaattcactcgagcaaataaatgggagacgcaaaattaccgtcctatgtgggacacgcatcaattggcccgttctacatcgagggtaggttcgtaacttcatccaaccgcgccttctcctcggccgaaatg

SEQ ID NO: 445576 - DNA, 396 bp, Triticum aestivum
gggtcgacagggttcctggatctaggcgaaatggaacacttacgaagctgtcaataattctgcaacaaaacatcactggatatttcgtcgctcgagggggttcaagatgatcaaagcgtacatgccattccataccgcgtcagaaaacgtcaagcaggtcaattcactgcacgtcactggacaacgtattatacgctaaagacggggagatacctatcttaacccatctggaacacattgcaggttacccacctttcgtcatacggcttaacgccgaacaggtctccattgctaacatttccgaaaagttaatgaccaaaatgacccactgtgaagcgccccattaccggccatgaatctcatcggtattcacagttacaccaagggtcatcacaa

SEQ ID NO: 445577 - DNA, 446 bp, Triticum aestivum
  unsure (1)..(446): unsure at all n locations
cgggtctccattcttctggggacatcagagacgtcaaaaacttatacacattgtgtacactcataaacacattagacccttaacctataagtcttcaatacaccaaaatcaccaaggggcactagatgcacttacaagtcacccggggattcatggatggatatacactttggaccagacacgatgaagagccagtcatggatggatatacccagggctgcgacatgccaaatcccgatcagagtcacatggatgttgaatctaacatcagggctgcggcatcaagctaccaatagaataccgaaaagacaaaaaccccactggaaaaccaagacggcgatgcagaaaatgacgacgacgaccttgatatgccagattttgttgctatgattgctgatttgcagggcccaaaaaaagatatggttgggtacaangacctgccatcc

SEQ ID NO: 445578 - DNA, 113 bp, Triticum aestivum
ggggttagtggattttaaaccagaaagtgaaaatagcaaaatgatacaattaggtctaagttttgtagtttctttgtttggtattatatgaagtcatcaagcattgaccctgc

SEQ ID NO: 445579 - DNA, 443 bp, Triticum aestivum
gggttcggcctcttcgcctcgacccacggcgagtccccgccgatgcaggtgagcgcgagctactacggcgccgcggagctcgaccgggccacccatcagcacaagctggtcaagggagacgacatcgaggtgcatcttgatcacatgcacatgggggtgggcggggacgacagctggacgccgtgcgtgcacgaggagtacctgctgtcgccggcggcgagctacaggttctcgctgcggctgcgccccctgtcgccgtcgtcatcgtgccacgacatctacagctcccggctacctaattgatcgtcccatctgtctgatgtggccgtcagaggtgcgtctgagagagaaagaacattcgagagactgaaacaatactgtccgagtcgctctcgctcgtgtaaacgtaagaagactgtaactggacaggtacctgtcaataa

SEQ ID NO: 445580 - DNA, 85 bp, Triticum aestivum
cgggtctacattcttcgctggacatcagagacgtcaaaaacttatacacatgtgtacactcataaacacattagacccttaacct

SEQ ID NO: 445581 - DNA, 373 bp, Triticum aestivum
gggaagactagtatgaatgattcaaaggagaaggatgagaaaaagaaagaagatggcgacagctcacaaaaggagaaggccaagacagggaaagataagaagagcgagagcaaagataaggataaaattagcgtcaaggagactggatctgatgcagatgacagtacccccaagaacaaaaagaatgataaggacaatgcaaagaagaatgatgaaagcgatgaaaaacaagagaaagacaaagagaaggaggaacatgataacaagaagaagcatgtagaagtgggtcacgcaagagaaatcaagctacaagataatgagtctgcgaacaaagaaactggtgcttctgaagagaagaatgatggcacggaca

SEQ ID NO: 445582 - DNA, 386 bp, Triticum aestivum
gggtcgaccggaacgattaattaaatccagcacgcagacctgcatcacgacagacagcgagcataggaaggggacgcccatttacatttacatatatagccctgctgctcctggcccctttccccagttccatcccattattggttcttgcgaggatggggcggagaaacggaagcatgaagcggagaggagatcaggcagcccttcatgcacagagggcggcgagggagggcgcgatggcgtccaagaggatacagaaggtgctcaaggatctgcagtaggatccccccacctcatgcagtgcaggtcatgtgggtgaacatatgttccactggcacgcaacaataatgggcccatctgacagcccatattctggtggacttttc

SEQ ID NO: 445583 - DNA, 423 bp, Triticum aestivum
gccatagaggcagaagcccatgcggtagccaaacagatactcgaacacgtccagaaacgaccacacgaagtagccctgcacgttcgacccgttcctgctggattcgagggtctcctcgatgtaatcctgcaggtactgcgacctgaactcgtcgtcaggggcgttcccagcagacggatcagcaatgctagcagctccgttctcatggatcatgactatagggttcttgtatttgagctggagatgctccagcattttctgcagagcccacggtttcgatgtcatgaaatcgcttttcaacccagacaggagctggttcttcttcaaaactggcatgtcatagttcactgatgcatcacacatgtaatctctcagctcatcatccagcttgctaagatcagccttcacatataccgcaatgta

SEQ ID NO: 445584 - DNA, 272 bp, Triticum aestivum
tggaagtctacaagtgcttcaggatgctcaagtacattgtcaggaataacgaactgcgccacatctccatcaacatgatgtccaacatcgacgatgtttctgttggtctcaaatgcttgcggcacggggcagcagtgtaactggtcaagccgcttcgcatgactcatctgttggaactctggacccatgtgtggccagtgagacagcagcttggataggtccataaagatttcgtcaatgtcaatcgtgacttggggctgtctgtaactaat

SEQ ID NO: 445585 - DNA, 385 bp, Triticum aestivum
gggcaattcatcagatcttgacaaacacaccgcaaatgaagattacatcgaatagatctccacaagagagggggagaactagtaaaatattttatgaacaatagggaagttggaatacagtaagtttaaaaccaatattaataaagagcgagttcagtacagtaccttgaagtggtgttttgttttctttcgctaacggagcttatgagattttctgttgagttttgtgttgtgaagttttcaagttttgggtagatatttgatggcttatggaacaaggagtggcaaaagcctaagcttgggaaagcccatggcaccccgagtaatctaaggacaccaaaaagcctaatcttggggatgccccggaatgcatcccctctttcgt

SEQ ID NO: 445586 - DNA, 169 bp, Triticum aestivum
taccggtcctaagatcgcgggacgtatgtgacatcacaagcaacgagctgggcacggtgatgctgtcgctggggcagcgcccgtcagaagaggagctgcgggagatgatcgcggacgtggacaccgacggcaacggcgtcgtggaattctccgagttcctgaacctcct

SEQ ID NO: 445587 - DNA, 453 bp, Triticum aestivum
  unsure (1)..(453): unsure at all n locations
ccgggtcgacgggggattcttgatcctgctggacgtgatgcgactgttctgaaagaagctctaagtgctgaaagtcttgatctgaaagcagctactgatataatatgttccaggacaccatcacagctgcaaataatgaaacagacatattatgcaaagtttggtacttatcttgagcatgacattagtcagcaagcatccggcgatcatcagaagatcttactagcctatgttggcattccacgctacgaaggcccggaggttgatcccactatagtgacacatgatgcgaaggacctctacaaagctggtgagaaaaagctgggcacagatgagaaaaccttcatccgcatcttcactgaacgcagctgggcacacatggcagctgttgcttctgcnttacatcacatgtatgatcggtcgttacagaaggttgtgaagaatgaaacatct

SEQ ID NO: 445588 - DNA, 378 bp, Triticum aestivum
gacggggaagaagaagaagaggaagaagaagaagaagaggaagacgaagaagaggaagaggaagaagaagaagaggaagaagaagaagaagaagaagaggaagaagtagaagaggaagaagaagaacaagaggaagaagatgaagaagacgaagaagacgaagacgaagaagaagaagaggaagaagaagaagaagaagaagaagaagaagaagaagaagaagaagaagaacaagaagaagaagaagaagaagaagaagacgaagacgaagacgaagaagacgaagacgaagaagacgacgaagaagaccaagaagacgaagaagaagacgaagacgacgacgacgaagaagaagacgaagacgaagaataagaagaa

SEQ ID NO: 445589 - DNA, 167 bp, Triticum aestivum
acgggtaaaacgaagacgaacaataggaacatgcaaaccaagaagacgtagagggagaaggctaactacaggaataagtaatagacgaagatatcgagcttcaggaagcgggtcacgaagacgaatatgaatgtctcgagggacatgcagacgaagaagaagatgaa

SEQ ID NO: 445590 - DNA, 376 bp, Triticum aestivum
gggtagtcacattgcacgcacagtgcataccaagacacgccaacagcccgtcatgtagcaatcttcatgtgttttcactaatcatggtctctttggactcacggatgccataagggccaaatgcatcaatattgacacgttgcactcaaacgtgccacttgggccaacatggataatgggttttttactagcaaggatcacataagccattatatagtgttggtaccctagctaataacaacatatatcaacattggtcctagttgcagcttcacaggaccacttatgcatgtgtcgataccatcttgaccaacacgcaacaacattggtctcattagattgatacatgccataaggggtccaaatcattcaccaa

SEQ ID NO: 445591 - DNA, 254 bp, Triticum aestivum
gggtacatcatcctgaggcgggaccacacggttcagtcttaagtacggatgcattggacgtcatagtgctgctacaatggcacgtatcttcagctgatgtggccatcgttatagaagatccagactgggatgtcgctgctctgatacaaattacgcgtcttgtatcaaattctcatttagacagatggattaacaccgaaaaggttggcaacgttcacacatagtacgagttgcacaccctgactggtgaagag

SEQ ID NO: 445592 - DNA, 429 bp, Triticum aestivum
ggggccacgggtatttttaaatatcacatgatatgtgttttgcctggagcgtcaattgatttcctttgtgttgcttgttgtttgaataaagataccaagatctgaaattgttgaatgggagagtcttcacgggggttgcctacttaattgactactcattgatctttacttatcatctttcggaatagtttgttgtttgctcaaatgattcacttatatcttttacagcacggcgggggatttagtttaaggaaatggatgaactctcatgcttcacttatatatcttctagagtcctgaacagcatggtgatttgctttgggtatgaatttagtcccaatatgatgggcatcgaagatggatataataaacgactttcatatagagtgagttgaaaacgacagaagtttgattccttatgattgtttt

SEQ ID NO: 445593 - DNA, 368 bp, Triticum aestivum
ggtcataccagacctgtgggacccatatgtcagcgtcacaggttaaacaggggggtttagtttagtttaattaaaaattagggcactacggcccacatgtcagtgtcagcaggggggtaattaaattaaaataaactaaactaattaacaggggggctggccccacctgtcatcgacccaaggggggtcaaacccctggtcagcagggcctaacctgccggcggcttgacgccagcgaggccgagacggcggacgccttcggacttcttgctccggcggtcaaaccggtggatgaaggcgtctaccttgagctgtgactcccccgcatccatctgtgcaaacgtcaggggctgaagtggcccaagctc

SEQ ID NO: 445594 - DNA, 212 bp, Triticum aestivum
ggggtaccgacagtgtgacggcaccctcctagattctcataagcacatcagcatcaagctggatgagaacttaaactgggtacaatatgtcataccgagtggttgcctacatcagtaaacatgaggaatgctgcacatgctagcacttaaaattaattgaatcttaccaatgttctaacgtaccccctgtcataccagagttattgtcttgg

SEQ ID NO: 445595 - DNA, 138 bp, Triticum aestivum
cataccgagaggttgctgtcatccgtagacatgaggtcttcttcatatgcttgagcttaaaattgattgaatcttaccaatgtactaacgtgcagcatgtcataccaaagtgattgtcttggaaataacaatttacat

SEQ ID NO: 445596 - DNA, 301 bp, Triticum aestivum
attcgcgggtcgacggggaatgctatgaaacctgctacaaggagctgaccaatggcggcgaaaaactcgacaatttgtgcaccagcaaagagggctcggacgacatcggcatggcccagctccccgaaatccgcagcttcaacaaggggaacaaccgggcccaaggccaattggaattccaaaaggttcccccttgcaattgccaggagacaacccgacaatttcccaaggagaaccaatgccaaaaaggcaatggtggtcctgaatttgcccgttaccaaattgcccaattaaggaaaaa

SEQ ID NO: 445597 - DNA, 372 bp, Triticum aestivum
tcgcgggacccggcgttcgcgcagcggctgcggaagatgtgcccgcggcccaagccggacgacaacccgcagcaggcgcccaaggtgaacttcgacgagcgcaccggggagaagctggacaacgcctactaccacgagctgctggcgcggcggggcctgctgacctcggacaacacgctggccctgtacacgcagacgaggccgctggtggagcagtacgccaaggacgacgcgctgttccatcagaggttcggggaggcgatgcagaaggtgagcaagctggacgtgatcatcaagaagaacaacgggcagatcaggcgggactgccggatggtgaacaaagccatcgaggtacgctggatgcccatccac

SEQ ID NO: 445598 - DNA, 312 bp, Triticum aestivum
gggacaatcacaggcagagaactgcgcagcgataatcagtctctgcaggatggacgtgctcaccgagggcagcggggaaataatgaaagtgtgcaacgcgtacgtagacgaatggagccggtcgttggtctacgtgagttcgtgcacgtgactccatcgatcgtcatgtggacggagtcacgacgggaggtgtgccagctagtcgcacagcacatggattactccatgggtggctacaaaattgagaacgtcacaccgacacgcggcgaatcctccggtgataatgaaatcagtcatatccttggtcatgac

SEQ ID NO: 445599 - DNA, 379 bp, Triticum aestivum
gggaaggattccacctatgagctttggacgacggtgaacaatctcttcgcctcgcaatcacagtcccggatcaccaatctaaggatcgcgatcaccaacaccaagaagggcacaatgtcgagctcggcgtatatggcgaagatgaagagccttggggatgaactggctgccgctggtcgtcccatctctgatccggagatggtgaactacatactcgcaggacttgaccgcaactacgactccgtggtggcggtgatcggcgctgtcaagaacacaatcaccgccgatgacctcttcgctcagatctccgcctttgatcagaggatggagatgctgggagactcgtcttcaggcgggtttcattcatctgccaacgccg

SEQ ID NO: 445600 - DNA, 238 bp, Triticum aestivum
  unsure (1)..(238): unsure at all n locations
cgcctgcaacgtacggtcgtaaattcncggggccaccgacggtaacacgacactgctccacttcgtggttcatgagatcatccggtcaggaggcttcaactccgacaagacagggaacgttcctgacactgtaaatcccagggtcgaacagttcaagaaggatagcctcaccgtgcttgcaaggctcagcaatgttccctcacacatggggaaagaatgtacacagagaatggcgaca

SEQ ID NO: 445601 - DNA, 443 bp, Triticum aestivum
gggtcgacaacttgcggcagaatgcggcgaatagggttttcccggacgcgtcgggcaaacgggccggcccataaccaggcaacaagcgatattaaaaatgactcgaaaaagaaatgcgcacacaacagtttcgaacacgcgacctcatgcttactagcggccacgccaacaatctgacctagctcctgaatatggccaattgaagtgcaaattttaaagtacaatgtacaacgacaaatcaatttttttccttcaaaatttccaataattcttgcaaacaaatgtaaacgattttccttaaatatatttgaaaatcgtgaataaatatcgaaattcgaacaaacacttaaaacccgaacaattattgaaaacgtgaccactattttgaaattccaatttattatatacgttattttttgtaaaatatatattaaacaattttt

SEQ ID NO: 445602 - DNA, 56 bp, Triticum aestivum
  unsure (1)..(56): unsure at all n locations
gggttcnnttantggcganggtggactacganggttnaggattgggggntttagtt

SEQ ID NO: 445603 - DNA, 323 bp, Triticum aestivum
gataaagtatagtttaggatttaaagtcatctgatcagaaaatgtaggattcatatgctatcaaacggttcaatcttcatgttccaagtaaagtggtcataagacttttaaactgtgtttattgtcctattgatgtatatgggtaaatttaagtctagagttaaggatcataggttatgtaaatttatctattgtctcaaaagtgctaaactacagatgctagataagtagcgagctttggggcgtatctaatgtcgaggaacatagtaaagatgtcatttgcacaagaagacacacaccaatctcaagttcagtttgcacat

SEQ ID NO: 445604 - DNA, 154 bp, Triticum aestivum
ggggaaagttcactccagcgtgatgttagaagtggtggagccttgcagttggtgcttcggtgttgaagatgtagatgcctgattagcatttgttgcgcatgttgaaccatgccaaattgtattgtctaacgatcgacctttattcagtcagatc

SEQ ID NO: 445605 - DNA, 375 bp, Triticum aestivum
ggtcaaaccagacctgtgggacccatatgtcagcgtcacaggttaaacaggggggtttagtttagttcaattaaagattagggcactacggcccacatgtcagtgtcagcaggggggtaattgaatgatgatactctagacaagttatcacgggggctggcccacctgtcagcagccacaggcggtaaaatccctggccaacagggcctatgctgccgctcgcttgcggccaccaaagcctaaagcggggcgggcatctcacgtctagctctgccggtcaggaagtcgcctgagggaatttcttcgaatccgggactgtcttcctcacaacggtgcaagcttaaatcgctaccatgaccgtggcccagaggagcc

SEQ ID NO: 445606 - DNA, 203 bp, Triticum aestivum
atgtaacctaagcgcgtccgtgaggatgagccgttatggatgggcttcaccaggatcagcatttgtgatgacaacatgtcctcgggggagcactttctgaacttccatgtgagccttcgccaactcttcagggtttttcatgagctccgacataggccacaccaaagtggtcgatgaggattcactaccaggctccaaagtat

SEQ ID NO: 445607 - DNA, 401 bp, Triticum aestivum
gggataggcgacgtcggctcttccccgcgtgagagcgataggacccctgggacattcgtactggcatgcgtctgttgcctgattgctcacaacggctgccgctccctggacctcaggcgggagacgttcgtcaccactgtcccgtgccacgagtccatcgagctcgtgtctatcccaatcagagccctgacgcatgacgcgcagccgagaatgaaaatgcttaggatgtttgccacgaaagggtttttactagctgggagctgtctgttgcactttgccttactataggctacaaccttgtgtccttgtgctgtgcaacttgtggcactcccagattgcagtcaaagttatggcatatggcgtaatgctacactctgttaactggaaaagatgcgacatta

SEQ ID NO: 445608 - DNA, 391 bp, Triticum aestivum
ggggttgatgcaagccctagatttagtctgatgacatgcttgctaatcatcattatcctgtttgaagactttacttcgtacattacattgaaagattaaatgaacaagtgcaataccacactgtgatcaaattctgccttgggctatggaatcccgggaacaattgtactcagctttctgtaataatccctatctgctgctagcatggcaacattgaaaaaaacatcagaaattctacttgagtgccttcaagtaatttagattgtccaattatttctgtcactggatactctttgtttttcactgatcacggatttgggttcagaagatttgctaatttaggttacgataatgttggactgaagttatgatggcgtgttgtagataaaaa

SEQ ID NO: 445609 - DNA, 348 bp, Triticum aestivum
cgacggggttgacgcaagtgcgacgtataatctgatgacatgcttgctcatcatcatgatcctgtttgacaactttacttcgtatagtacattgaaacatgaactcagcaagtgcaacaccacacagtgatcaaattcggcctggggcaaaggtatctcgggaagaattgtactcagctttcggtcataatcgatagccgctagtggcatggcaacattgacaaggacatcagcacttcaagttgagtgccatcaagtaaatgacagtgtacaattgcttcagtagatggtaaaactctgcgtctcagtgatgacggatttgggcacagtccatttggtaatttaagt

SEQ ID NO: 445610 - DNA, 487 bp, Triticum aestivum
  unsure (1)..(487): unsure at all n locations
gngnnnngngnntttttaggccgnncggtaccggacanaaattcccgggtcgaccccaaaaacttgattagggtgatggttcacgtagtgggccatcgccctgatagacggtttttcgcctttgacgttggagtccacgttcttaatagtggactcttgttccaaactggaacaacatcaaccctatctcggtctattcttttgatttataagggattttgccgatttcggcctatggttaaaaaatgagctgatttaacaaaaatttaacgcgaattttaacaaaatattaacgttacaatttaggtggcacttttcggggaaatgtgcgcggaacccctatttgtttattttctaaatacattcaaatatgtatccgctcatgagacaataaccctgataaatgcttcaatatattgaaaaaggaagagtatgagtattcaacatttccgtgtcgcccttaatccctttttgcggcaatttgcct

SEQ ID NO: 445611 - DNA, 381 bp, Triticum aestivum
ggggcactgcatgtttctaatcaccacggttgatggcgtgttctcatttgtcgagtgtttttaggcaatatttggaaagcgttaatccgttagtacggttcacctatgcccaagtgtcaaccagatcgcactagctaaatgtttttggttgtttattaatgaattataaactttgtcgagtgcccattggaaaatacttgacaaagataagacacttgacaaacaatttgaaaggacatcgacccctaattagggttttggtgttaatggcaatagtgagtagacgactaactatgtttcgagtatgctttgagtatatacatcattggaaatggaacataaagttcgtctgcgattccctaagctaaaaggataaaagaa

SEQ ID NO: 445612 - DNA, 407 bp, Triticum aestivum
  unsure (1)..(407): unsure at all n locations
tacggtcctaaattcncgggtccacgggtagcctctagagggacgagcagagtagcaggaggatgtaacctaagcacttccttgatgatcatctgtaagtaatggagttcaccaagattagcatttgtgatgacaacacgtcctcgaggtagcactttctgaacttctatttgagccttcgccatctcctcagggtttttcatgagctccgacatagcccacaccaaagtgggtcgatgaagattcactacgagctccaggtatgtcctagaaataagagtgcatgcatatgtggacatagataaaacagatagtaattatgacaaggtaaatagatgaaacatttacatcagaggtgataaaatacctaaccaaggttctaccgacaatcgtagacttacgagagg

SEQ ID NO: 445613 - DNA, 269 bp, Triticum aestivum
tggaaaatccaccaatcttgcaaaggtcgcttattggcttcttcagcataacctcagtgtcatgatggcagcatgcgataccttcagatctggtgctgttgagcagctgcggactcatgctcgcaggcttcagatacctatatttgagaagggatatgagaaggatccagcagttgtggcgaaagaagctatccaggaagccactcgaaacaaatcagatgttgttcttgttgatacggctggccgtatgcaggataatgagccactca

SEQ ID NO: 445614 - DNA, 120 bp, Triticum aestivum
caaatcgacagtagcatccgttttccccacaaatacagtatatattatagaggattatgtttttaggagtcacgttcatttggtacacccaagttacacattcgtgacattttctacccc

SEQ ID NO: 445615 - DNA, 51 bp, Triticum aestivum
gggtgtatcttcatccgtttgtgtaaacttgttccttgcatccgccatcct

SEQ ID NO: 445616 - DNA, 82 bp, Triticum aestivum
ggggttaggagttgtaaatatgcattgttgtatcgcgacctgaatgaatggaataaacgaaataacgctgttgttcaatcgc

SEQ ID NO: 445617 - DNA, 387 bp, Triticum aestivum
tgaagtacatgggagagggggggtcctcgtcgaagtgcgagaacgccatggccacgtacgttggctaccagcacccagagccatgcgcctagtcggccaatttgattctggtggatgctggtgcgaccttaatttaattctccttttcttcttctactaatctaattaatcaatgtttcctggacgaatttgttgtttcctgttgcttagatgttttgtgtgtgtgcggcattagggagctgccaattgctgcatctacggagtactccctccattccaaattactcgtcgtggttttagttcaaagggagtacttgcctagttgcccaatcagtgaactcgatcgtctgacaagtgggccctgtgcttatgttgacgattaatgtg

SEQ ID NO: 445618 - DNA, 490 bp, Triticum aestivum
  unsure (1)..(490): unsure at all n locations
tggnnngnaactgttattccggccggcagtnncgaacanaaattcgcgggtcgacgagccactaatcggcggncgctctagaggatccaagcttacgtacgcgtgcatgcgacgtcatgctcttctatagtgtcacctaaattcaattcactggccgtcgttttacaacgtcgtgacgggaaaaccctggcgttacccaacttaatcgccttgcagcacatccccctttcgccagcggcgtaatagcgaagaggcccgcaccgatcgcccttcccaacagttgcncagcctgaatgcgaatgggacncgccctgtagcggcgcattaagcgcggcgggtgtggtggttacgcgcagcgtgaccgctacacttgccagcgccctancgcccgctcctttcgctttcttcccttctttctcgccacgttcgccngctttccccgtnaaagctctaaatcnggggctccctttaaggttccganttaatgctt

SEQ ID NO: 445619 - DNA, 426 bp, Triticum aestivum
  unsure (1)..(426): unsure at all n locations
gggttgacatacttgctacttcctcttgctgcttggataactttgtagtccaatatgctttgtccaacatttagactttccccttcaaagacacattgtctccgaaagttggaagattctatattttatatcccttatcttttgagaaaatatatgtgagtgaacctgaatgtggatgtataagattagtatgaaaccacaaaaaatgcaataatgcatacttacatgcaaggcaaccattatctttctaacttataaaagacaatatattaatacaaccatgtttgatctcaactttctagaaatccaatgatagtaagcttgttaggaaagaaacatatgattagttttaggacaaatggccaaagttgttatagaactggcatgtaatacacataacatgagatgttagttaanctaattttt

SEQ ID NO: 445620 - DNA, 77 bp, Triticum aestivum
gaacaatttgaaagaattcctttgagatctcttgtacggacctacgtatgaatcgttcaaatttgatgatgttcctc

SEQ ID NO: 445621 - DNA, 442 bp, Triticum aestivum
ggggtattaataaacctgacaggttaattgaagagtgcaatatcgtttcttttgctttatctgttgcagaagaaattgaaggtaatgctgagccttcttcatattccgaggctattatttctggtgatagtaataagtggatgaccgctatgcatgatgagatggaatcacttgaaaagaatggcacttgggatttagtaagattacctagagagaagaaacatattcgttgcaagtgggttttcaagaggaaagaaggtgtttctcctaatgatgagacaagatataaagcaaggttagttgctaaaggttatagccagattccaggtattgactataacgaagtcttttctcctgttgtgaagcatagctctattcgcactttactcagtattgttgccatgcatgatcttgagcttgaacaattggatgtaaaaactgc

SEQ ID NO: 445622 - DNA, 491 bp, Triticum aestivum
  unsure (1)..(491): unsure at all n locations
ggnnnngnaactgttattctgccggccagtaccggaccaagaattcccgggtcgacgagtcactagtcggcggccgctctagaggatccaagcttacgtacgcgtgcatgcgacgtcaagctcttctatagtgtcacctaaattcaattcactggccgtcgttttacaacgtcgtgatgggaaaaccctggcgttacccaacttaatcgccttgcagcacatccccctttcgccagtggcgtaatagcgaagaggcccgcaccgatcgcccttcccaacagttgcgcagcctgaaggcgaatgggacgcgccctgtagcggcgcattaagcgcggcgggtgtggtggttacgcgagcgtgaccgctacacttgccagcgccctagcgcccgctcctttcgctttcttcccttctttctcgccacgttcgccggctttccccgtcaagctctaaatcgggggctccctttaggttccgatttaatgctttac

SEQ ID NO: 445623 - DNA, 361 bp, Triticum aestivum
ggggctgctcgatcgcggtagtgttcgtgatctgcctcttcatgctcgcgttcgggtggtcgtggggtccgctcgggtggacggtgccgagcgagatcttcgccctggagacgcggtcggcggggcagagcatcacggtggccgtcaacctcttcttcaccttcatcatcgcgcaggcgttcctgtcgctgctctgcgccttcaagttcgccatcttcatcttcttcgctgcgtggatcgccgtcatgaccgccttcgtctatgtcttcctgccggagaccaagggcgtgcccatcgagcagatggtgctgctctggagcaagcacgggttctggaagaacgtcatgccggacatgccact

SEQ ID NO: 445624 - DNA, 367 bp, Triticum aestivum
ggggagcacggccgaaatcccggcgaggctgcggcggcggttgaagtcctcctgcacggaccgggggacaaggaggcgctcgatgccgtggataacaccttcgggcctgagcacggcgtcggggcccttgacggcggcgtggccaacgcgcatggttccgttggcgccggcggcgacctcgacgtcctcgccggaaagcgtggggtgggaggccgcgggccaggaccccgccgggtggcgcgccgggaggacgtggtagaggagcagcgtctggaacgacttgaggttgcggggctcgagcaagaagcgcttgaactccgggtcgatgtcccgctccagcgcctcgttccggggccccaagattgtg

SEQ ID NO: 445625 - DNA, 377 bp, Triticum aestivum
  unsure (1)..(377): unsure at all n locations
gggggccacatcaagtacggcggttggagctcggacaacggcggaagcggcgttgcagagtgcaaactaggcggcttctggctcctacggcgcctacgggagctcacgaggttactggacatggattccaggccagtaagtcacgggagtgacgccggccatgagcttgagcggcggtgggtttcggcctcgatggaactacggcctagagctcgcaatcgagagcgttgttagaggggaaatgaccaggtgctcacaacgcgttggatggnnggctcggnagctcgggcgaggctctggagtcggtgtgtggtcgccggcgatctcggcggacgagagttgaagacggcgaaggcgacggcgatgcaaggcgttcg

SEQ ID NO: 445626 - DNA, 350 bp, Triticum aestivum
ggggaagaagaagggctgccgaaaaagtcccagacaccggacgaccggccgggaccgaacgtccggcgcctgaagcatcaaccgagtcctagccagcggacgttcggtccaggccggatgaccggtgccccgacacccgaagcaaacgagctgacgtccggtccggaccggacgaccggcgcacctgcacccgaaccaaagtcagcggaagaccgacgtctccggacgtctggcacccccatcacagagcggaaccagcggacaaccggaggacaccggacgtccggcagctcctgagacaccggacgaccggtcccaagcggacgtccggtacctgtctgcgcacagtg

SEQ ID NO: 445627 - DNA, 72 bp, Triticum aestivum
  unsure (1)..(72): unsure at all n locations
ttntgtttnttgtcgttttcttctttttntctgattgnntgtttntangttgttntttncnattcctncttc

SEQ ID NO: 445628 - DNA, 476 bp, Triticum aestivum
  unsure (1)..(476): unsure at all n locations
cctgcccgtacggtcgaaattcacgggtccacgggcacngctgcaagaaacgagctgaactgcataggttttgccatacgatgtcggaaaaaaacgtataatatatcaacggattcagcacgaaaatccgcatccgatggagacagcctacgacctgtttggaattttttagaatcgtcaaattcgaacaggaaaaaaagatatggtcaaatttcagttttttaaaaaaaaaattggttaaatttggtcaaactacttattcaagaagtattaatgtgactacataattattcaagaatatgagtgttactaaataattatttcaattttgtgaattttggtcaaactatggtcaaactatgcgtcaagcgtattcaagacatattagcgttactaaataactaacaattttttaaaataacagtttcaaactcacaacgtgaaatgtgtgacttcatgctcaagctaaactcctg

SEQ ID NO: 445629 - DNA, 216 bp, Triticum aestivum
tcatgcaactacctactccggatcccgatccagcctcagcttcacctgacgccggccctaattttgtgtgatcaaatttttgctactagtactaactattgatgatcactgttgcaccatttatttagtttatagcgtcacaactttccactgtctcttttcattctctaccttgttatcgatcgtcggctccagctctatcgaacgatccatgca

SEQ ID NO: 445630 - DNA, 202 bp, Triticum aestivum
  unsure (1)..(202): unsure at all n locations
gnnacgtcccgtaccagggnccatnngggtganagttgtggggncatcttacatcacgtcactgnacctggcttgngcggtcttannacctggtccgtcggggancagcgncggtcntncctaccatgctntccccnactgagcatgcgtgtncatcctngncttctgnntgacgccaacntnttggcnngnaacgttcang

SEQ ID NO: 445631 - DNA, 446 bp, Triticum aestivum
gggaaagttcttgttttcgtaatttgttcactatttcagaaaaatgttcatgtttcaaaaaatgttcgggaatttcaaaaaatgttctcgttttcaggtagaaacacaatttcagaacaatgttgatgtttgaaaaatgttcgcggtttcaacattgtgatcgcaatttcaaaaaatatccctgtgtttttttgttcgcatttccaaaacacatatgaatacaaatattgttcgcattttaaaaaaaatattcatgttttatttcttttgggtttgaattaagaaaatgtgtttttcaatttttgtttaaaaatatcatttgtggtcttagaaaatatttaggaatttccaaaaaaggaaatagaacatcacatttttcgaaaactgtttgtaatatatacaatacttgcgtgatttcaaaactgtttgcaactttaaaggaatgt

SEQ ID NO: 445632 - DNA, 70 bp, Triticum aestivum
gtccacgggtcgaaataactgcgaataattagaagatatatatagaaaaaatgtgcatgtaacgaaaaat

SEQ ID NO: 445633 - DNA, 395 bp, Triticum aestivum
cacgggaaattcattaaatggataaatgcatttgccatgttatgggtacttaaaagaaaaaaaaaaaaaaaaaaaaaaaaaataaaaaaaaacataaacaagaaaaaaaaaattgaaaaaaaaaaaaaaaaaaaaaaaaaaaaagggggccgcccaaaaggttcaaacctaagttacccttgaaggcaatgtaaaaccccttcaaaattgccaccaaatttaattcaatggccgttcttttaaaaactcctaaacgggaaaaaccttgggttaaccaaattaaacccctttgaagaaaatccccttttcacaattggggtaaataccaaaaaggcccaaacgaattgcctttccaacaatttgccaaccctaaatggcaaagggaacgccccctg

SEQ ID NO: 445634 - DNA, 83 bp, Triticum aestivum
  unsure (1)..(83): unsure at all n locations
ctngctcttctgtcttcctttntctctccgctnttgcttctngtctngtgctcgtcttncnggnctcgcgnttcccttntctc

SEQ ID NO: 445635 - DNA, 440 bp, Triticum aestivum
  unsure (1)..(440): unsure at all n locations
gggtccagtgcacgttgcgcatgaagatgaaggctatacacctcgttcttccttcccttcggtctcactatgcagagaaattgaagctacagcttctaacgctgtctaccactgcaaaattggttcagttgatgcagcagcaaagatacggtacctagatacccggcgtgcttctaatgatgaagtanaaacatttgaatacaagcttcttggggaagtacgaatgatgaatgctctaaggaagcacagatccatagtggacatatatggtcaccaactttcttctaaatgggttcaagatgatagtgataacgagtacaggataatgcagtctgtaattttaatggaatatgtgaaacgacgttcactgaacggctatttgacanaactactgagagacggcaagaaacatgtacctgtggacctggcattttacattg

SEQ ID NO: 445636 - DNA, 365 bp, Triticum aestivum
gggtgcacggcgacacatccagcgaatccggaaatgaatactgctcctccggtctgcgcatgacgttagtacatctgcgtactgccgtgatatttaccagtggacgaccaatcgatatgtttgcgcgatcaccatatgtggaaggattaactcaactaccaaatggccccgtgcgaatgggtgtacacgtactgtagtaattataacactgcagaatcaagtgtcgtatgcaacttgtatcaggaagttctccgtatcaatatcgtgtacgggtttgctaagactcgagtaaacatttgttttcttagtttgtagtgaacggacgcacttgatgatcctggcatacgtatgcatgcagccaacgt

SEQ ID NO: 445637 - DNA, 388 bp, Triticum aestivum
gtccacgggatgatattaacttccgcccctgatgattggcaaagcttgcaacaatcatacggttagtatgcaatcatcattggatcaacgtttgtgccaagtataacagatgcgatggactaccatgataattgatttgagtctactgattgccagaaacattgcgagcacgaacagacattagttaagtcacatgatcgtaattatgccttgaacagacgctgtatcaaggacctcatagatgcgaatgatgattacagcaccaaaagtttgcataatgtacagactgccacagactgtactgtgcataacatattcagcttctcgtatgatggatgctcattctatcacgactatcgcaatgaaattatccgatccacctgcccga

SEQ ID NO: 445638 - DNA, 344 bp, Triticum aestivum
ttcgccggtccacgggtccaaaataccttcggcatcagaaaagtgcgtacgtggtgggcagtctcacgaatgtctcgatgatgtgaataacatcctgttgtttggttcagatcgaagctgtagcacctggatgatgcatgttcctttatctgtacagtgtgatgttgtgaatttggtggggtttgagaattcgtcagttgagttgccctatgctattcaataacaacatcattgtttagtgcactcatggatgcgactgatgaatagagcagctaaaatttgcacaaaagacagtactgtcacggactgtactgtgcatgacatattctgcttttcgtgtgttg

SEQ ID NO: 445639 - DNA, 450 bp, Triticum aestivum
ggtccacgggatcactgcagtgtgctgatgccgcatggggcgtcaaattaatgcaacccctccacaacgccgtccataaaggccatgtttcattggcagagcctttcccaccattttgctctctctctctctctctctctctctctctacccttggctagctcttcacagtgctatataaggggcctcacctggcgagccattcttcctaccacccacccaccatgatgtccatgcatacctccccacctctcctctcctctagcgtccagctgccgagcccgagccacacctgctctcggcacgccatcggcaaccggggcttctttgctgactgtctgccgaggctttcctccacagccaggcgttgtcgtccactccgttggctcaagggcggaacctcccagggcactgcgtcccgctgattcacggcctggctctaccctctctg

SEQ ID NO: 445640 - DNA, 333 bp, Triticum aestivum
ttttgttaagttaagcgagtcacgtagcatgcaagtatggtataagttgtgtgacaaatttgttgcatgacgtgctcttttgattgtcttccttatgactggcagtcggggaccaacgatggtcatttcctactattctatacctcttggggcatgcgtagtagtactttgcatcgagggctaagtcgacttttgcacttatctatatgagttctttttgactaatgtgagtccatggatacacgcacagtcatccttccactttgctatcctctattagtagagcgcagctttcacaggtctcatgaagcctttatttttcttctacaactc

SEQ ID NO: 445641 - DNA, 225 bp, Triticum aestivum
cacgggttgatggccactgctgcggcagatgccgaagaatgcgaggaggaggcctgaagaaccaaataaagccgtatcgactgcatcctgttgctctactttgttatcgctgttgtttaaaactttcaataccaatgcacaaaacatggcgtgtgtccctgtttagcttgtattttcgtagtgtcagtgtttgcacaagatgagactccggacgaaaaaaaatga

SEQ ID NO: 445642 - DNA, 435 bp, Triticum aestivum
  unsure (1)..(435): unsure at all n locations
gtcgggtacggaagangtttcggacgcgcacgacgggggtctatggttgtgcacaaaggctccggtttaggcagcagggaaaatcacgaccatggttggagatgacgaattaagataacaaaggcagtgggatattttgcaagtgtgtcatggtgaatgccatattaacgaaatatctatgatagctccatcaatattatgaggatatgttataaagagaaatcaccattgtgattatccctcgatttaaattgactgaggatccatacaattcaattacatgagttgcatacattaaatgagatgatggcatgatgacatgatgcaatgcaacaagcaactaaaacacatggcaaagctcggaataactggaagtcttctggggcgccgggctcggggcgttacaacactccactactacaggaggatctcgtc

SEQ ID NO: 445643 - DNA, 420 bp, Triticum aestivum
atctgcaaggaaattgagagcatacaggctgatgaacacatcgacatttggcgaattagcctcactcccttttcaattttgacgacacaatatgatgaagaatagtcacagtctgaatatatgacacttacagtctccacgtctgtatcatccagcatcattggtgcaaggtccgagagccgaacctccttggcctccacctgagttggattggacgcctttgccacctgcacacgcatacacagaagagacatgataaccataccaaatcacttttttatttattgcatggatggcagggcaattctgaatatgaagtgactccagacacttaattctattgaaccatcaaaagagatgccacactttagtttctacaaaaggcccctagtcaacatattaacatcaccggcaatgttt

SEQ ID NO: 445644 - DNA, 85 bp, Triticum aestivum
gggtccacggcgtcctacttagcacaaacactaattaaaacataaaaccacatccaaacagaaggtagatggattatttattcct

SEQ ID NO: 445645 - DNA, 391 bp, Triticum aestivum
cgggtttcgccatgtgtttcatttgtgcccgcccttttatttgtgcattgcatcatgtcatcatgccatcatgtcatttcttttcttaactcgactaaataaattgcatggatgttcggtccatttaaatcgatggatattcacaatggtgatttctcattataacataccctcccaatattagggagctataatacatagtccatttaattggaagccaccgctagagacttgcattataaatccctctcatttctaaattattttgcatccatgatcttttctccgcatggctcctttcaagttgtggcacattggcattatgctgccaagtggctacttgttaattgtcagctcaattataaaatatttggaccctcaaatattttct

SEQ ID NO: 445646 - DNA, 462 bp, Triticum aestivum
attcgcgggtccacgcgcttgtgaaaaaagttaggcctgtaattccattttacatcacagccatgaacaagacaagtcatctgcaaggattacgctgccaaataccttccacatgaagaacaattcatcacactctgccatcctcataagagcaacatatgggtagacaatttgaaggttatcactgatggttcatgcatgctttctgttggctggtcgtgcttcgttctccacaacgagttgcgggaaagtgacatctgcctatttgaagtatcgaaaaacgacggtgaagtgacaatggttgttcattctcttgaaggaggtcatcacctacaagggaaagagcccgaatctcaaaacaagtgcagttatccagttaaggtcgaggtgaccgacgaagaggagagtgacaaagaacatgccgagtccagctactactactcaaggtatgcctatgacctg

SEQ ID NO: 445647 - DNA, 72 bp, Triticum aestivum
  unsure (1)..(72): unsure at all n locations
ctnttnttttttntttgctttntttttgttttttttccngtctcncnttttcttttncgtcttttnttcntc

SEQ ID NO: 445648 - DNA, 74 bp, Triticum aestivum
gggtccacggcaatgacgagaatcgaaagctcatggaatcaaatagactatgccaaaaaataaaacagcaagac

SEQ ID NO: 445649 - DNA, 375 bp, Triticum aestivum
cggggccacgggcgggacgaactttgttgccgtccccaatacagcaagagggcacataggcggcgcattaaatacgtttgtcctacagtgtcaggtgatcaacttgtacactgtagatactttccacctcctgtgtgccactgtggcgaccgctttgacatataaaaggaggcccgaggcgtactgtggaaggattcggactttttggactgggcatgcatggcagctagttcaagagctcaagaacaccaaatatacacagacaagcaggactagggtattacacatcgtttgcggcccgaacctgggtaaaaattcccttgcgttactcgtctagacctgctctttgcgcagcccttcacccccgccaactgt

SEQ ID NO: 445650 - DNA, 298 bp, Triticum aestivum
tcaccaaatccagcaagttctgcagggccacaagaggccgatggtgatggcgacgtgatcagccaaccagcagcttgctggatccttctctctggatgcctaaaatcagtatgtccatgtaatgtaaacatccctttccctttcccctttcttcatgtagcttcggtctactccttagtagtcctggtaaaagcttgtgctctgtagttgcttcagctactggtaccctatgatgtgtgtggtgtaatatactatggatcattgtggcaaaatcgtctccaaaacctacgaatagaaa

SEQ ID NO: 445651 - DNA, 183 bp, Triticum aestivum
cacggggtaaatctaattgtatccacatatgttagtcgacaaggttacgctatacatccatcagcactaagtagactgcctataaatcacgtaagtccatcgtacgtgttaatgatctcagaactcaaactcagaacaataccatccatcggaacatcagctcgctctacattgatccagaca

SEQ ID NO: 445652 - DNA, 500 bp, Triticum aestivum
  unsure (1)..(500): unsure at all n locations
gggggnatttctggncgggncgtaccanacatnaattcgcngggccntcnagaggatccagcttacgtacgcgtgcatgcgacgtcatagctcttctatagtgtcacctaaattcaatcactggccgtcgttttacaacgtcgtgactgggaaaaccctggcgttacccaacttaatgccttgcagcacatccccctttcgccagctggcgtaatagcgaagaggcccgcaccgatgcccttcccaacagttgcgcagcctgaatggcgaatgggacgcgccctgtagcggcgcataagcgcggcgggtgtggtggttacgcgcagcgtgaccgctacacttgccagcgccctacgcccgctcctttcgctttcttcccttcctttctcgccacgttcgccggctttccccgtaagctctaaatcgggggctccctttagggttccgatttagtgctttacggcacctcgacccnaaaaaactngattngggtgatggtt

SEQ ID NO: 445653 - DNA, 347 bp, Triticum aestivum
tgatcacgtttctgggacaaacttcgcgtgatcactgcacgacttcgactcatttgaaagacgtgtgaagagttaagtgacaatctggcacatgatcgtatctcgtcggacctaacttagaacattacgcaagctagatccgtcaatcagctcatatacgtacatcttgcacatctcatcagtgtcaagcaactggtcatctattagtacaagtcaggcaatgctttcttatcacgaatacatcattggtatcctcgaacatggatcatggtaccgtaccgtcacgtcttactcgaagctgcgtgtgtatctgacaagagtctacgatttcaatacagcttggctgg

SEQ ID NO: 445654 - DNA, 79 bp, Triticum aestivum
  unsure (1)..(79): unsure at all n locations
ttgtttntttttnttntnttttgtttctttctntttctttcttcttttttttttttttttnnntttnntccttttnttt

SEQ ID NO: 445655 - DNA, 434 bp, Triticum aestivum
ggtccacgacgtggccggtcagtaaggtgcaatacggtgctctacgatgagctagtgatcgtataatcaccgcaaaactatatatactgaccgtaaagagcgtattgttacatacgttgaccgccagtgtatttttctcatttcaaattaagccatattaaccggaaaggacgcagtatggactagtactagtactgctttgatgtgtcccatcaactcgccgaacgaggagaagcttgcttactacgcctctccctcgcccacgtgcgcggtggttcgcaggacgaggagatggttttgagtacagcgccctctccctctccctcgccctcacagtggacgtgcagcagttcaattggtgtcagattgccagaagcataatgtgtactgtagtatcatcattgttggaccttctgaagaggcgacgagccaag

SEQ ID NO: 445656 - DNA, 430 bp, Triticum aestivum
  unsure (1)..(430): unsure at all n locations
tccacggcacctcgttgaactgcagatgcacaaaacatagtgtaccacctccttcctcaacccaaaatttgaatttttccaccaattgcaaaacctggaagaataaaaaaaaaggtcaaacaaccaaaaggaacctaaccaatcataattgccctaagaacaatggtctcaggttcaagtcaagaggaaggccttgaatgcccatttgctgtgaatccttcaacatcgtanagaacgttcttatgtcntgtggtgtggtcacacaatgtgcaagaactgcatcttaagtcttcagtgggctgttgtcaagttcncaacccttcctatccagctgcctctctttgtctcgtgtccttggtgcaacctattatctttccggctggtgtacaagggcaacctcaagttcccacgtaagaactactttctgctg

SEQ ID NO: 445657 - DNA, 412 bp, Triticum aestivum
ggctatcctttgatgatcgtgacagcttttgatgggctaagttcggacacccctgcagggtatgaacttttgagaaccgtgcccacggttatgtggcagaagggaatttgttaatatctggttgtagagaacttggcacttgacttaattaaaatgcatcaatcgcgtgtgtagctgtgatggtctcttttcggcggagtccgggaagtgaacatgttttgggttatgtttgaacgtaagtagtttcaagatcacttcttgatctcttccagcttcacgaccgttgcgtagcttctcatcttactcttacttgcgtatgttagccaccatatgtgcttagcacttgctgcaactccacctcattaccttatcctaaccataagcttaaatagtcctgatctcgcgggttttg

SEQ ID NO: 445658 - DNA, 105 bp, Triticum aestivum
cgggtttaaactaatcatatcgatatgtgtcatgcaacgctataagtcgataaagtgaacttgatgtcggatggagcttatgcgtcacgcatgtagtgcgtgggt

SEQ ID NO: 445659 - DNA, 58 bp, Triticum aestivum
  unsure (1)..(58): unsure at all n locations
gtnncccctttntttttntttcattttatgtagnctctaattntcttttnttttatnt

SEQ ID NO: 445660 - DNA, 63 bp, Triticum aestivum
  unsure (1)..(63): unsure at all n locations
gttnttnntttcttnttttttntttttttcntttgttgttttttntttttcttttncttttnt

SEQ ID NO: 445661 - DNA, 457 bp, Triticum aestivum
  unsure (1)..(457): unsure at all n locations
cggggccacgggtttctgacatgacatgacggtggaaagtgaaccacattgcgcggcgcaacgctgtgcattgcacaggagcgagtgtctcgcgtaaaagttaactcgctaatgctagttgaccattagacgtgagcatgccacagttgcgtgattagggaagacttttgctctgtcacacaaagcacatgtggctaagctgttccgattttctagcatgtggagcagataaaactgaagtgccaggttagtggtgatggtttttaaacacaacgacagtgttgcatttgctggtcaaaacggacagacgaattancatgaaacagattaaacttgcttagtgaagtgatagctaatgtgaacaaacttgggtcttcgctggccgccaatgctccacgtcngcacttgacanactggttccgccagccaacgttgctccacggcatgcatgcacatg

SEQ ID NO: 445662 - DNA, 146 bp, Triticum aestivum
cggggttacttaaatcctcacatgaaattttaagtattccaacacattcattcttggcagctccatgggtgcgtctcctaaaaaaaaatacagaaatatacgtcactttggttaaaaaacgtccctccaacaaatgatgcagatgc

SEQ ID NO: 445663 - DNA, 271 bp, Triticum aestivum
cggggggattacagtagggacgctgagtgtgggcttgctgttcacccaccacccagtgtagcataaaaatactgttgctatgtgaaccgttcatctagaattgtattgccattgcctgcatgggcttctctcattttccccgtaaataaataaaaaacaatctagaggagtgtattttgttaatatcagcgaagattgtactccattgttgtaaaaacccagtatctgaataaattcgccacttggatgaaacagaaaaggacatctccac

SEQ ID NO: 445664 - DNA, 280 bp, Triticum aestivum
acatggtcgagcagactcctgagatcccctgatagtgcctccagcggtttcggcggtagcatgggctcgcccgtgagatggaacatggccgcacctttcacgggtacacgctcttcagaatgcatcgtctggctgctatgttcctctggctgtttgggaggcaccaaccttccccatttcctcctggcccttttcctggggacaacctggcgaaccttccctaacccctggcccagtgttcccgaactaagttctgttcgacactcgcgccccgactagt

SEQ ID NO: 445665 - DNA, 383 bp, Triticum aestivum
  unsure (1)..(383): unsure at all n locations
ggggccacggcgaacaaggaaaggagcggcaggggtgcagctgtgtgagggcactggtctcgcgcgtgaggagcgcctctcctcgggaggaccggaanggagcgagtcaaactcatatccacttcagagcaaggtgggtctacaactgctaatttaaagggattcgattgtccctcgtctgagcataagcatgataaagtgcagcaactgacttggcttattgttttggaaatcgcaaccggtgctctcctgcttgtttttgtgattactggtgtcgttactgcctacagaagctgcaatctaaagccttctatacgaatatcatcatggagcagatcaaaaagttggagcgccgagataacagtactgattggccaataacg

SEQ ID NO: 445666 - DNA, 120 bp, Triticum aestivum
gcgtggaagggaaactagaactggatacttagtcaaatggataatagataatgcaagtgatagatgcgaacagtatactaccacaaaggagaaaaatcacgaaacttcgcaaataaaaat

SEQ ID NO: 445667 - DNA, 97 bp, Triticum aestivum
  unsure (1)..(97): unsure at all n locations
ttcnnnttttttgtngttttccntgttctcctcttttctcttgngtntttccttttttngttcctncttgnttngtcgttcttnttttttnttntct

SEQ ID NO: 445668 - DNA, 460 bp, Triticum aestivum
  unsure (1)..(460): unsure at all n locations
cggcgaggtcggagaggcagcaacggcaaggtaatcgacgatgaaggacggtgccggacttggagttggaggatgatggcgacggcttcagggcgaatccggccgagtccttgcgcggggaaggagatttcaaggttgcggacctcctggacaaggttgtttcctgcggggaggccggtagccgtgcttgtggtggtcctcctgtgggctgcaatttgcaccgtgagtccgtcggtcctagctccagctgcaccgtggcatcacggcgctggagcggcgcggctcaagatggcaatggggccccgaaacccgcgtccccgcgggtttttaccctattangggacggggatgggcgtctttttaaccccatggggctgctgctgggtaaattataaaacccaacatgtttcacgggtttaaacccgtttgagcaatacccgaacccgaaacccgccatccc

SEQ ID NO: 445669 - DNA, 242 bp, Triticum aestivum
gggtttaactgaaatgagtcgtagtaagctacaagaacagcagatgacaggatttccccttggaggattatcgtcaccgatttaaggcgagtccggccgagtcattgccctgagaacgagatttgacggttgcaggcctcctagagaaagttgtctcttgcgtggaggacagtagccgtccttgtggagtgcctcctgtgcgctggaagttacaccgtcactgcgtcggtactacactccaa

SEQ ID NO: 445670 - DNA, 418 bp, Triticum aestivum
acgggagctccggaccgactgctcagcagtcggcccgaatgtcgggggctacacccagcgggtgcgctgacgcgcccccacgaaaaagaagacaaagtagtcgccggaagatccggcccgactgctcaacagtcggcccgaatctcgggggctacacccagcgggtgcgcttacgcgcgcccgcgaacactaagacttagtcatcatcggaagatccggccacactgtcagcagtcgacggttaacgcggaggcacaacctctcaggtacactccaacggattgtccaagtcagcgacatcgttgtcaccgtcagatctgttagaagcagctgacatggcgtcacccgattctgaatgtgttctgtccacatatgcctcgggtaaggagctctcggccacatcagcatcgccgttatg

SEQ ID NO: 445671 - DNA, 115 bp, Triticum aestivum
  unsure (1)..(115): unsure at all n locations
cagnananatcacncttcncacnaatnnctcancctgaatggcgaatgggacncncccttaccgcgcgcacttaagcgatcgaggntgtggtngtcatgcacaccatgncngcta

SEQ ID NO: 445672 - DNA, 509 bp, Triticum aestivum
  unsure (1)..(509): unsure at all n locations
ggaganttcntcgngtgngcgttcagtccttacgagggccggcccgatccananatcnaacgcgtgcatgcgangtcatagctcttctatngtgtcncctnngttcanttcactggcctcgttttacaacgtcntgnctgggaatnaccctggcgttncncaanttatgcgncttgcgcacatcnccctttcgtnagctggcgtagtagcnaagaggcccgcaccgntcncccttccaacagttgcgcancctgagatggctaatgggacgcgccctgtngcggcgcnttnagctggcgggtgtggtggttacgcgcagntttnccgctacncttgncaggcgccctagcgcncctcctttcgctttcttctcttcctttctccgccacggttccgccggctttccacgtcaactctnaatttngcggctccctttanggnntcgnatttnttgctttacgggancctcganncccnggnnncttngnnttncggngtttgggttcntg

SEQ ID NO: 445673 - DNA, 96 bp, Triticum aestivum
  unsure (1)..(96): unsure at all n locations
ctcactnnaacngtttataanattccggctnttttatatttgatgttctagtntggttnntgttatcnntgtggatttnctgtttgtcttnggncc

SEQ ID NO: 445674 - DNA, 488 bp, Triticum aestivum
  unsure (1)..(488): unsure at all n locations
tgnnggangtnagttgnacggcccggtccacaattaacgggnccacgaccntgggaaaangangaaatncactctgatcnctgatntcngagaantangtggntcacgaggaatgnacgacagattctctatttgatctctaagtcntcatataacacttcttccagtcggatcactgttggaatnnacatatntgctcagnacatgttccacacgggcagngnancanagtattagatgaaaatgaatggaatactcncgcatgaataggaatattccnatnaangattgtgacgcttttataggatacgtaccaccttggggtcagatnancttttggggancancagtnntacaagcttagctagcnccataccagtannatgagatancatagtgncttggctttgnggggtttctccgtngncaatgncaccntaantcgtttttttagtctncatcacttacncnccttgttcgnccctttg

SEQ ID NO: 445675 - DNA, 510 bp, Triticum aestivum
  unsure (1)..(510): unsure at all n locations
gnnnnnnaatgtctnctngtacgtggtcgtacatcntccngcaatggccggtccactggtaattcnaaacgcgtgcatgcgaactcatancctcttctatagtgtcacctaaattcaatcactggccgtcnttttacaacgtcgtgactgggaaaaccctggcgttncccaacttaacgccttgcagcaaatccccctttcgccaactggcgtaataacgaaaaaggcccgcaccgtcgcccttccaaacaagttgcgcagcctgaatggcgaaatggggacccgccctgtagcnggcatttaacnccggcggttttggtggntacccccancgttaccgctaaaacttgcaacccctaacgnccgctcctttcgcnttcctcccttccnttctcgccaagttngccgggtttccccgtnaaactcctaaatccgggggtccccttaagggttcccaanttaatgcctttacggacctcnaacccaaaaaaacttgnttaanggggnttg

SEQ ID NO: 445676 - DNA, 210 bp, Triticum aestivum
  unsure (1)..(210): unsure at all n locations
gtggtgttccgcaggaagaagaacttggccaaaaactcccggccttccggtccggcttccaaaaaggaaggttttcaagccaattgattcccaattattgaaccacaacaaatccccaaccaatcccggttatccaaatgttcaaaattacaggatgaaactgtnggaaaaatgttgtggtccccttacaacaaagggatttttgctgct

SEQ ID NO: 445677 - DNA, 78 bp, Triticum aestivum
  unsure (1)..(78): unsure at all n locations
tttngttttntttctctngcccttggtgttctttngacgagcgctnngctgtgttcacnccnaggccnttcnctgttc

SEQ ID NO: 445678 - DNA, 236 bp, Triticum aestivum
ggtccacgggggaagaggaaggaaggacatggagttattcgtgacgtgtttaaaactcttgaggttttttttttgaaaaaaagcaaatacactgccccgtggacaacttttctcggacagagggagtattatagaagaaaatgttgtattgaaaaaaaaaaaaaaaaaaaaaaaaaaaaaaaaaaaaaaaaaaaaaaaaaaaaaaaaaaaaaaaaaaaaaaaaacggtcaaacaaa

SEQ ID NO: 445679 - DNA, 464 bp, Triticum aestivum
gggtccacggggatgaggaagacgactcgctacaagtagagagcacatcagtgggcttatccatgacacgtggacggtgagtgtaatggaaaggaaaagagggaagagggggaatcaccgaaggtgatggagatggagacggggaagacatcgatgataaaggtggagacgaggaaggcatctgtgatgaaggtggagaattggtgttggtgtcaccccagaagctcaaagattatttgatgcattgtcgaagacgcttccagttcattgggacaagaccgacattgttgtaatgaaggaggttcgtgtatgcagtccctacctgcctgaaaatgtcagcggcggaacatcagctgctaatgaacgggttaagaaagtgctggactttgagaggaaaagacaacatgtgcgtgtacctggccaattctaacttgttcgacttgacaattttcacctcaactcct

SEQ ID NO: 445680 - DNA, 452 bp, Triticum aestivum
ggtccacggggcaagatgaaaataatttttgaagggtatcccattgtttatttgttggtggctcttggtggaaatacctattgttgtgtaaattcaaacgatgtaacctattcttgtaatgtaaccaacatgcactcaatctctataggtgcaatcaaaacaatgaagcaaaaaaacagaggaaaaatagagcctatttctctaggcctctttaatctttgtgggccttcgacaatcaacgcaatgcgatggcccaactagagcttggtttcattttgggcccaataactacatttttttctcttgcacttggtgttgtctgacgaaactgaaagtgtcaaaaactaacacctatagagattcagagacgaagatagagacatagtttaagcaacacagagagcacatgatccacaaattgagcaacacaaagagcacatgattcactaacc

SEQ ID NO: 445681 - DNA, 403 bp, Triticum aestivum
cacggacatggacagcaccaacggcacctacgtcaacgagaggaagctggtaccgggattcccggtcgccgtccaacccgggagcctcctcatcttcggtgacatccacttggcaatgtttcgggtgaggaagacaatcgtcgatgtggcagccgatgccaccaaagatgaccagcaggaagctgagactgtgctggcaagtgcagttcaagaaacaagctagtctaccttacctttcaaaataagagtgcaaaatagtgcatcatggtaatatgcagtccccgtctcaggatcaacgaaatatgtagctaggcagaaatagcatgtacgagtaaagagtaacttgcaacatgtcatgctcaaggaacaggtcattcaaacaaacacacgctaaatttcacgc

SEQ ID NO: 445682 - DNA, 462 bp, Triticum aestivum
cggtccgagattaccggggccacgacgacaagatgatgcatggtggtgtccggcgctgcgacggcgtcgtccacgacaaggaggtcttcgccggtgtgatgccgcgcgaacaggtggttgcggtgtgatgccgctaggaggagatggcagtgcgacgctgccatgacgaccgtgcgatgccgacaagacggtgatgagatgccgctgagaagatcgatgtacagcgggtgaggccatcatgaggatcgatgtgaagctagccgcggaggtgttctgggtggtgtgacgccatccccaagatgaggtgttgcgacgacgacggcaagacgtacgtgaccagtggtgtgatgctgctgaagaacgttcaagtggagattgatgatgcaccatggtgaagctgcagcgtgaggcaaggtggtgtgatcttgccgctgcaaagtcttggcaagatgttgcgggtga

SEQ ID NO: 445683 - DNA, 309 bp, Triticum aestivum
  unsure (1)..(309): unsure at all n locations
gggatactcgagatggcggcaagctttgcacaggccgctccgctgaggcagtacaaccaataaaccttctccccaaagggggtaaaaaggaacttctccttgaaccctttgtaaaccctaaggaacaaattcaaaacggtttacttcaaccttgcggcctgacgctgcaagatcacttgcgccttggtacaaacaaaaccggaataacacacgccctctttcttctcatgtataccgtagtttacaacaggcattanaagaggaaatgagtttgtttcttctggaatacttcgaaatttcaactaaata

SEQ ID NO: 445684 - DNA, 423 bp, Triticum aestivum
cgattaatattaaaccctcctctgcggtgcctctttttctcccgtggatgacaatggcgacggctgcgcgtaagctcctgacggatggctcttcctcacgcacgtgactggcagcaactatggtggtgcgagagcctccccacgcgcgtcaccaccctcgagatcgcagactctggtagcgcacacacagcaaccgcacagagccgcagtggacatcacggtcctgtcgccacgcctagggtccgcagcgacagggtcggcggcaaatctaatccatatccactggtttcagcagtaagctgacgtctcatacatcaccccgttcatctcccatcttgctccttgacaaattagattgttctaccaatttttttttggtgattgtggacgaccaagataaggataagagaaagtaatcataaa

SEQ ID NO: 445685 - DNA, 442 bp, Triticum aestivum
ccatagctatctaggtagctcttatcacagtagtatcatatgtgggctttctttagttgcatctgctctgagtgctgcggcatcatctggagaaagggtgagtaccactattgtaggccttggggccgggagtttaccaatgtttcttcatggatgcctccctcatcttaatattgaggtggttgagttggaccccatgatggaggaggtagcaacgaaatattttggcttttcaatggatgagcaattgaaggtgcatttgggggatggaatcaaattcattgaagaaaatgcccattctgaaccaaatggcaaagacagtgacgcagttagaattcttattgttgatgttgaatcatctgatctaagttctgggttgtcttgccccccagcaaactttgtcgaagatgctttccttatgtcagcaaaaaagttcctttca

SEQ ID NO: 445686 - DNA, 448 bp, Triticum aestivum
  unsure (1)..(448): unsure at all n locations
cgggaaccacagcacgttacatgctttgcatctgttggaacggcagtgtgttgtgttgcaagatgctgagggattgccngagcagttcntatgcagggaaaggcatggctatgcgagatgtcccgtgatcacaggccaacatatgaagcagagcgccaaagggtcactgagtgtgggggatacattgaagatggctacctcaacggagtattgtcggttactcgtgctctaggggattgggacatgaaaatgcctcaaggctcgcagtcacctctgatcgccgagccagagttccagcagaccgtcctcacggaggatgacgagttcctcatcataggctgcgacgggatatgggacgtcatgaccagccagcaggcggtgaccctggtccggaaggggctccgacggcacgatgaccccgagaggtgcgcgagggagctcgccatgg

SEQ ID NO: 445687 - DNA, 333 bp, Triticum aestivum
cgacggcacggacagcctctacgactgcgaggaggccctgacggacgacaccaacggcgccggcgctaaaacctccgccgaaaaaatcgccttcggcaacctggtccgcttcatctccaaaaaggtgtgggccgcctggacttgaccggcatcccccgcggccgcggctataacttctcgtaaattagggagacccagcaatggagactaccaaaagggtcaggtcaggtcaggtcaggtccgtgaaaccagtagtagtagtagtaccagttggttttgtcccagcaagcaagcaagcaagcaagagcatccgctctctctatgccccctttg

SEQ ID NO: 445688 - DNA, 93 bp, Triticum aestivum
  unsure (1)..(93): unsure at all n locations
cncnaangaangttnggttcagggtnaaggttnagttcnttaatatctagttgttngttttattagcaattnggtttttgtnccnngcaagta

SEQ ID NO: 445689 - DNA, 211 bp, Triticum aestivum
aattttgctggacatgtaccgaaagttcaccaacggtgatctatggcatcgacactagttcacttctgatgcgtggaagattccttctaagctgcacgatcaagcttgtcacactaggataactattgataatctgactgatcatcccttgttcaagaaagggttttaaactgtagtaattccgttaagatcaacaccacatgcttcaaag

SEQ ID NO: 445690 - DNA, 451 bp, Triticum aestivum
actaccgaagtataatggcctgtctggatggctatatgaacattgtgatggagcaaaccgaagagtacgtgaacggccaactgaagaacatgtatggtgacgccttcatatgaggcaacatcgtcctatacatcagcacgtcgaagcggtccctcaccgactgagcatacgccgagtggagcattcacatcatcatgatgtaatttcaaggtcgttaacccgatgattggttgtgatctgactggtgctaccttttgcaatcttgtacgtgttgtctgctgtagtgcctgctgacagagacttatctggaatcatttcgatttgatgttatctgcgtttttagcttggagatgtttgtggctaagattctgcgatcaggatagatagtacatttgtgtgtccatagtcctgtgctgcatataacagacattacgtgtcttaagggacaccc

SEQ ID NO: 445691 - DNA, 389 bp, Triticum aestivum
ggaagaatggaatcgtcctccggaggatcagcggaatgtggatgatgtgacgctggtcgcccgtatctactgaggtcaagtagtgacatgtctcgatactccggaacgagttgcaccatcgtcctcgcctgcatcactgctaagccggctctcatcctgtgatcatatgcgaattacaccgtccacatcatcatgatgtaatttcaccgtcgttaacgccatgactggatgatatctgactgcgttcacccttcttgcaatcatgtacctcttgtctgctgtagtgcctgctgacatcgacgtacctcgaatcacttccacttgatgtggacatcctttttatcttggagatgtttgtcgcccagattctgccattatgacagacagga

SEQ ID NO: 445692 - DNA, 424 bp, Triticum aestivum
cgggaggaaaaaaaaagagagggagacgaagcgagtggacttcagccaaagaggcgcctcgttcggattcagtgtccactacaaaaaaacgtttcagctcccgcgtgacctttcgtatacccatcgtgcgtggcaaaaatttatacatcggcttggctcattcccgcaacccgcgtcgcgtcgcgccgtgacgaggcgaggcgtggcgtggtgtggcgaggcgggcggcggaggaggagtgcgcgtggatgtccctcttgttctcatcctcacacatgtggggaaagaacctcccttataaagagatccaactccctctaaacaagcaatgtgggactaaactttagttccacctcttgccttgtacgaatgggttgtgtgggcctcaggatttattaggaatttttgaaactgctattgggct

SEQ ID NO: 445693 - DNA, 101 bp, Triticum aestivum
atcccgggtccacgggagcacacatatctgcccgttcccctctgaatcgcccccaaaaacaaacagaaaagaaaacgagaaaaagacccatcgaccacccc

SEQ ID NO: 445694 - DNA, 431 bp, Triticum aestivum
gttccaatttcaaaaggagcatttgctcatattgagaaccctctgccaaatcccgctccaaaatttacccccttggcagccaaaccagctaccatcattctctcaggattcggaggctttttcagcttcagtgatttctcaaacaagcccattaagcagaactccaacaagaagaatcccaacaacctcccccagaataaaggccagtctaataacaatcatgaagcgatgagcaatgactggctggaaaatggtcaatgccctcttgcaaagtcatatatagcaattggtggagtcgtgcctcttgtcgcaaaactgctggcgcccccagctggtatgaaactgacgtgccctcctgcaattgttgctgcccgtgcagcaatatcccgcacggcgtttgcaaaagggcttcgccctcagcccctaccgac

SEQ ID NO: 445695 - DNA, 485 bp, Triticum aestivum
  unsure (1)..(485): unsure at all n locations
ggnggangttttcngccngcacgtaccgatccacaattcccgggnncncgcccgctcctaangctttcttcccttcctttctcgccacgttcgccggctttccccgtcaagctctaaacgggggctccctttagggttccgatttagtgctttacggcacctcgaccccaaaaaactgattagggtgatggttcacgtagtgggccatcgccctgatagacggtttttcgccctttacgttggagtccacgttcttaatagtggactcttgttccaaactggaacaacactcaacctatctcggtctattcttttgatttataagggattttgccgatttcggcctattggttaaaaatgagctgatttaacaaaaatttaacgcgaattttaacaaaatattaacgcttacatttaggtggcacttttcggggaaatgtgcgcggaacccctatttgtttatttttccaaaacattcaaataag

SEQ ID NO: 445696 - DNA, 453 bp, Triticum aestivum
gggtccacgggcatctttacatgacagaaataaggcaaccatcaaacaaaccttcttatcatctggaagatcatcaatgtgtatgaaatagtcttcaacaggcgatgcaacgaccaaatcactggaatgaaaaaggtggaagaatgcggcaccggcatttgtttcaggcagggagaaaaacaatgacagagtatatacgttcgtcaaaatgaaataggggaagtatatttacttacagattgttcagctcaaacatgccaattatatggccatacacctcaagggaaaacactagagcaagttaaggtaactcgaatgacaacgataactactcattgtatgaaagtttgaaacaagtctggtaactgccaaaaaaggatacatggtgcacactcagcatcgaagatcgcatccttgagaagctttagtgactgcaaatacagaagccatgat

SEQ ID NO: 445697 - DNA, 304 bp, Triticum aestivum
aatatgatatgagcttcacttatatcgcttgagctaaatatttttgctctagtgcttcacttatatcttttataggcggtggattaattttgaagaacccgttcatctatcatagttcacctatatcattttgagactcctttagaacattatgctatttgctatcgttataaattcctcctacaatgatgatcccccaagttgggtataattgatactatcataagacgttaattggatgttaccatcaacctgatacttgatcattgttttgatataaggatgtattgatattaggatcttg

SEQ ID NO: 445698 - DNA, 146 bp, Triticum aestivum
cgtgacgaagcacagtgcgattggcgtcagtgcgccagatcgggtccgtggcggtgcaaccggcttcaatcccccggttcgggtccttggcctgggtcacacccttaccaacaacattgacgggcgctccaaaaactccggcaacg

SEQ ID NO: 445699 - DNA, 443 bp, Triticum aestivum
cgggcatattgggagtcgttcaatcagtgaaattccaaagatcccgaagccctcttccatgtgtttatctgaaactgacaatgcaaatgacactaaagataagacccagcgactccatatgccagctggagcgttggttgacattagtaacttcatgggcacacattctggaaatattgaccatgctgttaatgagaagagaagaattgagggaagaaacactgcatcttcctttaaacgcccccgctcttccagataaatcctttgatttgcatccctgttagcaggctgtaaactccttgatgccatgcttttgctatgcccttgctgtcaatgtgagtttgacactgcatgtgttttgcatgctggcgacgtttatttatgcagcagcaaggcagtggatcttttttttcagacggatctaaaatgaagatgattgtctt

SEQ ID NO: 445700 - DNA, 452 bp, Triticum aestivum
gggcacacgggaaatactagggaaaccgtcaatgatgaattcatcaatcgcttatcattgtataccacgacgtgtttgcccagagcacacatggcgtattagcatcaaccatctgtgttattatcggtcttcgcagacatttctaattacagacctagttgccgtgtaccacacacatcttgttaagttgaaccgtttctgttctcttgggtcaacgcaaacagttcatctgagtgaactgtatgccgtatatcgcacacacctttgatctggctgagcgtttctattgtgttgcctaagaaaaaacagttcagttagtgaactatatgccatatatcgcagacaccttcatctggctgcacatttctgttgtcctacctcatcgcaaataggtcactggagtgaaccgtatgccaggtatcgcacacgcaactctatctgaaatgtgtttg

SEQ ID NO: 445701 - DNA, 430 bp, Triticum aestivum
cgggacaagtatagtgaaggccgggttcgccggcgacgacgcgccccgggcggtgttccccagcatcgtggggcggccgcggcacacgggggtcatggtgggcatggggcagaaggacgcgtacgtgggcgacgaggcgcagtccaagcgtggtatcctcaccctcaagtaccccatcgagcacggcatcgtctccaactgggacgacatggaaaagatctggcatcacaccttctacaacgagctccgcgtggcccccgaggagcatcccgtcctgctcaccgaggcgcccctcaaccccaaggccaaccgtgagaagatgacccagatcatgttcgagaccttcaacacccccgccatgtacgtcgccatccaggccgtgctctccctctacgcctccgggcgatacaccggtatcgtgctcgactcc

SEQ ID NO: 445702 - DNA, 298 bp, Triticum aestivum
ttcgcggggtcacgggcgggatcataatcatgaggaatatataggataataaggtggtgtattaccaccatgcccgttgagctgatgtttgtttcagctagagaaatcgttacgcccgctcataattcctttttcgacgctctggagaataataactactggtatatcattctatatcaaagccggcttgtgaaataaatgatccgccgtcttgccttcacttgtttttgttttccgcgtgttttttacttgtgtgtgtgtgatccaaggccctgaaatggagttcctgatgcagctt

SEQ ID NO: 445703 - DNA, 521 bp, Triticum aestivum
  unsure (1)..(521): unsure at all n locations
tgggaangtcccttccnacggattcgtccancaatacaggggccncggccnaaaacttattanangtgatggttcacgtagtggggccatcgccctgatagacggtttttcgccctttactttggagttcnacgttcttaanagtggacccntngttcaaaactgggaacaaacaaccnaaccctaaccccggtccaattccttttgatttataangggattttgccgatttcnggctattgggttaaaaaatgagctgatttaacaaaaatttaacgccgaattttaacaaaatattaacgcttacaatttangtggcacttttcggggaaatgtgcgcggaacccctanttgttanttttcnaaatacattcaaatangtatccgctcnanaganaataaccctgataaatcttcaataataatgaaaaaggaagaatnnnantaatcaacaattccgttttcgcccntatcccctttttgccggaattttgcctccggtttttgcncaaccanaaaag

SEQ ID NO: 445704 - DNA, 327 bp, Triticum aestivum
tatatcaaacaaaaagaagcacgaactgtagtaagtacgtacgtaggtgtgacacctcaccttgtacggaaaacaatgggaatattgaagaagaccacaagttccctgagcttcttcttggcggccttcatcgtggtcatggttgcaacccttctcttctcttcttgcaacccccgcaaggaaaaggataagcccacggcttcccccttgtcgggaaaatgcttctcgaggtttttcccaaactgcaccaagcagcaatgcacgaagttctgcgtccagcactccccgggagccgtctgcatcgacaaaaccactgttgctgcccta

SEQ ID NO: 445705 - DNA, 336 bp, Triticum aestivum
gggataggaaggatgcttaatgttgtcgccgtctgctagggattactggctcagctcttcacttctgactcatcatccgcgctgtacggcatcctaccccttcttcttctcctccgtctcctctccctccgacacatacatcattacccttaaggtagaatttacttactccaaatgcattgctctatctgcatctacaccatgaatctatgacgtgtttcaaagacgaaatgagttgcgggagtattacgaacatttgtatacagcattaatctacgatctggttcactgagtagattactggggaaatttgtataccataaatctatgatgtga

SEQ ID NO: 445706 - DNA, 402 bp, Triticum aestivum
cggggcaatgcgaaagcgagaggaggggtcgaactgtgttatgtacctgcgtcggtgtatcaccgcaacttgttactgcacacacggttattgtgaagatgaccacgatctccatgagcatcgacatagtcgccctcaccttggtcacgggtgccagtctgctcttctcctcgtgccatccgctcatcgatatagatacgcacgtcgattcccccatgtctgagaaatccctcacgaggtttttcacacatttcacgcaccatttatacattacctaccgcatccagccactcacctgtgccatctgcatctacgtctaccactgttgctgcgctactgcgtacttatacccctctttgagccaatcgggctatcatcaagtactggttaaagatggcaacc

SEQ ID NO: 445707 - DNA, 123 bp, Triticum aestivum
ggggttgtttcaagacggcagaaaaaatggtactaatgtaacaacgaaaccagataaattcgcctgccctgcagcaacaatcagtaatcatgcatgaataaataatggtcacaataccaaagg

SEQ ID NO: 445708 - DNA, 445 bp, Triticum aestivum
  unsure (1)..(445): unsure at all n locations
tctcacaactgaaccgggaaaggaaattgacccagacggcatgaaactcgcgactaaataaatatgtagagactgatttctgcaggactcatcttctttagacctgaataaatatttctcacaaaccgaaattattttacaaagatctgtgtaacatgaagctagcaacccaaatgttgtgtggaagtctgaagatgtggtaattcctgcatccgtaaagtaatcttctgaagatgtggtaattcctggtaaaccttgctccaggccaaaagagtgggtgttgctctccaagaaaaagaaggcttattgattgcttgcttaagtgtttgaaagatatcaaaacaatcgtatacaagattaatgccagggcataattgggagtacttagcaaactggcagctgaaacagaggtgttcccttgcntctactgtccttagcaacatgg

SEQ ID NO: 445709 - DNA, 226 bp, Triticum aestivum
  unsure (1)..(226): unsure at all n locations
gcaagagagcggaaagcgtcanggcagccggcgagaaaggggccggccttggttaaccaaaaccccggcaacctccaaggaacctgccaaaaaggcccggcccttgagaaccaaaaccccgaaaaccttcttggaacccgccaaaaaccgggaaaatggtaaaaaggggttgccccccttgaaaaccacaaccggaaaaaaacccaaaaaactcgttgggcccaag

SEQ ID NO: 445710 - DNA, 421 bp, Triticum aestivum
aacgacgaaaaaatgaggctatggtggttatcaatgcaatggtaaggattagaaaaagatttcatcaaggttacggccaaggtatccgtttgaaagcatggacggttgttggcgattaacagtccttggcgaagatgaggagtggtagtgttgatatagcaccgtacctatatagccgaaacacaataggacacgaaaccacaactcaaattctcaaagacaaaaacgggccaaaattgacggggatggtagcggtgaagtgaaggtggttcttgcagaaatcgatggtggtatcggagtgtgtatgcggtggtggagttggaattgaagtgcgtatgccggagtggtggccgtggccgaaaattttcgggcgaaaaaaaagaagccaaggaagccccccccccaaaaaaaaagaggccat

SEQ ID NO: 445711 - DNA, 173 bp, Triticum aestivum
taggtgtgatatgtcaagtactggacagataggccaagcactggatgtggctttcagggatttatgcagtgggatttgattggtactatgctacgcagtgtttgggatatgacatgtaacgatgggacatgtgccacgctcagaacacaatatctgcaagaatcgtaaacaac

SEQ ID NO: 445712 - DNA, 279 bp, Triticum aestivum
cgggtgtaacttaaatgttttcctctgtgcctggtcgtacatagacttgtctgggacattgcttcgtgtaccactgtaagtgtgtcgtgacgtacacattactagagatgagtgatacaccacaaacgtctatagattcagtgacattgcgcatcatgacaaaatttcagcagttcaattgagggaattgcgattgtagcaacttctgagagctcgcgcatggggtgctgtccatctgacagccttatgactgaattcaatccaaagacattttttatg

SEQ ID NO: 445713 - DNA, 434 bp, Triticum aestivum
cgggcctagctaacagtgggagtagtaggggcgatgaggcctcaatggcaacacagccggccactggaggcaggagcaggcattctccccggcgctggtttgggcggctggtgcatgaagagcagcgattgaagaagcagcaggaccgttcgattcaaatccaaatgttactgttgctagaatcgtttgttgactaagttgacaagccctgcgtacgcgtcaacttagtaggcccacaggtcagcctcccaaccagtgcgccccagatgtcagtgggaggaatcatttttttgcgtaataaggaggcagttgattgcgtgcggccaggccagtggagggagtagggtgggccggggaagcctacgcgacatcacagcgggccacatgaggagggagcaggcagtctcgccggtgctagtttaggcggctggagc

SEQ ID NO: 445714 - DNA, 454 bp, Triticum aestivum
gtccacgggctcgtgttcgtgtcatcgttagctcatcaagcacgggcacacattacttaaccccattgttggaagagttgacatttttggtatatatggcccctgccctgttggaacgggtactgtcttaatcagtgacagtatattgttagttaatacccgagatgcagaccttgggcatgataacaccactacgtgttgcaaattgcatctgagggtacgtggctggagtatcttgttgcgtcagattctttttattcttcttcttcttctgaaaatgtacaaaatgaatctgaacgaaggactatgcaaattatcgtgaaatttttatttttttgaaaaggggattgtcgtgaacgttgagaattttaaaaattgaatctgaattttagtacttttacgagatgaaatcgggtctgaaaatggagagcccgacagcgacgtactccctccg

SEQ ID NO: 445715 - DNA, 130 bp, Triticum aestivum
gcaacgggaacggaagaaagaccgggaacacaaaaaaaaaaaaaaaaaaaaaaaaaaaaacgggcgctccaaaagattcaaacctaacttcgccttcaagccaactcaaaacccctccaaaatggcaacc

SEQ ID NO: 445716 - DNA, 218 bp, Triticum aestivum
aaatcaaaacataatcacaacgcatgggccaagttggcgcctatgaaagttgggcaaggccaaagagattcgtcccccttgcaccaagctgccagacctaacaagaacatgcaacctggcaatggggacctcccacaagaaggaatgaatgggaatttcctgaaaaaagggcccctggggtaaaatggctaaccccacataatccccaaaaggggccc

SEQ ID NO: 445717 - DNA, 408 bp, Triticum aestivum
gggttgatgtgagacctgtagcatcagtgtcccatagcacatgctgcgtggaacagtttgactgcagcatcagcaagtctcagctgccttttgtgcatcctggtgtcctgattgtcaggtgcatcaattgataccagcacattccaactgtcattaggcatacattgtcatcgatagatatatgcctttgaacttcatcgcagtacatctatgatcactatggcgtaaaacaccaggaggtaccatgtcaattcacacattttgccagcatatctcattgagcttgtcaatctactaagatgatagcagttcttacatcttttataattcgacatcaattactgtgatctataattttacagtgcattgtcacttatcactatagtgttacctattgcacacaacatg

SEQ ID NO: 445718 - DNA, 449 bp, Triticum aestivum
ggggaacatgaagccatgcgtaagatgaaaaatgaatttatggtgaactgggatggtctgagaacaaaagacaaagaacgtgtattagtacttgctgccactaataggccgtttgatcttgatgaggctgttattaggaggctcccaaggaggttgatggtgaatttaccagacgcaaccaataggaaaataattattagtgtaatactagccaaagaagatttggcagaagatgtagatctggaagcagtggccagcttgactgaggggtattcaggcagtgatctgaagaatctgtgtattactgctgcacatcgtcccataagggaactccttgaaaaagagaagaaggagagatccttagcagaagcagaaaacaaatcattgcctcctaagtattctagcagtgatgtccgtcccctaaatatgagtgatctcaaacaggcaca

SEQ ID NO: 445719 - DNA, 274 bp, Triticum aestivum
cgggtagacaccagagggggctatggttacacagagtaggttacagagaaaggaatcttcacatccgaattaccaagctttccttccacgtaaaggagagtcccattcggatacgggatgaagtcttctatcttgtatcttcatagtccaacagtctggcattcgcatatagtccggctgtccgaggaccctcaatccaggactcccttagcaggcactaactagccacttcacaagcccaaattacctgctgggaatggctttggcaggccat

SEQ ID NO: 445720 - DNA, 503 bp, Triticum aestivum
  unsure (1)..(503): unsure at all n locations
tgnngaangtnagtcnnacggnacgtccacaatacagggnccacggccaaaaacttgataaaggtgatggttcacgttatggggcaaccccctgaaaaanggnttttcccccnttganttggggtccaagttcctaaaaatggantcctgntccaaantggnacaacantcnanccnacccnggccaatcctttgaattaaaanggaatttgncnaattncggccaatggntnaaaaanaaccggattaacaaaaaattaaacccaaattttacaaaatatnacgctaacaattagggtggcactttccggggaaatgtgcgcggaacccctatttgttaatttttctaaatacttcaaatatgtatccgctcatgagacaataaccctgataaatgcttcaataatattgaaaaggaagagtatgaatattcaacaattccgtgtcgcccttaatcccctttttgcggnattgccctncnggttttggcncaaccaaaaaag

SEQ ID NO: 445721 - DNA, 67 bp, Triticum aestivum
  unsure (1)..(67): unsure at all n locations
ggggatattggaatcctangtttgaagtcagtttaaatggatgaagaaaatgcaagtgatagctgcg

SEQ ID NO: 445722 - DNA, 432 bp, Triticum aestivum
acgggttcagccaaggtatgcggatgtggagccagctaagttgtgcggcggttgcgtcgatttaggcgtgggaggcggcggagtggcgttggagccggccggccagactcacaatcgatggagagggtggtgcggtcgagagcgggaggctgtgacagtggggcgtggcggaggtggtgccgtgcggccggacgggatcatcctggtcgaacaggtcgctgcccccaggctgctcaccggactccaattcccaccgctctcaagctctagatcgagcttcgtctggacccatctatttgtgcgatactgcgtttcctctggtggccatctgttccgctcagcgtttcctctgaatttgagaggagaaggccttgaggaggttcatgcaaccatggactgtttagatgagattagttgagagaaaaggaaaat

SEQ ID NO: 445723 - DNA, 350 bp, Triticum aestivum
  unsure (1)..(350): unsure at all n locations
gggacggtgaagatgtacatggacaacaaatccacgatcgagctgagcaggaaccaattcaacaagaaacaagttagcacaaccacaatccgtttcaatacaatcctcaattcaattaaggaaggcttgttgacaatgattatgttagcaacaattgaacaaacatctggacaaaggccctgggggcgcgtcaaagttctcggaagatgcgactttaagctcggcgtcatggaagtatcanacgggacacaggattaagggggtgatntgttgaccttgtaatcctggcgcccttgtatctagtttaagtagttgtttctttgcttttcaaaactctaccgcatgtgcac

SEQ ID NO: 445724 - DNA, 404 bp, Triticum aestivum
tcgacgggttcctcattgttcaagttcagttgggttatgctacttgaatggttcgaaagcacaggtttgaagatgatttccctgcatgtttggttttgcctttcctgctgatccgtttcttccctgaactttcagttatggttgcttatacagaagagagacggtcaatattgtatgcttgtgtatgctagtgaagtggcatgattcatttttcttgtgtgtgcatgctacttatagttcaaaattgttcgcttgtatatgctactgtaagtgcctatgttgaagcacactatttaagtttgttttacacacagaacttcaactagaaacttttgagaaagtacgcccgctttgtttttgtgaaaagttcaagtatgattgtttgaaaagtacaaaaatgaatg

SEQ ID NO: 445725 - DNA, 401 bp, Triticum aestivum
catgttatcaaaagtaccgaccttagtgagctccgatacatgtagatggtcatcaaggaggtgttaaggttgcatcctccggctccgctgctcgtcccagagagaggagagaggactgttaaatcatgggctataacatgcctaaaggaactaatatcttcgttaatatctttgtaatttctcgggatcccaaatattgggacaacccagaagagtacaagccggagagctttgagaacagcaacgtcgaatattatgggacacattttgaattcgaaaaaaaaaaaaaaaaaaaaaaaaaaaaaaaaaaaaaaaaaaaaaaaaaaaaaaaaaaaaaaaaaaaaaaaaaaagggaaaaaaaaaaaaaaaaaaacaaaaaaaaaaagcggcccctcaaaagg

SEQ ID NO: 445726 - DNA, 515 bp, Triticum aestivum
  unsure (1)..(515): unsure at all n locations
gtggnggaanttctcgttcgtcntgtgtnggtaatcagncngcacggcccgggnccacggctaactagaanggcggccgctctagaggatccaagcttacgtacgcgtgcatgcgacgcatagcncttctatagtgtcacctaaattcaattcactggccgtcgttttacaangtcggactgggaaaancctggcgttacccaacttaancgccttgcancacatccccctttcgcagctggcgtaatancnaagaggccngcaccgatcgccnttcccaacagttncgcagcctaatggcnaatgggacgcgccctgtagcggcgcattaagcgcggcnggtgtggtggttaccgcagcgtgaccgctacacntgtcancgncctagncgccgntccnttcgcnttcttcnctnntttntcnnctcgttcgncggggntnccncgttnntgttctnnattcgggggcncccttatggtttcncattaagtgcttaggggncctcnaantgtntg

SEQ ID NO: 445727 - DNA, 486 bp, Triticum aestivum
  unsure (1)..(486): unsure at all n locations
tgggtngnagntctttctggccgttcgtaccanaccatcaattcgcngggcccaacgctacaattnangtggcacttttcggggaaatgtgcgcggaacccctatttgtttatttttcaaatacattcaaatatgtatccgctcatgagacaataaccctgataaatgcttcaataaattganaaaggaanagtatgagtattcaacatttccgtgtcgcccttattcccttttttcggcattttgccttcctgtttttgctcacccagaaacgctggtgaaagtaaaagatgctaanatcagttgggtgcacgantgggttanatcnaactggatctcaacagcggtangatcttgagagttttcgccccgaagaacgttttccaatgatgagcacttttaaagttctgctagtggcgcggtattatcccgtattgacgccgggcaagatcaactcggtcgccgcatacacantctcagaatgac

SEQ ID NO: 445728 - DNA, 452 bp, Triticum aestivum
ttcgcggggtcacgggaagaaaacaatgagagatccaatcttggaggggctctcgcccctctgggcaccatggataccgagtaccagggggagaacctctccacatctaggggcatggaggagcaagccagagggggtccctctcttccctctctctcgatggcgtcagaatgccaccgggggaaccatctccgcagtaatcgtctttatcaacatcaccgtcttcatcacctccctaatctctttttagcggtccactctcccgcaacccgctgtaatcccctacttgaatatggtgctttatgctatatattattacccaattatgtgtagccatcctatgatgtttgagtagattatttttgtcctatgggttgatttatgaacttgattggtttgagttgcatgttttactttggtgttatcctatggtgccttctgtgacgcgcgca

SEQ ID NO: 445729 - DNA, 401 bp, Triticum aestivum
cgaaaaaaatataaacgaagtcaaaaaaacaacaaaaatgtcaaaaaaaaaaaaaaaaaatggccgtcgttattaaaacatcttgaaaaaaaaaaaaaaaaaaaaaaaaaaaaggggcggcccaaaaggttcaaaccttacttacccttgaatgcaaattcaaagcccttcaaaagggcccccaaatttcaattcacgggccgtcttttaaaaacttcgtaacgggaaaaacccggggtttcccaaattaaacccccttgaagaaaatccccctttcccaacttggcttaataccaaaaaggcccccaccgtttccccttccaaaaatttgcccaccctaaatggcaaatggaaccccccctgtaccggcccataaaccccggcggttttggtggtaaccc

SEQ ID NO: 445730 - DNA, 528 bp, Triticum aestivum
  unsure (1)..(528): unsure at all n locations
tgngggaantgtctagcttngaacgtgnccgtccancaataacggggccncgagctcacaagtaagcggacgctctaagaggattcaaagcttaagttagcgtgcatgcgaagtnaaactcctcnaaantgtnacctaaattcaattnaacgggcgtnggtttaaaaagtnctnactggaaaancctggcgttaaccaactaatccccctggaagaaaatcccccttccgccaagtggcgttataagcnaagaaggcccgcaaccgattggcccttcccaaacaagttgcgcaagctgaatggcgaaatggggaacgcgcctgtancngcgcattaagcgcgggcgggtgttggggttacgccgcaacgttgaccgctacacttgccaagcgccctaacgcccgctcctttcgtttcntcccttcctttctcgccacgttcgccgggtttcccgtcaagctctaaatcngggctccccttaagggttcgaattaatgccttaagggaacttgaacccaaaaaacttnt

SEQ ID NO: 445731 - DNA, 68 bp, Triticum aestivum
tgacacataaacaaaatggatacggaaaaaactcatcaaaaatgtcaaaaaaaaatcggccccccaaa

SEQ ID NO: 445732 - DNA, 120 bp, Triticum aestivum
cacggggagttcgaaaagatagaatagatattggattgagaatgacgctttttcccccgcaaaaaaagataatgccgctctttgcaaagataaaagcttacatacacatgcataagaggt

SEQ ID NO: 445733 - DNA, 98 bp, Triticum aestivum
cgggaggatcacaggagagaagcgacggagttagaagttgtaaatatgcattgttgtatcgcgacctgaatgaaataaacgaaataatgctcttgttc

SEQ ID NO: 445734 - DNA, 100 bp, Triticum aestivum
gcagtagcatgactctgcatagaagtggtttcgaaaaagctcgaacagcaatgagcttgtattatttgctcataaggctatataatgtgatttctcaatc

SEQ ID NO: 445735 - DNA, 130 bp, Triticum aestivum
tacggtcctacattccgggtccacggggggccgaaatgctaggcgagctctgaacgtgccaggcgatcctgttgcagtttactccggactcgcttgaaggtgtccggggtctgtatcgccgaattagtgg

SEQ ID NO: 445736 - DNA, 365 bp, Triticum aestivum
ccgggtccacggggcacggttatggcgtcgtggcggcggccgtcgtctctgctgtcttctcatccatcttctgatttttggacaagcacacgctcttttatcctctccctttcttctatccttcatgtttgtttacataactctgcaagttcccacacaacgacacgatgctttagatgatctatatctactcacgtggtaagaggattcgttcggatgacttactcttgttttaccccatacaagtagatggaaagttgagacttgtgtttcttcatgtggaagtgatggtttgtagtaatatcctgaaaaaatgtggttatgttcttcttgttctaattgaaatctggtacgcaaacgccatg

SEQ ID NO: 445737 - DNA, 103 bp, Triticum aestivum
tctgtaaactgaagccaacccagcggtcaatctgaactctgtccacacaggagatcgttcacctggatgcggtgctcaccacgataccaccagctgaacatcc

SEQ ID NO: 445738 - DNA, 465 bp, Triticum aestivum
cggtcctacttcacgggtccacgggcaacgaataaagcattatatctcaggtacgcctattaatgttgaaagcaatattatccaaacttttacaccgaaagaacacataaaagagtccttccggaacactccagaatcgtcaaaataaggaggtacgtgatacggtaagtaaacggactccaaaaaatctgcaaaaatattttttatcgatcttggtatattttaaaattttggaaataaagaaactcccaggaagcgtcacctgatgggcataatacaccagggtacgccaggctttcctggcgcgcccaggtgagttgtgcccacctgggacacctcctgtatttcatttttcttccatgtacttgccctgcaagattaaaaatctacataaacttaccaaacatgttaaccaccatatcacggagaaatcctctgttctcttttcttgctattttctgacag

SEQ ID NO: 445739 - DNA, 378 bp, Triticum aestivum
acgggcaagtcccaccttcttcccacaggcggatcagggagcctctgcagattgaccttcgtttggattcggattcaggtttgatccaacccaaatccaaatcgtctgatttggcaaggatttgatcaacaactggggatcctgagttgaatatgatatcaaatccggtgaattggtacagtttcgggcctggatagaagctgtagtgatgccagattggaaggcgggcgagtttgaaggtaaattcaacgatgaatttgctcggggtaatagcaacttgcaagaagatggagcaaggcctttgaatatctcaaataagaaactgaaacatgggattaacactgaagagaacccgcaaggtgtcgtgtctacaacaac

SEQ ID NO: 445740 - DNA, 374 bp, Triticum aestivum
gccaacgaggaaagcataacatctcatgtacgcatattaatgatcaccacaacagtaactaaacttttaaaccgaagtcacatttatcagattccttccggaacactccagaggcgtcaggataatgaggtacgtgtgaccggttttacattcgggccagaaaatctgtctttaaaccttttaccgatcttggcaaatttgaaatctttggaatatgattcaactctcagaccacctttccctgtatgagcataatagaggagcgcaagccatgctgtctagtcgcgtcaaagtaacttctggtcatcagcgatatgccctgaatggcaatgttcttgcagctgtatgcactgaaacattgccccacttgactc

SEQ ID NO: 445741 - DNA, 412 bp, Triticum aestivum
cacgggctaaaggataaccagatcaagtctgtatcgtgtgtgtcccccggcgtgagcccgtggttgcgttcgtggagtgaacgatctgcatgcgcatagccgttgcgaactgttggagtcacgtgcgatgtgcgcgcggctggagggagttagctgcatgctacctatatggttggacgggtcatgctagtgcatgcaaggcgcagcccggcgggtcacgtggtcatgcatggatatggatcgtgcatctaatggttagcttaatgcgtgagttatttgccgagtgtgcacgtcgtgtggtgtgtgtgcaccggtataagaaaccctccgtctatgtactgctcgagctgaaccggtgtgtaaccatgtaaccactgttaggaagaaaaggattggggcgttcatgctcccg

SEQ ID NO: 445742 - DNA, 390 bp, Triticum aestivum
  unsure (1)..(390): unsure at all n locations
ggtccacgggccctctgcatggagtagacaaagagaacacagacatattaatgtactgcacgggtggcataagatgcgacgtctactcaacgatcttganggagaaaggtttcgggaaactgtacactctgaaagggggcgtgtccaacttactcaagaccaaaggagcgctgagtgggtgggtaacctgtttgtgttcgacgaccggctctccctgccaccggccaagtttgcangggcagaagtcgcagcagaagaagggggtgccgacaacggggatctgtcatcgtctcggtggctggggcggtgctacttgtgcgggtccgangtggaggagctgangcaacgcaactgcgccagcatcgactgcaaccgcctctacctgtgctg

SEQ ID NO: 445743 - DNA, 341 bp, Triticum aestivum
cacttgtggaatcgggtgagcttatcttttgaaatttctggcatccatcacgtgaacgtttattgctttcgagtgggcctcgattcccgtcacgctagcaaaccactgcagtactgtacggatgctgtacagtcactgtcatgtgggacctgaccccacatgtcatctatactacaacaccatatagtactgtagaagatctcaacccaaccaatatggctgctcatctatgtgctcaacaccagtgagtgaggttgtcggaagtgtcttttgttcaactttgttctaagcttcctccctgattgtattgcccgtgaatgtagtattattgagtaattaat

SEQ ID NO: 445744 - DNA, 369 bp, Triticum aestivum
ggtccacggggaagaggcccttcaaggtacctgagatggctctgagggtgtgcgtgatccccctcgccttggcctccctgtgggagatggccaccaacaagcaagccgatgacacctacggggagatcagcttctccaacctctccggcttcaagtatttagttttcattaacgctgtcactgccgcctattccgtggtctccatcctgatgtcatccttcaagtccctcgctcgcttcgattggctcattttcctcctggatcaggcggcggcgtacctgctggtgacatcgtgctcggcggcggcggagctggtgtacctggccaaggaaggccaaccggaagtttccttgggccaagttttccccc

SEQ ID NO: 445745 - DNA, 501 bp, Triticum aestivum
  unsure (1)..(501): unsure at all n locations
tgnnngnaangtctnttcggncgggncggtccanaaaccaaaaattcccgggtcnacgggcaactgaacagcctcaaatcgaggagaaagtggaaaaaaaaaaaaaaaaaaaaaaaaaaaaagcggccgctctagaggatccaagcttacgtacgcgtgcatgcgacgtcatagctctctatagtgtcacctaaattcaattcactggccgtcgttttacaacgtcgtgactgggaaaccctggcgttacccaacttaatcgccttgcagcacatccccctttcgccagctggcgaatagcgaagaggcccgcaccgatcgcccttcccaacagttgcgcagcctgaatggcgatgggacgcgccctgtagcggcgcattaagcgcggcgggtgtggtggttacgcgcagcgtaccgctacacttgccagcgccctagcgcccgctcctttcgctttcttcccttcctttctgccangttcgccggntttccccgtnaaac

SEQ ID NO: 445746 - DNA, 419 bp, Triticum aestivum
gggggtatttagatatttgctgggagaaagaagagatagatcaagagaacagctcagcactgcggaaaacaaagtcaattatactcacaaatagttctgcatgcaaactgaagctgggagatgtggagggtgctttgttagatgcagactttgcactgcgtgaaacagagggcaacgcaaaagcttttttccgtcaaggacaggcacgcatgacactcaagaatattgatgctgcagttgggagcttccagcgtgcgttggagttggagccaaacgatggaggaatcaaacgggagctggctgctgcaaagaagaaggttactgacagacgcaatctggagcggaaggcattttccaagatgttcgagacgtcaggaagttcagagaaaagtgatggagtattggcagcaagttcagag

SEQ ID NO: 445747 - DNA, 366 bp, Triticum aestivum
  unsure (1)..(366): unsure at all n locations
ttcacgggtccacgggggtgcggatcttggtgtggttgtgatgcatgcaggggctcgcgtgaggctggactagctggacatggctacggccatggttgccggctggttcagagaagatgagcgtgggcgtgtgcgcaagcgaggagcagagaaaacaagggagcctccggcgcatgcgagcgggacggcgaaggagctcgttggaggaaactccggcgaccaaaagctacggctgaggtgcgcaaatgaaccgcaacggggacccgaactcgcgcatgtctcgcacagcaccaagtgacgatggangcgtcgccggtgttgaggaaacagaggcggtgaggccatacttgaactcgaagaaacaca

SEQ ID NO: 445748 - DNA, 101 bp, Triticum aestivum
gggaggttcacgggagagaagcgacggagttagaagttgtaaatatgcattgttgtatcgcgacctgaatgaatgaaataaacgaaataacgctcttgtac

SEQ ID NO: 445749 - DNA, 313 bp, Triticum aestivum
ggggccacgggaggacatgaaagaatttcgacgaaagataatttgattaagcgcaactggacatgatctactaggtgtagtttctgtgatcgggatgaaactatcaagcatcttttctttgattgcccgatggcgaaggtgttgtggcgctcggtgcaaattgcctttaacattactccttcaaatttggtcaggtcgttttttggaacgtggctggttggtatagaggctgaaacagctagacaaatttgagtgggagcatgttttattccgggctactgcgctaatccgtacgtggtcattactcactccg

SEQ ID NO: 445750 - DNA, 83 bp, Triticum aestivum
ccacggggaaatggcaggaggcgaggtcttcacgcaggcgagcaaggcagcagtggtgcttgccgtgaacggagacgacgggg

SEQ ID NO: 445751 - DNA, 448 bp, Triticum aestivum
ggtccacggggaaccacatacggatgtatgtggatgcattttagaatgtagattcatccattttgttccgtatgtagtccatagtggaatctctacaaagacttatatttaggaatggagggagtatattccaatgatgggcttcctcaaattgccctaggtctttgtgatgcacacccacttagtttctttttgagctttcatacacttatagctctagtgcatccgttgcatggcaatccctactcactcacattgatatctgttgatgggcatctccatagaccattgatacacctagttgatgtgagagtcgttaatagcatggtaatttgggccttctttcttgatctctcatgcttcacttagattattttgagattcgttaatagcatggtaattttcttaatgttaatatacttagtgttcaagatatgtgaaactttct

SEQ ID NO: 445752 - DNA, 453 bp, Triticum aestivum
ggtccacggggcctgacggagcactccctgaagaagaagaactcgacatggctattctactggcgtttctgctgctgatttcttatggaaccggcaacatccatggctcaacaacggttaaccatgggaacaacacagacatgctctccttgctcgtcttcaaagcggctaccaacgacccaacaggcgtcctgcgatcatggaacagaagcgtccgccactgcgactggacgggtgtcatttgcagctcaccgaatttcaggcgcgtcgttgccctgagaatccccggccaaagcttgtcaggggaagccaccaagcttccgacaactcgattttcgagaacatgaactaagggggaacattcctgaagtttttggccagctttcacaactctcaaggcttgaccttggctataataatttccaaggtgtcatacctccatagattagtgag

SEQ ID NO: 445753 - DNA, 246 bp, Triticum aestivum
tccacgggtggactggaacgcttctgcgcaccagctacttcagcctgatcaagccgatggtggattcctgtccgtgactggtagtcatcaagcgatacgtttgcattgacggtggccacttcagcctgaccaaagacataacttttgaatgacttcacctttgtcatgtttgtaaattaaatacgaagttgcttgcactatgtagcgcttctgtgaattagaatagtaccgtctgtacggttgttt

SEQ ID NO: 445754 - DNA, 90 bp, Triticum aestivum
gaacccccctgttaccggggcataaaccccggcggttttggtggtaacccccaccttaacggctaaacttgcaagggcctaacggccggt

SEQ ID NO: 445755 - DNA, 444 bp, Triticum aestivum
gggggtcatatcgacaatcaaccgtgatggcgtccaaagtccttcttgcaatcctcctcctcgccgcggcgacgccagcgtcgctggctgccatcgatatggcgcagatgctcgctgacaagccccagtacgcgaccttcctgaggctcctgaaggagacaaaggtcgccgatgacgtgagccggctcaagtcggcttccgtgctggtcgtccccgagaaggccgtaaagccactcttggcggtgccggccgccaagcagcggacgatcctccagcatcatgtcctcatcaagtatttcgaccccatccagctgggcgagatgaagaccaacgttgccaagctccagaccatgctctccaacacagataaggacatgggcaccatcgactactccaaggacaaggacggccagatgtacctacgctccccaggcgccgatagtg

SEQ ID NO: 445756 - DNA, 304 bp, Triticum aestivum
cgggtccacgggaaatgacaattcaaagatgatggctggacttccttttcgcaatagaggatcgtgatatggtggttgagcctatgtcagccactggttccactcagccgagaaggccaagcataaggtcttcaccttcagcatccagtaagagtgttacggcttgcaatttagttccagatcagctgccctgccaacactagcaacaaaagcaaacagggctgcaaacccttaacggttcgatgcacggactaaacatttctccgtaaatgcctgtgtactggtttttgctggactctgggga

SEQ ID NO: 445757 - DNA, 286 bp, Triticum aestivum
  unsure (1)..(286): unsure at all n locations
cgggactgactgagagaacatgacaaataaggagttgcatgataaatttcagcaaatgatgagtgaacatgtgcaagatgtgctaaacagatttgaagaggccatggagaagatagatggcatggagaagaagttcgaaacaaagctcaataacaagttttaatgaattgctcgcgcgtcttccaccaccaccaccggctggccctaacgcanctctacaacaacaaacaacaacatcaacaaacaacgtcgtttttccaaatcaagtgggaacaagcacaacgtg

SEQ ID NO: 445758 - DNA, 83 bp, Triticum aestivum
cgggtcacgggactgtcatgatgaggcgagagccggtcgctgttcgagaggtttttgcgagtccttaaagacttattccacat

SEQ ID NO: 445759 - DNA, 447 bp, Triticum aestivum
cacgggggactggcaatggcgcgcgccgtcgccgtcggcgcgttccagaggctcaaggcgcgctgggcctgcctccagaggcgcaccgaggtcaaggtggacgacctttccgtcatgctcggcgcctgctgcgcgctccacaacatctgcgagcgcagcggcgaacccttggacctccagctgctgcagggcctggagctcgacctagacgacgacgacgaccacatggtcgccaatgaccccgtgccctcccccgccgccgagcaaatgcgagacaccatcgcccacaacatgcttcaccatggcaacaagctggccggcgctgggacgtcttcctacaacctacaagcaattactggtttccatttcttgaccggttcattaacccgattcaaagttaaaggaataattaaaggagtagagcaccaaaattcatttgttattttg

SEQ ID NO: 445760 - DNA, 367 bp, Triticum aestivum
gggtccacggggaagaaaaatccttctccttcaagaaggcttcacgggagatgctcccggatccagtagagctggaagacagagctgttgtgtaggatcaccatagattagctatacgttacatgagctgagactattttgctgttgttaatctcagatgcgtataatccatcatctgatgtgcatattttgctgtcctagtaggtgaaaaaactgtgtatacaaggagtaggctttctttatctcccacccctttcagtgagacagttttctgtaacttatactgagaataaaatccgttatccgttctgggaataaaccgggctgcaagtggccagtaattttggtaaacaaaataccacatctc

SEQ ID NO: 445761 - DNA, 439 bp, Triticum aestivum
cgggtccacgggcaggtttaagtgttctaatatagcttttgttaacacagttgaaactttagcatgttccttaatcctaacacggaaaggtgtggtttctcaatataagcagaaggaacaactggatcaacattataaagtatagtttcctctttaagtagaactagttctttaatttcttctttaatgggtgggtgatatttaaaccacttctccttatggagttcaatatgggtagcaaatgattcacaaaaggaggctactatctcagagtcaagtccatatttagtgctaaacttttgaaaagcatcagtatcaataagagatttaacacaatcatacttaagtttaatacctgactctttaccttcgtcgagttcccaatcttcagagttgcgtttaattctttccaaaagattccaccggaattcaatagtct

SEQ ID NO: 445762 - DNA, 224 bp, Triticum aestivum
cacgggttctccacatttgtacagtgaggcaggtcccgcttctagccagcattatgctacattgtactgcctgtaacttgtaatggagtctggagcgattcagtgtgtctgtcagttgcggtgcggcgcatccgcccgacggccatgattggcgtgtcagtctttcgacacagtacgttattcgcatatgtgtgtgtgtgtgtgtgtgtgtgtgtattgctgtg

SEQ ID NO: 445763 - DNA, 125 bp, Triticum aestivum
  unsure (1)..(125): unsure at all n locations
tnttttttnttttnttntttttggggttngtngcttttttttntantttttctcnattgntgttttgtttttggttgngtttgtttttttnattnttnttggtctttnggtttctntttttttnt

SEQ ID NO: 445764 - DNA, 447 bp, Triticum aestivum
ttcccgggtccacggggagggatggatacgccatcgatgggagtacgatggggtggtgaggcctgcacagctgcacagccggccgccgaggatagagcaggcagtcgcgccggcgcttgtttaagcggctggagcatgaagagcacatattgaataagcacgactgtcattggatggacatccaacagtcactgcttgtgtgtcaacatttttttacgacaacctcaagtctgtggtaaacagcatacattccatctgccattatttctaataatttacatcccatttgctaattcgtatgggttttttggagcccagattctttttgttagcattacaacccatattgtggcacacgttaaaccactatacgaaattttgcataattcagtgctgtccaaactatttttaatcccacaatttcgagtcagattcagactgatttta

SEQ ID NO: 445765 - DNA, 497 bp, Triticum aestivum
  unsure (1)..(497): unsure at all n locations
gggnnnnnngttnctnccgtgccgtccacanctaagntcccgggncnacgagctcactatcggcggccgctctagaggatccaagcttacgtacgcgtgcatgcgacgtcatagctctctatagtgtcacctaaattcaattcactggccgtcgttttacaacgtcgtgactgggaaaccctggcgttacccaacttaatcgccttgcagcacatccccctttcgccagctggcgtatagcgaagaggcccgcaccgatcgcccttcccaacagttgcgcagcctgaatggcgaagggacgcgccctgtagcggcgcattaagcgcggcgggtgtggtggttacgcgcagcgtgccgctacacttgccagcgccctagcgcccgctcctttcgctttcttcccttcctttctcccacgttcgccggctttccccgtcaagctctaaatcgggggctccctttanggttccgattaatgctttacgggaactcnaacc

SEQ ID NO: 445766 - DNA, 413 bp, Triticum aestivum
ggtcgacattcacgggtcacgggtctgatcaattgaatcatgcactttgatgtgacagttttagtcaatagaagcttaattatagaaaattgtggaaacaaagcccatgttctcatctgtaagtggctagttcacaataatgtcatattcctaggaaaattataaatcactatggggttaagcggttaggcacaaatttctaaaaatgtattattttcaataaacgaacataccaatccacaaatagtggacgcaccaacagaagatttgatgccagcacagtaactcatgagtgaacctgttataacaatttcgacaatacaaagattcggctatcaaatgaatactacaaaaattacaaatattattcgttatccaaaagggaaaagtaaaagatgaagaaacacctacct

SEQ ID NO: 445767 - DNA, 374 bp, Triticum aestivum
  unsure (1)..(374): unsure at all n locations
cggcaggatctttacctgatctctcggacaaaaacagcttaactttgaattatggtggccttttttcatgtaattctttgaccgcagcagcagcttaaccttagagcagaacacattactggctacttattatgagttttgtgaaatttgcatcatgtttgtatatggtagaagtgtggcagtggatgatgaattgaattgactaagttagagtgaagtgtttggttgaagattgcggtattgcatttgccagaancaaantaactcatgaatgaacctgttataacaatttcaacaatacaaacattccgctagcacttttctcgagcaaaaatacaaaatattactcgttaaccaacaggggaaaagtcaaa

SEQ ID NO: 445768 - DNA, 385 bp, Triticum aestivum
cgggattactggaggacgagaactctgaattctccaggctcatcaaggagtactcacggagatccaaggggttctaaagcaccacaaacaattgaacggcggcgaaaccggcatgaagccaactaggcgcaccgcagaacccagcagaaagaccgcacacaccacaacgacctttctccagacgacaagcactcacgaaacccacccagacaaagacgatataggatgtacaatggacgggactagctagattattcaggcgatttggaaaaattatcaaagccatgtaatgcaatagcacagtagcactatgtaagatgctctctgatgtgagaaagatcgagtgtatgtatgtaactgttcaaaaagcatcacctcatttgac

SEQ ID NO: 445769 - DNA, 427 bp, Triticum aestivum
gggtccacggggtaagcgcaagatagaagacctgcacgaactcataccgtctacgcaatcttctggaaataaaacgagaacgaaacgtcggcgcaacggacaacggacttcgactcggagacagcaatcacgctgtagtttcaagacgaacttctttcttaaaatcgagcaggagcaatcgccgaaccacgcccgctgcctcagtccgaccacggcccgctcctcgatttcgcaaggtgaacatgcgcacgatgggtttgggattgggagcgccgttcttcctcctcgtcctcctcttgctggccgctggcactggagctgtgccgcaggacaagatggttcgcatgaattatgttcttctcgatctcaatacaatcgagatccgcccaaatgacaaggaggaaattgcctctagcaaaattcctgt

SEQ ID NO: 445770 - DNA, 267 bp, Triticum aestivum
aaatccatgctgccaactctcaaggtcctcctcatccccgggattctcaatccaaccccgttccgtaacccctcccgaaggtcaactgaaccttgtaagtagatatccggaaccaacccaaatccttttcctttttttcggaaaaaccaacaagagcaatctccgaaacaagcccgatgagccaatctcgaacaaagagcacacaaaaaggggccgctcaagaatactaactcttaatgactcgtaaatggaatgtcatacctcttc

SEQ ID NO: 445771 - DNA, 262 bp, Triticum aestivum
  unsure (1)..(262): unsure at all n locations
attcncgggtccacggggcatccatacaaaatggaccaactacagaaagcaaccctggcctcttccggagtacccggacaattgctaaaccataataacaacactggaagaattcaacaacaggctccaggccaaccagagcaacacggtgctgtgaattaagaggcgagcaagaaggacctgaagagccggggcttgtgcctcgtcccaatctcgtgcacgtcccactttggcggggacaacgctgctgactactgggccc

SEQ ID NO: 445772 - DNA, 448 bp, Triticum aestivum
tccaaaattcccgggtccacggggcgtcccgacccctcactcataaacatacacgtaacccagaagaccgttctgtcacgtatacacaacgtatcggcatctgtctatgtcccactcaagcatgataatttgcacaatcagaactcaatgtctggatcacaggcacaggatcgcgagattggcgctccggcagaagacaaatacggacagagatacacgtcacctctcaatgaagcagacaaatagagtaataagtgaactaacgcgcaactaaaacgtctagctcgagtctcttacaggttggagctaaattcatctatatggaaatattgtagcttcgagaactttcgtaggagtctcggtagcataaatactatgaaagtacaaatggtagaataatgttccaggattggtttagatacatcgagatgttaagtggatcgatttc

SEQ ID NO: 445773 - DNA, 312 bp, Triticum aestivum
cggggccacgggtacttgcatagtacttacaacatgtaggttgaattctactgaacatccattgagtaactgagtggtgtgaatgcatgtctcatacaacccttgagaaatatgacataatgcaatgtatctcaagttaaaattcccaagtcatgtgatatatcaagatgaaaaatggtatggggccttactaatgccaacctaaaatgcatacaagtctcaagtcaatctattgatcctaagctagaacatttcatatataagataaaagatcaagtgccaatgtttcccttcgcatgttacaaaatgtta

SEQ ID NO: 445774 - DNA, 70 bp, Triticum aestivum
cacggggatataattcagatatgtcagactttctcttgggaaaaaaaaaaaaaaaaaaaaaaaaaaaaga

SEQ ID NO: 445775 - DNA, 430 bp, Triticum aestivum
  unsure (1)..(430): unsure at all n locations
ggggacggagatcgggttcgtccacacactcccgccgccaccaccgccgcgaaccggagagcgaggccgacaccgccgccgcgatgagggccaagtggaagaagaagaggatgaggaggctcaagaggaagcgccgaaagatgaggcagcgatccaagtaggccgtaagcatcatcttgcatccaggcagcggaactctgaggggtgatggcattgtctagtgattcttgatttgttctgttgttttggctgcggaagttgcttttacctgtgtttggtcaaatttagttgtttaatactagtctggctatgttccagtactgagttttatgtaatgtgaggattatatgtgtttgtgactgaattttatgcacctattatccttgaggaaaaaaannnnaanaaaaaaaaaaaaaaaagcggccgctct

SEQ ID NO: 445776 - DNA, 409 bp, Triticum aestivum
ggtccaccagctcatggtaattaattatgctagcgagaatgtcatcctcgcttgccagggacttcagcaccgccagctcatcgcgatcaccgacgcggctagtgcgcttgtgaaagcccttgcgtgctggtgagaactcctttgacggctccgcagcccatcaagacatctctattgtggatgtcgcgtaacggcgagacctctctagttcttttgcgaccttggtcattgctccttgggtatatgtcatccaaaactcctcctatcggtcatggcggaatgacttgacaagtaagaactattttgttagtgattaagatacgaaacgttgagttaatttctagtgggtaattttaaaacccggtgctaagtgttaacatgtttaagtttgattcgtgtgaacaaattt

SEQ ID NO: 445777 - DNA, 53 bp, Triticum aestivum
gggtccacgggctttgtgcatcggttacagaagtgtaaaaaggtgcatgctat

SEQ ID NO: 445778 - DNA, 316 bp, Triticum aestivum
  unsure (1)..(316): unsure at all n locations
ggggccgctgcaattcaaggtggtggtgaccggcgggtacgacgggaagtgggtgtgggccgaccgggaggtgctgcccagccggtggcgcgccggcgatgtctacgacacggnggtccagatcaccgacgtcgcgcangagggctgctttccatgcgacacgcangagtggaggtgaaagcaggcaggctagtaaacaaacaaagagccaaagaagaagctgatggctcctcgttttggccgggctatgcatcacagcacaaggccacaccacaccagagatgattagtttagtctaacagttaacaccagatga

SEQ ID NO: 445779 - DNA, 140 bp, Triticum aestivum
cggggaaattcaactggttttctgcagtcgacgattataaatgttgatcgattctctacctgatggaaaccggccacctgtatatataagaaagtgtacataactgccggttcagtaatgggcaattgcagagttctagc

SEQ ID NO: 445780 - DNA, 86 bp, Triticum aestivum
cggggttccaacaatgatgagctgggaactgtgctgaactgaagatggttgaagatattcacggtttgcctgagtttgctccatat

SEQ ID NO: 445781 - DNA, 220 bp, Triticum aestivum
ctggttcttatcctgtgttgatgcatggtctgttgatacacgcgcatttgccagattatgcgccattggtgtatctacgtgtcattatggtactcattgctttgtgtcatattgtgttcgtccggtattagctctcttacagaacgtttcgattgaatgccttgcctgttggttcgtaaccgaccatcattacttcgtatgatcttcgctattactggct

SEQ ID NO: 445782 - DNA, 512 bp, Triticum aestivum
  unsure (1)..(512): unsure at all n locations
tgnnnnaatgtctcctgtgacgtggtcgtccaganattcanaggggccccgggccacgncnaactagncggcggccgctctagaggatccaagcttacgtacgcgtgcatgcgacgtctagctcttctatagtgtcacctaaattcaattcactggccgtcgttttacaacgtcgtgctgggaaaaccctggcgttacccaacttaatcgccttgcagcacatccccctttcgccactggcgtaatagcgaagaggcccgcaccgatcgcccttcccaacagttgcgcagcctgatggcgaatgggacgcgccctgtagcggcgcattaagcgcggcgggtgtggtggttacgccagcgtgaccgctacacttgccaagcgccctagcgcccgctcctttcgctttcttccctcctttctcgccacgttcgccggctttccccgtcaagctctaaatcgggggctccctttaggttccgaattaatgcnttacngnaactcgaacccaaaaa

SEQ ID NO: 445783 - DNA, 242 bp, Triticum aestivum
attccccggtccacgggtttatagtacgttggatttgctacgatttttgacgttggaaagagtgttttcctgatttttgatctgatcttgatagctgagatatagatacgtacggtcgtgtacatacaggacagaggtaatttatctacctgtattttttggactaacaccatgcaacacaacaaacattcaaaaaaatggaataataacagaaaagcacgcaccgaataacacttcaaaac

SEQ ID NO: 445784 - DNA, 134 bp, Triticum aestivum
cttccatctcacagacacttggcttcgggcaatcgatgtgggagtggacattgtgttggttccttcgaaatttgggaaaataagcaatcaaatttaacctggcaactaaattccaatccaatttggaatcccaa

SEQ ID NO: 445785 - DNA, 324 bp, Triticum aestivum
  unsure (1)..(324): unsure at all n locations
ggaagatctaaaacaatatatcttctgtgcaaatataccccaacataactcattacattgtcttccttgtccanattcaactaaatttctcaagttttaaataaataaagggtaatcaaaatcatagaagatgtccaagataatataattgtatgtgaaaagttccctccctatactaatcattcaagaatttcttgtatgatcaatattgtcattgtcaagcttcaaaagatttcactttctaaacccaatgtgaagccaatactaagcatgatatgaacatataatttcaaattcatgatattcaattcattcaacaatttt

SEQ ID NO: 445786 - DNA, 333 bp, Triticum aestivum
agtcagtggatggagagctacgagcagtggatggagagctaagagaaaaaaaacatgtgaaaaatagagtgaagttcaagtagacatgccgagaagttcaagttcttcacgcggcgcattttcgaagaatttgttttgcgataaaggcagaacgaatgatctcgccatttttgaaattacttgaaaacgaccaggaatcagagaaaaccatcaacatgaaaaagtttcgcattttccgtagcttttcaacggtatattatttgccccattccgataaactttgcagaaaatacggcaaaaaatatgtttttaaccattttcagaactaacata

SEQ ID NO: 445787 - DNA, 422 bp, Triticum aestivum
cgggtctcacttgagcggtagcacggccgttaacatcaacggcgagatcggtcctttcttccccaccctatgtggggttcaacaaggcgaccccttctccccgttcctattcaacatggtcgtggacgcccttgccaccatcctggataaggcgaaggctgctagccatattcgtggaatcacccccaccttgccggagggtccgggatttccctcctctagtatgccgacgacaccatcatcatggtcgaaggctcggaggcgaacatttccaacctcaagttcctcctcctctacttccaacaaatgtctggccttaagattaactttgacaagagtgatgttatggtgatgggcatgaggagtgtctagccattgccaaccggcttaactgccgcctgggctcctttcccatgacctac

SEQ ID NO: 445788 - DNA, 325 bp, Triticum aestivum
ccgcatttatcatggtagtcaatacgcggatcgccaagctaaagatagaacgggatcgacatagtatcataggcagcagatgagtaatcgctgaggacccgaacttacatgatatcgcggtgcaatctgagattgctagtactcacagtgtaggattagccttgtcagcctacagagtttcgcatggcatccgcctattcttggggagacacatggaaccacagcttatgcagatagcactgttgcctaggctatggtatggcctcgtaaagcaactcctcgtacggctagtccatcagcaattttacgtggttcaactgttgga

SEQ ID NO: 445789 - DNA, 500 bp, Triticum aestivum
  unsure (1)..(500): unsure at all n locations
tggnngnnngtncttcggnccgnncgtacaaatccnanattcccgggtccacgggtgttatcngtcaaaaaaaaaaaaaaaaaaaaaaaaaaaaaaaaaaaaaaacaaaaaaaaaaaaaaaaaaaaaaaaaaaaagcggccgcncnanaggatcnaancttacgtacncgtgnatgcacgtcanancncttcnanagngtcaccnaaattcaattcacnggccgtcgttttanaactcgtgacnggnaaaaccctggcgttacccaacttaancnccttgcagnanatcccccttcgcnagctggcgtaatancaaanaggcccgcaccgntcgcccttccnaananttgcncacctgaatggcaaatgggacncnccctgtancggcgcattaancgcggcgggtgtggtggtacncncagcntgaccgctacacttgccagcgccctagcgcccgctcctttcgctttctcccttcctttctcgcnangttcgccggg

SEQ ID NO: 445790 - DNA, 78 bp, Triticum aestivum
gggttgggccggaaaaccaaggatgacaaggtgtatgtataatattcacgattgattgtctcgtgtcattgtgttgat

SEQ ID NO: 445791 - DNA, 211 bp, Triticum aestivum
gggcgacagtataatcacaagaaatatatatataggataataaggtggtgtattgccgccatgtccgttaacctgaggttggttccaccaaaaaaaaccgttacccccgcccaaaattttccgacccaagggaaaataataacaacgggaaaaccacccaaaatcaaaccggcttgtgaaataaatggttgcgccccggttttttgtcgcc

SEQ ID NO: 445792 - DNA, 55 bp, Triticum aestivum
atgcattgttgtatcgcgacctgaatgaatggaaaaaagacaagtcagatacgct

SEQ ID NO: 445793 - DNA, 435 bp, Triticum aestivum
ggtcgtaattacgggtccacgggcatcacggccaagagaccgtggaacggagacggcgtcctgggtccacaaggctcctccggggggttggtttcccctaacggaaccccggctgggaaccccttcgcccggggcccgggtttttacaaattaaggtccccgtcggtcctggaagccctgcctttccgctggaaccgcgacatacaccgctgcttaaaggtgagcgacggccagctgcgctacgttcagatccatggtgcatctgagaagccggtggtcagcatctggacgctgtcatccagtgattcgtcaaaggcgacatggggaagcccgaccagcctccccttggatgtggttttgggaagacagcaactacagtgatgatccccggttcgtccgggggtcgtccctgctttgccgctggtccaccccatg

SEQ ID NO: 445794 - DNA, 111 bp, Triticum aestivum
  unsure (1)..(111): unsure at all n locations
tggaatcggttccgatggttttgtgacgagaacaatgttcttggtgcctcctgacatttaggggttgtggcagtgtcccggngagttgagctcccgaggtgttgtcgtcat

SEQ ID NO: 445795 - DNA, 141 bp, Triticum aestivum
ggtccacggccagcacaagaaggaaggtgagcacaatgagggcatgatggagaagatcaaggacaaaataagcggcaacggcaattgcgactgcaagaaggatggcaaccacatgaactaaaaggtcttatcataataaaa

SEQ ID NO: 445796 - DNA, 462 bp, Triticum aestivum
cggggccacggatacagaagacgaacaggtgagtggagagaaaaggatgggagacgaaatatctgtacagcttatcatgttctctgtccccagttccctatctgaccaccccagcttgcaacagtagcaaattgatgcctgtcgtgtccagttgagcagatgagagatcaaatgagcatttcccgtggcctctataacaactagcaagtaaggattcatcgacttttacttctttttgtggatccaaaccatgatgtctttattgtatactaacatgatttttctgccgtagatgactccaccgtgcttgatgtaccggacacattgcttgatcacactcattgtatttaccttttccctaatgctttattatgtttttcttgagaccaagctaagtcatttaagctgatgttttgccagatcgtcttttggttaatcatctcatgcacatatcaacaaaaa

SEQ ID NO: 445797 - DNA, 424 bp, Triticum aestivum
ttcgcgggtccacgggcagattggcatgagccctgccgaggcggcggagtacaacaaatatatcattcgtgaggttagttccgggtcaggcacaccgctcatgccaaagcggaagttcgagacgtacatattcacgctcttcaacgaggacctcaagcccgggcccgtggccgagcgcaatttcgggatgttccagccagacttcacgccgatgtatgacattggcatcatgaaagatccggtcaaaacaacatcggcgccagcgtcggtcgtcccagcggtgccgcagaaagtgacagcaatgcctatggtcgctgctgctaatgccttggaagctggagtgcctacaaaggcgaacgactcgaacaacgcctaggcatccacgcaagcatcgtcgccaggcaacaaatccttgaccgatgac

SEQ ID NO: 445798 - DNA, 370 bp, Triticum aestivum
gggtctgcaactatacagcttcgtatgtagttcgcagatcactacgtcattctgtacatgctgcttccatgctccacttggagatattccaaatgggttgttccactatacgtatccggtttgctacttagagtcactcagataggtgtcaaagcttgcatcgacgcaactctttacgtcatcctcattatcagctccatatccgagaagcatatccgtattcctctaatgatagttttgaccgctatctggtgatctactccttgataacctttgtatcctcttgccagatatgtatcagggcacacatcaagtgccgtacttataataccgtagagccgatgtctgaagcataagggactaccttcgt

SEQ ID NO: 445799 - DNA, 366 bp, Triticum aestivum
ggtccacgggcccaatggtgcatgaatcagatatccagcacgttgtgtcatcatggactggcattccagtggagaaagtctcgacagacgaatctgataaacttcttaagatggaagagacattgcataagcgtgtcatcggccaagatgaggctgtgaaagcaataagccggtccgttcgccgtgctcgtgtgggcctcaagagccccaacagaccaattgcgagcttcatttttgcaggtcccactggtgttgggaaatcagagcttgcaaagacgctggcatcatattacttcggctctgaagaagccatgatccggctggatatgagtgagttcatggagaggcacactgtgtccaagttga

SEQ ID NO: 445800 - DNA, 396 bp, Triticum aestivum
gggtcaattccaacgagtctgtaactgcagcgaggcgagcgtctgggacatgcattagtacatgcgattagataatcagtaacacaaacccacaaacggcaacctgcccttgattagataatgccatataaaatccgatggatggaacaacaaggtacgtgcagctgcatgcatgtaaaattgagtccatatccacgagtaaaggctgctgcatgcatatggcagcaagccagccagccagtgtacgtgcagctgcagcgaggcaaagggcctggatggctccggcactcttcggccttcccgaagtcgaagatcacttttcggtcaacagtaagttgaagttactattttcagcccagctgaccacttttccgccgattggaggctaaaaagctc

SEQ ID NO: 445801 - DNA, 360 bp, Triticum aestivum
ggccgggaatcacttatagacttctacactagctctgggaagcgaaagccagaccaagttattattttcagggatggagttagcgaaagccagtttactcaagtgataaacattgagcttgagcagatcattgaggcatgcaagtgccttgacgacaagtgggagcccaagttcacggccattgtcgctcagaaaaacatcataccaggtttttccagacaaactcgccagaaaatgttcctcctggcactatggtggataaacaagtgtgccatcccaagaactttgacttctacatgtgcgcgcatgctgggatgattggcacgtcgaggccaacgcattaccatgttctgcatgatg

SEQ ID NO: 445802 - DNA, 328 bp, Triticum aestivum
gggtccacgggttgatcctgatgaaaatcagaaacttttgaacccagtaaattagtttttttaattcacataaacgtgattttgatcgtattctttttgatctggattggtacaaacatttctaaggtcttccaaatttggaaaaatttttggagttccagaagtatgcgtttgatgcaaatggcaaaaaacggtccggttttgacaaggtccccttttcaaggggtggttgcctaatttgaagcaaccaaggctaataaaataatttataaaccatagataagttgggatacaatatggttaacacacaaataaataaagaaagagt

SEQ ID NO: 445803 - DNA, 427 bp, Triticum aestivum
ttcgccggtccacgggacgacaagacgccggatgtcccggagcaggccgatgcgtatggacgtgagttggtggtgaatgaagggcctgttacaatagagggtaagccgatggatgtccatcccacaatggaagatggcaatgtgcaggatgttgccgtggaggcagaaaatactactcgggcttcataaatcagaagagtggatgcaagatcagcaattggtacaaaaattctctgtgcttgttgtccatatgggtgaagaataaagaacttagaggtggttgtagaatgtgacgaacagcagtgtgctgtgcgcctctgcactcgtagctaagtgagtgaccatgttgtaagatggatttctggacaaatcaggtgtaaagatgtaagattcccaaacaatctgtacgtatatatatacccagact

SEQ ID NO: 445804 - DNA, 312 bp, Triticum aestivum
ccacggggagccataaaaaacatgctcagtctccgctggccggtgtccaagagcaacccaagccaagaaccaacctgccgggggcaatggaaacaatttaagttaatgggaaattgtgggcgctcacagggtcaaggttacctgcacaatgctagccacgtacttacttacagtgcatgtgccatacatacaacacatggacacttacacaaatggcacatgtgagacactcccgggggcaggcaccctaaactatgtgtacaatttacctgtggggcttacgtgcttttatgaggaggtaaacccctgtgt

SEQ ID NO: 445805 - DNA, 168 bp, Triticum aestivum
  unsure (1)..(168): unsure at all n locations
gggacggggcgagaacgcagnggactcggacctgcagctggagcggattaacgtctactacaacgaagccaaccggggaccgttcgtgccccgcgccgtgctcaaggacctccaaccccggaacatggactccgtgcgctccgggcccctccggcaaattttccgccc

SEQ ID NO: 445806 - DNA, 510 bp, Triticum aestivum
  unsure (1)..(510): unsure at all n locations
ggnnggaantgtctagctttacgtngccgtccacgaattcangggnccacgagctcactgtnggcggccgctctagaggatccaagcttacgtacgcgtgcatgcgacgtcatagctctctatagtgtcacctaaattcaattcactggccgtcgttttacaacgtcgtgactgggaaaccctggcgttacccaacttaatcgccttgcagcacatccccctttcgccagctggcgaatagcgaagaggcccgcaccgatcgcccttcccaacagttgcgcagcctgaatggcgatgggacgcgccctgtagcggcgcattaagcgcggcgggtgtggtggttacgcgcaacntgaccgctacaacttgcaagcgcctanncgcccgctcctttcgctttcttcccttcctttctcgccacgtttcgccgggctttccccgttcaagctctaaaatcggggggctcccttttngggttccganttaattccttaacgggaacctcnaacc

SEQ ID NO: 445807 - DNA, 278 bp, Triticum aestivum
ggggctcagtttatgaaatagaggtgaataatattttgagcggtatactttcattgtcaacataacaacaaaaaaatggcaaaaccttcaaggcaaaaaacataaaaggcggttccaaaccaaaatggtaaatttaaggcccccccttcaacaaacaaccatcaaccaatggcttgcccaaaacaatgattgcctcaaactaacaaaattcccggggggagttttgtttgcaattattttgatttagtttgcataaagcatggaactgggcatcccgg

SEQ ID NO: 445808 - DNA, 439 bp, Triticum aestivum
  unsure (1)..(439): unsure at all n locations
gggtccacggcggaagaattagcaatgctaaattggtgagaagagagcgagaggaagatgatgaggcgagatggaaaaggttgattttataactggatgctaggcttaaatcagaggacatggtancggaagaacaagatgtcatattctgaataatactgaaggtactttcagtaaatgttctgcaaataagtgcatccagaacgccaggatgtgtggggacaaaatgtactctattgcttcacatgggaatggcttcagttccgctactgtcacgagcctgaggttctgatcctacacctcggctgctcggccagaagctaagtcataccaatttatgttagttcttgagatttttttgtggctttggatttacagtctgcaaaatgtgtttatgcttttaacaatccttccagctctaacatacatatgttttttt

SEQ ID NO: 445809 - DNA, 462 bp, Triticum aestivum
cacgggaggcggataacgctcggaggttgataatattcatgatgcgtcaagttgctcagcgacaccgaacacaaaggctccagagtccaagtggcatgcctggagatgccgaggaaggttatgcggttagcagcggtggcgccaatggaaccaccccgtaccctttcaccttggagggcgacgacgaggatgacatggctctggccggaggggaaggggcgggtatgcttagatcagacaggcgtcgccggcgacgccgtaggaaccgtggaagactgtttttagattctaattgagaaggcaggggctctgtcaccagagtacatgcacagctgattccctggtgcctggcattcatcaattccaaccaaaatttacttgttcatgatcattgtaccaaagtagtttgtcttaacctcagctcatcattgctttccatcaaccatgtttcattttcacatt

SEQ ID NO: 445810 - DNA, 351 bp, Triticum aestivum
ttcgcgggtccaccgtttctatgattctctatatttagacgaatctgtaatctcttgcaaagctaaattagcggctgcgacgatgacaaacctgcagagaacctctgacgactcaactcaagttgaaatgcccagcacaccaattgtttcttggcctggctgtatatatagaaattacgaagttgctgtctctcatgtccctattgtttcttcgtttccgggcattgtcgttgtaaattagcggtgatcatggtttgttctccttgtagccgcgcccctctgtggcgccggatcccctgaactgtttgctatttctacttctataataatatcgacctgtgaagcttgtac

SEQ ID NO: 445811 - DNA, 277 bp, Triticum aestivum
tcataatacgaatctgtactctcttgcaaatttaatttaacggctgcgacgattacatgtctggatagaacatctgacgactcatctcaggttgaactgccgaggagagcaattgtttcttggcctgactgtttagatacaacttacgacgttgctgtctcgcatgtccctattgtgtcttcatctccgggcattgtcgttttcaattagctgtgatcatcgtttgctctccttgtctcctcacgcctctgtcgacgcctgctctcctgatctgttt

SEQ ID NO: 445812 - DNA, 370 bp, Triticum aestivum
  unsure (1)..(370): unsure at all n locations
gggtctgtcccaacagtttgtcggcgccttcatangcggacaaaagcctcatggccaggagagtgatcttcatctgctcgcccataaggaaggagagcccctgcgcaagtacattcagagattcagcagtgtgcagcacaacatcccaaacgtccaccctgccgcggtgattagcgcgttccatcaaaacgtgcgaaaccgcaggatgcgggacgaaatggcgatgtgcaagattaaggacgtcagtgagttatatgcactggccgacaagtgtgcacgtgctgaggaaggaaggagaccccccggagaaaaatgtaggagcgggaggatctaacattgaagatgctcccccggcaaggaaaaaccggcg

SEQ ID NO: 445813 - DNA, 370 bp, Triticum aestivum
  unsure (1)..(370): unsure at all n locations
cggtccgacattcacgggtccacggcgtcgtggccacgctgcgcaaggacgttgacagccttgcttccagccccatcacgaccacctcctcctacttctacggcaaggccattgccagggcggcgaggctggcgctgatcgccgaggaggtcgggtgccccgacgtcatccccgcggtgcatcggttcttgaaggccaccgtcacgccgtggctggacggcagcttccaggggaatggtttcctgtatgatcccaaatggggcggccttgtcaccaagcangggctgcangactccggcgcagactttggcttcgggatctacaacgatcaccactaccatttgggctacttcctggtatccattgctgt

SEQ ID NO: 445814 - DNA, 358 bp, Triticum aestivum
  unsure (1)..(358): unsure at all n locations
gggtccacggctgacaccatagtacacatatacaatggcaactcccaatttagtgtcataatccttcgataaacatggctgcaaaaaggcattatcagttattgtagaccccgttccgcctccggttcaaaaaaggcgtccctacggtactgatatagtgaaaagttcccatttttatcctcagcctatgcaaaggcagccatttatcatagtgaatgggctcccagtggaatcaccgccaatcgaagggcagtgacgtgcccaactggaaatggacaagtcatgtcaaggcagcanggctgcaataaatactctcccctccgagtcatctggtctcagaggttctttatcctctgaa

SEQ ID NO: 445815 - DNA, 91 bp, Triticum aestivum
cggggacggggcagcgacgaagacgaacagaggaactaactgaaatttttcgtaagtgttgtatatataggagaggcctttagtaccgggg

SEQ ID NO: 445816 - DNA, 442 bp, Triticum aestivum
ttcgcgggtccacgggggaatgggagcccatgaccgagtcatgggggtcaatctggcggttggacacgcggcgccccatgcagggacgcttctcgctgcgcagcaccaacgagtccggcaagacgctcgtcgccggcgaggctcatccgctcagactgggatcccaactgagatatacagctccatcactccagttcgactaatcttttttagtcgatcgatcatctgatctaataccatatatagatcggaaaatataatgtgtgtgtgaagacgcatcatatgcgtgcgtggtgtcggtgtatgtactataactgatgaagcaataaccgctctgtgatcgatcgagttggctcatcttagtgccatacgtagcacggtgagacgtcgcctgtgacctccggtgattagtgtcgtcctccaacgtgtaccccagtccatt

SEQ ID NO: 445817 - DNA, 79 bp, Triticum aestivum
gtgatcactatgctgagtcgtcttacatatgaaccaaccgagatttttcgtacatgttgtctaaatctgagacgctttt

SEQ ID NO: 445818 - DNA, 464 bp, Triticum aestivum
cacggggcgtatgaaaaaggtagacatcaaaacataaatttgaaaatatgttaatcatgcatttataaaacggtaaacatgtactgtataaaacaatgtttctcatgtaaacaaaaaatatagagggtgtatgtaaaaaagtccacataaaaattactacaaaatgttaatcatgtattaaaaaaatgttaattgtgtgttttaaaaaatgctcctgatatatatggaaaatttacaatgtgtataaaaaagttgacatcaaaatatatatttgggaaacaaagtgtaatcatgtgtttgaaaattttcaaatgtatgtgaaaattgttgctgtataccaaaaaattaatgtgtacgaaaaagaaaatatgcatcaagacttatatttaaaaaaaatgttgatcatgtatttaaaaattgttaaacatgtattaaaaaatatacccgatatatacgaaaaatat

SEQ ID NO: 445819 - DNA, 99 bp, Triticum aestivum
gggccactttgtttgctgaatttttatttatttgttcatcgtgggtgcaatgcacccggttgtagccattactttcctagaatggaactgttccaccgc

SEQ ID NO: 445820 - DNA, 353 bp, Triticum aestivum
  unsure (1)..(353): unsure at all n locations
gggtccacggcatcctgggagagatcatcgaccacacggagtaaatcctcaagactggcatgtcacccgcgtcggagaagaacctggtggaggttctcctcggcctccacggaaatgaagactttggcttccccatcacccgctccacggtcaaagcatttatcttgaacatatatgcgggtgggacagacacatctccatggtatgggtcacggcagagctgatgatgaantcaaaggtaatcaggaagctgcaagaaaagatcagggccggcgttccgcgagatcaatctccggacgagcggaagttgcatcaagtaccttggcttggtgatcaaggagacgttcaagctg

SEQ ID NO: 445821 - DNA, 431 bp, Triticum aestivum
gggcatgaccaaattaccaggaaaaataataaacttgtaatatggcaattcttttaaaaaaagtgttatcagaaatgagatatcatgtgtgaagatttatggctttcaagccaaatggtcaatcttatggccagattcatggcatagtttgttcaaatgatctcatattatgcacaagggtgcatcttggaaaggcaaacaatgttgtctaagggagttttcattttctttggacaaaaaattcattttttatttttcgaatgcccaaaatgagtttttttttgtgaaggacctaccatatatttgtaacaaaattgggccaaataaattttccaaaatactatgccatatttgattcacaattgacaaaatagttgggtatcaaaagttttgatccacctctgatgaaaaagacaaaattccgccgattc

SEQ ID NO: 445822 - DNA, 510 bp, Triticum aestivum
  unsure (1)..(510): unsure at all n locations
gggnngaangtttttgtngncgtgcngtccacaatcncgggnccacgagctcactagtngcggccgctctagaggatccaagcttacgtacgcgtgcatgcgacgtcatagctcttcttagtgtcacctaaattcaattcactggccgtcgttttacaacgtcgtgactgggaaaacctggcgttacccaacttaatcgccttgcagcacatccccctttcgccagctggcgtaatgcgaagaggcccgcaccgatcgcccttcccaacagttgcgcagcctgaatggcgaatggacgcgccctgtagcggcgcattaagcgcggcgggtgtggtggttacgcgcaagcgttgaccgctacacttgccagcggccctaacgcccgctcctttcgctttcttcccttcctttctgccacgttcgccggctttccccgtccaagctctaaatccggggggctcccctttaagggtccgatttaagtggctttacgggaacctcnaacccaaa

SEQ ID NO: 445823 - DNA, 92 bp, Triticum aestivum
ggtcgacgggccgcctcttgccacacactcgcgcgctggcatcctccgcctgtggctggttgtggctctggctccttcctgccggctgctgc

SEQ ID NO: 445824 - DNA, 454 bp, Triticum aestivum
  unsure (1)..(454): unsure at all n locations
ttcgcgggtccacgggcagatgatgattgaactgaactatctgaatctgaaaccgccgacccgactcgtgcttttttggactccgcttttgcaggatcctgtgaggcatcgaattctttggcaagtctcttcttgctagtgttgtacgcgttttattccttcgcccgacatgctttcgtgataaaagaatcatagcaacatagcgtgaggttccataggttgatgagcctgatcagtcgtgtaagctatttactacagccgtcttagatggccccaggtatcctcttcggcttgatctttcctttgcttcgatcgccaacttgcacttccttattccactattgcgatatctttgtcctggacaaagaccaagagctggtgcaggtgaaagaatagcttatggggctggagtcaaaggagctttcatagacatagaaatcataatanaaagagc

SEQ ID NO: 445825 - DNA, 371 bp, Triticum aestivum
cacggggaagaaagggaagaaacgccggaggaggtctaaaggaactagccaggcaacggctgaaggtgcttctggagagaagaaaaagaggaagagtcggaaacaaaaagttgaggctgaaaatgagaatgatgatgaagatgatgctggtcctgctggttctgaggactcatcaatgggagaaagtgatgaggactctgaagtgaaagaagagaccaagagtgatgaagagcctgaagcaacaccggtgaagaaaaagtcaacagatggtaaacaaggaaagaaggaagctggattcaaggcaaaggaaaaggatgcatcggtgaagaagactcctactaaatctgtaaaaagcgtgtcaaagccaaatg

SEQ ID NO: 445826 - DNA, 357 bp, Triticum aestivum
cacggggtggaaggcaagcgccgggactaggcaccccgtttctcatcgccgctatgggttcatgacgaagacaattttatcttaagttagaaccgcagcaacaattgatgtaatataactctgcagtactttaagatgaaacatgctatcttcctgtgttgatctttctttgtatgtatacaccctacgcccagtgggatagggttgccggcgcgtaaacccatgctatggcgcttcgaggacggatccttagcagcctgccgggggcgcttgctgccggaaaaaccaacttgccactcttagcgcggccgcttgagctgttgagcggactcaaaatagaacaaggacgttgctaat

SEQ ID NO: 445827 - DNA, 96 bp, Triticum aestivum
  unsure (1)..(96): unsure at all n locations
gnncnanggnttngttgaatgtngctattacggaagcagtcctgttcngcgattgatttctggtatcatatttatccaaagagcancgncnnttna

SEQ ID NO: 445828 - DNA, 420 bp, Triticum aestivum
ttccgggtccacggaaattaagtcaaaaaaaaaaaaaaaaaatataaacatctaaacaaaaataaacaaagaaatccagatccaaaagaacaggaataaaaaccaagtttcaaaaatatgacgcggccgatctaaaggatgaaccctaaattactcgtgcatgaaacttcaaacccctcctatagggtacccaattattaaattaaccgaccttcatttaaaaacatcgagtcgggaaaacccttgacattacccactttatcccccttgaaaaaaatcaccttttggcaatatgaagtcgtactaaatgggcccgcacggttcaccttaccgaaaaattcccctactaaatcggtaattgggatctccctgctaaaggtcaatttcgcacgaaggttgtagcgtttacgccaacattga

SEQ ID NO: 445829 - DNA, 458 bp, Triticum aestivum
gggtccactcctcgaccaatgacgctccatcccaaccccaccaatcttcaccgctgcttgacgacatggagctgaacaccgctgcaaccatggtggcgccccctctgaccaagcaaaaaaatttgagatatctcatatattggcaaagctaatgcctgagagggagctacccaaacaagcatgctttatatttggggtgtgtaggctggaaggatcattggtaattgatcctatcaaaggaaggcgcgatctccagcctgaaggaatggctgattgatttagctataggaagcaatcctgttctgcgattgattgctggaatcatatttatccaagagcaagactacacacgatgctgtcaagcacacacacacaacggaggaactctggacatttcatcatcttctgacattggaagaggatgcactaagttataaagtaataaagtaagacatgga

SEQ ID NO: 445830 - DNA, 351 bp, Triticum aestivum
ggggccacgggggcgaataccataaccatcgcactatataataataaggaataataaaagtaagaaaattagacaagtatctatctcaagtaagaatttttttctttcagaaagaagataagaacaagaggctcaccacggtggtgccggcgacgagatcagcgcgggcgatcgacggcggttgtcgtggttttgtcacggcagatgtcctagagaaaggacttagtcgtggagccatcgctacgggttagcttaaaggggttaaagcggacaagggacgcaagagagttatatactagttcggccccttacgatgaaggtaaaagcctacgtctagttgtgatggaattg

SEQ ID NO: 445831 - DNA, 414 bp, Triticum aestivum
  unsure (1)..(414): unsure at all n locations
ggtccacggggcgaaatggaaaacgaagtgtggtcgaggttctacggcgccggcttctggaggagcccctcgtcgctcggcgacgagaacagatgatcggcacaggccggcggctcctgcatgcatgcgacgccctggcttcgtctacggctttcttgattcttgctcgggtaggcttccttcgttttcctcggagggaaaccgatgtanaggaggaaatgggaagcttgtgtgtcgtgtttgatccacaccgcattcttgttccacttccaccttatatccactatttttttcttcatccttttcttgttgggtgtacgtcctctacaagggaaatgaacacttcccttctttgttgccattgtatgcaactaaatatatataccgagtgatgtgattggggataaaaaaaca

SEQ ID NO: 445832 - DNA, 474 bp, Triticum aestivum
  unsure (1)..(474): unsure at all n locations
cggtccgaacattcacggggccacgggtacttggttagatacatgccaaatgttacgttcagattagttgcattatttcgttcattttttacccaaaaatctatacaaagtgttaattggacaatgtgaacaatgtggcatgtaccctgaaccctaacccccccccacacacacacaaaaccgtaaaaacattcaaaattttgccccacatggaaaccattatgcatgcattctctatggggtcatgggatgccatgaagaaagtttgggattatacacgcaagtacgatctctgacacgcgcatttccggcctagcatgtcaacaccccgaaagcccccttgaggtatagaccgatgttttgaccagtcagtccagaaaactagctttgtttgtgcaagagatcatgtgtgccaaaactgaagtgatttggangtgtccananaatcatcgcattccggaggggccatttggt

SEQ ID NO: 445833 - DNA, 68 bp, Triticum aestivum
aagccaagtaaattaacaaaaacaaaaaaaagtagttaaattggggacgtcaaaaatgtttcggattt

SEQ ID NO: 445834 - DNA, 388 bp, Triticum aestivum
  unsure (1)..(388): unsure at all n locations
ggtccgacattcacgggtccacggggcggctgcggctgtcttctttccttgcttacgaggcggaggagaaggactacgatgcgccggagcagccggagcggcggcgggtctcttccgcccttgctgacgaggcggagaaggaggatgctggctgctctggcgcgccggcgcaggcagagaaggaggcggagtgccgccacgcgccggagaaggaggctgagtgccctgatcactcgccggaggaggaggcggagtaccgccacgcgccggagaaggaggctgagtgccctgatcactcgccggaggangaggcgaagtgcccttactcgttggaggcgtccagttcggaaggttgatgagctccttccgccataggcatggagtcttc

SEQ ID NO: 445835 - DNA, 136 bp, Triticum aestivum
taccgatccaacattcgcgggtccacgggcacatcctaagagattgttgcacaagcttgtgctgacaagccagcatcttcgttgcttcaaatctggccgaatttgtagaataaatacactacaacagattatcata

SEQ ID NO: 445836 - DNA, 455 bp, Triticum aestivum
gggtcgacggggagaagaacaccatcacgtacaacgagaatgctttcttgctgtcttgcaagtccatgatgtacattttgcacaaaccaccaaagcattttgaaaatttcgtcaaggagcacttcactcgcctcgcgccgcacatcctgggagcctgcaacgcatacctcggcggcgatctcgtcggtcatgctggcgacagcacgtacatatcagatgatggctgcaagagctgctcgaccggattcaagatcatgctcggcaagctactgccgaagctcgtcgccgccttctccgaagccgggatcgcccgtggccagtgacttcagagcgggcacacctcctgcatggcgatggcggtgacggcacgcccactgcgacaccggtattgtataggttttgcaataaaaatgctgcctggcacatgatccttttgttgcgtgacggcatcttgt

SEQ ID NO: 445837 - DNA, 471 bp, Triticum aestivum
gggtccacgggatcatcgtaaagaccctgccaccgcgccacctcagcagcctgcctgcctacatggcaccgcacgcatcgctggcctgagtgcgtgtcgaagcgggacggtgcggcgacggacgggacgggcctcgttcccgtcctcgataaagctaatggacacctaactagcgcatttaatgcattttgtcccctaacgtcaggcgataagctcacgcgctgtacacctttccacctcctgtgtgccaccgtggcaaccccttttcgactataaaacgaggcccgacgcatactggagagggattcggctttttggaactacacaaccgccgtagctagttcgaaagctcaagaacactcaatacatccaccatagcaggactatggttttacgcatcctcgcggcccgaacctgtgtaaacgatatttgtgctggctcctggacctgctcttctcacaaccccgcgcc

SEQ ID NO: 445838 - DNA, 387 bp, Triticum aestivum
gggtccacgggcttcaagacacctgaagacgttcgggatctcatccaagactcatgaacaacaatttggtgaccagtcatcagatatcccaatactactacaagcattggacgaacattatgcgtgtgaccctgcgggttcaaaaattatgtagtgcacaaccgagacacctctccagtcaataaccaatagcgacacctgggttcccatattggttcctacataatccaagatcatctttatccgtcgatgctttatgacatcatacataagtcgctttgtcagtccgtacgttacgtgcacaagattcgatcatcggtatcactatgcctactttaaactcattattggcaagtcgctttactcgattcatagtacatcatcctg

SEQ ID NO: 445839 - DNA, 512 bp, Triticum aestivum
  unsure (1)..(512): unsure at all n locations
tnnnnntnccnnggcccccaanaacccanaanggcctaggcctnattaaaagtgngaatattatgcatgcgaagttctaagctcctccaataagtggnaactaaattnaattnaatggcgtnnttttnaaaagtncgtnaactgggaaaancctggcgttnnccaanttnaacnnccngaacaaaaccccccttncgcaancgggcgttataaccaaagaaggccggcaacgattgcccttccaaacaagtttgcgcaagcctgaaatgggcgaaatggggacgccgccctggtacggcgcattaagcgcggcggggtgtggtggttacgncgcaagcgtgaccgctacacttgcaagcgccctancgcccgctcctttcgctttcttcccttcctttctcgccacgttcgccggtttccccgtcaagctctaaatcgggggctccctttagggttccgatttagtgctttaggnacctcgaacccaaaaaacttgataaggtgaanggtca

SEQ ID NO: 445840 - DNA, 330 bp, Triticum aestivum
  unsure (1)..(330): unsure at all n locations
ccggcaggatatctactcaggctgggaattgcctgaccaaggtaattacatatgcaattcccccttctaatccaattcagcaatttgcaggtacttatgaaacaaaaaaaataactgtccgtgatcttgctagatgaggtggccgagtggaaggctgccgggctgggtgtangaggtctccaacgattcgtgagaagttagcctaagattctagttaagtgtgggtgttgggttgtacctgtgctacacgtttgttcccattcgtggcgcacgtcttgtaaatattttttcccttctataaaaatatggtacgtctttgtcgtattcttg

SEQ ID NO: 445841 - DNA, 226 bp, Triticum aestivum
gggagctaaagctgaacatcccagtgtccggcggcgaaaggtcccggctcatcatgagggccaagggcaactaccggctggtcctgaacgcgagcctgtacgatgacatgtcgctgaaggacatggagaagaagggcgtgacgttcgcctgcatcaacagcaccggcgatacccaggcaatgctcatcacgtacgccctcacgttcaaggacactgtcgtcacgga

SEQ ID NO: 445842 - DNA, 454 bp, Triticum aestivum
taccgatccaaaattcgcgggtccacggggacaatcaaatcatcccacttgccatggcatttgtggagggtgagaactttctcagctgggtatggttcttccgccaagtgaaaattgccatcgtgaaggaccgaccaaacgtgtgtgtcattcatgacagacatgctggtataatgaaggtcgtgaagacacttcgtaatccaacagatgatgaaccaacaccttggagggacttgcagagccggtggtgcatgcgccatcttggggctaattttttctcacagttcaagaacaagcggttgatgaacttgttcaaaaaattatgcaagcagagccagcagtgcaaatacgaatttatttggtcaaaactagatgagtttactaagaagcaggtccgcgcgaggaagaaaatggaagaagatcaggttaaattagcagcactcatcgcggagct

SEQ ID NO: 445843 - DNA, 85 bp, Triticum aestivum
ttcgcgggtccacggggctgctcgaaatgaacacgtgtcattgttttttaactagctaagcagttaagaaggcatcctgcggcag

SEQ ID NO: 445844 - DNA, 401 bp, Triticum aestivum
gggtccacggggagcgccatacttatctctgcaacaacggtgttgttacaggaatggtggaagactacgcaagtatgcgagcgcccggagatgctttttgcagtttttgcaacatgagtcatattgtagaaaattagatgcggcggagatgttgcattaacttttgcaacaagagtcttgatgcagaaaattagacgcaacggaaaatgttgttgtaatttttgcaataaggatcttgttacagaaaattagatgtgtgaaagatgtgcaagaaattagacgcgtaaaagatgttgttgttgcagaaaattagacacagtgggagatgttgtttgcaatttttccaagggtcctgttgcagaaaactaaagaagaagaagttttgcaacatgggtcctgtt

SEQ ID NO: 445845 - DNA, 225 bp, Triticum aestivum
ggcaacacttaatctaaacgtgttatttcatgtagagctcagatcagcgaaacactggatgtgggtttcagggactttttgaatgggaatttgatggcactatgctgcgctgtgatttggaagttctcaacacgcacagtacatgtgaaattctcttacgtgcaagtcatctgctctaatctcgccatttttgaaattacctgaaaagcagcaactctacaggat

SEQ ID NO: 445846 - DNA, 395 bp, Triticum aestivum
cgggtcggccggcggcggaggctctgatcttgggcgcagtggcgtggggcggcgctatttaaacgctgcacccggactgtgtctggcccaggtaccggccgagctctgttcactgatttgcatcacagtgcaccccgagtcgagctctattctgaacatgctccagaacacgctgggtaggattccctcgacctcctaaaacaagccagacaaagggacaaggtccgatggggcatcaatgcacatttcttgcatccatatcttgccaaaattctgataagtcaacgccttcaatccgggatacatgctcgtctgattggattaataaatcctcaatatttcctcacttagggaagatcgtctcatcacctccctcatagtcttgtccacattta

SEQ ID NO: 445847 - DNA, 311 bp, Triticum aestivum
gtatcgctataatgagtcttatgaattgttgcgctacggctgtgagttctttatggctgtcgttgagtctatggtgtagaagcactacgcagcttccgcgagtgccagccatgtcgataccgcacacctttcgcgcggtgtcatacagcgagcagatgccttcctcagaacagccagcagacgtacatatcatggtattgtccagagacgattccatgatagattgccatgcagctttccaccgttgcgtctaggaggcatgcttcatcattgtcataatgcgttgcatgatcatgtgcttgacattgttt

SEQ ID NO: 445848 - DNA, 289 bp, Triticum aestivum
acggggaaactatgtgtcgtattacttttccaacaacttatttcaattctttatcaataatgttgcctccatggattttaagtaactcttcagctttcgaggattgcctacacgttcgaagattacatacctttccatggtactttatagcccttatatattttcatcaaaattacctatcatcgtattctatcatggtatttctatatggttccgacatatattgccatgcatctttccactgttccgtttattatgatacgcttcatcattgttatcttgctttgcc

SEQ ID NO: 445849 - DNA, 63 bp, Triticum aestivum
  unsure (1)..(63): unsure at all n locations
gatnnaggtcttnantntcttttancactgtctccgggtgnttttgggttntcttgtggtgnt

SEQ ID NO: 445850 - DNA, 234 bp, Triticum aestivum
gcggcggcagaactgattttgggcgcgtcggcttgtggcgagcctatttaaacgctgccccctggcggtgtcgcgctcgggtacggcccgaattcggttcgcgtttttttagtccgtgcagaacagaaagagggagaaatactaaacggactccaaaaatcctgaaataaattttccctggcttctaaaatcaggccgcacaaggtgaacatttatttgaggcctaaatgcaat

SEQ ID NO: 445851 - DNA, 117 bp, Triticum aestivum
tttccttcgggcagcaattaatctttccaatacggagatgattcctgaattcaaatgaatctgtgataccattcaagataattcctggtacgcttttattaataaatcctcaatata

SEQ ID NO: 445852 - DNA, 362 bp, Triticum aestivum
ggggatcttgagcaaatatcacaccaaagtttgatgatgacaaaaggctatgaggagatgtctattgcgtaggtgcaaaatctccatcgatacagatcgcgctaggtgccagtttttccgcagagaacgggccccgctggtaatgtgctgcaagattgattgacagatcttaagcaggtcctcgcaagtcctcacgccggtgatgatcagtttgtcagccagatacataaggatcgtaatagaaacggggtcaatgcctaacaaccagtaacgtagattgtcaagagacggcgacacagctcatcatcattctcttgtatactctgcacaggctagtccacttttccacagaagactcaatg

SEQ ID NO: 445853 - DNA, 97 bp, Triticum aestivum
ccggtcaagtattccgggtcgacggggccagccagaagactggccccgtcggcgcacgcagttttgcaagcctcagttgggagtctcgcactaaaaa

SEQ ID NO: 445854 - DNA, 380 bp, Triticum aestivum
  unsure (1)..(380): unsure at all n locations
gggtcgacgggtgatgttttaaaatgaccttcccccgatcagagaatgggcttggtctggaacggattgagacggaaagcggtaatcaatcgccgcgtggtggaacgcttgttggagaagggtaagcgcctccatgtcgtangggtgggtaggccaatagaagactacggaacttagcctagccactcagttctgccccgagccaagtctatttagtgtcagcgaacacataccactatctatatataggtttttctttttcgtagaggttgtcgcttaagtccttggacccttccttcatgaagcttgaggaaacactcacttttcaatcaacngcattcttggttctgcacttaatcctgaacctgtgttgggttggg

SEQ ID NO: 445855 - DNA, 419 bp, Triticum aestivum
ggtgtcgtgatatataaacattttgcgaatgattatctgtttacttaccctcatcacctcatgtagagggaggttgaaggagcttaaactgaaggcgttcatatggattttcacgggtgcacttgtgggattcacaattcctggtttcgcctacattggccttggagacacatcgccaggatacgcggttaacttctataacatcataccgattgccgccttcatcctcgcggtccttttcaggaaggagccactggacatgacgagcctggtggggaacatcaggttcattggaaccctagtctgtgttggaggaacgctggtgatcacccgttacaagggcaacgtgctgcacctttggcccacaaatatcatcggctaccacccgaagcaagcccgaactgcctttgggtaacacc

SEQ ID NO: 445856 - DNA, 437 bp, Triticum aestivum
cgggggagagtcagatagggataaccgcgagagacgagagtcgagtgagagggtggaagagaaggcgcgatgaagctcaacgtgaagaccctcaagggcacaagcttcgagatcgaggcgacccccgagtcctcggtgggtgaggtcaagagaatcatcgagagtgctcatgggcagaatgtgtaccctgcggatcagctgatgattatatatcaaggaaaaattcccaaggatgataccactctggaagctaacaaggttgcagagaacagcttccttgttaaaatgctgtctaagcctaaggcgtcatcatctagtggtgcttctactgcttcaaaggcacctgctaatcagtctcaacctgctactccacctgcccctgttgcctcagctgcaagataacaacttcacaggaacctgttgctgcatctgaaccg

SEQ ID NO: 445857 - DNA, 391 bp, Triticum aestivum
  unsure (1)..(391): unsure at all n locations
ggggaggaggaggccacgtcgggagctgaggggccttcagctcatgttagttctttgctcgagtgacagattgttttgttttgttttgttttctttgctcgtgttgaaatacaggtgttgatgatcgtgacaactgtttttcttcatttaggggcaaatgtatgtgtggctgcagtccccctctatattgacatgcgatctattgtatttatttgggtangaggtgtatttaaggatcactttgccctcaaaaaaaaaaaataaaaaaataaaaaaaaaaaaaaaaaaaaaaaaaaaaaaaaaaaaaaataaaaaccaaaacaaaaaaaaaaaaaaaaaaaaaaaaaggggccgcccaaaaggttcaaaccttacttacccttgaatgcaa

SEQ ID NO: 445858 - DNA, 423 bp, Triticum aestivum
  unsure (1)..(423): unsure at all n locations
ggggaaaatgctcaaatgcatgagatgaacacgtatgcaaatgcacatcacatgacgacatgataagagatgcatggtcacgacaacagcacacggtgacaaagagccgaacccgggaaaatagattaacttaacgccggaaacggcaatagttggcgtacatatacggaacgttacatccggggtgttacacggtgtcccaacttagcccatcacaagatctcacggtcattgaaggatattccttctctcaagacatccgataagccggatccggtaacagacatctcaatataggaaacatgtcagcatagccagccgaatgtgccgacatatcccgatatgagctgcacatatctcgttctcacggcacactcagactgtccaaacctccggtaaggcatcccanaattgcccctggtg

SEQ ID NO: 445859 - DNA, 477 bp, Triticum aestivum
  unsure (1)..(477): unsure at all n locations
gggnnnnnggnagcatttcctaggccnngtcggggtcaagngtntcncgggtngnccgactcactantcaagcggccgctctagaggatccaagcttacgtacgcgtgcatgcgacgtatagctcttctatagtgtcacctaaattcaattcactggccgtcgttttacaacgtcgtactgggaaaaccctggcgttacccaacttaatcgccttgcagcacatccccctttcgccgctggcgtaatagcgaagaggcccgcaccgatcgcccttcccaacagttgcgcagcctgatggcgaatgggacgcgccctgtagcggcgcattaagcgcggcgggtgtggtggttacggcancgtgaccgctacacttgccagcgccctagcgcccgctcctttcgctttcttccctcctttctcgcaagttcgccggtttcccgtncagntcnaaancgggggctcctttagggtcgagg

SEQ ID NO: 445860 - DNA, 414 bp, Triticum aestivum
acatgctcaagcatttcaatatggcggtctatccttggtcggacctttgagttccttttcggatagcggtcgcatattgctgcgtgccattataaccgacgcttggggatgattaaggcactccatgatattcaccgataatcacaagcctaagcttggggatgcccccagaatgcatcccctctttcgtcttcgttcattggtaactttacttggagctataattttattctccacatgatatctgttttgcttggagcgtcttgtattatactactcattgctttgtactttaccataatcatcctttgtcgtacacatccttatgggatacagcctactttgattataatctgctggaatactctatgtgcttcacttatatctttcgaacttgatagcttttggtccaat

SEQ ID NO: 445861 - DNA, 268 bp, Triticum aestivum
cggtgacaacaatgtgcagttacttgaacaattaggtgccaataatagcacattgaaagcctcaaaattgatcttgatgtggaaatgtcacttcttatttaccatctcgagtcacagaatatgcacgtttgtgaccggacggaatggctgcactgtttttccaactattatggcaactctttggtgtcgttcatcagcgtcatgtttgataaaaaataacttggtagtgttgcacttcctgaattaaattaatccgcctagctaaata

SEQ ID NO: 445862 - DNA, 126 bp, Triticum aestivum
ccggggccaggggaagaagaaaaagaagaagaaggagaagaagaagaagaagaagaagaagaagaagaagaagaagaagaagaagaagaagaagaagaagaagaagaagaagaagaagaagaaggc

SEQ ID NO: 445863 - DNA, 439 bp, Triticum aestivum
  unsure (1)..(439): unsure at all n locations
ccgggtcgacgggggatgaatagatgcatgtggaggctggaggaggtcgatgttggagatgaacaatatcccatagagtcccgttttgcggtatgccacacccctcccgatgaacaggacccccgttttgaccgcaatgctccaacacatgtctgtttcctccgttttgcggtacgccacacccctcctgatcaacaagaccctgtttcgaccgtangaggtccaacacaagtccgtttcctcccttttgtggtacgccagacccctcccgatgaacaggatcctattttgaccgtgccggtcgaacacaaggtcgtttccaccgttctgcggtacgccaggcctcgtttccatcggctgttccgtccaagccggttggctcccaatgaacatgacatattctgacccagtcctttgcctcccgatgaacaggaccttg

SEQ ID NO: 445864 - DNA, 80 bp, Triticum aestivum
gggggaatcaacacaaaacaaaaacgaaaaaataagataaagaagaagagtcaaaaatgcataaaaatacctatacatac

SEQ ID NO: 445865 - DNA, 440 bp, Triticum aestivum
gggggatcaaatatgataatctatcttagttgcccctggcagaacacaatgttactgtcaggtcgccatcggttatatcgagtgagtgtttgtggctggccgagctggtctgagaactgctgaatgcaatctatccttaaatttggtaaaaaaaaaaaaaaaaaaaaaaaaaaaaacaaaaaaaaaaaaaaaaaaaaaaaaaaaaaaaataaaaaaaatgaaaataactaaccataataaaggaaaaaaaaaaaccggcaaaaaacaaaaaaaggggccccccaaaaggttcaaagctaagttacccttcaatgaaagttcaaacctcttcaaaggtgcccccaaatttcatttcaggggccttcttttaaaaacttggtaacggaaaaaaccctgggtttacccaaattaaacccctttaaaaaaaacccccttttcca

SEQ ID NO: 445866 - DNA, 428 bp, Triticum aestivum
gtaccgaatcagaattcgccggccgacggggctgctgatcatcatcgggctgtatgcattcctctgggggaaaggggaggaaacacaagagcagcgcaagcaaagcagagaggcggcgaacggaaacgggagcgcggcaggtagtgggctggacagcgtgcaggttgggaagcacgaggtgcgaattcgcgtggaagtgagctagctaattatacagacacatatatagacagtattggcgcagaaggcagatgaaaggagtcaaatcaagatgaacaaatctctgagatcagatgtatatacatatgtatgtaagtatgtcttatgcagactcttactttttcgagataagaacaactctaatagattcgttaaaaaaaaattcatgaacaatgtgcagtaaggatcaactggaaacttgccttaaa

SEQ ID NO: 445867 - DNA, 473 bp, Triticum aestivum
  unsure (1)..(473): unsure at all n locations
gnnnnngnaacttntctcgccgccaccggtcaagaatcccgggtcgacgggtacttcagaaaaaaaaaaaaaaaaaaaaaaaaaaaaaagcggccgctctagaggatccaagcttacgacgcgtgcatgcgacgtcatagctcttctatagtgtcacctaaattcaattcactggcctcgttttacaacgtcgtgactgggaaaaccctggcgttacccaacttaatcgccttgcacacatccccctttcgccagctggcgtaatagcgaagaggcccgcaccgatcgcccttccaacagttgcgcagcctgaatggcgaatgggacgcgccctgtagcggcgcattaagcgcgcgggtgtggtggttacgcgcagcgtgaccgctacacttgccagcgccctaacgcccggtctttcgcttcttcccttcctttctcgccaannttcgccggntttccccgttnaagctcna

SEQ ID NO: 445868 - DNA, 241 bp, Triticum aestivum
gggcaatggaagatgtaggtgtgatatgtcaagtagtggacagataagccaaccactggatgtggttttgagggatttttgcaatggggtttgtacggtgctatgccgcgctgggtttgggatttgaaataaaacgaagggagatgtgccacgctcttaaatgccagtcttctgctctaatcttgctaaaaaaaaccccctttcgcaaagatggagtaataacgaaaaggcccgcaaaaat

SEQ ID NO: 445869 - DNA, 283 bp, Triticum aestivum
cccgggtcgacgggatgtacacttgtttgggccagtgaggtgtcgttgaatatgggccgagtaataacgcaccggaacggacgctgttcttgatgcgcggaatggcaaagcattctttcaccgagtgatggtgattgacgacttgattacagacaagatagattttggtacattcttacctcgaaagataatctgccaaataaagccgtttataagcttgccactttgataatctcttgtactgacacaatttgaaacaatttggaagaattcctttgagatc

SEQ ID NO: 445870 - DNA, 222 bp, Triticum aestivum
gatgtacaattatgtggggcagtgaggtgtcgatgaatatgggccgagtactaactcaccggaacggacgctgttcttgatgcacagaataggagggcattcttgcaccgcatgggggcgaatgagcacgtgactacacatcaaatggaatttcgcacattcctacgtcgaacgatcaactgccatctgaagccatttataaccttgacacattgagaagca

SEQ ID NO: 445871 - DNA, 446 bp, Triticum aestivum
  unsure (1)..(446): unsure at all n locations
gggggccgtgatcgttatgccagtgaccggtacccctctggtggtgaccgctttggtgcagacaggtatggtgcagctccagaccgttatgcaccaagtggtggtggaggtggctatggcagggagcgggagagaagctacgagagagatggaattcgtggtggtggcgcctatgacaggagtggcccaaggggcggtgcaagctatgacagggacggcccaaggggcggcatcggtggtggctatgacagggacggtccacgtggaggcggcgccgactatggcagcggagggcctgctcgctacgagggaggaggttacagggagaggcctgcgccgtatgaccgccccaggggaggaggacgcttcgacgaccgctattagtgacctgttgctgcantcgagctatgtatttgcgttttaactctttcaagtttggcatggcc

SEQ ID NO: 445872 - DNA, 446 bp, Triticum aestivum
gggattacttctagtgtttcttttcttgcaacgatttgcaataatatgcaatcgagtcgatatccctgtgattaaccttttaaccacaataccgaagaatcagtgatcaacaaattgatcatatttcccaaggactacacttcacttgaccaacctactctacatctcataactgatgtggttcaaactgatgcatgcatcgatgatggcctcgcgggcccacagatggaagcgtcacacgtacgtcctaggataaccacctcctgcatgcatgtggcccaaagaggtgttgtgtgatgtttgaatagccaatttcacaactttgatgtggcacgtgcctcagaaaccgagaagtcacgacactgagtgaggtgtacttgttcacagacgcgtacgtaaagtaaacaaggcaattatcctcctacctcttcgacgcatactatata

SEQ ID NO: 445873 - DNA, 425 bp, Triticum aestivum
atagcccgcttgcggggcagaatcacatcgtaaccttataaccacgatgtacgatcgtgttggtacacaatacgtatgagaaacaaatcacaaggaaaaaaatgctacccacagcagccgatctctccttcctccccccgtcgacgggaagctcgccggcggcgaggtggcacgggcgacggacgtcggaggcgaaaccgctcgacgaaacagaaggagggagcagcgctgaccgaggcgttgcggcctcgggcgtacggcggcgagatcgatgctctgtcgccggcggcgggttggggacggtggcgagatcgatgctccagccgccatcttgtcgtttccctttcaccgaggatatgcatttgcgaacgtgatttgacgattacaacctcccaaccctcccagggccggcccataaagacgga

SEQ ID NO: 445874 - DNA, 417 bp, Triticum aestivum
  unsure (1)..(417): unsure at all n locations
tccgggcggacgggatgctgaccaaggaggtggtacgcgcagcaacaaaggacttcggcagtgaaaatgtgatcggcattggtggctctggcgcgattgtgtttcagggggttctcccttctgggtcaagggttgctgtcaaacggttccaagctatgtggccgtgctcaaaggcgtttctgagtgagcttcgtgccatgcttgattgcccacaccaccccaatcttgcgccactcttgggatggtgctccagtgagcatgaccaggttcttgtttacgagttcatgcccaatggtaatcttgacagtgcactgcacacaaagggtggagcaatacttccttgggaggcacngtttcnggcggtgcttggtgttgcatcaacacttaaatttctgcatgatgaatgtgaacaccgca

SEQ ID NO: 445875 - DNA, 388 bp, Triticum aestivum
gggtcgacgggatgggcaacaaaggcgccgcgctcagcaacgccgtctcctactgggtctacgtgatcgtgctggctgtgtacgtcaaggtgtcgggctcctgcaaagagacgtggacggggttctccacggaagcgttccgcgacgtgctcagcttcttccggctcgccgtcccgtcggccctcatggtctgcctggagatgtggtcgttcgagctcatagtgctcctgtcaggccttcttcccaatccaaagctggagacttcggtgctgtccatcagcctcaacaccgctgccttcgtatggatgatcccctttggcctcggctctgccataagcacccgtgtctcaaacgagctcggagcggggcgccccgacgctgcccggct

SEQ ID NO: 445876 - DNA, 408 bp, Triticum aestivum
  unsure (1)..(408): unsure at all n locations
gggtcttatacgatggacttagaggattctaccactgcttgcaaacttccacaatggggtagtgctagtgaacctcgcaaatctgaatttagaaattttcttgctagtataactgtgggggaatctagagatatagcagaagctaccatagggagcattcattttcctgctatacattattttgctctcttcataggtaggtgcataaatggtaaagatgaagcatgtcacatgtgtgtccctgaccttcagtattcttaggagtgctgtgttaggagacaaatcttataatttgggagccattgttgcacgtaggttgcatcataatagttttaatggagatttctttgcangaatttatgcaacccgcttagctaatttcctggtgtggacatacgtgatgatgat

SEQ ID NO: 445877 - DNA, 408 bp, Triticum aestivum
tccgggtcgacgggaaccgtgaccgttgagtattcagaactatttcagttatacaatcaatacgcactctacaaatctatcgtcagttgctattgtctgtaagtgatttctttctgtagtttaagtcgcaagctaactgtagtgatcattttgatcaatcattacctgtaattagcctcactatattcttttctgtggtattatgcaggatgaagatgtatgaaatgaaaaaatctggacgctatggcattgggtccattgagccaaatagcaataatgagtagacatggaatattccaagttgtcgagcaagtttagaggaaagcatgctagagttcttcaagcgcctcaataccaatggagatatactacttccttacaacttcctgtgagtcacactgtcttgta

SEQ ID NO: 445878 - DNA, 406 bp, Triticum aestivum
ccgggtcgacgggattctttttgacacttaaggaaataatctacgaatcaccctcctccaggatgtttcgtcgtggtatcatggcaacccaactcctcgctacgtggacaatcgtttaccaccttcttaagtgtggaattgttgtccacctagtgaaccttcgtcatccgtttctttccacccctcttgatgcgtatctcgtgtctcaacctgagagatggttctatgtttcattccgtgagttgttcgacctttgagaagatcgatccttccagaatttttttccctctcgttgtcatgttagctaaaattctcaaaagcaggacatcaagacaaagatggtgatcaaatcaacgttcctatgaagtgcaagttggatcgtgaagattgcgctagttgcgttccc

SEQ ID NO: 445879 - DNA, 418 bp, Triticum aestivum
attcgccgtccgacgagtgaaagaaacaccaatcgattgatattcacgtacacatatcgtgaatatataactgttcaagactgtcatccgggatgttcctgatatatctacttttcattgtgcttagtggggtttatgtcactgttgtttgttctcgctgccgctatgctatgcatctgccaagcaagcaacatctcaaacttgtgttgttataacttgttcagatggatcttatgtatattacgttgtttcattgtgcatctcacatacaatgtgtttcattttgaaaactactgaatacaacattcacggtttcacgagatactgcaatgctcttcgaaccaaccttgtcatgcagctaactcaccggctttaatctgtcgaactctaaatattccgctttatgcctgaatgtcct

SEQ ID NO: 445880 - DNA, 155 bp, Triticum aestivum
gccacggtcaaagaatccgggtcgacgggttacaacaaaacagttcttggtgataacagctctcttgtaaataccaacaagctactcaccttactggtccaaacctactagttgctctaaatgtttaaaataactttacaattctgttttgatac

SEQ ID NO: 445881 - DNA, 321 bp, Triticum aestivum
ggggccgtcgatcatgtctgactaactcccgtcgcttctgctctccacatcctacgttaggtactgaagcccgtagataacttttccgcccaggtttagaacgtcgctgcaaacactacgtatgaaaattgataaatgagatagctcctagtgatgtttctcgctgaactgctgcgatgttggacactttgtcagcgacaaggagttatctcctacgcgacccatcgtggtattgtgtacatttgcttaaggttttgcttatcgttgttatcatctatggtatgcaattcatgggtcggcaatcataactcatgcaggagc

SEQ ID NO: 445882 - DNA, 385 bp, Triticum aestivum
ccgggtcgccgggctatattaaatgcgaaatggctgagtatacttggaaaatctggtgtatttagttggccaatgattttgagtagtattatcatcatggtatgcttcaccctgctcctggaaaattgaacattatctccttgtatgctattgataacctggagtgtggactttcctgctgtggttcatatgatttgacgtgaatcggcttcagatgaacagcagagaaaacgggactcagcattctcagtgtcgtgtttgcttgctagcacatcttttctgggctccactcctacgcattgatttgtctgaccagttggcatggtttggaggatgtaaatatactacagaagatgcgtcatgtgacaagcctgccctagtgtgt

SEQ ID NO: 445883 - DNA, 82 bp, Triticum aestivum
tcgacggggttaggagttgtaaatatgcattgttgtatcgcgacctgaatgaatggaataaacgaaataacgctgttgttcg

SEQ ID NO: 445884 - DNA, 446 bp, Triticum aestivum
gggccagagatgggctgagacccggatatggtttaaagcctgtagttgtaatcattgttatggtagaacttgtagtgtaagacaagtatagttgagagtccgagccggacactcttatgagccggccgggactctgagggctgctgggcgtcagcctccctatataaagggacgacccggcagcggtttagaggcgagaacaatctcatcgagagctgggatagcaagtttagttccctggtgatcgtaaccctaagcaataccatctcaactggatgcaggcttttaccttcaccgtaaggggccgaaccagtataaaccctcgtgttccttgtctcatttaaccccttcaagctttcctagttgcaatggctccacgactaagtcctagctcgatgacaatcggccgtgacatttccacgacagttggcgcccaccgtggggcc

SEQ ID NO: 445885 - DNA, 457 bp, Triticum aestivum
aattcgcgggccgacgggagctgaacaataagagtaaagtacccgcagttgatgcaataaagtatattgcaatgtccgctggggagtatcaaggtgtgtggctaggaaggttacacagtgatctcatggatcgagatccaacaagtggtacttaatgttgatagcaagtcttaatttttttctacgtgaagatccagcacgccatgatagaagcaagcacattaatacggtgtatcactacataaaggactgcatggaaaaagggaaagtcaactacatttacaccaatgatcagatgatagatatgctaaccaagactttggaccgagagaagtttttgaagatacgaagaaggatcgacgtccgagttgtaatatggtgacgtggtgtttagggggatgattgttagaatttaacacgtagtcacaatcctggctcggacgtaaacaggacaccg

SEQ ID NO: 445886 - DNA, 431 bp, Triticum aestivum
gggctggtgaacgcgccggggtcggtgattgacgtggtgcgcgacgccaaggagaaggaggcggagggggctgagttccggctggaggacgagatcgaccatgtcgccgacgtcgtcatccgccggatccacaagcagctcaagctgcacaagctcgagtcgttcacgaggttctgcgagatgatggagaggagcgcttgatccacatccctagaagcagatccgcctccagtccagtgaggtattatgcataagtatgcactggcgccagctccatcacaccctaagccaggattatgtctaacttgatccgagacccatgcatgtgagtagaaggaagagatacatccaggcaagaagatgcttatcttctgctaaggttttagtggggaagccaatggtcaacaacttgggactttactcattacgta

SEQ ID NO: 445887 - DNA, 500 bp, Triticum aestivum
  unsure (1)..(500): unsure at all n locations
ggggnngnaactttttttcagncgccangtaccgaacaagaattcccgggtcgacgggtcccccaaaaaaaaaaaaaaaaaaaaaaaaaaaaagcggccgctctagaggatccaagctacgtacgcgtgcatgcgacgtcatagctcttctatagtgtcacctaaattcaattcactgccgtcgttttacaacgtcgtgactgggaaaaccctggcgttacccaacttaatcgcctgcagcacatccccctttcgccagctggcgtaatagcgaagaggcccgcaccgatcgccctcccaacagttgcgcancctgaatggcgaatgggacgcgccctgtagcggcgcattaaggcggcgggtgtggtggttacgcgcagcgtgaccgcnacacttgccaagcgccctagcgccgctcctttcgctttcctcccttccnttctcgncaannttcgccggctttccccgtcaactctaaatcgggggctccctttagggtt

SEQ ID NO: 445888 - DNA, 405 bp, Triticum aestivum
  unsure (1)..(405): unsure at all n locations
gggggcttccatcagacaggaactttggaaatttgctgaggaaggttcactangcaaatttcgttgaattttggcatggggcaatgttattgacagaaaaaggtgtcaaaaaagtttggggtcaatgatgcaaagataaatgacacttccttctcaaaaatccacttanggcagaatgagaaaaaggaatatttgtgaattatctttgatgatgccaaggaaggtttttgacatatctatggaagatatgacccaaacaaaattttgagaactatttgggaatttggggagtgacggaaaatataggttgtttcacaaactaatggcaaaaatgatgattcctttaatagaaaaaggaatattcccaataaaaaaatattgggaatggcccaagatgaaaatgac

SEQ ID NO: 445889 - DNA, 377 bp, Triticum aestivum
gggtcgatacatcaggggaggcaaattgaggggaggcatgatggttcctaatgagaggcacttttgtatctggaatggagtcacggttcatgactctgttattgcaatttttattcaagcagttgttgacccagggagccactgtttttttatgtacgttgggttcaggcgggaatatctatgatagcccacagttatttgtatgtgagaagcatggacagacatagagatgcaggtccgttgatatcactgaggtttgtctttaaagcaaagtggaggcacgcatgtggcttttgtgctggccgaaccgtgcttctatttttctttagtccccatgtagtatttgcacgatagggtcatcttgtttgcttcctctc

SEQ ID NO: 445890 - DNA, 401 bp, Triticum aestivum
  unsure (1)..(401): unsure at all n locations
gggggaagcgattctgcaggcggtagggcaagaacccggtcaagaattggagggcgaggcggaggagagcgcagatcgagaggggaacggcgacgacactgggaaggaagatagtgggtgtaaagatctggtcctggtagaggaccctgtcctggtcgaggatccagaggaaggtacctgtacttctctggcggtcgcatccaagaacttgttccgtccattgttaagcacgcaagaaacttttctgtgctgttatttggctctattagctgactgttggtagtgttcaactgtaagatgcaataatacaatagaagttctatggtgttcttgcgtangaatagttgcagaagaaacagtatagctggttttcgggtgttgctaattttaaatttaacaat

SEQ ID NO: 445891 - DNA, 458 bp, Triticum aestivum
gggtcgacgggaataagagcaagtgacagtgaaaagttactctaagactactgctgaatcaaatattcaacaatagtctcgaggactacacctagtgtgtgccttagcgtgcccccactggttcagatcagtactcagcagggtatgcccagcgtgagtccaaaaaagagagagaaagagagtacattctaagacctcacactactaggaaaaggcctactaatggcgcaccggttttgcctactaatggcgcactaccggtgcgccattagtagcacgccactagtattttttactaatggcgcaacacccgggcgccattagtatctgatatactaatggcgcaccacgaagtgcgctattagtatgtaagaacatgcgccattagtatgcctcccgggggggccatacgtaaccatgtgctttgtcatactaatggctcactctgtggtgatgcg

SEQ ID NO: 445892 - DNA, 84 bp, Triticum aestivum
gggaggatttacgagtccggaaactgcttcaagtcggccgcaacgcgctatgactccgcttcagtagacatttgtaggatccgc

SEQ ID NO: 445893 - DNA, 479 bp, Triticum aestivum
ccggtccagctagcattggccggtcgacgggtggataaataacaatatccgagaatgtttttgccgaatccctaaaggtgttcggcgttgcactgcgagacttctgttgaaaatacacaaatagtttgaaagtgccatgggctcgaaaagcgaaaaaacttattcaaaatgttaatgtccgaactagatcaagtgttcggtgccaatccgaaaattggactttagaaaaaaaggtgcttctgccgtgctttaacatgacacatcctatctcaaaacttcaagcgggtcagcctacagcttcaacctcctatcccgaaagcagagtacttcttactaggcccgtttagcaaactacactctatcggctttgagagagaaattaagctccaccgctagcgaccgcacacttgtgtcaaaaaaaaggattggcaaatactactaacaactttgcagcgactactaagaaaaacacttatcat

SEQ ID NO: 445894 - DNA, 86 bp, Triticum aestivum
ggggattgaaaagaccagcagaaatccagaatctgtgatttctgtaggccatggactcgagtagctgtcaagatatctgaatcttg

SEQ ID NO: 445895 - DNA, 350 bp, Triticum aestivum
gccggccgattgggtcaccaacaatatcaatacctcatgtatcttcgcattattcagattgctttaccatattcttgcgcgttcttaggttatttggaacgaagacaccttcgaggccaggttgatcgtgctcgagcgtggtcaataacctcacggacttagtttatccattgccacagcgcaagctcgtgcaagtttgtactccgatctccaaagtcgtttccaacaggtcgatagttatcatctcagtgaaagatcgggacacgctctcctctagtaagtgagatcagttttcaagatgctcagtaagaatttctagttctcatagatgagatgtatattcttaccta

SEQ ID NO: 445896 - DNA, 403 bp, Triticum aestivum
ggggcggcagtgatgaaataaagaaccacaagtggttcaaggcagtgaactggaagaaactagaggctcgacagatcaagccaagcttctgcccaaatgttgctgggcagacctgcattgcaaactttgacgagtgctggacgagtatgcccgtgctggattcccccgtggccagccctgtcgctgcagatagcaacttcgtggggttcagttacgtgcggccggagccattccttcaaaagccgagtcctctaggctgaagactactttataattgtggtatctaagaaatctggtatcttacctttgctcaagacagtaagatgaacctgctgttgtgcttgttttagacttcactagttgattgcccgtgcgttgccatggaacacaagaacacacgtta

SEQ ID NO: 445897 - DNA, 184 bp, Triticum aestivum
gggcttcatagcaaaattacacgagagagagagatatcactggtaatgttgctctggaagtatctcatgctatgggatcaacacaaaaatccagggcccacgtgtggatcacaatccaccaatgactgaccaggggttcttgcgcacccaaatttgttgtgaccaactggttgaactccctccg

SEQ ID NO: 445898 - DNA, 388 bp, Triticum aestivum
gggaagcactatgtatctatggaaatttcagttttggcatcgagcatctctcttccctcacacgagtccatgccatgattagctgcaaatgtgctgtagcttcggaggtgaatactgtgaaggatgcgatacgagaacaagcaggtaacttgtctagcaaacccacgatcgaatttaccacaataaatgaacacatgataattcctgatcacaaagcaaagacagcagcagtttcccctaaaatttggttaaacgggtgtatcaacttcagacaaactgcctagcatcgtaagaggtcaggatggagtcaattttaatcacatgtggctgaagcactcatgcagaacaggacacgcgacttcgtcttcctctctagtactccctccgt

SEQ ID NO: 445899 - DNA, 377 bp, Triticum aestivum
gacgcggacgatcacaaattcatgaactttctttccatccttggttaactaactcgacccatgtatcctggcgataccccctagctggagataagctaccagttgctccttgaaagcgaacgatgaaagactgcacatgacacatagattgagttttgtccacggatgtcatctcccccctgccctgcccttatcttgccgtccccaagccaacagatgcatgtgcgttcagctgacgcggatccgttgttgatgagacgtttattaccaccgaaaaattacgattccttaagacgaagatattggcagaattcgaaaaggagaatgaatggcgactgtcaagtcaggtatggaaacgtgcactggtgcgagctaaa

SEQ ID NO: 445900 - DNA, 459 bp, Triticum aestivum
  unsure (1)..(459): unsure at all n locations
tcggccgagagtgctattaaatattttaaaaacaaaaaaataaagaggggaacctaaaacttttcaaaaaggaaagtgaaagttataaagacaagcattgttgaagtgagagagctccttgaactttgttcatgctcacgggaactctgtgaatcttgatttacaaaaaatttcaaacaaaaataattatccctttggtcaattccaacctattaaaaaaataatggtgcaaaggttggctttaaggagtttaaaatgcttggtggtttgtacggtgcaaggcaaaaaccttgggtgtaatgccccaatttaaaattttaactggaaaggcaaacgggtccgattccttttgcactgtctttctgtacaaagtttctaattttcccaagttttggttaaatttttggggtaccataagtangtttaatgttcagatttctacagactgttctgtttttg

SEQ ID NO: 445901 - DNA, 372 bp, Triticum aestivum
  unsure (1)..(372): unsure at all n locations
cgggaggaagaagctgcagcctgcaggagcttgacttactacctagactctgtaactttcggtactcgtagccgtctgtttttacttttttttttacacggagaggtgctcatcttttttcgctgctgtatgcatgggtagctgtcagtggcatgttgcagaaaaggaaggcgactgaattacatactgtaagtagaagtagcagtggatgggaggtcccgttgggagtagggagcacagccaagttgacagtgttgttgatttcgacgtgtaaacttgctagtactaagctgcttaattacagtagctcattatgaagaggaattgagcgaaaaacaanaaagaaaaggaaaaaaaaaaagcggccgctct

SEQ ID NO: 445902 - DNA, 369 bp, Triticum aestivum
gggcaatggcaaagttgagtgtagaaatcgtacccctaacgtatcacttagtcgtcgtaagatcctgcaacatgagacgttgcagccacaaagggtcagtacattgaatgtactggcaaattcacaccaaagagcaatgatgaataaaggctatcactacatgcatatatggctggtggaaagctctatggttacagtttttgcaaaaagccaatttttccctactacaaaggaataaattttacttactatcattgtggttgtttaacaatgagaatggttgacactattctcaatcccaatttaacatcatcattaaaacccaacaaaatttattataagtaacatgattagattaacatgataatc

SEQ ID NO: 445903 - DNA, 136 bp, Triticum aestivum
attgcgcataataactgagtgattagtcgaggtttctgcgacttgttgatatggttcagatttcagaatgctcgctactgctggcagtgattattcccctttgttatctctactcctaagggagcagttggtagtc

SEQ ID NO: 445904 - DNA, 281 bp, Triticum aestivum
ccgtgttaatccaaggatggatgcttgacccaactgtggttgtgtgtcattatggtccttatgtcaagctgttaattgtcgtgatttgccggttggaactctacatgtttgccaattaacctgtgcagcgggtgcaactttggcacagtgaactattacttactttgtgaaaacaaaaacgataaaagggaatacacagtgcggtcccgtcgctcggatggatgcttacgtaggtatgcatgcaacctcagtgatattccatcgagggacccacttacatt

SEQ ID NO: 445905 - DNA, 393 bp, Triticum aestivum
tacggtctagtattccgggccgccgggcatgctaaaaagtggtatttattcataatttggttgccaaatctcatgcgtgcaatgcacgtgtaccttactctagtctaaatggtgtttctgtgcttagttctgctgagctgtacaactctgaaactaaaagttggattacacttccaagcatgaacaagcgtcggagaatgtgttctggagtcttcatggatggcaagttttatgttattggtggaatggccagtaacacggaggtgctgacatgcggtgaagagtatgatttagagaagggcacctggaggttgatagagaacatgtccgaggggctcaatggtgccagtggtgctcctcgccttgttgctgtaattgacaatgaactatatg

SEQ ID NO: 445906 - DNA, 373 bp, Triticum aestivum
ggcctatcaagaagagcagtaatataaagcttttgagcttaagcacatgaatcaagcccccagaatccgatggcccactgagccagttttaagttggcgaggaatggtggagcactgaaccttgccacacaacggcacccccttcgcctgatgaccttttccgatcacgatgacctcctgtcgctgctgaacgaattgggaacagtactggaggaattgtgatctatgtcaagggtgatgatgtctatggaaatgattgttgagtgttatgatacatatggtgatgaatggtgacgaatctaatgtctttcgtcaagacatgcaacaaagtgaagttatgaagttctggtcaatttagcttatgcataatgct

SEQ ID NO: 445907 - DNA, 402 bp, Triticum aestivum
tcccgggtgcacgggtacgacaaaatatgatgataattgaatttgttccgccgaaaaaacaaaacctttgaacccattaaaaaaaaattaaggaaaccacaggaacgatattttgcattgattcttagtgcaggatgacaatacagcaaatttcataggacatcatattttggtacgatttttgaagttccagaagttagcgttaggtacatattgctatacactgtactgtttttgacagattctggctttcgtgtgttgtatgcttagtttgatgcacctatggctactatgtaagggtatgaaccatagacaacttggaatacagtatgtttaacaccaagttaaatacagattgagttcattacagtaccttacgttgtggttttgtaatctttcact

SEQ ID NO: 445908 - DNA, 68 bp, Triticum aestivum
acggggaaactatgatcaagaagtgatcctagaacaacctacgtcaagcataactccaacaccgtgcc

SEQ ID NO: 445909 - DNA, 391 bp, Triticum aestivum
gggtacatcacatgtccaatattgaattggccgatggtggcggcatccgtggacaccgtatccttcatgaaggctccgtcgtggtgcccttactcctttgaattgctccgggtgaaaactcaatctttgggatcggatggtggcggctatcagtggtcgtttggcaccatcttggagtccttgttccgtcgttttccgtctcacctctcctcggaggattggaggactccgttggctccaagcggatcatcctcgcgtatgtgtagtggctttgtagtcattggggtggtgtggcggtgctcggcacccttgtatcttgccttgagtgtgtgtgtcgtgtgtggtggtggcgtgagtttgtatcgtcgtgatgctttgtgattggtgcctt

SEQ ID NO: 445910 - DNA, 284 bp, Triticum aestivum
acggtgttaacaattgtgagtctgcattgttgtatcgcgacctcaatgaatggaataaacgaaataacgctgttgttcaatcatcaggctccggttcagtactgcaccaagctgtgatttttgcctattttgaaaataagcacatgctgctgtgtttatttaaacaccatgaagcgcatacatgaaagaaggcatgacatataaaaagattaagcatcaacaaaaacgaggccgctcttaaggatcaagccttcctttagcgtcaatacgacgtcatacctctt

SEQ ID NO: 445911 - DNA, 395 bp, Triticum aestivum
aattcccgggccgacgggacgtatacaacgtatctatagtttttgattgttccatgctattatattatctattttggatgttaatgggctttattttacacttttatattatttttgggactaacctattaaccggaggcccagcccaaattgctgttttttgccaattttagagtttcgccgaaaaggaatatcaaacggagtccaaatggaatgaaaccttcgggagcgttatttttggaacaaacgtgatccaggagacttggagtggacgtcaagaaacaatcgaggaggccacgaggcagggggcgcgccctccaccctcgtgggcccctcattgctccaccgacctacttattcctcctatatatgtccatataccccgcaaacatcca

SEQ ID NO: 445912 - DNA, 213 bp, Triticum aestivum
acgggaccaataatacttatctataatttttgattgttccatgctattatattatctattttggttgttaaggggctctactttacagttttatattatttttgggactaacctaatatacggccgcccagcacaaattgctgttttttgctacttttagagtttcgccaaaatggaatctcaatacggaactcgatatggcacaacaccttc

SEQ ID NO: 445913 - DNA, 377 bp, Triticum aestivum
tcccgggcgcccggggaatctaatatcttgcacactaaataacttatcataggtagcggcaaatattattggaaaaggggttattcaagatttatttacttgtgccggtgtgttacccatgttaggtggatctattctccataaaactagtagtcttgtggatgctatatctttgcccgtagttgaacttgaaaggcaatttgttcatatgcatccatccatacaaaggatttttctagagtttcccaatattgagcattattctattaagcgcgccgccactatatttctagcaaatgagtttagatttattatgaaagaagctagtgaaattttcgcgcattataaagtagatggtggtcatcctcctatagaag

SEQ ID NO: 445914 - DNA, 131 bp, Triticum aestivum
gggcaggcaaagatgcataactagctagtttgtgttggagattacgtatgtatgtacgtataatttcactggatgaatgaagataatgaacaggtccgccaagaaaaaaaagaaaaaatggaaaaagaaaa

SEQ ID NO: 445915 - DNA, 395 bp, Triticum aestivum
ggtggctacaaagtgggtggtgggtgggcctcgaatttcttcgccgtccgtatcccaaccatgctgaccgtaatccggccagggctctcctgacaaagagagagactttagtgaattcaggatgtcgccaaaaggcgagtgctgaaagacgtccgcggcggtgaactccatgatcggagcccaatcgggtttgatcggaaggggtgcggaggattcggagtccggaacggagtccggcaccttggaatcacgggccttgcaaaggactaggctggtatttggctctatcgccgtaaagattgcggctcctggggcagcgtccaatcgtccgtccttggttggtgtagtcggctccgggataatggtcggagcggacacctgagccgcgctctggg

SEQ ID NO: 445916 - DNA, 448 bp, Triticum aestivum
  unsure (1)..(448): unsure at all n locations
attccgggcgtcgacgggagaaaggatgaaatgttagatggctgtgacagtgaaggtgcaagctctgtgggtgaagacaacagcaagcagcggggttccaacgaggatggctgggaactgtgctgaactgaagatggctgaagatcgtcagggtttgcctgagtttgctccatataaataaataaaaatggcggtaataatcatttagaaccgtctctattttgtgcgagcaaaattagtgaacttgcgggacttgtcatggaatagctttgccttttgggaggcgactgaatatcagtaagttaaaatggtgctgacatgatatgtatataccgagattctagcttaatctatagtataaataaatgattggtgccatgtcaatgccaattttattgccacacanaaaaaccnaaccaaaggaaaaaccaaaatcaaccccaaacaa

SEQ ID NO: 445917 - DNA, 383 bp, Triticum aestivum
aagattctggcaggcgatgcccgaattctcgagcgccttcacatcattagtgatgtccaccgtagcgaacatgtagtgggggctattgacaaacctggcgaaacgctcgcaatgccttgtcgtcaggcagtagtggtagacgaggacgtggtggcgcacacacatctgagcgacgacgaccttgggacgcgacccggcacgagcgcgagcgtactcaaggtcgaacccgaccaccttgtacttctccgcggcaagcaagagctccatgatgtggatgtagtgctccacccagaatgggtcgttggtgtacaccatcaagaggtacatgaaccttctggtgggtgtccaccacggcacgcatggtgaactgctgctcgtcgtca

SEQ ID NO: 445918 - DNA, 366 bp, Triticum aestivum
gggtgttcgaaggcagctgaccagggccatcgagaggctcgaggtggtcctgcagcagctgattctggcctgcaactctataaggtgagactgagctcgaagcgaaacccgaggacgcggttagtaagatcaagagggatgtgcagtgcccgccagcgccatgtatgctatctgctctgctcttgttcttggcctttgactgatttaccttcacatgggcggagctttttagcttgtacaacaactaaaaatctaggtaaattgattagtgttggactgttggtccaaggataagcaacttgtactctgtactcattttcccccctgtacacagaaatttatagttgtatgtgaaattcagatttg

SEQ ID NO: 445919 - DNA, 355 bp, Triticum aestivum
cccgggtccacgggagccacaacatctccgatgacggtgagctggtggcacgtcacaacaacggccgtggaggcgtgcggtgacgttgggtgaaggcgtccaaggcaacaacgacgacctgtcagggcaggcaagccgcacggcgagttcatggcttagaaggtgagtgttggaataagccacgccccacgctccatgatccggccggtgcgtgcatgctgatcaagccagttcggtggtccgcagtcgtggcgaagtgtagcgtgtgtgcacgctcgaatggggcgcatggccgggtgtgttgttagtgtatggcgtgagtctgttgtaattttgcccgagtcgctaggacgtg

SEQ ID NO: 445920 - DNA, 482 bp, Triticum aestivum
  unsure (1)..(482): unsure at all n locations
tggnnggnaantcctcgcgctccgtaccggtcacaaattcccgggccnacgagctcactatcggcggccgctctagaggatccaagcttacgtacgcgtgcatgcgacgtcatagctctctatagtgtcacctaaattcaattcactggccgtcgttttacaacgtcgtgactgggaaaccctgggcgttacccaacttaatcgccttgcagcacatccccctttcgccagctggctaatagcgaagaggcccgcaccgatcgcccttcccaacagttgcgcagcctgaatggcgatgggacgcgccctgtancggcgcattaagcgcggcgggtgtggtggttacgcgcagcggaccgctacacttgccaagcgccctagcgcccgctcctttcgctttcttcccttccttttcgccacgttcgccggctttccccgtnaagctccaaaaccggggggctccccttaagggtccgatttat

SEQ ID NO: 445921 - DNA, 290 bp, Triticum aestivum
gggggagcaaatggagcatagccacctactgatcacctctgcaggcgaacgcgcacgatattgctgttatttacacgaaacacgaataatacaggcagacgaaacaactaggcgattggcggccatgaaatcttactactggggggtgcagatatgagactacttgtgtaccttatatggtcagggatgtatacgtgcagagaataccatgatatgtgctacatgtaaccgaattgtgcactaaacttgctggatgctgctgatgtcaaaaaaaaaaaaaaacttgctgg

SEQ ID NO: 445922 - DNA, 331 bp, Triticum aestivum
acggggccttcagtctgctcatgcattcttctgatatgatcttctcgtctttggtcacaacatagctgtcactaccttgacacaattccggttgacggtcatcatggatctaagcgattggtggccatgaaatctgatgtctgcgtgggtgtagatgtcgctctatatgtttaacttttatgttcctgtaagtctacgtcataactcttctatgatgtctgctacgtttatttcattggtcttcgttttttaacttcgtgatggtgatgtccctgtctttatccaacttattcacctttgatgcacatttttttttctccaactggcgtac

SEQ ID NO: 445923 - DNA, 429 bp, Triticum aestivum
gccgacggggaatccataaagaaggaggcaaagaggaagaaggaagagatggacgaaagaaagagaaagtacaatgtgaagtggaatgacgaggtcactgcggaagacatggaggcctaccgtatgacaagagtccgccacgacgattctaagaaagattttcccaattaagcgttcaagtcccctgtggttgcttggcctatgcctgaaccctttctgctgcgtgtcaaccctttgccggattgttgtctctgtactctctgggtgtctaggaacacgggatgggatggcatgccagctcgtgagttactgatgttgtgaagtacagatatgatcgcttgatgtccaaaggcagaacgaagtttgttctcatatgtcctttgaaacctccttcctggtaaccatggcatacgccactcatatggatat

SEQ ID NO: 445924 - DNA, 400 bp, Triticum aestivum
tccgggcccacgggggagaatctcgcccgccgcctgacgccaccgtcgtcgcgtccggcgctccgtggaaagaagagaaaacccaccgtcagccatggcgaactcggcgtcgggcatggccgtgagcgacgagtgcaagctcaggttccaggagctcaaggcgaagcgaaccttccggttcatcacgttcaagatcaacgagcagtcgcagcaggtggtggtggaccgggtggggcaaccgggcgagacctacgccgacttcaccgccaccatccccgccgacgagtgccgctacgccgtcttcgactttgacttcgtcaccgacgagaactgccagaagagcaagatcttcttcatctcctggtccccggacacgtccagggtgaggagcaagatgctg

SEQ ID NO: 445925 - DNA, 184 bp, Triticum aestivum
taccgatctagaattcgccggtcgacgggctcacacataaaaaaaaaaaaaaaaaaaaaaaaaaaaaaaaaaaaaaaaacaaagaagaaaataatagaaaataaaaataaatgcggacgcacaaaaggttcgatcctcacgttcgcgttcaagttacggctcatcgcttcgttactgctcccca

SEQ ID NO: 445926 - DNA, 426 bp, Triticum aestivum
gggtggcgcagtggcgccaacacttcccgcgggacatcatcaacgagcgcgggttctatgcgcaaaggagggcggagagggataagatgagggcagagcgaaccgcctatcgcgaggacaagcgtaggcgaaaagtggacgctcaattcaacatgaggctaggagcagcgtcgccttgggaattggacgacgatcggtatcttctcgcctacagtcatacgtcagaggaggacatcacctaggaggagtcagacaacaaggagtagttgaattatctttttttaaccaaccatgctgagaactatcctctactctatctacttcttgagctcagcactgtaaacactttttttaaagcgccgcgcattgtgattctgttggagatgctctaacatggcagatgagtgctttaatgttgcccacaag

SEQ ID NO: 445927 - DNA, 265 bp, Triticum aestivum
gacgggaacacaaaaggattagcaagtaatttcgagagtaatcttgtatgcgccctgggctcagtttgcgccgcgataaattgttttcaacatgtaatacattttttgccgcatgccaggtgagatggcgaactgggtgtgctttctgtgtttgtgttgtgtgggaccgtgggagagtgatttttcttcagaaggttcagagttttattgggttaaggcgaactcagcttatcgtacagtcttgttcaaacagtgatttttctcc

SEQ ID NO: 445928 - DNA, 303 bp, Triticum aestivum
gtaccgatctaagaattcccgggcagacgggagtggaacaggagagatcgaagtcgcgctaagtgctgtatatatagcaaaggctttggtcccggttcgtggcactaaccgggactaatgccccctttagtcccggttggtgccaccaaccgggaccaaaggcttcgctacacccgcagaacttaacgagacttcgctctctcctgcgctactcacgcagccctgggcgctccggcccggtctctggaggcgctccagctgacccgagagttcggcgccgtgacctgcaagcgtaccagcttt

SEQ ID NO: 445929 - DNA, 466 bp, Triticum aestivum
  unsure (1)..(466): unsure at all n locations
tnttnggccgccangtaccgntcaagaattcccgggncgacgagctcactaatcggcggcgctctagaggatccaagcttacgtacgcgtgcatgcgacgtcatagctcttctatagttcacctaaattcaattcactggccgtcgttttacaacgtcgtgactgggaaaaccctgggttacccaacttaatcgccttgcagcacatccccctttcgccagctggcgtaatagcgagaggcccgcaccgatcgcccttcccaacagttgcgcagcctgaatggcgaatgggacgcccctgtagcggcgcattaagcgcggcgggtgtggtggttacgcgcagcgtgaccgctaccttgccagcgccctagcgcccgctcctttcgctttcttcccttcctttctccgccangtcgccgggtttcccgtnaaaccccnaaaccgggggctccctttagggttccgat

SEQ ID NO: 445930 - DNA, 83 bp, Triticum aestivum
  unsure (1)..(83): unsure at all n locations
ggccgnccnaaaggttcaaaccttacttacncttgnatgcaacttnatancncttcaanntgtcaccaaatttcatttnatng

SEQ ID NO: 445931 - DNA, 480 bp, Triticum aestivum
  unsure (1)..(480): unsure at all n locations
tgnnnnnnnggnattnttnagccggccaggtaccgancaagaattcccgggctctagagatccaagcttacgtacgcgtgcatgcgacgtcatagctcttctatagtgtcacctaaatcaattcactggccgtcgttttacaacgtcgtgactgggaaaaccctggcgttacccaactaatcgccttgcagcacatccccctttcgccagctggcgtaatagcgaagaggcccgcacgatcgcccttcccaacagttgcgcagcctgaatggcgaatgggacgcgccctgtagcgcgcattaagcgcggcgggtgtggtggttacgcgcagcgtgaccgctacacttgccagcgcctagcgcccgctcctttcgctttcttcccttcctttctcgccacgttcgccggctttcccgtcaaagctctaaatcgggggctccccttaagggttccgatttagtgctttacggnactcgaccc

SEQ ID NO: 445932 - DNA, 53 bp, Triticum aestivum
acggtctatgttccggtcgcacggaactccaaaagagtcatttttagaataag

SEQ ID NO: 445933 - DNA, 450 bp, Triticum aestivum
ttcccgggcccacggggatcgccacatcgcactctcctctcctgccccccggcacttccagaacctcgatcgatcgtagctcgtgttccctctccttttcgcggcgatggcggtggatctgaccccgaggcagccggcgaaggcgtacggcggcgaaggcggtgcctactacgagtggagcccagccgagctgcccatgctcggtgtcgcctccatcggcgcagccaagctctcgctcgccgccggctgcatgtccctccccagctactccgactccgcaaaggtcgcctacgtcctccaaggcaagggaacctgcggcatcgtcctgcctgaggccaccaaggagaaggtagtcgccgtcaaggagggcgacgctctggcgctcccgttcggcgtggtcacctggtggcacaacaacccgggggtcggcaacggagctcgtcgtcctct

SEQ ID NO: 445934 - DNA, 199 bp, Triticum aestivum
agatatttattacattagttagtgactagattgggcaggttagttagttggtgccattcaatgcatgtgcaagctcccgtcatcattatcatggtcatcatcagggtgtgatgatagcttagacttgatcaatggcacatattagtacttaaatgacgtgatcctggttacggttatccagtaatctgatgcctcggtt

SEQ ID NO: 445935 - DNA, 485 bp, Triticum aestivum
  unsure (1)..(485): unsure at all n locations
gnnnnggaaattctacagccgccggtaccggaannaaatccngggncgacgagctcacnatcggcggccgctctagaggatccaagcttacgtacgcgtgcatgcgacgtcatagctctctatagtgtcacctaaattcaattcactggccgtcgttttacaacgtcgtgactgggaaaccctggcgttacccaacttaatcgccttgcagcacatccccctttcgccagctggcgaatagcgaagaggcccgcaccgatngcccttcccaacagttgcgcagcctgaatggcgatgggacgcgccctgtancgggcgcattaagcccnggcgggtntngtggttacgcncaaagtnaccgctaaanttgncancgccctaacgcccgntcctttngnnttcntccctttcctntcngcaantttnncngggtttnnccctttaancntnaaaatcgggggccccccttaaggttcccaantaat

SEQ ID NO: 445936 - DNA, 378 bp, Triticum aestivum
gggtcatcaaaagaatcctgcaacatgagacgttgcagccatgtaggtcagtatattgaatgtactggcaatttcacgctgtagagcaatgctaaataatggctatcactacatgcatatttggttggtggaggctctaagtttaatttttgcataaagccaattttttcctacaacaaaggaatatattttatttaactataaagtttgttgaaaacattgagaaggttcctccaactcaatcccaaattaacatcaataacctaacaaattatttaaataacgtgatgagatcaacatgataattcaagaaccagatacccaagatgtccacaaccagggatacggctagtcatgactagtttgtacactctgctg

SEQ ID NO: 445937 - DNA, 475 bp, Triticum aestivum
  unsure (1)..(475): unsure at all n locations
gnnnnngnanttttcgcgnncgtaccggtcaaaaattcccgggtcgacgagctcactaacggcggccgctctagaggatccaagcttacgtacgcgtgcatgcgacgtcatagctctttatagtgtcacctaaattcaattcactggccgtcgttttacaacgtcgtgactgggaaaccctggcgttacccaacttaatcgccttgcagcacatccccctttcgccagctggcgtatagcgaagaggcccgcaccgatcgcccttcccaacagttgcgcagcctgaatggcgaatggacgcgccctgtagcggcgcattaagcgcggcgggtgtggtggttacgcgcagcgtgacgctacacttgccaagcgccctagcgcccgctcctttcgctttcttcccttcctttctcccaagttcgccggntttccccgtcaaactctaaaaccgggggcccctttaagggttccgttt

SEQ ID NO: 445938 - DNA, 455 bp, Triticum aestivum
  unsure (1)..(455): unsure at all n locations
taccgagctagaattcgcgggccgacggggcagctcatcggcaagacgcccatggtgtatctcaacaagattgtcaagggctgtgtcgccaacgtcgccgccaagcttgagattatggagccctgctgtagtgtcaaggacaggataggaatcagtatgatttccgacgctgaagagaagggcttgataacacccggaaagagtgttttggtggaagcaacaagtggaaacacaggaattggtcttgctttcattgctgcttccaggggatataagttgatactgacaatgcccacatcaatgagcatggagaggagagtcctactcaaggcttttggcgctgaacttgtgctcacagatgctgcaaaagggatgaaaggggccctagataaagctacagagatcttgaatangacaaccaattccatacatgcttgagcagtttgacaaccctg

SEQ ID NO: 445939 - DNA, 212 bp, Triticum aestivum
attcgcgggccgacgggggcatgattcgcgggcacaagaaggccgtcttctgcctcgccgcggcgggagcgctcctcttcagcggctccgccgacaacaccatcatggtctggcggcgcgacgccggcgtgcactcctgcctctccgtgctctccggccacaccgagccgatcaggtgcctcgccgtcgtggagtacaacaaggaaaacgtc

SEQ ID NO: 445940 - DNA, 423 bp, Triticum aestivum
  unsure (1)..(423): unsure at all n locations
cggtcctagtattcccgggtccacgggcacttgtaacaacctgngagtttccccttttttttccttcataatttcggtttttcaaaatgtttaatctcttgagccatgtgtccaaatactgaaccgttttcattgttagatttatcaccttgagatattcgaaactggatcccaagttaatagatttccatgatattgtttccatagaaaagttgaaaataaaaaaaatccaaaagagtgaatacccaaaaaacaaaatccaaaaaaggccaaaaattggttcatgcaaaaaaaatgatgaatactgaaaaaagaaggaaaatattgaatcatggaagaacggtttgcagttttgcactttttttggaagcacatgatgtgcttttcctatttttgaagaagcataattaaatttgtgctttt

SEQ ID NO: 445941 - DNA, 477 bp, Triticum aestivum
  unsure (1)..(477): unsure at all n locations
gnnnnggnaatttacgcgcgtgtaggtcanaaattcccgggnccacgagctcactaatcgcggccgctctagaggatccaagcttacgtacgcgtgcatgcgacgtcatagctcttcttagtgtcacctaaattcaattcactggccgtcgttttacaacgtcgtgactgggaaaacctggcgttacccaacttaatcgccttgcagcacatccccctttcgccagctggcgtaatgcgaagaggcccgcaccgatcgcccttcccaacagttgcgcagcctgaatggcgaatggacgcgccctgtagcggcgcattaagcgcggcgggtgtggtggttacgcgcagcgtgaccctacacttgccagcgccctagcgcccgctcctttcgctttcttcccttcctttctcgcccgttcgccggctttccccgtcaaagctccaaaancgggggctccctttagggttccgattagtg

SEQ ID NO: 445942 - DNA, 388 bp, Triticum aestivum
gggtgtgattatttgcttatggtgggttccgggagggattgaaacctgtaccccaagttgtgagtcgttgcatatgggatgaagagggcaatttatcttaaggtcatagttgagtttgccttaatgaacttgttcgtatttgtggatatttgctaatagttctaatcataagtgcataaaaatccaagaaagaaatagtatgttagcagaggcctctcccacatataaaactacaatgacgattatcgttctgttatcaattgcctcccaaaataagagtctctaccttagtacaactttgtactaaagttagtccaaagtcaagacacttatttcgggatggagggagtattaggataggaaataccataataattttcttgaaaca

SEQ ID NO: 445943 - DNA, 429 bp, Triticum aestivum
gggtattataataacagatctcacgaaggtttttgttaagttttgtgtgggtgaagtgttcaaagatcgaggaggtctcgatatgaggagaaggaggagaggtaggagttcaagcttggggatgcccaagtaaatatgcgaggagactcaagtgtctaatcttggggtaccccggaaggcatcccatctttcttcaacaagtatcgatatgtttcagttttcgtttcgttcatgtgatatgcttaaatcttggagtgtcttttgtgtttagtttttgctttttattttatgcacaatgctggtatgatatagtccatggttgatttatggaattctctttgcacttcaattatatcttttgagtatggctttatagaatgcttcatgtgcttcacttatatcattcgaagttgggatgcctggttcccc

SEQ ID NO: 445944 - DNA, 254 bp, Triticum aestivum
gggaactgggagactatctgctggggttggggttagaaggggtgtagctggttctctgtccaactgggtaggggtacaatctgcatgagtgtgggttatgtgtggtggggctggttcttgggcaagtacaaccgtggttctatctgcatcgacaggtagcacgatcttttctgaagaccgtgtttttactcccacagatactgccatcactccctccaattgaaatggctgataaacaagaaaagtaattgacc

SEQ ID NO: 445945 - DNA, 292 bp, Triticum aestivum
acggggataacaatctgcagacggatgtagtgattgtgtatgataacaagcaatatgatcctattgcgatgcatgctgctgatagctcatctcaccttggtcgacactctttgtctgggagttactggtatatcgagaatgcttgctctaaatgatggatatggtcaagaggaagggattgacgaggctctcaaagtacatagctagtgattaccatcagcatccaacggaatgatagtccttcgttaacaccgatgaggttcatcaatgaatggtatatgtacgcatcttg

SEQ ID NO: 445946 - DNA, 478 bp, Triticum aestivum
  unsure (1)..(478): unsure at all n locations
tgnnnnngnaactnatcnagccgncacgtgtcaagaaatcccgggncgacgggtgtgttagaaattttcaagttttagggctttacggcacctcgaccccaaaaaacttgattagggtatggttcacgtagtgggccatcgccctgatagacggtttttcgccctttgacgttggagccacgttcttaatagtggactcttgttccaaactggaacaacactcaaccctatctcggctattcttttgatttataagggattttgccgatttcggcctattggttaaaaaatgagcgatttaacaaaaatttaacgcgaattttaacaaaatattaacgcttacaatttaggtggacttttcggggaaatgtgcgcggaacccctatttgtttatttttctaaatacattcaaaatgtatcccgctcatgagacaaataaccctgataaatgctcaataatattgaaaaaggagagtat

SEQ ID NO: 445947 - DNA, 478 bp, Triticum aestivum
  unsure (1)..(478): unsure at all n locations
tgggnnggnaattctacgcctctgtaggtcananantcncgggnccacgagctcactaanggcggncgctctagaggatccaagcttacgtacgcgtgcatgcgacgtcatagctctttatagtgtcacctaaattcaattcactggccgtcgttttacaacgtcgtgactgggaaaccctggcgttacccaacttaatcgccttgcagcacatccccctttcgccagctggcgtatagcgaagaggcccgcaccgatcgcccttcccaacagttgcgcagcctgaatggcgaatggacgcgccctgtagcggcgcattaagcgcggcgggtgtggtggttacgcgcagcgtgacgctacacttgccagcgccctagcgcccgctcctttcgctttcttcccttcctttctcgcacgttcgccggctttccccgttcaagctcnaatcgggggcnccctttagggttccgattagtgc

SEQ ID NO: 445948 - DNA, 192 bp, Triticum aestivum
tacggtctaagtatccgggcccacgggtcagaataaaattagttggttaattcgttgggtttcctttctttcttggtgtgagatgagatgctacctacgactcagatccagtcaaaccctgctgcttctcgttcgctggtgtaaatataatataaaagtggatcgcgccgcgcgcgctctttcttgaccccg

SEQ ID NO: 445949 - DNA, 431 bp, Triticum aestivum
gggtttgcattttgttcccagcttgcaccgtcattgagccattctaccatgggtctcttccatttccgatgataagcaaattcatccattacgttgtcttcaacaaggtaatccacatcatccaagtccgagtatgccattctaccgaccccctccaaacgatcgctcgaggattgtcttaggctggtttaaagagtttcaatgatctttgaatcaaaagtaattctttttgccacttaaggggatatttctacgagtcaccttccctaaggtgcctcgttgtggtttcatggcaactcaactcctcgctacgttgacaatcgattaccaccttcttaagcgtgaaattgttgtctacctagtgaaccctcgttatctgttccactccatccccccaagggggtgtgcttcgtctctcagctcaagagatg

SEQ ID NO: 445950 - DNA, 480 bp, Triticum aestivum
  unsure (1)..(480): unsure at all n locations
tgnnnnggaattnctacgngcctgtacggaaanagaattcccgggncgacgagctcactatcggcggccgctctagaggatccaagcttacgtacgcgtgcatgcgacgtcatagctctctatagtgtcacctaaattcaattcactggccgtcgttttacaacgtcgtgactgggaaaccctggcgttacccaacttaatcgccttgcagcacatccccctttcgccagctggcgaatagcgaagaggcccgcaccgatcgcccttcccaacagttgcgcagcctgaatggcgatgggacgcgccctgtagcggcgcattaagcgcggcgggtgtggtggttacgcgcagcgtaccgctacacttgccagcgccctagcgcccgctcctttcgctttcttcccttcctttctgccacgttcgccggctttccccgtcaagctctaaatccggggctncccttaagggttccatttagtg

SEQ ID NO: 445951 - DNA, 482 bp, Triticum aestivum
  unsure (1)..(482): unsure at all n locations
gnnnnngnaattctncgccggccgtaccggtcanagaattcccgggccgctcnagaggacaaagcttacgtacgcgtgcatgcgacgtcatanctcttctatagtgtcacctaaattcattcantggccgtcgttttacaacgtcgtgactgggaaaaccctggcgttacccaacttatcgccttgcagcacatccccctttcgncagctggcgtaatancgaagaggcccgcaccatcgcccttcccaanagttgcgcagcctgaatggcgaatgggacgcgccctgtagcggccattaagcgcggcgggtgtggtggttacgcgcagcgtgaccgctacacttgccagcgcctagcgcccgctcctttcgctttcttcccttcctttctcgccacgttcgccggctttcccgtcaagctctaaatccggggntccccttaagggttcccgatttaagngcnttaanggnactcnacccca

SEQ ID NO: 445952 - DNA, 411 bp, Triticum aestivum
tgatcataaagcgcaacgaagaagcacattacaaaaactgggcaccgttgcagcgtaacaaaataatactgaaccgagaccacttccaagctagttcaagaaaggttagccttgcgcgggaactgctgcgcaagctgctgagcaaggctgtgagaccggcctagcatgtcggtcatagcttccaggtgtagctgtttagcgttgaggttctcattggtgttctccgcaatctttcttagagataggacttcaagtcaaagttgagttgcagaatgcctttctgctagaacttgggactgaagaagtcgaactgattcagacaacaaattctgtgagcttgtctgactgctagtctcaagtaacttgaacactgcaacaggacaagactttggggttgtctcgctatcttca

SEQ ID NO: 445953 - DNA, 122 bp, Triticum aestivum
ggaacgatacatcgcgccgcatataggttattctacaagattactctatagatccatcagctctaagtaaactgcgtataaatcatgtatgtataaggtatgtgttactgatgttagaagtt

SEQ ID NO: 445954 - DNA, 381 bp, Triticum aestivum
gggcaggaacagatgatcacacaatatcttttgataaatcctttttacctagcttctgatttctattaccagaaacagattgtctgttcttacaggaaacatctacaaacagccgttattcgttattgtgctcttccatgttgcgccgctgacaagaggatggagggttttagtcgtcgtcgcggagaagaagggtaaccaccaagcaggagagagggaggaaagctatgcccgttcgctggaagccaggcaacccggcgccatcgtcgaggagagcgaggaggggctagattacgccgccacagaggtgagctacgaggggctgcggcgtccctgcataggaggggggagagaagccgccaccgcaccacgtgattctgc

SEQ ID NO: 445955 - DNA, 284 bp, Triticum aestivum
attcggcgccgacgggcataataaaactctagccgtttagcttttgccaccgcgtatctatcttccatcatacttctccatgcagtggcacactgaaggtgtacagatgcttcatcggtcaacaatgtggaggctgtcgtgtgctcatatatatgtaacatctctagatacgacacaatatttatgccatctataactatcacaagagatagtattgtctcataagctctgtaaggactgatgttctccgtcgattgggtctattctgtgtagcaacatcatac

SEQ ID NO: 445956 - DNA, 349 bp, Triticum aestivum
gggcgcggcgtgcagctgcgcatcgccgatggcgcgcaggtgaccgtgcagtatgcgcacaacgtgatcatccacaacatccacgtcaacgacctcatcgtgggcaagggcggcaggatccgggactcgccgcagcacgccgggttccgcacccagtccgacggcgacggcgtgagcgtcttcggctccaccgacgtgtggctcgaccacctctccctcgccacctgccaggacggcctcatcgacgtcatcgaccagtccaccggcgtcaccatctccaactgccacctcacaaaccacaacgacgtcatgctcttcggctccagcgacagcaaccccaaagacgaga

SEQ ID NO: 445957 - DNA, 397 bp, Triticum aestivum
gggtcgacgggaagtggaaatcattcttcatttctgagcgtatgaagctgcttcgggtccttgatctggaggatgcaacatcagatataacggctggcgatctcaagaaggtagtgaaacggctgtgtcgcctcaagttcctctctctccgagggcatactgagatcgatcatctaccaagttcattaggggatctcaggcagctccaggccttggacgtcagggacacctccatagtgaccctgcctgcgagcatcaccaagttaaagaagttgcagtacattcgtgccggccgtggcaccaccgtctcagcactacctgcttcatcctgctggttgcccgatttctgcaagtgccgtcaactagttgatgttcaagtgcccggggaaattgggaa

SEQ ID NO: 445958 - DNA, 236 bp, Triticum aestivum
tctgtaaatctccgttggtgcgctggtgactgtgcagtatgcgcagaacgtgattatccacacgatccacgttagcgttttcatcgttggcactggcggcaggatctcggaggcgccgcagcattccgggttccgtatccagtcttccggatatcgcgtgagtgtcttcggatctatcacgtgtggctcttatacttctccttctcgacctgccagtactgcctcattgtcgtcat

SEQ ID NO: 445959 - DNA, 435 bp, Triticum aestivum
  unsure (1)..(435): unsure at all n locations
cggggtcacgacgacgtgcacggcgaagacgagcttgatggcgagcgcatggaccacctcggctccgttcggtgctcgggacggatgaagacgtccgtggcgggcctccaggacgtcctcccacgcgaaggcgacgacggtggtcgcggtaatgacgatgacaagcgcggtcaccgtgagagtttccaagctcgaattcgagcgaaagaagaagggggcgactggggaaagaagggggaatggacgagggcggctagggttttcgttggacgcggttataggccatgggggagcacgtggaggccatccatggccacggcagccgtgggatggatgccatgacctcctctgaacgggaagaangggattgccgttaagttggcctggactatgcactgtaccagtgggctacaagtgcacagtagtagttaggtc

SEQ ID NO: 445960 - DNA, 440 bp, Triticum aestivum
gggtagaaggaagaagaaacacaaaggaggcagcataaagctcaaactacactgaccatgttgccacttggccaatatgcaaattcaaatctacaaccaacaggacgcatattcagtttccaactacaactaagataaccaatccaccggaactgaataacagtgttctctaacttccactaaatggaacttagtaaaaggtaaatggtccatactcgattattcaccaagagaatcaagtactcagatttcgcaatctaggtgaatgagtggttggaaggatgaacaaatgaataggcttgaaaatgacaatataggacttaagaatgcctgtttacataatactcctccgttcacaaatagaagatgtttttgatatttcaattatggactacatactacggaatgaaatgagtgaacaaacacactaaaatgtgtct

SEQ ID NO: 445961 - DNA, 67 bp, Triticum aestivum
  unsure (1)..(67): unsure at all n locations
tcngnttntttntcttcnttgnttttggttttttttnntgttatctcnttggtcttnttctctcttt

SEQ ID NO: 445962 - DNA, 500 bp, Triticum aestivum
  unsure (1)..(500): unsure at all n locations
gnnnnngggnnnntgnnggannttngnagcctctacgccggtcaagtaccggtcanacatcccgggccgacgggcagcaggnacccgtcccaaggattctctttagattaagacccagtaaaannaaaagnaaaaaaaaaaaanaaaaagcggccgctctagaggatccaagcttactgggcgtgcatgcgangtcatagctcttctatagtgtcncctaaattcaattcacnggcgtcgttttacaacgtcgtgactgggaaaaccctggngttacccancttaatcnccttgcgcacatccccctttcgccagctggcgtaatagcgaagaggcccgcaccgatcgcccttccaacagttgcgcagcctgaatggcgaatgggacgcgccctgtancggcncattaancgcgngggtgtggtggttacncgcannntnaccgctaancttgcaancggccctanncccgncctttcgctttcttcccttcctttcnng

SEQ ID NO: 445963 - DNA, 395 bp, Triticum aestivum
gggcaaaacaacttcaaccgaatgagtacaactctgggacatttactctgtccaacttgggcatgtttggtgtagatagatttgatgcaattcttccacctggccagggagctataatggctgttggagcctcaaaacctacagtggcggctgataaagatggtttctttagtgttaagagcaaaatgatggtcaatgtcacggctgatcacaggattgtttatggtgctgatttggctgcattcctgcaaacttttgcgaaaattgttgaggatcctgagagcctaactttgtaggatgttcttggaagtggtctatgagttgttcaaccgtcagttcatttccagttggaagtctatcgctgagtttgtttttcgttttcctatctgtatcct

SEQ ID NO: 445964 - DNA, 461 bp, Triticum aestivum
  unsure (1)..(461): unsure at all n locations
attcccgtatcgacgggtggcgtaaaccgtagggtgtccattggtggagccatgatgcaagcatccaaaacagacatattgtatacgaagaatgttcatgctgccaagagaagtgaagacattgcccatttgtcccctggatgggcgtgtaactagagaacaaaacactatggcggcaaacgagactatcgaaccgaactgattgtactgaaaactaggacctaaacttgtgctgctggccaaccttttcttcagggaatgccaagatattcgccaaacaaagccataggatggtgctatacacagaggacaacctatcagcaagtcgggctccagtgtgtttgggtcagcgtccacggaggagcagataactgacgacatttacgnctgccgggttcacaatcctcatcacacatgaccacaacccacccaaccgactgttacaatggtcgtggagcttc

SEQ ID NO: 445965 - DNA, 473 bp, Triticum aestivum
  unsure (1)..(473): unsure at all n locations
ggngngnaantctacgtngncggggccggtcagaaattaacgggcnctngangatccaacttacgtacgcgtgcatgcgacgtcatagctcttctatagtgtcacctaaattcaattcctggccgtcgttttacaacgtcgtgactgggaaaaccctggcgttacccaacttaatcgcttgcagcacatccccctttcgccagctggcgtaatagcgaagaggcccgcaccgatcgccttcccaacagttgcgcagcctgaatggcgaatgggacgcgccctgtagcggcgcattagcgcggcgggtgtggtggttacgcgcagcgtgaccgctacacttgccagcgccctaaggcccgctcctttcgctttcttcccttcctttctcgccacgttcgccggctttccccgtcagctctaaatcgggggntccctttaaggntccnanttaatggcttnanggaaccncnccc

SEQ ID NO: 445966 - DNA, 438 bp, Triticum aestivum
gggacgcggggtggactgatcatctaccatggagtcatgttgaaggtggagcttgattgaggggctacggtgtaaggatccagagagtcgaagcctattcagctgggaaaaagcgagtgacatgcagtttggactggagcctagtggtttgatggaagcgtgaaactcgtcatcggtcggtgatgatcggtggtactctgcagtgggggttgagtggtgtggtttagcgacccttgagactcgaccgggacagcggaggctcgacgcgataatagcggtgaggcatgcggtagcacggggcatggagacgggccagggctctggtggtcatacatgtggtgaggcaactgcgaatttgactcggggtgactacaagcaaatggtgaaaatcctttcaggtttcagacaggcggtcaagaaatgagcggtgatattgag

SEQ ID NO: 445967 - DNA, 371 bp, Triticum aestivum
tacatgacacttcaccattatttgggactagaggaaggcattgggaagtaataagtatttgatgggttgctagagtgacagaagcttataccctagtttatgcattgcttcgtacggggctgatttggatccacatgtttcaagctatggttaggtttaccttgatacttttgttgtagttgtggatgcttgcaatagtgatgaggacatcaatacaattgttacacccacagcccctgctgctatacatactggaccaattactagagctcgtgcacgccaactaaattaccaggtactttcgtttcttggtaatgattctaatgttcatgagaatatgatgctgcctaaattggatacatttgttttgc

SEQ ID NO: 445968 - DNA, 79 bp, Triticum aestivum
aatttaaaaggtacccttcgtattctcgaatggtaggacccaactgcgtaccaaccagaccttggctcgtgttgatcct

SEQ ID NO: 445969 - DNA, 72 bp, Triticum aestivum
ggggttcgaaattgtaaatatgcattgttgtatcgcgacctgaatgaaataaacgaaataatgctcttgttc

SEQ ID NO: 445970 - DNA, 232 bp, Triticum aestivum
ggcgtatgtcatatttaggtaggaattttagagttccagaactttgcgttacttacagattgctacagacttttctgtttttgacatattctgtatttcttgtgtggtttgcttattttgaggcatctatggatattaaattattttataaacaatattgaagttggaatacattaggttaatcaccaattaattaaataaggatttaataacgttacctaagttggaggtt

SEQ ID NO: 445971 - DNA, 470 bp, Triticum aestivum
  unsure (1)..(470): unsure at all n locations
gggngngnaattcnacgtnntcgggccggtcacnaattaacgggccgacgccaaaaaactgattagggtgatggttcacgtagtgggccatcgccctgatanacggtttttcgcccttgacgttggagtccacgttcttaatagtggactcntgttccaaactggaacaacactcaacctatctcggtctattcttttgatttataagggattttgccgatttcggcctattggttaaaaatgagctgatttaacaaaaatttaacgcgaattttaacaaaatattaacgcttanatttaggtggcacttttcggggaaatgtgcgcggaacccctatttgtttatttttctaatacattcaaatatgtatccgctcatgatacaataaccctgataaatgcttcaanaatatgaaaaangaagagtatgagtaatcaacaatttcctgtntnccctaattccctttttt

SEQ ID NO: 445972 - DNA, 362 bp, Triticum aestivum
gggcgctagattttgttgcatttaatgaaaaccttagaaaaaaggttcctaccaatattctagttgatagaatttctgaacttaatgacgattttgctattcgaaataatgagctaggatattctctcgaatataggctcaccaagttctgtcaaaagaatgcctataatgatgaattggttatgcaatatgaagggccgaaggaggaacctatacctcctaaggttgatcttggggatttttgtcccattaaatttagcccttttgattacttttgcttgccacaaagaaagcttgctgccgaacgtagagagtatgaaatgagttttaatgatctatcttattattatggcagtacctag

SEQ ID NO: 445973 - DNA, 433 bp, Triticum aestivum
agggcctccaattcgtaaaaagaggagaggtaaatcacacagagaaccatcagcaatggcgaagatttctagtagcaccgttgttctcctggtgtttctcgtctcgtcgtggggggcattgccggtgctgtcccgtggaggcctggaggatggaggaggcgggccaaacggtggtatcggtgctaatgttgggcttcaaaagtctgtcggtgctaatattggtgttggtgcgaatggaggcgctggtgctggtgctggtgctggcattggagcaaatgtaggtgttggagcaaatgtaggtgccaatgctggtcttggtgccggtgcaaatggaaatggtggtgctggtcttggtgtcggtgcacataaatctattggtgccaaatgttggtgttggtgcaaatggaggcgctggtgctggtgctggtgctgg

SEQ ID NO: 445974 - DNA, 398 bp, Triticum aestivum
gggtcgaggacatggtaatgccgtattatccatcgatgctatgtgacttgcttcaccaatggctttgcaccttgatccagattgttttcatgcaaagcctgtcatgtttgcctcctaatgaccacatccactaagtcagctctatctctctactactgcaactaactaactgtgatgatcttctccaggttttttggctggatactgagatggcaccattgtgctgctgaagttaaaccctgtttattgggacgtacaagcgggcggcaagcacacatggcggcaggagacaagccatattttaccaatgactgctgctaggattgatgtcctattgccggagaaacaatggcaacagtcgcaccgttttttcttagtttctttccaaggcactcaat

SEQ ID NO: 445975 - DNA, 498 bp, Triticum aestivum
  unsure (1)..(498): unsure at all n locations
gngggaattctacgcggctctttaccgggccagaaattcccgnntcgacgagcgcnctatcggcggccgctctagaggatccaagcttacgtacgcgtgcatgcgacgtcatagctctctatagtgtcacctaaattcaattcactggccgtcgttttacaacgtcgtgactgggaaaccctggcgttacccaacntaatcnccttgcagcacatccccctttcgccagctggcgtatagcnaagangcccgcancgatcgcccttcccaacagttgcgcagcctgaatggcgaagggacgcgccctgtagcggcgcattaatcgcggcgggtgtggtggttacgcgcagcgtgncgctacacttgccagcgccctagcgcccgctccttttcgccttccatnncctnccttccngccaagttctnncgggctttncncngttaangcgtgaaaaatgnggggggcncccctnaagggttcccgatttagntgcntnt

SEQ ID NO: 445976 - DNA, 344 bp, Triticum aestivum
aggatgaacagaatattaaccctgacgtagatggagcatatgtgtttgatagccatctatacaagtgcagaacagaagtcgaggctcttcttgtctgttacttgtcgtgccctcttccactctctcattttgagtccctgtatgagcaacggtacaagaagactctcgactaccaaagctgtggagttgatggtctggaggaactgcttaacaagttaaaagatgttgtcgaattgaatgtatatgagatcagcaacatgaaagtcatcaaagccaagtcaccaaaatgtagtccctcaaagccatgttaaatagtgggtgtcctaatatcagtagtatagtca

SEQ ID NO: 445977 - DNA, 439 bp, Triticum aestivum
gggcgcctgtacagcaggtgctacgcacgacagatcttccagagtcttcgcgtctggatggacgagcgcatggaggtggagccgttgggcgccgtagtggcgtcgacggatggccggactggcaaggatgatgcggatctctctcctgaagacgggtcagtggtttgatgatgatggcagcttgtaaaacgtgtgcgtgtggtgtacgctttaggtctgctgcaccggctgttggttccgatacgttatgtggatgaatcggcaatgacaccggttttagatatgaggagtgagagcactccacattatcgcgtttgtaggtgtgaatggtggcttcgggtgacctgacgtatgttttggtcagtcctttgctgaataagttaataaagatggccgtatgcatcaattgatgcagaggccggaggtctcaacctccttt

SEQ ID NO: 445978 - DNA, 492 bp, Triticum aestivum
  unsure (1)..(492): unsure at all n locations
ggnnnnngngganttntagcaggctctaccggtcantaccggtcanngnattcccgggtgacnagctcactaatcggcggccgctctanaggatccangcntacgtatgcgtncangnanntcanagctcttcnanagtgtcacctannttcaantcactggccgtcgtnttanaactcntgantgggataaccctggcgttacccagcttaatcgccttgcagnacatcnccnttcgccagctggcgtaatagcgaataggcccgcaccgatcgcncttcccaacagttgcgcacctgaatggcgaatgggacgcgccctgtagctgcgcattaagcgcggcnggtgtggtngnncgcgcagcntgaccgctanacttgccagcnccctaccgccngctccttncgcttncactcctcctttctcgccacgttcgccgggntttccaggtngnnnctcnaaatccggggggtcncttntnggtcccgattt

SEQ ID NO: 445979 - DNA, 89 bp, Triticum aestivum
  unsure (1)..(89): unsure at all n locations
ggntgtttnnnttgctttttttntgtttttggtttgtgtgtttttttntntnggttnttttttnctggttgtgttttgtttnttttnnt

SEQ ID NO: 445980 - DNA, 441 bp, Triticum aestivum
  unsure (1)..(441): unsure at all n locations
gggtacatccccagagtccaagtccatttgatgaggctggtgtcgctgcctacgtgacccagaggggtagtaatactgaccacacacctgtacatcggcctcgtgtcagtgttagcgtcagcggcgtcgcccctgacgcacactatagagacggggcggcggcctacgcgggcctcgccggtgcccacgatcaagaggaagacgctgccgtcctcctccgagactagcaggaggcggtgatcctccagcgactccgacatggtgaacgggtagcacatctcgtacttgatgttctccgccaagggccagcaatggacgaagggctccttggaggcatcgaccaggccgtccatgaaatgggagtggctgttagggaacatgcgcaagttgantatatgagcaagttactatgagatttaatccgaataagcacaaaataaa

SEQ ID NO: 445981 - DNA, 372 bp, Triticum aestivum
gggggctcaacggtcgctcacgacctcattttgccaaacgtgtgtgccaggagggcatatcccggacggtttctgggtcgtgtgggaaggaccccccctatcgcccacactcacttggcgacggttccaaatgtcgtcgcggaaaggggtaaagaattgtttgtttaggatcgacgcgcaccagtgatgcgcatgtagttcaaatttgaattatgcacataaatgcattgagaactcagttaatgcataaaaatgtccaaacgaaccccgaaaaatcataaaaattcacacaacgctcccgttgttctatgttgacacgagaaaaaaaaaatgaaagcaataagaggcaatggatatcgtttcctccccaaa

SEQ ID NO: 445982 - DNA, 485 bp, Triticum aestivum
  unsure (1)..(485): unsure at all n locations
ggnggactgttacgcagccttangccggncagtaccggtcanagnattcccgggncgacagctcactantcggcggccgctctagaggatccaagcttacgtacgcgtgcatgcgacgcatagctcttctatagtgtcacctaaattcaattcactggccgtcgttttacaacgtcggactgggaaaaccctggcgttacccaacttaatcgccttgcagcacatccccctttcgcagctggcgtaatagcgaagaggcccgcaccgatcgcccttcccaacagttgcgcagcctaatggcgaatgggacgcgccctgtagcggcgcattaagcgcggcgggtgtggtggttaccgcagcgtgaccgctacacttgccagcgccctagcgcccgctcctttcgctttcttccctcctttctcgccacgttcgccggnttttcccgtncaagctctaaatcgggggctcccttagggttccgattt

SEQ ID NO: 445983 - DNA, 375 bp, Triticum aestivum
ggggattatgacatacatctgcaccggcgtcactgtcctgactgcctaccattttggtctaaccggcctcggtgcctcttgttggcgggttgctgccgcttcggcatggcgtctcgaattccatccctataaaataccatatacacaaggtaggtgaagtgtctaaaatgagatgcctgcagttgggattttggttattcggaaatgcgacgcatggagctgtccaagatactcggacgtaatggccattatggcatcagcagacctcaattgaaagaactgactgattatcatccccatgaatatgtcaggatcatcgtcgagtccgaggaccatggtccagtcaaggtcatctggttgtggatatgggctgtt

SEQ ID NO: 445984 - DNA, 66 bp, Triticum aestivum
ggggttatttattctagtcaagatataagtgttctttatggcgaaagaaaaatataagtattgcag

SEQ ID NO: 445985 - DNA, 209 bp, Triticum aestivum
  unsure (1)..(209): unsure at all n locations
ttcntnctttntgtttttttttctgttctgngtctgggggtttntnngngnggtgtntttctctgcctttgttttttttnnttnntttttgttctgtttttttntgtgtcttttttctnctttggctggnttgtttttggtgnctttctttngnttcntgntttcnttnttgttgtttntttcttgtntttctttgtnttntntnttnc

SEQ ID NO: 445986 - DNA, 401 bp, Triticum aestivum
gggccgacgcgctgaaaaatgttcagaattttttcaagtcccgaattcccgagttcaaagttcaagtcataaatgtggaggtgcccgaggaagctgaattagttgcggattcgtcagacgagttagtgcaagatgatgtgaagagcacatcagagagttcattggaggagcctagcacggaggaattccaggaggaagatgtctctgatggagattcagactcgaacgacgaaagtaaggggccggaagtaaggcttttcatcagcggagtagttcataataaagaggaggctggagcaaaatcttatgttcgagttcccgctgaaataaataacctggaaagggactcctttgaactctacatccctggaaaaggttctgatcgggatctgagtgaaaca

SEQ ID NO: 445987 - DNA, 441 bp, Triticum aestivum
ggggtcaccaaagcagggacgttttaatttcaaaaaaaaccatagatcattaggacattttagtacattgactgattttctacgggtataatgtgcaaaaatcaaatttgagctacatgcacacatgacagtgcacctaaatggattgcaaaaacacatgtgtctcactgggtgcatgtttactcctcgtgcaagaaatttcaaacattgagactcttaatttttaaattctagtacatccaaaacttatctaaagttcatgaaacttatcatgttgtcatctagacaccaatacaaagtggcattgtacttttttgtcaaatttgagaccagttttggtgtaatatgtatctaattacaaacgggagattattaataatttggaaaccattatcccaaatgaattatttattcgaaccgtgagcgttagacaaacaatgg

SEQ ID NO: 445988 - DNA, 343 bp, Triticum aestivum
gttcgtgagggggaacctggtgttcgccgaagggaagcacgccggggccgcctgcggcgccaccatcctcgccaagtgatacactagagctacaatgtcattgctgatttctagcgtatatgatcgtgtgcgctgtgtagtagtatgtatgtgtgcagatttgtagttgtttccctgtgtataattggatccggtgcatgcatccattcccctccattgtgtatacccacccattcattggacagcaccaggtgtaggttatttctctgaattattcagatgtagtagttctgaacttctcagttgtgataatatctatgggaagaatgtggattattctgcc

SEQ ID NO: 445989 - DNA, 182 bp, Triticum aestivum
gggaataacgagcttctttgtgatgtcctgtttcgagcgcctagtatcgcatccgccgtcgattatccatctcgatctcctgaagatgttatctcctgcctgaatccagactcgcgtgtattaagactccagtgtgacagttgggtgtgctcttattgtcgtggaagatttaagttataatc

SEQ ID NO: 445990 - DNA, 314 bp, Triticum aestivum
gggagacgctgcatgcaagtatgatcgatcgatgatcgtccgaagcaagtggagtgcagtgcagtcagccagaggaagacgaaggcgtttctatcagtccgatctcctgccccttttacatgatgattattattattatcttagtgcatgtgtatgtaatatccaccatgaactgatgttacagtagactgccacattggtagtgcagtgcagcacagcacataaaaaaaaaaaaaaaaaaaagaaaaaaaaaaaaaaaaaaaaacaaaaaaaaaaaaaaaaaaaaaaaaagacatacaaaaaaaaacgaaaat

SEQ ID NO: 445991 - DNA, 483 bp, Triticum aestivum
  unsure (1)..(483): unsure at all n locations
gnggaatttagcgnctctaccgttanatattcncgacatcgacggggaccggattaaaaaaaaaaaaaaaaaaaaaaaaaaaaagcggccgctctagaggatccaagcttacgtacgctgcatgcgacgtcatagctcttctatagtgtcacctaaattcaattcactggccgtcgtttacaacgtcgtgactgggaaaaccctggcgttacccaacttaatcgccttgcagcacaccccctttcgccagctggcgtaatagcgaagaggcccgcaccgatcgcccttcccaacattgcgcagcctgaatggcgaatgggacgcgccctgtagcggcgcattaagcgcggcggggtggtggttacgcgcagcgtgaccgctacacttgccagcgccctancgcccgctccnttgctttcttcccttcctttctcgccaactttcgccgggctttccccgtcaaagctctaaatcggggggctc

SEQ ID NO: 445992 - DNA, 70 bp, Triticum aestivum
  unsure (1)..(70): unsure at all n locations
tttnttgnttttggnatttccccttttctcagttcatntanctttgnagntntgntggtangcgtacttt

SEQ ID NO: 445993 - DNA, 445 bp, Triticum aestivum
aggggttaggaattgtaaatatgcattgttgtatcgcgacctgaatgaatgaaataaacgaaataacgctcttgtacaaaaaaaaaaaaaaaaaaaaaaaaaaaaaaaaaaaaaaaaaaaaaaaaaaaaaaaaaaaaaaaaaaaaaaaaaaaaaaaaaaaaaaaaaaaaaaaaaaaaaaaaaaaaaaaaaaaaaaaaaaaaaaaaaaaaaaaaaaaaaggcccccaaaaaaaaaaaaaaaaaataaacccccaaaaaaaaaaaaaaaaccccctaaaaaggccccaaaaaaaaataaaatgggggcccttttaaaaaaaccttttaggaaaaaaaacccggatttaaaaaaaaaaaacctttaaaaaaaaaacccctttttaaaaaggttggaaaaaaaaaaaaagcccccaaaattatcccccaaaaaaaattttcccccaaaa

SEQ ID NO: 445994 - DNA, 414 bp, Triticum aestivum
tgacggtctaaaattcacgggtcgacgggcgatgacagccgcagttaagcgctcgacggcgacgtgcaaattgcttgctaaacgtacccaggaatgtgtcgtgtcgtgcgcgcgtgtggcccaactgttttttttagcatcagtacagacacaagcgctcatatacacgcgcatacactcacccctatgaacgcacacacgcacaccttacccctatgagcacctccgaaagacggatccggaaacttatgatgatgcacgggtgcggtgcacgtctggtccgaacgttgacgatggtgcccattttctgcagtctgcaccacattttattgacctgcattgtatttgtatgttgggcctggcaagtttgactcctctcggcgagcgtataaaaatgccactgggttgttgttg

SEQ ID NO: 445995 - DNA, 480 bp, Triticum aestivum
  unsure (1)..(480): unsure at all n locations
gnngnaattctacccggcctttaccggccanaaattcccgnnccgctctagaggatcaagcttacgtacgcgtgcatgcgacgtcatagctcttctatagtgtcacctaaattcaattactggccgtcgttttacaacgtcgtgactgggaaaaccctggcgttacccaacttaatcccttgcagcacatccccctttcgccagctggcgtaatagcgaagaggcccgcaccgatccccttcccaacagttgcgcagcctgaatggcgaatgggacgcgccctgtagcggcgcataagcgcggcgggtgtggtggttacgcgcagcgtgaccgctacacttgccagcgccctaggcccgctcctttcgctttcttcccttcctttctcgccacgttcgccggctttccccgtnaactcnaaatcggggggctccctttagggttccgatttagtgctttacggcacctcgaccaaaaaat

SEQ ID NO: 445996 - DNA, 478 bp, Triticum aestivum
  unsure (1)..(478): unsure at all n locations
gnnnngngnanttctacctggtcggtgccggtcngaaattcacgggccgacgggggaaanaggaagggaaaaaaaaaaaaaaaaaaaaaaaaaaaaaagcggccgctctagaggatccagcttacgtacgcgtgcatgcgacgtcatagctcttctatagtgtcacctaaattcaatcactggccgtcgttttacaacgtcgtgactgggaaaaccctggcgttacccaacttaatgccttgcagcacatccccctttcgccagctggcgtaatagcgaagaggcccgcaccgatgcccttcccaacagttgcgcagcctgaatggcgaatgggacgcgccctgtagcggcgcataagcgcggcgggtgtggtggttacgcgcagcgtgaccgctacacttgccaacgccctacgcccgctcctttcgctttcntccttcccttttcgccaanttttcccnggttttccccgnaagct

SEQ ID NO: 445997 - DNA, 296 bp, Triticum aestivum
ggtctacaattcacgggtcgacggggaggatcaagaagcacgagctgaaggccaaggctaaggagcttggccctgtgaagaagagcacgatgtgagctccgatgttgagatacatatacgtatagtggaccgtggacgctagcgccatcgtgaataagttatgctctggggaaattcccaagtgaaggcttgtctgtataagaaattcaagcactcattttcattcaagaaaatactgtagaagacaagagggagacagaacacgaactcttgcatctgtacaagaaagcaacgtc

SEQ ID NO: 445998 - DNA, 375 bp, Triticum aestivum
catgaacgcgcgacggaccgccgctgttgtgacgcatgccaggcggactgtgagccatgtcgaccatcaggacctcttccgcgaggtcgctgctgtcgcactcgaatagggtctcgacggagccagtcgacagatcaaacaggccgtagagagattcgtcgggctcaattgccgcgacttgaggggtggccgacttacgtgccaccacatgcttcacccaccactgaagccgtgactgaccggatctcttgtgacggcgagcggcggggagcaaagatgttgcgggggccaaccgatattgagttgccggctgccacagaaggacaccgcgaatgcacgcgcaaaagtgcgtcgccccgcggacgcggagcgcct

SEQ ID NO: 445999 - DNA, 153 bp, Triticum aestivum
aagaagaagggaggggagcacaagaaggacggcgagcacaagaaggacggggagcacaaggagggcatgatggagaagatcaaggacaagatcagcggcgacggccacggcgacggcaagaaggacggcgagcacaaggagaagaaggacaag

SEQ ID NO: 446000 - DNA, 70 bp, Triticum aestivum
ggggagcaaaaagcggggtacgcgtgtgcgctgccaccaatttttcgaaatgaaattttctgacttccat

SEQ ID NO: 446001 - DNA, 435 bp, Triticum aestivum
gggagagtggatacagaataacttcatccgcaggcacacctgaccaagctgcttttatcttgagcataccaaagaggaagccactggacgagacccaggaaacccttcgaacttctgccttccccagtaaccacgtgaaggaaaagtgggcgaagaacctgtacatcgcctcaatctgctgcgggcgaaccgcgtgttgacgacgtacttgagctcgacggcgaaatcacccgagttttaccactggagccagaagagagttcgagacggaacaaactcagcgtcaaccttattatctaggtttcgagcgcaattggctgggcgctgacactggcccggcctcttttggttggcggcacgctattccaattggtaagaatccttgcaaaaatccttggggtggttgtatcagtcctcatcggatggatatgaacc

SEQ ID NO: 446002 - DNA, 355 bp, Triticum aestivum
aggcccagtattccgtcacataacatagaatgtcctgcaccggatgtatggaaggaatcgggcgtgtgttaactgatctaatgttacaccgatttcatcatctcctcgatgacgagaagattgttccgaacagaactcatctattatcagtgttccgttgtcagtgtgtagtttactctgcatcggaactttgttttactcaacgaatgcatactgctatcataaatgtgtcaatgttgatcgtagcatgtcatacctgtctgactgatacaatgatcaagtagtccatgaatgataactcctgtgtcatctcagtttcaatcatcttgagagccccatggaattttctgcgtcg

SEQ ID NO: 446003 - DNA, 312 bp, Triticum aestivum
ttcccggttcgacagggaagaggaagatgaagaagaggaagaagaggaagaagaggaagaggaagaagatgaagaagaagaagaggaagaagaggaagaggaagaagaggaagaggaagaagatgaagaagaggaagaggaagaagaagaagacgaggaagagaaagaagaggaagaggacgaagatgaagaagaataggaagaagaaggaggagaaggagaagaaggagaagttggaggagatggagaagattggaggagaatgagaatatcgaggagaaggataagaaggatgagaaggagaagaatgac

SEQ ID NO: 446004 - DNA, 409 bp, Triticum aestivum
gggcaagaaaaaatttagggaacttagtcagtcacgtccagtcaaggctgttcagggcagattttacacgccatctaacaaatttatttggaagacagcgattacttttgtcttgcttggagtgcttacccttgttttccctactgaagaaggtccaactctccaggtcttaatctcttgtgcggcaaatatctatttcctttatcagcggcttaaaagtggatggaaatcattcttttatgggttcggctccttctttgcttcctggtttcttgccacattcttgatggtatcggtaattccgcctatactgcctggtccaagaaacttggaagtgagcacggcatgtgttgcttacgcattcctttttgtatcatcaaccttcctgaaattaccaaagtttggtttt

SEQ ID NO: 446005 - DNA, 522 bp, Triticum aestivum
  unsure (1)..(522): unsure at all n locations
ggttaatgaattttctttttcnnntaaanntccnctncctattntatggccccngggcctttttaaaatttaaaatttnntttttntntntttnttttnttnttnntntttttcctnttttntctnttttttttttttttnttnttnttttttttnttttttnttttttnttttttttttntttgtctttngnnttttttnttttttttnttttttntttttttttntttttttctctcttcttttttttttttnttttgtttttttttttttntttttntttttttttttttcttnttttttttnctttnnttttttttttttntcttttnttttttttttntctttttttttttttttnttttttttttnntttttcttttttttttcctttttntnntnctnttttttttttttctttttnttctttttttttttttttccttttctttttttttttttntgtnttttnntttcttttcttttttttcttttttttttttctnttnttttttttntttt

SEQ ID NO: 446006 - DNA, 429 bp, Triticum aestivum
gggttctacgagaataaatagtgtgccgaatccattgattgtcatcaatttaaattggtgaaggataagcataatgtaattcttattcttgtttcatcgactaaattcaattccttattccggagcctcatcaaaattctcggtttcaattgtttcatcttctcttcccgcaattccaagctctctcaattatatcatcacaaagatccatccaagtcactacaaggattcaccttgtgctttcaacttctctttctttttgtttgatcattctttcattaccggagttcttcatgaaggttctacatgatggtttcatcaaggatttaatttgttctcgaagtgttcatcaagattcttttcagaggagttcaagcattcttcatcttgctatccggagtgcaatttcttctacagtatcatcggagg

SEQ ID NO: 446007 - DNA, 393 bp, Triticum aestivum
acgggccacacgagagggagacctaccagcaagagaggtttcgttcagttctgctatgagccaatcaagcaaatcatagccacctgcatgaatgatcagaaggataagttgtggcctatgttgaagaagcttggagtgaccatgaagaatgatgagaaggacttgatgggcaaggctctcatgaagcgtgtgatgcaaacttggctgcctgccagtcgtgctctgcttgagatgatgatatttcacctcccctctccttcaaaggcccagaggtaccgtgtggagaacttatacgaaggcccccttgatgacatatatgcaaatgctatcagaaactgtgaccctgatggtcctcttatgctgtacgtctccaagatgattccagcatctgac

SEQ ID NO: 446008 - DNA, 296 bp, Triticum aestivum
gacggggcttcccatgatactaattagtacaatatggtataaggatatacatgcgtcatggagatatcttattactgagtttgatcacttatgcatatttatatggagtagatgtttgtgacaatagaaacaatgtcatatgatgacccctcgtgtgcttatactatatatttatttaagcaacatagtatatatgtacattggtcggagattacaaatatgtaatgatacttattttatgtttatttttacccctctgtatctaaaaggaagtataaagaaaggtcttatatttt

SEQ ID NO: 446009 - DNA, 434 bp, Triticum aestivum
  unsure (1)..(434): unsure at all n locations
tcacgggtcgacggagaggcagatgctgctgttacgttgtactgttagctctgacgttaattaatccgttaggccgcgtaggtgtccagcaaaacacggcatcaatcgctttttaatacgctttaatcggtcgtcgtacagaacatacatatgcatgcgtggacgcccattgtgcacgtccacatcccccgaaagatgcagagttgcagacgaagagaacttgaagaagaaagtgattttgatcgactgttgttggtttgaccaagatgaacttacacctggccatggcgcagaggccggatcgcaggcctaactctcaagagctctgatgtgaggtgaaattgaactgaactcaactccattgtgctcattcatcaggccagtcagtcagagagtcngcgtcaacgtaccctagctagctgtccctagccacc

SEQ ID NO: 446010 - DNA, 412 bp, Triticum aestivum
ggggcagaagaaagtaaaagaagcattcgaacatgcatggtctggctaccgaaattatgcgctgggtcatgatgagcttatgcctttgagccgcagaggtgtagacggattaggaggtctaggtgctactgttgtggattctttagacactgcaataataatgggtgctgacgatattgtgtctgaagcatcaaaatggattgaagacaacctaatgaaaaagatcagcgagaaagggcaggttaacttatttgaaaccactatccgtgtcttgggagggcttcttagtgcgtatcacttgagtggtggagaccaagcaggaggaggtgattctgggatagcagtaacacctaacaagactaatccagatcgtcttctggcaatctcaaaggatttagcagacagattattg

SEQ ID NO: 446011 - DNA, 429 bp, Triticum aestivum
gggaatgacaacttattccctagtatttggaggtgaagccgttctacctttggaggtacaaatcacgtcattgagagtcgccacacatgaaaatttatcggaagaaaaatcagtacaattacgtctcgatgaattggatagactagaaggaaggcgacttgaagctttgcaaaatcttgaggcataccaagctaggatgtcgcgagcattcgacaaacgagtcaaaagaaggtcgttcaaacaaggagatctagtacttgcggtcatccgtcctatgaatatcacgcgacggatgaaaggaaaatttgaaccaaaatgggaaggtcccttcgtcataaaagaggtttattctagcggcgcatatagaatcatatcaccagatggggaatactcaccggcaccgataaatgagaaatccttaagcattac

SEQ ID NO: 446012 - DNA, 577 bp, Triticum aestivum
  unsure (1)..(577): unsure at all n locations
ggttttggnaagtgttncgagtttgtgccgtcngntanattatcgggncgagggcccttnntaaatttnaaatntnttntntttnttttttttgntntttgtnnttgtcnttttttnttttnnttgtttnntttttttttttttnttnttnnttntgtttttntcttttttcgtntnctttttttngngntggttttntntnnttttggttnntgttttttntgntgtgntttttttgtctgttntntttgttttnnttnctnttttttngttntctgttgtttttttttttctntttttttttttttgnnttttttttcttttttngtttgttttttttggtnttgngtgtctttntttttgtnttgttattttnnttnttgtttnttttttttgtttttgttttntttttttttnttttgtttngttttttgttntttcttntgtttntgntttttttttttttttttttgtttttttntngttttttgtttttgttttgttttgttnttttgttgttntttctngtgttttgtgtttttgtgtttctnatgtgcnnttttttttttttngtttg

SEQ ID NO: 446013 - DNA, 165 bp, Triticum aestivum
cgggcggtggttggttaaatttagtgcatgttctacttctgctctgtactgtacgtgagttaccgctccattttggttatatagagaggattttgtgtatattttcagtgtacgtactccattatcatttccgtgcattcaataaattctccacgcagcttattc

SEQ ID NO: 446014 - DNA, 412 bp, Triticum aestivum
gggaccatcaaatgcatgcatttatttgtgaacggcaccagtacgcaccacaatagatgttgtaggactcgtttgttcccatgcatctctcaccaaccatgtccctttccttcaaccaacgagcttcaaactggttgtatcctctcggttgctgcaggttacctccgacagccccttaagtatccaggaaaacagttttgtggtaagatttttgttttctgcggttacaacctttgcatttggaaatacaccatgaaactctccattacaaacaaccgtatccagtcgttcccgtggcctcatccttctccatgtaaactgatctccggtaaaccccctatcttcaactcacagtcaatcagagcatcacagaaatcttgcatcatgtgcatcggatgtggagctcgtccct

SEQ ID NO: 446015 - DNA, 443 bp, Triticum aestivum
attcaagggtcgacgggtgcgtgtgagagtgtcggattccgaaacggataatggagaaatcggatgcaagttttgaaaaacatgaagatgaaatgcacatgatgacatgtcaaagagcaacatgcaagcgaatgacatggtaatgatggtgaataactggaagacacctggcgcatcggactcggggcgtcacaactctcctccactaacaaaagatcttgtccagagatcttaggaacgagatggaagtgaaagagggtgaggtaaaacaagagctgaagagagaagaagaacaaagtcgagaacactcgagttgaaaagaggaatgatgaatatgatgagaatcaaagctcaaggattaaaatatactctgaaaccactcctgttagaacaagatataaaaggaataagaatgaaagaactgtgataacatctcggttgga

SEQ ID NO: 446016 - DNA, 186 bp, Triticum aestivum
gggggtgtagatgtgagcaaagcggcggatgaacggcgaccatggctgcgcgctgccgccgcccgagtcgattagactgaatgtgtagttcgccctgacctcggcgttcctggagaggagctcgaggtagacagagatgtagccattgcactcgggggatgagtatccatcggggtagtaacggac

SEQ ID NO: 446017 - DNA, 423 bp, Triticum aestivum
gggtctccccgaggacccaaccatctgtgttccccaaaaagaaaaaaaaaacatggtagtagtaatgtaatgctgtaatggaattacccgagatgtgtactagctgttttgtggcgcgccgcggcgtcgctgtgagcgagtgtgtacgggctgttccgtggtgtgtgtgtctgtggatgattgtgtgttgcgttgccgtgggactggtgcaagtgtcgtgtgatgtggtatgcgttgtgtgtgggtgggtgctgtatatttgcgtacctctatgtgtactgaccgtgatgcgttgtttgtccgttttatctctctatatattgtccgttgtttgtccgttcggcatcccagctggtgcgtcccagccgagagatttggcacgcggagaggaggaagatccgcgatggacatggggatgcacga

SEQ ID NO: 446018 - DNA, 96 bp, Triticum aestivum
cacccgacactgagtcgtattaggtatactatatatgtttgccaaataagctgtgcacctttggaacagtgaagtaattattttgtgagctttgcg

SEQ ID NO: 446019 - DNA, 351 bp, Triticum aestivum
  unsure (1)..(351): unsure at all n locations
aggatggaggagcanaggatttcattctgaattatttttacatcagttattgattctgttaatacatattctacctcacatgacctcgtcagaaacaagtttgttttacgtatgccatgtactcaaaaaagttccccacagaaaaaagttccaaaatcccgggttcgccttttctgacaggcaattgagcatccttcactgaagttgtgtgtgtgctcaatcagtcttcagccgtgggacttcactgaacctggttcacagagctgttcatgtgaagactgccaacgtcgtgtgttcggttcctgggtgtgctgcttctaccgaatacatccacgacatgaatttgttcac

SEQ ID NO: 446020 - DNA, 447 bp, Triticum aestivum
  unsure (1)..(447): unsure at all n locations
attcaagggtcgacgggaaaacaaaatacggacatagaagcatcatgttgattattataatagcaacaaaattaaaaataaaacttttatcataggacttatatcatatacttctcatgaataattaatagttcatcacacaattgaagtataaagcaaaaactctattaaaaaccaacaaactatgttctcagtcaactttgcaactacaattcatcatgttttcaggaagggtcgcatatcggagcctttaggcaagtccacatactcaaccatcatatagtcttctatgattgctaacactcaccgcgtacacatgagcaaaacatttcaaccggacacatagaaagattggggcttatagtttcgcctcccagcgtattcacctcaagggtgatgtcaacanttattattcatgctatctatattcaactggacatatgtgcc

SEQ ID NO: 446021 - DNA, 404 bp, Triticum aestivum
gggttctgcgaaaggtaaactgcatctgcatctcttagatggagttcacagatttgctacctttaggttttcttcccgcaaatgaatctttctgaattaatagttaccagaacggtatttgctacaattgcttccttcttaagctgatcaggtgtttgtttttctccagggagatgtgataacaagtttcgacggtgtctcggtaggatgtgaaggaacagtaccatttcggtccactgagcggattgctttccgctacctcacaagtcaaaagtaagtgcttcctcacaagtaccatcattttcttaatcatcttgaagtgcttttcctaacctttttaatttatttatgttctgttctagggcagaacattttttgtcaccagtttctaatggtccggaaat

SEQ ID NO: 446022 - DNA, 478 bp, Triticum aestivum
  unsure (1)..(478): unsure at all n locations
ggnnggnngnnnntttaattggncgcgggtcagtacaggtcacgagaantcccgggncgcgagcncactaatcggcggccgctctagaggatccaagcttacgtacgcgtgcatgcgagtcatagctcttctatagtgtcacctaaattcaattcactggccgtcgttttacaacgtgtgactgggaaaaccctggcgttacccaacttaatcgccttgcagcacatccccctttcccagctggcgtaatagcgaagaggcccgcaccgatcgcccttcccaacagttgcgcagctgaatggcgaatgggacgcgccctgtagcggcgcattaagcgcggcgggtgtggtggttcgcgcagcgtgaccgctacacttgccagcgccctagcgcccgctcctttcgctttcttccttcctttctcgccacgttcgccggctttccccgtcaagctctaaatcgggggntcccctaaggg

SEQ ID NO: 446023 - DNA, 412 bp, Triticum aestivum
  unsure (1)..(412): unsure at all n locations
attcaagggtcgacggggtctgcaaactttgaatacttctgtaactccaaaaattctgataaattacgaaaacctgggaaatttgtatatcaaacttttgttaaaaaattcatatcaaaagcacgtttctgagatttttttaaaattgttttaccgagcgcaaaagtttttgtttttcagcaagatcaaatcaactatcaccgtaagccatcccaacggtcttacttggttcaaacacaaattaaaacaccaaaacacaattactactgttggcaatctangaacngtggtcncaacacctgcctgcctgcggcccgcggcgtggctcctccggcggccctgtacgacccatcttcaccagcaaacattcaagaccctcgcgaggggccaagcctcacgaggcaaacgtcgc

SEQ ID NO: 446024 - DNA, 437 bp, Triticum aestivum
ctcccgggccgacgggccactgaagatgaagacagcggaggcggatatcgccgggttcctgtcggagcaggacaatagcggatacttccggtacgtcgcgccgtgcaccttctacggctcgcccctcccaaaagaggaaaagggacaggagaagaagaagaagaagccgcctcagttcatgctggtgttcatgtgcgtcccggtgtctccagggaaaagcagggtgatctgggcgttcccgaggaacgtcggcgtctggctcgacaaggtcataccgcggtggtactaccacatcggccagaacgccatcctggactcagacatctacctcctccacatcgaggagcgcaacttcgccgcggcgggcatcgaaaactggcagaaagccgtgtaggtgcccacgtcgtcggacaccatggtgattgccttcaggaact

SEQ ID NO: 446025 - DNA, 237 bp, Triticum aestivum
agggaaccctatagtgatgtcctatgaggtataaacatagagaagttggaatacagtaggttgaacaccaatataaataaagaatgagttcattacagtaccttaaagtggtgggttatgttcttactcaaacggagcttacgaaatattctgttcaagttttgttgtgtgtagttttcatgtcatttgggtagagaattgatgtaattcattttaaagaatggattgagcctagcc

SEQ ID NO: 446026 - DNA, 285 bp, Triticum aestivum
actcgcgggccgacgggcatccataggatgaggcggagaaagggaggggagagccatcatgtgcaggacacgagcacgtttcttctaggtattcccctgtcctttattcgaagcaagtcaaattaggtaataataacactgcaaatcttgaaaaaaaaaaaaaaaaaaaaaaaaaaaaaaaaaaaaaaaaacgtaaataaaaaaaaataaaaaaaaaaaaattaaaaaaaaaaaaaaaaacaatgaaaaaaaaaaaaaataaaaagagatgtcacgatagctacc

SEQ ID NO: 446027 - DNA, 416 bp, Triticum aestivum
gggataagtagctcataatcaagaaaatatgtataatttgaggatcacgagttcatgacatggtgcttaggacatgggtgcgattcagagtaaattgatctgactggcaatgttttcttttcataaaacttttgatctattcataacatcatggcagcataaagaacatcaaaaataataaaacatagtaagtaataacaattacattgagcatttcaatggaaaataaaattgttgccaatttagtaaggaatattaatgcccatgacaacgcctgggaaaaaatctagttcctatgaacaaagatagaacttggggtacgattcgagtaaattgatctaattgacaatattttcttatggaaaaagtttggttttattcatagcatcattctgataatctaaagcacattaaaa

SEQ ID NO: 446028 - DNA, 380 bp, Triticum aestivum
ccgggtcgacgggatggggaatggggcagcagcgggcggcgacggcggtcgcggtaacgctagccgccactcctagagggaggagaaaacgagagaggcgaatgaggagacgaggacaggaataggatctatggttcgatgcattttcacctcttttgtctattcctatacgacacagtaaaaatccaggtggcatagcccatcggccgctctttacgcgtgccttattgttatggatttttatctcatatgtaaagttatatgctacactccaatgagacaacaattttatggtctttcaggtattatttaacatgtgacttggatcagtcttatttcatactatcagtttacgggctacagaatgaagcaattaaaga

SEQ ID NO: 446029 - DNA, 426 bp, Triticum aestivum
  unsure (1)..(426): unsure at all n locations
ggggagttcagcgacatactggccgccgtggagcacgaccggcggaaccaggagggcgcgttccggcggatcctgcggcgggagtaccggccgtacctggtgatggccgtggcgttccccgtgttcctgaacctcaccggcgtgaccgtgtcggccttcttctcgccgatactcttccggaccatagggttcggtagcgacgccgcgctgatgggcgccatcatcctcggcctgatgaacatcggcggcatcatcgcctcgggcgtcgccatggaccgctacggccggaagctgctcttcgcgatctgcggcgcgctcatgttcacctgccaggtggcaatggcgagcatcgcggggacgcacctgnggcacgggagcaagatgcccaaggggtacgcngtggcggtgctggtgctgacgtgcgtc

SEQ ID NO: 446030 - DNA, 248 bp, Triticum aestivum
acgtggtgcaccagtggcggccaccaggaaggcgccttccggcagatcctgcggcgggagtaccggccatgcctgttgatggccatggcgtggggggtgttcctgagaggcatcgacgtgacgcgtgtcggccttcttctcaccgatactcttccggaccataaggttcggtagccactccgccctgacgggcaccatcatcctccgcctgatccaacatccgaggtagcaactcctccggcgtctcc

SEQ ID NO: 446031 - DNA, 396 bp, Triticum aestivum
aggcttttgttttcgttctggagcttttagccccatgaaatggccaattgcacgtgccactagcatcaacggtgagtcgtgtctggcatcactttctctattgctacttccatcgccctgcactgatctgcaaatgcagctcaacattcattttattgaactagtatatatattgaaaaagagacgacatcacaaagagtgtgctaacaagaatggaaaatcaatacactagtctgtcagtgagtgattgtgtgatggcctgtgctcacttatgtaccagccgttgtcatttgatcggagtaactatatcattgtgggacacttgcaacggtaggaacgtgtgttactatttttgggaccccctgtgaacatttgaacaaaaagagcaaatgtttc

SEQ ID NO: 446032 - DNA, 121 bp, Triticum aestivum
  unsure (1)..(121): unsure at all n locations
atctangccaatnacgaggcgtcctgcagctaatagctacagcgatcgtcgatcgtctcaggcatcaccatccccattgcgacagcgaacagggcacaaccataggcgcgggagcactaat

SEQ ID NO: 446033 - DNA, 400 bp, Triticum aestivum
tcgcgggtcgacgggacggtgtagattgtgtcggtcaagtctgaagactcgctggacatggtgctgctgccgggcaaggaagcattgctcatgcccgaggaatgtagcaagacatcttccagcgccggctctgggcgtgggatgacgtcctgggggacctcccaccgctgatgatcggcgtcggtgatgcgcacgtggagctggttgtccgtctctaggctgcccccggtcatatcaaaattaatacaatgagcatacgagttgtgtgcattatgctggttgtaatggggagtatcatatactagtatcatgcatatgatactagtgtgtgatactaccttcgcaatgcatagtatcataagttagtatttttgactgccttagtaattgccatgcatga

SEQ ID NO: 446034 - DNA, 424 bp, Triticum aestivum
  unsure (1)..(424): unsure at all n locations
ggggcaccctcttggtgaagttgttcttgttggggaaggacttggccttgtctttgcgaatgagctttccaccattgtcttccctcttctcataggagaaatccaccataatgtggctcacattgccacaattatagcatgtactcacacgttgcttgcccttggagccacttgagttgttcttggagaagttgggccttgagtttctcttgttgccccaaaattgccttcatacaagagccatgtgctcatggtaagcatattttgtgtcttcggggcaactctcttcctcctcctcctcctcttcttcttcttcttcttcttcttcttcttcttccaggatagccttggccttcaaagctaggttgggtgaggatttttcgaccgttggacatgagctagagcgttgtcngcggtcttgttc

SEQ ID NO: 446035 - DNA, 411 bp, Triticum aestivum
ggtcgatctgtaacgacgaggtggaggttgtttttttgtttttggtttggttttgtgaatcggtcgtgaagttgaagttgacgaagaagacgaagaccctgccggagtgcggcggtggacggacgggcgggcggctagaggcgggagccgccattgttgttaattaaaagattagtagccaagtgaaatactactaggatcatccatgatattgcttttttttcctttcctttccttcctgttaattactccatgtttttcccctagtaattataagacttgattcattcttgatctgagcttgtccatggcaattggtcctccatgtttgtagtatgcttgtacccatccctctcctctctgcacacatttttcttgttctctgaagaagaagaagaagaagaagaagaa

SEQ ID NO: 446036 - DNA, 80 bp, Triticum aestivum
agaggcggcggcggcggcgagtcagggcagggccagcgagcagcaatggggttcgtctccgtcgtcgtggagggtccgct

SEQ ID NO: 446037 - DNA, 429 bp, Triticum aestivum
  unsure (1)..(429): unsure at all n locations
ggggctctctttggtgtaccttgctgatctggttccgtcgccttttgccgctctttttgactctaatcgacttgtgttctctctctcgcatacctcgcgtgggggctaggcaggtgccctcgcaagtgtttttctttctccctgccttctgccaggtttttcgcgaggcccctcgttcgagcccacaagttggtgcatctctcctaatccgtgcccctccggtaccgcgatatgaagcgttgggtcaaggcttgggcgaacgataagtttcccggtgaagtttcctagcgagcttcctaacgaattttttctgcagttcctgagcgaccactaaggtcaagacgagcacgaggaaacaagtgcccagtgaagaagaagctaccccgaacgcgcaaagctaagttacctccacacanaataacgacacag

SEQ ID NO: 446038 - DNA, 219 bp, Triticum aestivum
gataaattccagggctatctttctcgcgaacgcgagaggctgaggcagcacgacagagccatgatgggcaagaactactgcagaccggggctcactttcgacgtgtcaccatgtgaactatacatggaacgaagtatctctatgagacatatcatacagattatcgctgccttccaatgccaccttttgcttctgccacccatcacatatcactgaccc

SEQ ID NO: 446039 - DNA, 198 bp, Triticum aestivum
ccgggtcgacggggagagaatcaaaactggagggtaacctggtcatttcgctgctttttcacctggtcggaaaaaaccccagcgtcatgtattcggaacggagggagtaatacgcaccatcacgcgtactactattcgtacaacaaattacgtcgaataaacaacaaattgacttgcctgggtgccaagttgttcttg

SEQ ID NO: 446040 - DNA, 390 bp, Triticum aestivum
ggggaggatatgtggtcttccagacataggaggtcatctcatgaaaataccgctggtggttttccaagttttgctttgtatgcggttggagggtacaccacctagcgctcgctacattccaatatttgctcttttctccccactatttattctacaaggagctggtgtccttttctcgataggaagattggtggagaaagttgttttgctattgcgtaatggaccagttagtccgaattaccttacagtatcatcaaaagtccgtgactgtttcgcttttcttcatcacgggtcaaggcttcttggttggtggtctattgatgaagggagcaaggaagagcaagctcggctgttttatactgaatctaacgggtacaatacattctctgg

SEQ ID NO: 446041 - DNA, 217 bp, Triticum aestivum
tcaacggttacggctgcaaaaaaacaacaaaatcaccggacggcgcccatatttgctacgcaactgagaacgtcagctaagctcaaagtgttggggcatttggaccacctgagtatgcgcttgtcccattctgacttcagtgggcgctagattaattagccgctctccatgattgaaacttacattgcatctgtccgacttccttacccgccgctct

SEQ ID NO: 446042 - DNA, 250 bp, Triticum aestivum
aaaccgacggggttagaggttgtaagtatgcattgttgtatcgcgacctgaatgacataggctaaataatgctcttgttcaatcgtcacaacgggggaaggggagagtgcaggcaaagaagaaacaaaaagggcggacgcccaacagggtgaattgtctaagcgtggatgcaatgagagttcagccatcgtcaatcttgacttgtaacttctagtccatcgaaatcgctatcaaagcttcatgactggga

SEQ ID NO: 446043 - DNA, 443 bp, Triticum aestivum
aattctagggtcgacgggccattcttcagtacaaattccatctctgttgtagcatgttttataactgaatcaccattcttctatataaggcatgcaaggggaagacgactatgttagaatctgaagggttacaaatcaggtctttgcaaaagatccaaactccaggagataataaaccaactccatttttcatagatactgctccagcacagagaaacccaactcccactgataataagcagatttcaatggccaaagaactagtccgctccagtccagcaaaagaatgtcaactccattctaagaagcgtgtgcgtatcctcgcatcatgaaattttataccattcttatcatattttctacatgtttcttacccgtctctcttttagaaaataaggttaaacgatacaagacttcctccattgggatcgtattcgaggaaa

SEQ ID NO: 446044 - DNA, 422 bp, Triticum aestivum
tagcgatatactgggatagtttcttctcagcttgtggatctgtttttttgcaactcaggttatgttactgcattgcaaattagtcgagataagcttgtgtaatcctacatttttctccttgggttcatgttctcggcagaatgatcaggaaagctgtgcacgttgtggtgcatttacaaagacagtgagatggacatttgttttttgtttagctcatgcattgcttgcatatcttttttggtgattgatctttatctgtggtttcgatgctatgagtgttcattcacattagctctgtttcttttaacatcactagcaaaagggcccgtgcgttgcaccaggagaacgaaatcacatgcccctaacccaataagaatcaatcttagaaatagtcatgtaataagagtcaatcggttacaccc

SEQ ID NO: 446045 - DNA, 259 bp, Triticum aestivum
aaattggcttttgacttgcggtcttggatggtttgtcagaatattggacagtgaaggtattgggatgtaccagatggtctcccttggaatgggccagctgaaagagatgggccttactgccgtaggaccccggagaaaattgatacaagctattgacattatcagcaagcccggtcagttcgagatcttttcttgatctcaagtgtgtctccgttcgtttgttacatgtccttgttgctagtcagttcaatcactgcag

SEQ ID NO: 446046 - DNA, 165 bp, Triticum aestivum
acaggatggcttattggtgtgggaacaactatggatgcaatttagactcgtgctgataagctggttgtccaggttctacgacgagggcatggggctctcggagttattcgtgtaacttgatatgcacttcttcctctctcataatgctgttgtgtcttatatcat

SEQ ID NO: 446047 - DNA, 385 bp, Triticum aestivum
attcccgggccgacgtcatgccgcaagaggtcgagagcgtctcccgggagccggaacaggaggagacatccgcggccactttgagagacgatgatggggaatcggacggaaaaaaaggcactgatgtgaaggaggccgcaataagggcagaggaaaagggaggggaggataagctgaccgtcgaggaagagaagaaggacggcgaagaacaagaaccagccgtcgctccggtcgagtcatcgtctagttgaaattgagatgtgagatcgtgcatgccaactcggatgtattggtgcgtgtatgaaccactgaatgtacagtttgctctcttcctttttctttttcagccaaaaggatccttccccaatgtaaaaagctttgcgtt

SEQ ID NO: 446048 - DNA, 390 bp, Triticum aestivum
gggtcgacggggaggaatagccatccagggtcaagcccctggcaaaatcgtaagtgtccggatacccaaataacttatggcgctcctctattattcggtattttctgacgccgaattcaatcatgcagtctgcccaaggctcagcttggcgattcgtcgagcggctccttggattcgtcggatgtgaatagtgcttcacttccgacggcttcctccctgctccctgcggacgacgccgaggtggagtcccaaaagggactaaaccaggaggaggttgttctggaggtgccgcaaggcatcctcctggactccaggcccaaagggggtaaagccccagtgggatctaagtccggccctgggccggacactgctacagaaccatcaacggtt

SEQ ID NO: 446049 - DNA, 374 bp, Triticum aestivum
ggggctgagcagaatgaactccaatttgctgtgccaggagggcttattggtgtgggaacaaccatggatccaactttgactcgtgctgacaggctggttggccaggttctaggagaaatcggggcgctccctgacgtattcgtggagcttgagatcaacttcttccttctccgaaggctgctgggtgtcagaacaaagggtacagagaaggcaggtaaggtctccaagctcaccaagggggagatcctgatgcttaacatcggatccatgtccaccggcgcccgtgtggtcgccgtgaagaatgatctcgccaagctccagctcaccgcgcccgtctgcacaagcaaaggcgagaaggtcgcgttgagccgccg

SEQ ID NO: 446050 - DNA, 211 bp, Triticum aestivum
gggtacgccgacctctacatcgtcaagtggacctcgctcatgatcccgcccatcgtcatcatgatggtcaacctcatcgccatcgccgtcggcttcagccgcaccatctacagcgagatcccgcagtggagcaagctcctgggcggcgtcttcttcagcttctgggtgctggctcacctgtacccgttcgccaagggcctcatggggcgcc

SEQ ID NO: 446051 - DNA, 182 bp, Triticum aestivum
acgctcatcatccggggcatcggcatcatgatggtcagcctcaacggtatcgccgtcggattcagtcgcatgatctatagccagagtgccgcaatggggggagctcctgggcagagtcttcttcaccttctgggtgctagctcacctgtatgcgttcgccaagggcctcatcgggcaccgct

SEQ ID NO: 446052 - DNA, 380 bp, Triticum aestivum
gggaatgctgcagaaggatagagatatcaatgaagacgtgagccatcgaatcaaagccggatggatgaagtggtgccaagcttttggcgttctctatcacaagagagtgccacaaaagctaaaaggcaggttctataggatggccattcgacccgtaatgctgtatggcgctgaatgttggccgactaaaaggcaacattgttcataagttagggatagcggagatgcgcatgttgaggtggatgtgtgaccacacaggaaaggatcaggtccagaatgatgatatacgtgacagagtttgggtagcactgattgaagagaggcttgtctaacatcgtctgagatggttttgggcatattcagcgcagaccccaaaagct

SEQ ID NO: 446053 - DNA, 430 bp, Triticum aestivum
gggatcctagctgaggaaatccacaagacccccctggcaagcgccatgccggggacgactacaacgccatggcaagacccttgccgggcccccggcaagacccttgccgaaggcatcagcggggccactgccaggcccgcgccagccaaggctccgccaccgttcgcatacagctaccagcccaaccagctgggcaggcacctgcgtggcaacatgcggcttacaagccaactcaccaagcacctacgtggtggcatgcagatcttcgtgaaggccctgccatcgcgccacctcagcagcctgcctgcctacatggcactgcacacatcgctggcctgggcgcgtgtcgaagcgaggcggagcggcgacggatgggacgggcctcgttcccatccccgataaagctaatggacacctaagtagcgcattt

SEQ ID NO: 446054 - DNA, 384 bp, Triticum aestivum
acatgatcaccggcttcggcttctacgagccctactggctcatcgacttcgccaacgtgtgcatcgtggtgcacctcgtcggcgcctaccaggtgtactgccagcccatctacgccgccgtggagagctgggcggcggggcggtggccaaactcggagttcgtcgtccggcagtaccaccccttctcgggcaagttcagcctcaacatgttccggctggtgtggaggacggcgttcgtgatcgtgagcacggtgctggccatctcgctgccattcttcaacgacatcctcggcctgctcggcgcgctcggcttctggccgctcaccgtctacttccccgtggagatgtacatctcgcagagcaagatgaagaagtactccagga

SEQ ID NO: 446055 - DNA, 445 bp, Triticum aestivum
attccaaggtcgacgggcaagttcaggggctatgcgctctttgtgtacaagacacctgagggggcgcaggcctcactagtggactcaactaaggtaatcgatgggcaacagctcttgtgcaagctagccatcgaggggaagaaggggaagcagcaaccacaacaatctgggcctgccgggcaacagcaaccatagatgctccagggtggcccgccggacatgacgggttctgggcttgggctaggtggagcgcagatgggtgggcaatatggtggccctgggaatggtatgccatcgttcggcgcatttggtggtcccaacccatatgcgaacatgccatcgtccatgagtggcggtggtggagctggtttgggctcaatgggaaatcagatgcattcccggaatgggttctgctggggctggtgcatttggcaccggcgggctg

SEQ ID NO: 446056 - DNA, 430 bp, Triticum aestivum
  unsure (1)..(430): unsure at all n locations
ggggaatttcatttgtttgggagcgggattttacttcagagaagggcgctgctttttctttgagaggagaaagagaaagagaagggcgctgctatcgcgacatgggccgacccagccgcgcgggatgcgatattaaccatgtacacaaaatgttacctcccaaaaaaaatgtacacaaaatgttaaaattgaccatgtacacaaaaaatgttgattctcaaaaaaaaaaagttaagaatgtattataaaaatatattacatatataccaaaatttacaatgtgtataaaaaaagtaaacataaaaaactaagttttaaaaatcatttatttcagaaatatttagcatttgtataaaaatgattctaatgtatatgaaaagtgttgaatactctctccatccggaattgcnttgtccagaaatggataata

SEQ ID NO: 446057 - DNA, 368 bp, Triticum aestivum
tcgacgggctatgggaagagttcaccttttgaggatttgacgacagaaaatctaaggttcttgtcgtcgaagcaggctttatctgatttggctgttttccgccagtattatcaggaaacattaaatgccaagtataatcgctcaggagtagacaattcttggtttgtgtttggagggtcgtactctggagctctcagtgcttggttcagattgaaatttcctcacttaacatgtggaagtcttgcaagttcaggggttgttcttgctgtttacaactttactgacttcgacaaacagattggggagtcagctggtccagaatgcaaagaagcacttcaagaagtaacaaggcttgttgatggacaact

SEQ ID NO: 446058 - DNA, 250 bp, Triticum aestivum
gggatggtcacggtctacgagggcggcggagggacagggagcatggagctggaggtgtgcctcgcccctgatgcgctcgccaggctcgtcgccgacgaagagctgatggccgcggtggtaggagggccgacgtactgatccgcgatggtaggtgcatggtgcaccaatgcgtcgaaggagtttgccattcagaatttcagacatacaatggaagtctactgtattatttttcctaaaaaagagtgtattg

SEQ ID NO: 446059 - DNA, 482 bp, Triticum aestivum
  unsure (1)..(482): unsure at all n locations
ggnnnnnnggnancgttgnanngtcttngcggtcngnaccggtcagagaattcccgggngacgagctcactaatcggcggccgctctagaggatccaagcttacgtacgcgtgcatgcacgtcatagctcttctatagtgtcacctaaattcaattcactggccgtcgttttacaactcgtgactgggaaaaccctggcgttacccaacttaatcgccttgcagcacatcccccttcgccagctggcgtaatagcgaagaggcccgcaccgatcgcccttcccaacagttgcgcacctgaatggcgaatgggacgcgccctgtagcggcgcattaagcgcggcgggtgtggtggtacgcgcagcgtgaccgctacacttgccagcgccctagcgcccgctcctttcgctttctcccttcctttctcgccacgttcgccgggtttccccgtcaagctctaaatcgggggctcctttagggttc

SEQ ID NO: 446060 - DNA, 420 bp, Triticum aestivum
gtcatggactcgatgggcacgcgcaacgtgaagctccaggtccgggatctcccgtgcctcatcagcagctcgggcagcagcagctgcttgcagctggaaggacacaattcataacacggtgaggaagtttaaagaaggatcatttgttgccctcaactgtgtcatactgcggtaggtgtagtctacgctgtgtagcaacagggtttggtagtctgtactgtacgcgtgtagcgtgttatgtagcggcaatggcgaacaggaagtgtagtgatcgtcgtgcaggcatgacggtgcaggcacgatgtcgtgcctgtgacgaaacggtgtcatggaggtccctgagaggatgtcatgacaataatctgttgtcatgaaggtctgcggtgcctggctgcaaatgtatcgaaaactcgaactcct

SEQ ID NO: 446061 - DNA, 423 bp, Triticum aestivum
gggggcgggagctttgtaccaccacgctggtagaccttcttacccccctcaaccaacaagccctcgctatcactatcatcagaaaagctgtcctcgccaccatcagcaaggtcactagcctctagagcccattgggatgaagactttgggaccggagtctcctggggcaaaggctcggcggcccgagcctcgtcggtccgaggctcgtggaccggagtccgagacaggtccatgtcagacgggtccacctcagacggagcagtcctgtggtcgggagaatcatctgggggtggcggcaaggaaggtgcaccagccttcctacctctcccgctgccatgtccacctctagcacccctcttcgtcttccctcgacctttcctagccgaacaagaaacgcccaacggtggtgtctgcatactgtct

SEQ ID NO: 446062 - DNA, 413 bp, Triticum aestivum
gcccgggccgacgggcggggctgtcttgaagagttgtatgcagcttcgccatacacctccttcatcaacaacgacatcctggacatctgtgcgagacagaaaaaattaagacttgaaaatacgttaaagcacaccacgcacgtggaatgaaaaaaaggaaaaaaaagtgaaacacagaccacatacaatttcgacacgttctccatggagtcggttccttgaaaggttacgccctgtatatctccacgagtcatggatatccagggactcacgatacttgttcatagtgtacagtgtgaaatgattccgattccaatatggtagcatgatctatcaacatgtgaattagacgacaaagaagagcataagaagttagctacaagatgtctcagcagtttagaagacaacactac

SEQ ID NO: 446063 - DNA, 376 bp, Triticum aestivum
ggggcactgcatggagtagggtccaagtctcctggatcacgtttggttggaaaatcacgatcccgaaggtttcattccgcttggactccgtttgatattctgcaaaaaatagcaattctgggctgggcctccggttaatcggttagtcccaaaagtaatataaaagtggaaaataaagcctaatatagtccaaaacagtaggtaaagtagcatggagcaatcaaaaattatagatacgttggagacgtatcaggcatccccaagcttaattcctgctcgtcctcgagtaggtaaatgataaaaaagaatttttgatgcagagtgatactttggcataatttgaatgtaaatcttcttaattgtgatatgaatattt

SEQ ID NO: 446064 - DNA, 496 bp, Triticum aestivum
  unsure (1)..(496): unsure at all n locations
ggnnggaanttctacttggacggcccggtcacnacannacgggtccggcngctcactaacggaggccgctctagaggatccaagcttacgtacgcgtgcatgcgacgtcatagctctttatagtgtcacctaaattcaattcactggccgtcgttttacaacgtcgtgactgggaaaccctggcgttacccaacttaatcgccttgcagcacatccccctttcgccagctggcgtatagcgaagaggcccgcaccgatcgcccttcccaacagttgcgcagcctgaatggcgaatggacgcgccctgtagcggcgcattaagcgcggcgggtgtggtggttacgcgcagcgtgacgctacacttgccagcgccctagcgcccgctcctttcgctttcttcccttcctttctcgcacgttcgccggctttccccgtcaaagctctaaaatccgggggncccctttaagggttcnatttaagngctttanggcacccg

SEQ ID NO: 446065 - DNA, 151 bp, Triticum aestivum
atatgccttcatcctacgtcataactcttctacaggttcgggtagattcatctcacaggacggtgtcttacaccatgaccactgggaaaattctgaggatactcaggttcatgtccttgtagaccatggacgtatcgacacccgtgttttt

SEQ ID NO: 446066 - DNA, 399 bp, Triticum aestivum
attcgcgggtcgacactgttatggaaaaatgtggtactagggtggtggcttgggatcatgagggtctcttccaagcagcaaggtgtgctaagtatgatggtattacagatccacttaacatagaaatcctagcctgccgagatggaatgcttctagcgaaagatttcttagggctaccaatctgttatcactgagacagattgttctgatgccaagtacctgtgggaaatgaggaaggaaggacggtcactaggtgtgcgtattcttaaggaaatgcaagacaggttatctaatttttagggttttgagcttcggtatattagccgtatttgaaataatgtagcacattgttgtgctaaagaagctctaggcataggtccagttcttttggccgattct

SEQ ID NO: 446067 - DNA, 486 bp, Triticum aestivum
  unsure (1)..(486): unsure at all n locations
gggnngnaattctacgcnggncggtgcccnnnaaanncaaaagggccaggccgacggggatacaaacactctttacttgctggagctgggatatttctagttaaaaaaaaaaaaaaaaaaaaaaaaaaaaagcggccgctctagaggatccaagcttacgtacgcgtgcatgcgacgcatagctcttctatagtgtcacctaaattcaattcactggccgtcgttttacaacgtcggactgggaaaaccctggcgttacccaacttaatcgccttgcagcacatccccctttcgcagctggcgtaatagcgaagaggcccgcaccgatcgcccttcccaacagttgcgcagcctaatggcgaatgggacgcgccctgtagcggcgcattaagcgcggcgggtgtggtggttaccgcagcgtgaccgctacacttgccaacgccctaacgcccgctccnttcgctttccttccttcctttccggcaa

SEQ ID NO: 446068 - DNA, 381 bp, Triticum aestivum
catacaaggaaaacaaattggggctatttcaagcatgtcgaaatacaacgtgctctcagatgaagccttttagcctacccgaaccccctccattaaacatgatgtatttttgaacatctttgaaatgaaaccaacttttgaaagtatgtgggaacgcccatggtaagcatcgatgtcaagtttggatgatctccgacaccgtatgcaagttgcgacacacccgaccatttatcggtattttttgattgaaaaaactccagaaaatgaaaaacttgtcaagaacccaagaaagtaggcatggtgccctgagttgatcatgcaataccatgaaaaagaattagggtcatttgaggaatgtcagaaaaaaaagtgctctcaaac

SEQ ID NO: 446069 - DNA, 478 bp, Triticum aestivum
  unsure (1)..(478): unsure at all n locations
gggggangttctctgccggacggnacaagtcagnaantcccgggncgacgagctcactatcggcggncgctctagaggatccaagcttacgtacgcgtgcatgcgacgtcatagctctctatagtgtcacctaaattcaattcactggccgtcgttttacaacgtcgtgactgggaaaccctggcgttacccaacttaatcgccttgcagcacatccccctttcgccagctggcgtatagcgaagaggcccgcaccgatcgcccttcccaacagttgcgcagcctgaatggcgaagggacgcgccctgtagcggcgcattaagcgcggcgggtgtggtggttacgcgcagcgtgccgctacacttgccagcgccctagcgcccgctcctttcgctttcttcccttcctttctcccacgttcgccggctttccccgtcaagctctaaatcgggggctccctttaaggttccgattaant

SEQ ID NO: 446070 - DNA, 237 bp, Triticum aestivum
gacgggaagtattaaaaataataagcaaatatttaaaaaatgttgaaataagtattaaaatgttgaagaagtatttaaaatatgttgaaaatgtatttgaagaatgttgaataagtattaaaatcttaaacaagtatttagaaaatattgaataagcattcggacaatattgaacgtgtgtacaaaatgttgatcacttacaaaaaatgcttttaacatatacgaaaacgtagagtg

SEQ ID NO: 446071 - DNA, 481 bp, Triticum aestivum
  unsure (1)..(481): unsure at all n locations
ggggaggtctctctgnccgttcggtacaagtcnctnaattcccgggncgacgggcggcagncaaaaaaaaaaaaaaaaaaaaaaaaaaaagcggccgctctagaggatccaagcttactacgcgtgcatgcgacgtcatagctcttctatantgtcacctaaattcaattcactggcgtcgttttacaacgtcgtgactgggaaaaccctggcgttacccaacttaatcgccttgcgcacatccccctttcgccagctggcgtaatagcgaagaggcccgcaccgatcgcccttccaacagttgcgcagcctgaatggcgaatgggacgcnccctgtatcggcgcattaagcgcgcgggtgtggtggttacgcgcagcgtgaccgctacacttgccagcgccctagcgcccgccctttcgctttcttcccttcctttctcgccacnttcgccggctttccccgtnaagcncnanccggggg

SEQ ID NO: 446072 - DNA, 411 bp, Triticum aestivum
ggtcgacgggccatacaaagtcatcaagaactggaactacaccggcctcgtcgatgccatccacaacggcgagggcaactgctggaccgccaaggtgacatgcgaggaggagctgatggcggccattgcgacggcgaccgaggagaagaaggactgcctgtgcttcatcgaggtggtggcgcacaaggacgacaccagcaaggagctcctcgagtggggatccagggtctctgccgccaactctaggccacccaacccgcagtagacattatactagatctcgattttgatgatttgagcgaggcattttcgatttactagaatccagcgtacgtttgattactactcccttcgttcctaaatacggatgtatgtagacatgtttctagacattttgaatgactactacat

SEQ ID NO: 446073 - DNA, 414 bp, Triticum aestivum
gcatcctaatgactcaccgacaatctgtaacctgtattcatctattgcgtgatgcattctattggatacaagtcatggtgttctgcagtctgcatttcttcacttagtctggatttcgagagctgttgcatgcatgtgtcctcgtcagtaggctcatcttttacagtctgtgggctgtgaactggtaactaggaggttcaatgtcagtcaattttattgacactgctatttaatttttgagagggatatcattgttcagcatgaattttgctgtagtcgcacttgtatttcctagagcatgtaacagtcgtcacggccgcagatattgaaatcgatgaagctacattctatgtaaatacatatatatatatatatatttttcccgtaaaaaaaatacccttgaaggaaaattta

SEQ ID NO: 446074 - DNA, 302 bp, Triticum aestivum
  unsure (1)..(302): unsure at all n locations
tngtcganaaagnatgttggtctangtgttgtgtgtnttngttttatggggtgngcgntttttgggnnatgntattggtgttgngggtgntgcngttgantctgtttgttcgaggtattgggtgtgtgntgtattgntgacntttgggtggtgggtggcntcttcngtttatggttggtgaggnntgngtggtgttnttgtgtgagntgtttgggtgtttatgggtggttttggnttnggctnttgntactggttgntnnngggntttnngttggtntnggncntgaggntttnngtttttt

SEQ ID NO: 446075 - DNA, 375 bp, Triticum aestivum
ggggtgccaaatagaaccgttgggaagacttggggaaagtctttttgatcctgctgtaaaaaacagaaactttagtgctcgcgagaattgatgccatttttttattggagagttctatttacttaattctttttgcatatgattaatagataaattcctcgcgtccagaaatttattttagaatttttggagttccataagtattataaacctacatattactacagactgttctgtttttgacagatactgtttttcgtgtgttgtttgcttattttgatgaatctatcactagtaacagagtttataaatcatagagaagttggaatacagtaggtttaacaccaatataaataaagaatgagttcattacag

SEQ ID NO: 446076 - DNA, 407 bp, Triticum aestivum
acgggattagctagacagtgtcgtggaacatgtgcctcatgtcctatggggatttgcgcgaatgtttcagacttaagcacacgtgaagtttgctcaaatactcgtagtagaaatctgttgggtgaaacaactgatggtggtttattagtaatatttcagcacgattctggccctgtagggtcacattcttttgaatctgcacgtcacttgtttattgttactactgctggataggctgttgccagcctgcttcgtcaaccgaaggatcggcataatggcagtcttctctttgatatccagtggagactagttcatagtgatttccgatttattttggagatttcccctgaaggtaacatggggtttgagagtgcacatttcaatcgaagccatgaaatgactcaatt

SEQ ID NO: 446077 - DNA, 407 bp, Triticum aestivum
  unsure (1)..(407): unsure at all n locations
ggggaagacgtggatgatgacgacgatgatgcagacgaagagtatgaggaggaggatgatttgggagaggagatcgatgaggagggtgatgaagatgacactgttgttgaggtacttgacgtgcccagtagtgatgatgaggaggatggcatcgatgaggatgatgatgatgatgaggaggaggttgaggatgatggtgatggtgaggaggctgagccagagagtagtggaagggttgctatggcggtggggggtgttggagaagagattgatggacatgagcaaggtgaaggtgatgatgaggatgagaatggtgagatcggagaggaagatgaggaaagattggaggatagtanggtttatgaggaggacaacgatgatgacgatgctgatgatgaggatgaaga

SEQ ID NO: 446078 - DNA, 408 bp, Triticum aestivum
gacggggatacaaatgaagcagattaacaattggttcatcaaccaacgcaaaaggaactggcacagcagcaacacagcttcctctagcgaaaagaccaagaagaaaagaaacgttacaggtaatgacggcacggagcaatcgtggtagaccgggtcccagatgaaacaaactagatgtaaactatacttttatcatgaagattgctgcagtatattctctccctctcctctttctggtggggcaactagatacgaagacgacccgttcacaagcaagttcaaaggcaaagaaggtatcaataatagttgaccaaaggtggtagcgactccggatgtacagtgtgagtgttttgctgatgtaatttgtgtaagcctgtgttgtataaccgaggaacggaaaggggcaat

SEQ ID NO: 446079 - DNA, 367 bp, Triticum aestivum
gggtattaggatgccaggcccggctgatccctggaggatggaacgccgatcgatcgattggccgatctgttggtttcttgcgtccttcaattggttgtgtacatatagttttaacgtctgattcagggttggcaccgccatgtagaccatcgatcgttttagatctctacttattgattgattctttcttcaaaaaaaaaaaaaaaaaaaaaaaaaaaaaaaaaaaaaaaaaaaaaaaaaaaaaaaaaaaaaaaaaataaataaaaaaaaaaaaaaaaaaaaaaaaaaaaaaaaaaaaaaaaaaaaaaacaataaaaaaaaaaaaaaaaaaaaaaaaaatgggccccccaaaaggttccaggcctaa

SEQ ID NO: 446080 - DNA, 217 bp, Triticum aestivum
ccgggccgacgggcttgaccatgcagccaagatcaagagccccaccgaggccgagaagtactacggcgagaccaagactgttctcggcgatgtcctcgccaagctaggctagatggatccgcataatggccgtgttgctttcaggccttttatgtttgttcatatttggaagccggcaatgtaacttccctgttgataatatgtcaacaagcacttg

SEQ ID NO: 446081 - DNA, 404 bp, Triticum aestivum
  unsure (1)..(404): unsure at all n locations
ggggtacagccgtgccgacggtcgtactcctccgtctctcggaggcggaagctcggcggcggcgagaggccgtagttggtccacttcctcgccccgtccgaccggacgcgccgctcgcgctcggggtcgcttccgctgtcggatctgctcccgaagctgcgtctggagctccacatgcggccccacatggtggctggaggcggaaggtggtcgccggcggcgagaaatgtggagaagggggtgggaattgcgtggctcggcggcagcgggggatagggtttcgacccgcaaacgcgtcgtggaacagtagatatagtggtcggggcgtgcggtttgcgggccgcggcaaattttgttacgggccggacgagtatgtgggctctgttctgancgaaaaattgggt

SEQ ID NO: 446082 - DNA, 489 bp, Triticum aestivum
  unsure (1)..(489): unsure at all n locations
gggganttnttcggcggcacggtcananaaccggggccgacnagctcactaatcggcggcgctctagaggatccaagcttacgtacgcgtgcatgcgacgtcatagctcttctatagttcacctaaattcaattcactggccgtcgttttacaacgtcgtgactgggaaaaccctgggttacccaacttaatcgccttgcagcacatccccctttcgccagctggcgtaatagcgagaggcccgcaccgatcgcccttcccaacagttgcgcagcctgaatggcgaatgggacgcccctgtagcggcgcattaagcgcggcgggtgtggtggttacgcgcagcgtgaccgctaccttgccagcgccctagcgcccgctcctttcgctttcttcccttcctttctcgccacgttgccggctttccccgtcaagctctaaatcgggggntccccttaagggttccnatttagtgctttacggcacctcgaa

SEQ ID NO: 446083 - DNA, 398 bp, Triticum aestivum
attctcgggtcgacgggggtggcaagagggcgtccggcttcaatagcttgtctcagcctgagagaaggaacagcagcaagaagctccagcgccagctttccttgcactattaattttagttgcctaattcgttcatcattcatccatcattttgctgctgaagtgtattaattcttggttctgcttactagattccaccttatgcgctagctgttggcgcaagtacgtcaatcacctcaaaatttagtagatttgaaatatcgttttcattagccattagtctctatgttgaaagagtttctgttgaagaaatagctagctaggcctacaacttttcccatgtctttttgtttgatgtctggatgttattggaaaccttaagtttctgttgaagaaat

SEQ ID NO: 446084 - DNA, 369 bp, Triticum aestivum
atccttctacagtaacgtgccttagaccagagcatatacgaagacccttaggagtctcgatctcgagcttgccttgaacgacgactttaaattacatcattcattcagcattcagctatcaatgcgctgctcaagtgtccaagctcttagatcagcctaccacattcgacttaacgctctacctgttggcacagctacgtcaaacaccacaaaatttaggtcacttgacatgacgtttctcagcatacactagtcgtcaagtcttgtgagtttcgcattattcagcatccaaccatgcatacaactttactcaagtcttgctgtatgatgtatccacttcatgatcagccttgtctatttcttcaagat

SEQ ID NO: 446085 - DNA, 433 bp, Triticum aestivum
gcccgggccgacgggcagtagtactttacttctgccattactcatagggagtagtctcattatcctttgtgggaacttcattcaggacatgacataatgtcaatatagcctccccccaccatgtcttggataaacccgatgtatctaacatggtgttaaccaaatctgctagagtatggtttttccgtttggcaaccccgtttgactgggtgaatagggaggcgtcctctcatgaataataccatgttccacactgaataaatcaaactcattagaaaagtactctccaccacgatcagaccaaactcgtttaattttcttttcaagttggttctcaacttctgccttatagattttaaagtagtgtagatcctcatccttagtatttaacaaatacacatagcagaatctagtggaatcattaatcaacaac

SEQ ID NO: 446086 - DNA, 338 bp, Triticum aestivum
acagtacgaatccgtacgtatggaaactcggtggactatacggtcatgtgctggtggtactccgtagatcggactggagctctcacgatgaagatggcaacttcttctgacgtgtgttatatattggtgagtgacatgatatgatatgatacaatgcagctcaggatatcagcgtgtggtttatttcaacttctatgtgagtttctctctatttgtagcagtgagattagcacgtgtactcctttttgattaaatcatttttgatgtacatttcttttccattttttctatatgatatggtaggacatattctacacaaggatctaccttgcattttc

SEQ ID NO: 446087 - DNA, 396 bp, Triticum aestivum
atcttcgtccacgggactggaagcagcagcaacatcaccggcctttgtaagtatctcaaggagaagaaccccaacgcaagggtgaagctcattttgtttctgttatgttaagatgtaaattagatgatcctgtgatgggtttgatgtgaaggttgtttgtgtgcttcagttcaaacacatctttggatgatcctgttatcttgttgcttatttattgtttaaatcacacagttcaatctttgtgttctctgtaatatgggagaaggcgtggaacagaggaagcgtgccacgtgaatggatccagaaccgtgtactgctacaaacgttgaaggtactctcttctcttctccccctttctttgttttgtgcgcacttgatggcttggttcggttcatg

SEQ ID NO: 446088 - DNA, 138 bp, Triticum aestivum
ttttccaatttccgaacaattaactggcatggaaaaaaaacttgtatatcaatttaaaacaaaagtaaaccaagtgctgtgtccggcttggatgtgctggtggcttatgtggttgccttgcccttactgctgctactg

SEQ ID NO: 446089 - DNA, 442 bp, Triticum aestivum
cggtcgtaaaatccggggccgacggaaaataataacaaaattattagtccgggaaaaacaaacaaccaaaaaattccggtgccccataaccaccaaacctaaggcaggatccggtgataataacatctggacagacttacaaaagagaatatattgagaaatggttcattgagggatacaacacttgtcccaagacacagaaaaagctagaaaactttgcgatgattccaaatacttgcatgagggatctcatttgcaattggtgcagagagcatggtttcacaatctcagatttccttccaagcaaagattcctacagttacttgccagagcaattgcatggtcactcaatgtcaagtttgcacaatgtttcagtgcctctaattgctgggaatgccagaaattttgtgattgaccacagcagttcatctgtcgcgttttc

SEQ ID NO: 446090 - DNA, 402 bp, Triticum aestivum
aattccggtcgacggggcatgggaaccttattcggaacctatgcgggtggtttccatggcgaggagaggctgggaaagcttggctatctcgttggaagccagctaggcagctgggttgggggaagaatcggactgatggtctatgatgtcatcaacgggttgaactacatgcttgagtttgtccgtccagaggagtatcgatcatcatcttacgcaacataagagggctcagagtatgcagataactacagaagttcgccttacgtatcagaagagggctcagagtatgcacataactacagaagtcgcgaaggatatgagccaacatacagtgagacgccagaagaggcgcacggaacgacggggtgaagctgtatgtgaacaacctgcgaagcgcacaca

SEQ ID NO: 446091 - DNA, 131 bp, Triticum aestivum
gtacgatcaaaaattcacgggtcgacgggaggttcaagtacgggagagaagcgacggagttaggagttgtaaatatgcattgttgtatcgcgacctgaatgaatggaataaacgaaataacgctgttgttc

SEQ ID NO: 446092 - DNA, 398 bp, Triticum aestivum
gacgggtcatgacacacactgctaaggatgcttcaaagtcaatttcgatcctttaccgtgtgattcaagacccgtcgtccagagcatgttgaataggttcctacaagggttcaaactatctacctcgtcattcacactgggtgatcacaataacagagtaatagatactaactctgacacaggggaagctaatattcacaatggtccttctagtaatgatacaatggcacctacatctttgcacatgtacaatctccaacatacggaggaccgattctctctacatatttaaatcatgccagacctcctaatattgtcataaataaagattttgattcctgagtgtatctcttcaagcgtcatttaaatcatgtgaacaataaacttttgagaatcat

SEQ ID NO: 446093 - DNA, 380 bp, Triticum aestivum
gcagacgagatagattatgagggtgaacaagactacctcgactttttgactgctaagcaacgttcgcatgtccgccccgatgatggtactgacgccgataccgacaccgacagcgcccgcaccgatggcggcgccgataccagtggggaaggtagcatcatggaagataccggctccgatgccggtaccggtaagatgcataagatgcagaggatataacagcctgacatactacggattggaccacttgtgatcaccatcatggcacctggcatgtttcagacttgcatgtagctcgattttctagatgatcacgcgatacttctttgtgtcggatgatgatttatactagactatatgtatgtcaatcctatgattac

SEQ ID NO: 446094 - DNA, 389 bp, Triticum aestivum
gacgggaaacgtgaagcgggacggacgtctctctggaacaaagatacaatagccaaacctgagtacggtcgtatccaacagagacgtacatcataactatctacatatccatcagtatcaactaaggggtggtggaatttaacagcaacatgccagctttgactcagtggctaacatgatctagacggcacgtaactcttttgaggtggcgcacacgagtccacatattcaccatatcaatacaccactatggatccgctcccgtctccctacgataacgccatccagagcactcacgcttatcttgcgcattttacaatatccacttcaagttatctatgaactgtacatgcaacccagatgtcctttactgcggacgcggctaatcc

SEQ ID NO: 446095 - DNA, 59 bp, Triticum aestivum
cggtcgagcatccgggtcgaccggtttatggaaaaaataatcgcggataggtccctggc

SEQ ID NO: 446096 - DNA, 435 bp, Triticum aestivum
cggtcgaaaatccgggtcgaccggcttattgatcgattcaaattcatggaaccgtatttgagaactgccgaccttttagaaccagtgcaccttatgtacaaaggaactatgagagtgctgcttgtactactccatgactttcctgaatttctgtgtgattatcacttcagtttttgtgacgtgatcccttccagttgcattcaaatgcgcaatgtcattcttagtgcttttccgcgcaacatgagacttccagacccatctactcctaacttgaagattgatctgctagctgaaatttcattacctccacgaatcatgtcagatgtcgatggtgccctcaagttaaagcatatgaaggttgatgtcgatgagtatcttaagagaccagaaggctcatcctttttgaatgatctgaagcaaaaattgctgctgcct

SEQ ID NO: 446097 - DNA, 138 bp, Triticum aestivum
attcgcgggtcgacggggtatgacagataatatcgatataggttattctacaagattactctatagatccatcagctctaagtaaactgcgtataaatcatgtatgtataaggtatgtgttactgatgttagaagtcg

SEQ ID NO: 446098 - DNA, 491 bp, Triticum aestivum
  unsure (1)..(491): unsure at all n locations
ggggnngnattattagccggcggtaccgancannaattcccgggtcgacggggtattagaaccatttccagttgttgttcccctctcaagggcaggttcttacgcgttactcacctgtcgccactggaaacaccacttcccgttcgacttgcatgtgttaggcatccgccagcattctcctgagccaggatcgaactctccatgatattcatagttgcattacttatagcttccttttcgtagacaaagcacattcggaattgtctttccttccaaggataacttgtatccatgccttcagattattagcctggagttcgccaccggcagtatagccaaccctaccctatcacgcaatcccacaagcctcttatccattcccgttcgctcgtggcgggggagtaagtcaaaatgaaaaaactcacattgggtttanggataatcaaggtcnaaatgaanaanttcaacaanncaaggtgacantctaccgc

SEQ ID NO: 446099 - DNA, 321 bp, Triticum aestivum
acacttcccctgtggtactcagtacgatagcttgtacaggaccgacaccatctttcagctgaagttcgagcgccttcgcgacagctggcaaggctgtctgcatggatatgtacgcatattgtgtatcccatgtgtcgtgtcagacacactgatcataagcggcacgttgggtcagatacttcgatctgccgttccctttgagtgtgacaggatcttcctgtgtcctcgagacttgcatagagatgcatatgcagtaacgtgacgtgcaatcaccgacttagagtagtgtcagtctgttatcattgcatacctgcctaaatc

SEQ ID NO: 446100 - DNA, 277 bp, Triticum aestivum
cgcgggatgagtgcatggcgagaaggacgctcgccgcgcacacggactacatctacacccaggagaagcacaactagtagccttcatatctgcgtccatgtaatgtaatgatgttagtcggcactgcgtccgcgtgttcgatctctatcctatagcttccttcataaaaaagggaccgatcccaccgtgcatgcatcgcatgcatgcatggcgcacttatgtattgcctataatttagtaattcgataatcaaacttggttttattgctcggtttgc

SEQ ID NO: 446101 - DNA, 486 bp, Triticum aestivum
  unsure (1)..(486): unsure at all n locations
gnnnnnnnggggaatttattcggcgcggacggtaacngtcngnaattcccgggccgacggcncactaatcggcggccgctctagaggatccaagcttacgtacgcgtgcatgcgacgtatagctcttctatagtgtcacctaaattcaattcactggccgtcgttttacaacgtcgtactgggaaaaccctggcgttacccaacttaatcgccttgcagcacatccccctttcgccgctggcgtaatagcgaagaggcccgcaccgatcgcccttcccaacagttgcgcagcctgatggcgaatgggacgcgccctgtagcggcgcattaagcgcggcgggtgtggtggttacggcagcgtgaccgctacacttgccagcgccctagcgcccgctcctttcgctttcttccctcctttctcgccacgttcgccggctttccccgtcaagctctaaatcgggggctccctttagggttccaattaat

SEQ ID NO: 446102 - DNA, 345 bp, Triticum aestivum
gacgggaaattggatactgcagttcccttacggactgctcgtgtctgggtgctcttggtggagactgcgtcgtctatctgctaacttcatctccgttcaatggccgtccacttacagtcgtgggacagccaaggacagtcacctgacgctggtggctcaccatctgacaccgccgccggtcctgacgtgcccggacaagaacttgatccaccaggttgtgttctccaactacttgaacccgctggggatctgctgcaactacaccgttggcaaatgccacacgcccaaggccatcgagattgtgcacaacgtgtgcgtgacgaatacgagctgcgtgctggccgt

SEQ ID NO: 446103 - DNA, 443 bp, Triticum aestivum
gaccggcaagagtagtaacaacactgaatttccccattgcccctgaggccctgaagacgcaaccttgtgctggacggacaaaatgtttcatgtaaaattcgacggctttcgcttctgctgtcgatggtatggcgaaagaaaagtaggcatactgtatacaccagctgttgtgttacactcactggtcctagggggcatgtgatgtaaattatttctagcgtatgttctcgaaaggaaaaaagggaaattccggtgtcctctagacgggcattgagatgcatatgctgtactgtgaccgagagtagccgattcagagagataccattttgtgatgaaaaataacttgcgtaaatcggtggatttgtggatgtaaaaaaaaaacacgaaaattgcaaaggcgcgtaagtgcatatccacccactgtccagatacacagtttaaaa

SEQ ID NO: 446104 - DNA, 496 bp, Triticum aestivum
  unsure (1)..(496): unsure at all n locations
gcggggnagctttntcagccnttnngtacgaactgcaaattcgcggggccgntcganagatnaangcttacgtacacgtgcatgcgacntcatagctcttctanantgtcacctanntcaattcactggccgtcgttttacnacgtcgtgacngggaaaacnctgccgttacncatctaatcgccttgcagcacatccccctttcgccagctggcgtaatagcgaanaggcccgcacgatcgcccttcncaaganttgcgcancctgaatggcgaatgggacgcgccttgtaccgngcattaagcgcggcgggtgtgttggttacgcgcatngtgacngctatncctgcnagcgnctagcgctcgctccnttcgctttcttcnnttnctttctcgcnngnttcgccngnnttcacgtcatgctcnngatnnggggcccncngnntggtntcgtntgatggtttnnggngcncnncgcngggncgttgngggngggg

SEQ ID NO: 446105 - DNA, 408 bp, Triticum aestivum
gggaaaccatagcaaggcacgcaaacatcgtctggcagtcgcagcgattgtggaggactacgtgaacttgcccagccactcagaacaacgcgacgacgacttgatatcatcgccaggacgaccgggcttcatgtaagaccgtatcataattgccacaccagtgaatgatcatcgtctaactcccattacacttctgtgatcacctctcctctactagcaccgcagcagcagcagcaagggatggagtaccgaacgcagcacgaaggcagcgtctactcggacctcatggagacgttcttggagtaacaacgcaacgcatgcatgcatgcgtcgatcgatcatcctcactacgacatgcgtaccgactttatgttttcttgttcccaccttttgttttgttccaaccaa

SEQ ID NO: 446106 - DNA, 351 bp, Triticum aestivum
gacggggagcacaagatcgcggaggagcacacgaagaccgacggggagcacatcaatgacggcgtaccacaaggagggcatgatggacaatcatcaaggaccagatcagcggcgacggccatcgccacggcacgatggacggcgaccaccacgagaatagtgacaacactacacactacgacacgatgcacggctagggccacaaggacgaccacggccactgcagcagcatcagcgacagcgacagcgactgagccatctccggccgcgctccggcagcatcgtgcagtgtacgctagatcgatgaacgcttgcgagatgtgtgccattcatatatgttgcatggtttgg

SEQ ID NO: 446107 - DNA, 379 bp, Triticum aestivum
gacggggatggcaggttaaaatcaaaaaaaaaaaaaaaaaaaaaaaaaaaaaaaaacaaaaagataaaaaaaaaaaataaacaaaaaaacaaaaaacacaaaacggtcaaaagcgatacctaaacttcaattcaacggccgttcgtcttccagggtctcccctgggttcaacttcgtcgtccgtcgttttaatcgccttgcaccgggtcaccctttccctagcccgcctctgccccgctgcgccctttccccttttcctccgctgacgtctcctccgactgggcccccacctggtcccccttccgatccgttttttaccctgccgggggtgtggaacactccccgtaccctgtccgtttccccccaccggctcccccgc

SEQ ID NO: 446108 - DNA, 408 bp, Triticum aestivum
aaaattgatttgatccccgtaggttaaccggttggttgtaaggcggccataccaattgccataattgtggcaattttccggtagttgattggcttgatcttttggtttgcttggaggtggaactgttcgatcgatggcagagtttcgtccgctattctaaattgctaaatgcacacaggtggggcctgagttttatgtggacggttagatgcctaatcttggggttgtagtttgtcttgcttttcccgtgtacgtttatttgggtgggcatagtgaagaatatgtttgattgtttaatagtataagtagagaagtagagatttgtctttcacctggagattcgatgtagctcggtctgagcatgagtgatagcagtcttgtatcttatgtttaccatgcaaattttac

SEQ ID NO: 446109 - DNA, 492 bp, Triticum aestivum
  unsure (1)..(492): unsure at all n locations
gggggngcatttctggcgctcggtaccgntcngcnaattcccgggcctatttgtttattatctaaatacattcaaatatgtatccgctcatgagacaataaccctgataaatgcttcataatattgaaaaaggaagagtatgagtattcaacatttccgtgtcgcccttattccctttttgcggcattttgccttcctgtttttgctcacccagaaacgctggtgaaagtaaaagagctgaagatcagttgggtgcacgagtgggttacatcgaactggatctcaacagcggtaaatccttgagagttttcgccccgaagaacgttttccaatgatgagcacttttaaagttctctatgtggcgcggtattatcccgtattgacgccgggcaagagcaactcggtcgccgcatcactattctcagaatgacttggttgagtaccancaatcacaagaaaaagcatcctacggtggcatnacnttangagaat

SEQ ID NO: 446110 - DNA, 451 bp, Triticum aestivum
  unsure (1)..(451): unsure at all n locations
gacgggtgggtacattgtgacgtgcaatcgcgcgcgcggggtagcgtgtcccctaccacggatcctaggtacgggccgacagtccgacaccgacctacgacgtgcgatccaggaggaccacgtcggccgatcaatcaatcagacgaattactaccacggtaataaggggtgcagtgggtggtgattaactcgcaccgccatgggggctctgtcggtgaccgtgtgatggtccaccatagcttccagaagatttcaagaaacgtctcgttctagctactaatttgacacgtatagatctttcgtgtatcagcaccgatccgtaaatggggcttccagaacacatcgatccattttgtcgctgccaaatgcgggcaagtctcacgtccagaagcaggaaaagtagagcgattaagaaagcagtcggaagcanatggcaattggcaagcttaca

SEQ ID NO: 446111 - DNA, 398 bp, Triticum aestivum
gggtacaatgacgtcaggaagcactcgtcggaggcctacgtgatcatgtccaatcggttgtcatccccagacccgacggagctcctcgagtttgccggcgggttatccaagaccgtcatcgacgtgcactactatgtgttgttcaatagcatgtttgatactttcaccgtgcagcagaatatcgatttcatcaagaccaactactcaagcgctcttagcactgtcacgaagcagaacggtcctctcacctttgtaggtgaatgggtggctgagtggcaggtgcccaatgcaacgaaggaagagctccaaatgttagcaaatgcacaaatggatgtgtatgggaaggcaacgtttggatgggcttattggactctcaagaatgtaaacaaccactggag

SEQ ID NO: 446112 - DNA, 407 bp, Triticum aestivum
  unsure (1)..(407): unsure at all n locations
aggcaaacaaacttcatcttcacctgcaactaacaacgctataagaggggctgagcaaaagcggtgacatagccaaacaacggttgctaggacaagttggttagagggttgacatggcaataggtangcatggtaaacaaaggcaggcagggctaacataacgaaagagcgagtactagcaagcaaagatagaagtgatatcgaaggtatgatcatcttgcctgcaaggttctcagagttgtcgaaggctggatcctcgttagcgtactcaacaggttcctcgttcacgtactcgtctcccggctctacccaaaataagaacacaagcaaggaaccacaataaatcacggtgcaatgcacaggcatcatgatgcaaaacatgtcatgatatgcgagaggtgatatgc

SEQ ID NO: 446113 - DNA, 449 bp, Triticum aestivum
  unsure (1)..(449): unsure at all n locations
cgggatactgtagactgcaacattagcctgtataaatcatccaaacccctcaagttcatctanggatgcangtgaccaaagtatttgggacctcatctggaaagcaaaggtgcctgagaaaattagaatttttgggtggagagtagccacaaataccctggccacaaaaagcaacaaatttaagaggacgctcgaggtggactcgacttgtgacatttgtggcaatggcgtggaggatgaacatcatgcggtgatcaattgctcgaacagcagggcccttcgcgttgccatgaggaaggagtggtctcttccatcagagaaatccttcagacatacaggtanggactggctacaggcgcttttggacaaggaaacagaggaagttagagcaaaaatcttaatgctgctgtggagatgttggcacttgagagaagatatcctaagacaca

SEQ ID NO: 446114 - DNA, 440 bp, Triticum aestivum
attccggtcgacggggttagacattgtaaatatgcattgttgtatcgcgacctgaatgaatgaaataaacgaaataacgctcttgttcaaaaaaaaaaaaaaaaaaaaaaaaaaaaaaaaaaaaaaaaaaaaaaaaaaaaaaaaaaaaaaaaaaaaaaaaaaaaaaaaaaaaaaaaaaaaaaaaaaaaaaaaaaaaaaaaaaaaaaaaaaaaaaaaaaaaaaaaaaaaaaaaaaaaaaaaaacggaacacccaaaagataaaataaaataaacaccaacgataacaaaaataaaacaaaaaatcacctcaaaaacaaaaaaaaatagaccaataataaaaaaccaacaatcaagaaaaaaacctagtaaatcgaaaataaaccttatcacaaacaaaacacctattcaaaaactctgaaaaacaaaaaaggcaatcaaaa

SEQ ID NO: 446115 - DNA, 433 bp, Triticum aestivum
  unsure (1)..(433): unsure at all n locations
gtttcataattttcaactttcatccatgttaaaaatgcttaaacttgttgtttgctttatatttgcataaatgccatgttaaaatgatttatttcataactaattaaccataactccgaattaaataaactatatatgtaaattgtctagaaaaatgcatagattaacatggtgcactttgttttattgcttaacaacattaaaatatgctttagggagaacagtagctaattaaaatatggacatgaggattttctggaattgttgtttgttgttccggcctcatttaaacttacctagatatgttgttttattatgcttcacctcttgccatgtttaacaacatttaatattgtttggtagcttggacgagattaaactaaatatgtcaatgtggtgtnttgtcaatatgcaacttgttgcatattgagct

SEQ ID NO: 446116 - DNA, 340 bp, Triticum aestivum
gggtcgacgcggagatgtgaatgaagggaggtcggtctgagttgcagaaaagcatgggactacgcaaccgatgacgaacatttgcactgagagtgaagagcgagggccacgccccttgcgaagatgccgccgtgcatgtaatctacaaagaagcctacatgatcaacgcgctagtcacgcatgcaatacagaatgtctatttgaacgcttacaggttcacacatgcagctttagttggcacggaaggtagagacagtatccaggtaggtacggtggactcagattgaagaactttggcgttcattgcagtgcctgcggacacagtagacgcgcttattac

SEQ ID NO: 446117 - DNA, 391 bp, Triticum aestivum
gacgggggacacaaacacacttcatcccccaaaacggaattgcaaaccccctccaatttgaaaataccattgacaacagcaaactttataaacccttgggtgtcaaaaccaaccggccttggtgtgtcaaaggttaccgggacaccttaaggaacattgccggatcaacccacatgctgcatcaactatttgtacctatacaaatattcatcatgctcaatctccctactccttgtttagtactgcctccgttccataatatagtgcatatagatttttttgagaagttaaacatcacaaactttggccaagtttgtgggggaaaaatatttacatctagaatatcaaacatgtatcattagatccatcgtaagatgtagttccatatttt

SEQ ID NO: 446118 - DNA, 479 bp, Triticum aestivum
  unsure (1)..(479): unsure at all n locations
gggngaattctagtggacggtccggtcacnaatncccgggtcgacggggtcatgaaatcaaaaaaaaaaaaaaaaaaaaaaaaaaaaaagcggccgctctagaggatccaagcttacgacgcgtgcatgcgacgtcatagctcttctatagtgtcacctaaattcaattcactggcctcgttttacaacgtcgtgactgggaaaaccctggcgttacccaacttaatcgccttgcacacatccccctttcgccagctggcgtaatagcgaagaggcccgcaccgatcgcccttccaacagttgcgcagcctgaatggcgaatgggacgcgccctgtagcggcgcattaagcgcgcgggtgtggtggttacgcgcagcgtgaccgctacacttgccagcgccctagcgcccgctctttcgctttcttcccttcctttctcgccangttcgccgggttttcccgtnaaacnccaaaccggg

SEQ ID NO: 446119 - DNA, 425 bp, Triticum aestivum
gggtcgacgggccttcctgcggtgtcgctcccataatctcatctcctgccctcagtatgatatgagctccgacgagggaaggacatgtcggtccgcctgagcgccctttaaatccgccgcgtccctctctttggctttaatcaggggctgattcccccgatgagtcatgtaggcaataattctgcagggccaaagcggcggcaggcatccacaccgcaccgcactacctggccctaccctacgtacatactccagcacaccgacgtactacgatgtaccctacactacacagtacacacaccctaaagacggagatcccccatgatcatcatcattagtgctgccatgatcctctttaatctgccgtacgcaccagatataatactgtctccctcccagtcccagttcaagcactcgttctgctg

SEQ ID NO: 446120 - DNA, 484 bp, Triticum aestivum
  unsure (1)..(484): unsure at all n locations
gggngaantcnagtnncacggnccggtcacnaataaacgggtcgacgggttcaaaaaaaaaaaaaaaaaaaaaaaaaaaaaaaaaaaaaaaaaaaaaaaaaaaaaaaaaaaaaaaaaaaaaaaggaaaaaaaaaaaaaaaaaaaaaaaaaaaaagcggccgcccnanaggntcnaagttacgtacncgtgnatgcnacgtcanancccttcaanagggncnccnaanttcanttcagggccgtcgttttaaaacgtcgtgacgggnaaancccnggggttaccnaanttaaccncttgnagaaaatccccctttcgcaagcnggngtaataccnaannggcccgnaccgttcgccttccnaaaanttgcccaccctnaanggcaaanggnacccnccctgtaccggcgnattaccncggcgggtgtggnggttacccccagcgtgaccgctanacttgccaaggccctaaannccggtcctttt

SEQ ID NO: 446121 - DNA, 360 bp, Triticum aestivum
  unsure (1)..(360): unsure at all n locations
aggccgcatcatatagtaagactcactagggaagcctccgaataagttcaaaaggtttggaaaactgcaaagatttgttaaaaaggaaaaggcctcctgtttctcaaactgttcaactcgacaacttgaaaaacctaaacctacatggtgtatctctaacagaataccccttcaaaaaggttttaaacggtttccccttaaatggggaaaaccctctcaaaaggaagccaatatctttagatatgcacccatggatactctctgtacagagaacgctggaaaattacgtcgcatccgangccacaacaaataagcttgccagagatgccttctgttcctggcttcgcgcttacaccgccc

SEQ ID NO: 446122 - DNA, 479 bp, Triticum aestivum
  unsure (1)..(479): unsure at all n locations
gggggaattctntctgtaggngcggtcatcnncncangggtcgangngntgccctaaannagtcntattaaaaaaaaaaaaaaaaaaaaaaaaaaagcggccgctctagaggatccaacttacgtacgcgtgcatgcgacgtcatagctcttctatagtgtcacctaaattcaattcctggccgtcgttttacaacgtcgtgactgggaaaaccctggcgttacccaacttaatcgcttgcagcacatccccctttcgccagctggcgtaatagcgaagaggcccgcaccgatcgccttcccaacagttgcgcagcctgaatggcgaatgggacgcgccctgtagcggcgcattagcgcggcgggtgtggtggttacgcgcagcgtgaccgctacacttgccagcgccctagccccgctcctttcgctttcttcccttcctttctcgccaagttcgccgggtttccccgtnagctccaa

SEQ ID NO: 446123 - DNA, 108 bp, Triticum aestivum
gggtcgacggcacgggggcaagggggcaccccaaagcacaatagttgtttcttagccgtctgcggtgccccctccacgtttactcctccggtcatattgtcgtagtgc

SEQ ID NO: 446124 - DNA, 233 bp, Triticum aestivum
ttcccggttcgacgggcagggctgtcttcaggagggatggctcctggcaaaaaagttactaacttagggaacaataaattaacaaacaagttgggaatggaataatttttgggccccggattggttccaaaagaacttagaatacataacaaattcaacccccccccttgcccccaattgtataaaatgtgcaacaatcgtccaatgacagttcttgaaatacccacttgttg

SEQ ID NO: 446125 - DNA, 491 bp, Triticum aestivum
  unsure (1)..(491): unsure at all n locations
gggngaanttntacttggccaggctggtcanagcaagcgggccgctccagangatnaaacntatctacgcntgcatgcgacgtcatagctcttctatagtgtcacctaaattcaattcctggccgtcgttttacaacgtcgtgactgggaaaaccctggcgttacccaacttaatcgcttgcagcacatccccctttcgccagctggcgtaatagcgaagaggcccgcaccgatcgccttcccaacagttgcgcagcctgaatggcgaatgggacgcgccctgtagcggcgcattagcgcggcgggtgtggtggttacgcgcagcgtgaccgctacacttgccagcgccctaaccccgctcctttcgctttcttcccttcctttctcgccacgttcgccggctttccccgtcaagctctaaatcgggggctccctttaagggttccgatttagtgctttancggcaacctcnaccccaaaaaaacttgatt

SEQ ID NO: 446126 - DNA, 502 bp, Triticum aestivum
  unsure (1)..(502): unsure at all n locations
gggnngcaacttntacttngccngggacgactcnnatacngnagncgcgnagntcnttgnanaccctatagtgagtcgtantagaggatccaagcttacgtacgcgtgcatgcgacgtatagctcttctatagtgtcacctaaattcaattcactggccgtcgttttacaacgtcgtactgggaaaaccctggcgttacccaacttaatcgccttgcagcacatccccctttcgccgctggcgtaatagcgaagaggcccgcaccgatcgcccttcccaacagttgcgcagcctgatggcgaatgggacgcgccctgtagcggcgcattaagcgcggcgggtgtggtggttacggcagcgtgaccgctacacttgccnagcgccctagcgcccgctcccttcgctttnntccgnnccntnctcgncanggttcgncgggntttcccccgtcaagcncgnntncggggggctccattaangngtncccacttngtgntttngg

SEQ ID NO: 446127 - DNA, 436 bp, Triticum aestivum
gggtcgacgggtatgacgatcattaaacggataatgtttgcaaaagcaaatgaaatactccctcagagggagtagcatacctttccgatcttcgaaagtttatctgaaactgcaaccagtggaatgctgccatcagtccatttagcatcatgaagtgtgatttttggagctgctgcttttgccttccctgcagtagactctgtcttctttcgtggttttggtttctcatcaacggaggagtcatcgttactggatagctctgttgtagcatcactaagtcgccgtgacattgcttcctgaagttacagaagaagatcagttgtcattgctcaggtacatgaatttcaattgcatgtaaacctaagcaattcagaataaagcagtgcatataataagatatgcccattgcacaatgctcctgattcacacatacact

SEQ ID NO: 446128 - DNA, 401 bp, Triticum aestivum
gacggggatgagaattgtgtggtggctcacggaactttatgtagttaaattataagtcaatccattccataatgtagtgtatatagatttctacaatagttaaactttgcaaattttgacaatgcttcgtgataaaaatatttatatttaaaataccaaatgcatatacttggatacatcatgagttaactattcatattatatatgtttgacattgtacatatagatagtttgttcataaacttagtcaaagtttgttaagcttaacttttcaaaaaaatccttttttgcggtaaattatggaacggagggagtgcttagaattgcaatttgaagttacacataaggtgttttccttggagttcacgattagaacgtaaaacagaatgtatcaccctgtc

SEQ ID NO: 446129 - DNA, 438 bp, Triticum aestivum
gggtcgacgggtcgtgcgatggtgtcggcaaacgatggcctcagtgggtggacgccgacacatgcagctggtgcacgatggtgacttcatggagctcatgttccaagcaaccctctccttgttggctcaggaggttcgcgatcgagcttgggctgctgatacctcttcctcgccgcccaacaggaatagcatgagatgagcagccaatccctcattcctagctttcataccaagattctgtgcaccggttcccctacggttgaagatggagagccattggtagtagagagggggaagggatgtagagacggaagcagcttcacttgccccgtctcccaccccattgccgatgcagcggtcgaaggagttgcggacctcgccaacaagcctgtgaccctgcatcagcgatggcttgatgtacgcactggaaacctccta

SEQ ID NO: 446130 - DNA, 308 bp, Triticum aestivum
acgcgagctgagcaccagatcaaatttcaactttaccggctcagtctcacaaagacgttcataacagtgagtacatatatgcgtacatgttctgaggaaaaaactcacagctccgaataaaacttgaccaagagttgtaaatactccaagttgctagctgtgatgcatgaacgctacgtggtagtcgatccaatgacctggttcagcggtactctgatcggctatgacatccgcggccggcccgtcttgacagccatcactccacgccatcgatggtgtcatgcacatccgatacaaaggagtgatac

SEQ ID NO: 446131 - DNA, 335 bp, Triticum aestivum
actgtctgactctgcacgtatgggagctagttcaacaatatgaacatgtgccggtggttcaatgggctaggacagccgatctagcatgtcttcacaatagtctcattctttcatgctaatcgtatcacacgcttagggagcgcataagctaactgggctcaagtatctcccaatcagcataattaacgcccatcgcccttttgaaattaggacttaactactcatgccatatgcatgcattttgatagacagtgtttattgatctctctctcactcactctctctctctctctcactctataattagctcacatcgtcatagaattgacatgttt

SEQ ID NO: 446132 - DNA, 395 bp, Triticum aestivum
gatggaaaacatggtgtccaatgaggaattcaatgtggccttggatacattgaaaacatcaatgacaaccacggtagaaagcatgtttaataaattcttagaaggacttaaactacctacctcgtcgttgaaagtgggtgatcccactaacaaggtgacagatgctaactctgacaagggggaagctaatagtgagaagggtccttctactagtggtagaatggcaccgacatctttgcccatgtagaacctccaacttatggaggaccgattccctctactcatttaaatcatgccggtcctcctaagattgtgaaaaatgaggattttgattcttgggtgtatcgcttcaagcgtcatttaaatcatgtgaatactaatctttggagaatcat

SEQ ID NO: 446133 - DNA, 312 bp, Triticum aestivum
acgcgctgatgaatatggggccgcactacatgatgaagaccgagtcacgcgtggatgtgaagacaggccgcatcgtgaatatcaccggccatcgcatcaatgccgatcatctcacagggtcctcactgcagatgtcctaccatcagcccagctacacacatgtgcatcacgtcaaccattcgctagctggcttactctacagtatgcaatcatgcatgttccgtcgatgtacttcatcaaccttaattgtcaatgggacactcactttatactgctcaagtcacgtagcagtagtgtgcgatactcacaaca

SEQ ID NO: 446134 - DNA, 464 bp, Triticum aestivum
  unsure (1)..(464): unsure at all n locations
cccgggtcgacggggaagaatgacgaagacacagaagaagaagaaaaagaagaagaagaagaagaagaagaacaagaagaacaagaagaacaagaagaggaggaggaagaagtagacgaagaagaagaggaagaagaagaagacgacgaagaagaggaagacgaagaagaagacgaggaagaagaagatgaagaagacgaagacgaagaagacgaagaagaagaagaataagaagaagaagaagaagaagaagaagaagaagaagaagaagaagaagaagaagaagaagaagaagaagaagaagaagaagaagaagaagaagaagaggcgattgaaaagcaaacggaagaaatacagacagatgagcagaaacatgatgacagtagggctgatttcaccacagagacaatattggagccccagagcaacganattgacacaacaaataggaaagacaacgctga

SEQ ID NO: 446135 - DNA, 266 bp, Triticum aestivum
aagtagaacttggtttgaataagttcttgaagtacatgattgcattattatgcagacgagtatgaggaagttctctgtaggaattttatgtggatgaagtgttcgactaatcaaaagagtctcaatatgagaacaaggaagaaaagcatgaagatcaagattgggatgcacacggcaaccaaggtgaatatgcagaggtactcaagcatcaagacatggagatgaagaagaaggcgtcgactcatacgacgacgaataacaataag

SEQ ID NO: 446136 - DNA, 373 bp, Triticum aestivum
gtattggttgtctgaacctgatggatatgaataaagttgtagcatacattcaaattcaaacatgcacacagtttggaaaagcagcaattaaattgcggtgaaattacgctctccaggctgtcacggcacacatggttggtaaaatacaaacatttgcgatttgcaccataatccgagacggttcacagacaggaaacgtttgcaagcatgcacacagttgccgtttgcaaagcatgtgctatgtcagacaatatcacaaacggtgcgggcaaactaaacgtttgtgttagttgccttatcgtacacgattcgcaaccatgaactgtttctgatgaagtatgcatcgtaaacgttgcaccacagaatagcgtgt

SEQ ID NO: 446137 - DNA, 485 bp, Triticum aestivum
  unsure (1)..(485): unsure at all n locations
gggngaattctactnntacgggcggtcacnnataaacgggtcgangngctcactaancgnaggccgctctaagagggatcaaagcttaacgttacgcgtgcangcgangtcatagctctcnatagtgtcacctaaaattcaattcactgggccgtcgttttacaacgtcgtgactggaaaaccctggcgttacccaacttaatcgccttgcagcacatccccctttcgccagctgggtaatagcgaanaggcccgcaccgatcgcccttcccaacagttgcgcagcctgaatggcaatgggacgcgccctgtagcggcgcattaagcgcggcgggtgtggtggttacgcgcagctgaccgctacacttgccagcgccctagcgcccgctcctttcgctttcttcccttccttttcgccacgttcgccggctttccccgtcaagctctaaatcgggggntccccttaangggtcnaattaatggct

SEQ ID NO: 446138 - DNA, 251 bp, Triticum aestivum
acacgatcaaccttcttatgaatattaccactgtgtctgtcatacgtcttgtctattaatgaacatctcatcattggcctactgctctttgcatgatcatgtagatgtcatcgtacttgtagtatggccaacttcatgattttcatacatgtcgctcttgattcattgcattgcccggtgaatcgcccgatgcattcatatatagtcatatcttgttctagctttgggttgttaatccgtaaaagtgtgtt

SEQ ID NO: 446139 - DNA, 383 bp, Triticum aestivum
gcgcaaagagagacgcttgattttggaacaacagctagcttcttctcaagttcctagggaggagcagataaaattgataaaggagttgcagaggaaggagactgaatacatgagacttaaaaggcatagaatttgtgtggatgactttgagctgctcaccatcattggaagaggtgcttatggggaggttcaactatgccgggataaatcctctggtaatatttatgcaatgaaaaaaactaaagaagtctgaaatggttgtcaagggtcaagtggagcatgttagatctgaaagaaacttgctggctgaagttggtagtcactgcattgtgaagctatactattctttccaagatgctgagtatctctatcttatcatggag

SEQ ID NO: 446140 - DNA, 376 bp, Triticum aestivum
atgacgtacaaaacttaaactgcagctaaccgcatgcatgtttcacactaagctgattcttttgctacatagctcagtaaaagtgaattaaaccaccttctttttctgacagtcaataattagatgcaagggcctcttgctaggtttagttagacttaatgcaagtgtctcttacttttatttcaaggttggtgctatttttcgaagcaaacttccaagttctgcatactaaatagtctgatcaagtaactaaagtgtcctaaatacgtagcaaagtgggccagttcgcttctgtgacgatacaacacatcctggatactagtaaatatcattagtgccttctctttgtccagtttgtggacttatagaatttgag

SEQ ID NO: 446141 - DNA, 447 bp, Triticum aestivum
attcccgggccgacgggtcactcaatctctctctctctctctctctctctctctcttttttgagggactcattccttcctcttaattctgctagtcagtggcagaaaactctttgtggaagggaaatcccatgcggctgtagccaaatagcgctattaattttccttgaaccagataagtgtggcgtgctctcagttgttgtaggagatgggatcatacggacttgtatttgtaatttgttttattttggaaggtacgtacaagtaaattgaaatcttgttcatttcttgggtgtgacaagtgctcagttgacttagatttggttaagtctaagtcggttgatatcagcatgtttctacgttatttttctatttttatgttttcctacatttttttaagtgcaggtgaaaaaattaagaatttaaatatgttttcgccttggaaaat

SEQ ID NO: 446142 - DNA, 443 bp, Triticum aestivum
  unsure (1)..(443): unsure at all n locations
tctttctacaaagaattaatcaaggaaattcaacaatacagccagcaggtttggtgttgtcccatgtacgatcactgggtgtgtttggaggttttgtggaaatcccttctctggaggaattcaaacatctgtgtgttctccacttgagccattgccaatcattggaagaacatcatcttgagaatatagtgaggttgccccagctaaggtacctgaacctcaaaaatacagaaataaggaagctcccagaacaaatcgggcgtttaggttgcctagagttgttggacctaagacacacttgtgtagaggaattgcctgcatctattgttaatctcaaaaaattgacgcatcttcttgttgactatggtgttaaatttcctgatggaattgangagatgcaagcattggagacattggaagaggtcaggttctccaaaacaaca

SEQ ID NO: 446143 - DNA, 414 bp, Triticum aestivum
  unsure (1)..(414): unsure at all n locations
gtcgacgccgtccttaacatgtagtctcaaaatcgtagttagattttgttacgttaaaccaggttgcttatgtcatgtgtgtcatggttgaaccagtttgattatgtcgtgtttgttagggttgaacaagtttgtttatctcatcaagtacattgttttcttatctcattatataagtttgctagcttcgtattttgtttatccatcatttcaaattcaagtagcttgcgagtggaactttgtggctgctgttcagtactagttatcaagcaactattcacacaagggtcttccatgtgtagtttggattcagcattgtatggaaaacataacgttgaaaacaatcagtacaatttgagctgcttagcagcgcttcanaagttgaagtaatttnttttagtacttcatgtactg

SEQ ID NO: 446144 - DNA, 329 bp, Triticum aestivum
gtattatcatggttgagttttgttacgttgatgcaggttgcttaggtcatgtgtgtcatggttgaaccactttgattacgtcgtgtttgttaaggttgaacaagtttgtgttatcgcatgaggtacattgttgtctgatctcattatacaagtttgctagcttcgtagtttgtttagccatcatttcagattcaggttccttgcgagtggaactttgtggctgctgttcagtactagttatcaatgcgactagtcagacagaggtcttccatgtgtagtttgggctcagcattgtatggaagacatagcgttggaaacagtcagtagag

SEQ ID NO: 446145 - DNA, 274 bp, Triticum aestivum
  unsure (1)..(274): unsure at all n locations
gggttctccgcggcgccgatctgtgggacgaagaagaaagagctagacagaaacaggaagacctgaaacattctcgtcgtgctcaatcacgccctccaattgcctatgcttctgtaaccccattccccttcttgcctgtgcctgtgtacgtctctccagaagctcatgagttttgaaaatcttgtcncagcagccaaagctgcaatggtttcatcttccttcctttttgtctgttgtcagaaaattcttttccgctcttgacaggaaattttac

SEQ ID NO: 446146 - DNA, 476 bp, Triticum aestivum
  unsure (1)..(476): unsure at all n locations
gggngaattccatcgntccgncggtcacnacanacgggtcganccaaacaacatgattaggtgatggttcacgtagtgggccatcgccctgatagacggtttttcgccctttgacgttgagtccacgttcttaatagtggactcttgttccaaactggaacaacactcaaccctatccggtctattcttttgatttataagggattttgccgatttcggcctattggttaaaaaatagctgatttaacaaaaatttaacgcgaattttaacaaaatattaacgcttacaatttagtggcacttttcggggaaatgtgcgcggaacccctatttgtttatttttctaaatacattaaatatgtatccgctcatgagacaataaccctgataaatgcttcaataatattgaaaaagaagagtatgagtattcaacatttccgtgtccnccttaatccctttttgcggcattttgctcc

SEQ ID NO: 446147 - DNA, 434 bp, Triticum aestivum
tggtttagcttacatcggatatgtaaatcgagcagtaaaatattagacacagttgaacttagactacctccatactcctatgattctgaggctgtttggatacgaattccacggtcagcaaaaatagctgtggaggaaaggaaactagagtttcgtggtggttcacatgctgcttcacacgcactcttgaatatattgcctctgcatatgatgtgtagtgcttctgacctgggaactgagtgcgtaaatcctcatgaaacccgtggtatgcctgaaagaattcttttatacgataaacacccaggtggtatcggcctggcaacgcaggttaaaaaactttttggggaacttctgcttgctgctttagagcttgtttcgacatgcagttgccctagtgcttctggctgtccgaattgtatccaatcattgacatg

SEQ ID NO: 446148 - DNA, 423 bp, Triticum aestivum
gcgggtcgatgggagtcccaaagtggtatagatctatgaaggataaacaaagaaaaaaattccatgaagatcattggacaaaataaactttattcttagtaatagttttgagatatgatgatgtgatatgtgagttatgttgatgagtaattgtgctctagtaagaatattggtgttaaggtttgtgattccctatgcatgcacgaaagtcaatagtcatgcagtgaaaattatgtcctacttgtggtgcattatttggtgttaattatgcttaatgcttgcttatgagattattcgtttcttggttggtcttttcccaaacttttgctaaccttcattttgcactaagtatgacctctacttgtgcttccaaaatcctttaaaccagttttgccacatgagttcactatatctacctatatg

SEQ ID NO: 446149 - DNA, 501 bp, Triticum aestivum
  unsure (1)..(501): unsure at all n locations
gggnnnnnnnnttnnnttgccttgcccnccaancangaaagtcccgggncgacgggaaggncagtcgctcctanaagggttcaagcttaagttacgcntgcatggcgaacgtcataaccctcctaataatggcacctaaattcaattcaactggcccgtcggttttacaaacgttcggactggggaaaaacctgggcgttacccaacttaatcgccttgcagcacatccccctttcccagctggcgtaatagcgaagangnccgcancgattgcccttcccaacanttncgcaactgaatggngaaagggaaaccccccttntncggggnattaaacccggnngggnttntggnnnaacccaaaattttnancgnnanatttnaaagcnccataagcnccngctcntttcgtttcttccnttcctttctcgccaatttcgcnggttttccccgttaaagctcnaaaatcggggcncccttnaagggtcccaattaaagggt

SEQ ID NO: 446150 - DNA, 427 bp, Triticum aestivum
  unsure (1)..(427): unsure at all n locations
tatacgacttcttccctaacgacgagaaagtggggatgaagcacatcaagaagtacgttgaaatgatgaacgccgagaaagtctcaagggccatattggttgtgcaacagaacctcaccccatttgcaaaatcttttcttcaagaactggagccaaagatccacttggaggttttccaggatgccgaaatgcttataaatatcaaggaacatgttctcgttccggagcatcaagtgcttgctaacgaggaaaagaagacgttattggcgcggtacgctttaaaggaaactcagctaccaagaatacaaattacggatcccattgcgaggtactacngcctcaaacgagggcaagtggtgaagatcatcanngccagcgagacagccggcagatacgtcacatatcgctaagttgtatgacagtacac

SEQ ID NO: 446151 - DNA, 487 bp, Triticum aestivum
  unsure (1)..(487): unsure at all n locations
gggngnanttctagttgccgggcccggtcatnnataaccgggtcgacgggaaaaaaaaaaaaaaaaaaaaaaaaaaaaaagcggccgctctagaggatccaagcttacgtacgcgtgctgcgacgtcatagctcttctatagtgtcacctaaattcaattcactggccgtcgttttaaacgtcgtgactgggaaaaccctggcgttacccaacttaatcgccttgcagcacatcccctttcgccagctggcgtaatagcgaagaggcccgcaccgatcgcccttcccaacagttggcagcctgaatggcgaatgggacgcgccctgtagcggcgcattaagcgcggcgggtgtgtggttacgcgcagcgtgaccgctacacttgccagcgccctagcgcccgctcctttcgcttcttcccttcctttctcgccacgttcgccggctttccccgtcaagctctaaatcgggggtccctttaagggttc

SEQ ID NO: 446152 - DNA, 507 bp, Triticum aestivum
  unsure (1)..(507): unsure at all n locations
ggnnnnnnnnttnnntgnccttgcccccaaaaacaaaaagtcccgggtcaacggggagagnacatgatcaaaaacataannnaaaaagcggccgctctanaggatcnaagcttacttagcgtgcatgcnnacgtcatagctccttcnatagtggtcacctaaaattaatttcactggncgtcgttttacaacgtcgtgactggggaaaaccctgngcgttacccaacttaatcgcctgcagcacatccccctttcgccaagctggcgtaatagcgaagaggcccgcaccgatcgccttcccaacagttgcgcagcctgaatggcgaatgggacgcgccctgtancggcgcattancncggcgggtgtggtggttacgcncaacntgaccgctacacttgccaacgccctaacgccgctcctttcgctttcttcccttcctttctcgccangttcgccggggttttcccgttaagctccnaaatccggggggctcccctttaagggtt

SEQ ID NO: 446153 - DNA, 398 bp, Triticum aestivum
gggcatcttcaaggccgtagctccgaatttaatgaactttgtatgtaacatgactagaatttcgtgtagatcatcctggtgcatcttaacttgctgtttaacaacttgtacataatacttattcagatctggaccaatttcgaaatttgcttatgaggacttacccgatttgttacatgttgtttccggcctcatttaaacttgctttgatgtgttgctctagtatgtatcatatcttgccatgagtagcgtaaaatagcctttgtcatgcatcatgcttggttgtgcatcttgtcatgtttatgtgttgtgtgtttaccatgtggtttgctcctttccggttgtgcttcttctcgatagttcctgtttcgttgcgatcgtgaggattcgttctacta

SEQ ID NO: 446154 - DNA, 453 bp, Triticum aestivum
cgggccgacggggattatcaatttaaaacctgtgtctttttcttttttttcctagtttgtattctgtttctttttcattttctcgttttcccttttttattttccaaaaatgcttattcttttaaaattggttcaaaattttaaaacacgtttgttttttcaaaatatgttcaaggaattaaaaatatttctattttaataagttgtagaactagtgaaaatgtttgtatcttaaaaattgctcacattgaaaaaagacgaacattttaaaaaagagcgaacaaaatttagatcatggttttttttgaatgtagaaaagattagaaaacgggaacattttctaaaattctgaacaaattttgaaagcatgagcattatttgaaactccttgaattttttaacattgaacttttctgaaagccatgagcgcttggctggccgaacgggtgcctg

SEQ ID NO: 446155 - DNA, 57 bp, Triticum aestivum
gtcgtattacgagcaagatcgtcggcttcctgactatacgcttcgtcggcacgtccg

SEQ ID NO: 446156 - DNA, 168 bp, Triticum aestivum
cggggagcgacagcgtttttatgtgcatttgtatgcacgacttgttgagcacgacatgggcatgaatgcatgttcggtgatttgcttcgtcgatgttcataccgacttctacatcatgagatctgtacagttcatgtaatcatgtgcacctttctgtgagaactctgg

SEQ ID NO: 446157 - DNA, 426 bp, Triticum aestivum
gtcgacggggcagtctttgtggtgttcaccatgaccctgaacgtgtacttctacatgtactacacgaaatcgacgcgccaggccgccaaaaagaccaacaaggccaccgccaatgtcggcatggctggctacgcatgacgagggagaaggactctggtttgatggaacttgcttgagtgctggatttagatagatattctggagcagaacgtagtagtttctggaaaatgtagcgtgtggtatggctctctatgatcagatcagatgtgtttgttcaggcctagttctcgtcttgcctgatctacagaatatttgatgtccaagacagcggcattgtgatactcctagatccaagttgtgagagtgagcatgatcatatgagaggggtgaaccggatggtccactgccaacgggctaagaattttt

SEQ ID NO: 446158 - DNA, 444 bp, Triticum aestivum
attcgccggtcgacggggaggagtgaccgcccagggccaagcccctggctaaatcgtaagtatccggatacccgagtaattcatactattcctttgttgcacagctttcccttatgtcgaatatgtttatgtagccacccaaagaccggctcgatgcgtcgtcgagcggttcactggactcgtcggatgtgaattcgcttccgacggcttcctccccccgccctacggacgacactgaagtgttgtcccaataggttccaatccaggaggaggtggtcctggaggcgccgcaaggtgacctcccggaccccaggagtgaaggggacagaaccccccagggctccaagtccggccctaggccggacaccgctccggaaccttcaaaggttccagagtccggcgggcgacctccttccaagaggatcaagcccaccgtgccgggga

SEQ ID NO: 446159 - DNA, 416 bp, Triticum aestivum
cgggtcgaccggctgtgcagaagaaaacccttttttttaggaacagaagattgcccttttactctcctagtaggaatatgtatgtgaatcaccacagaacaccccctacagcacaaactattttacataattacatttcacttttcaccttgcacgatttcctctgtgatttcccccatatatgacttgtctgttttgtgaggtatggtagtgctcacataattttcttgtattggacgatgatgctataggtgtcgagctttgcgatatatgatgatcaactgcatgcatagaaagatatagcagttgatttgcttcatagtatgttattgctaggctgctagttttgtgtcactcagtcaagtaggttatcatatgcttttagtgtttgcgagctatgtgcatatgtatacata

SEQ ID NO: 446160 - DNA, 210 bp, Triticum aestivum
gggtcgaccggtgctcgtgagtaaaacatatgtcttgaatgaatccatagacataactgatggaataaatcggaagtacatcttgtagatagattaactgttattaccacacaaatttctttgtcagttgctactagtataatactggaaggaagttgtaagtgttagtgatataatcctggctgcggttgctctccaaagctggagctt

SEQ ID NO: 446161 - DNA, 352 bp, Triticum aestivum
cgatcccaaggcatttgttaaactaaaaatcattggagattgcaccgtgtaatacaaagggtttgtgacttcggccaagccaagtgatacatgtacataccacggatttcccgaacatcacactaagggctggtcaacagctcctgcaatcaaacttccaagggtaaatgaaagcaattaagccgcataatccttcctccaacaataacgccttcgggaaacgagacgtccgctaaaggtcataatgtggaggatgaaacaccccttgtagcacctacgtggggaaagaagcccacgactggcaaatttcaagataaatgtggccgcatatggatcaaaatttaactaagaa

SEQ ID NO: 446162 - DNA, 340 bp, Triticum aestivum
cgggtccagattcggccgttttgactggtttggcttctatccatttggtgaatttgtccaccatgaccaacaagtattttttcttatggcttcctcctttaaggatccaaccatatcaagcccccagacgtaaaaggccaagttatggggattgtttgtacggcggtgggtggcatatggctttggttggcaaaaagctggcatccgacgcaatgttggacaaggtcttgtgcgtctgcccgggccgtcggccagtaaaaacatgtacaaaaggccttgcttacaagggcccgacctgcggtgtggtaactaaggaagccctgaattagggggtatccgg

SEQ ID NO: 446163 - DNA, 407 bp, Triticum aestivum
ggggatttagaaggtactaagtaaaccacacctacatatgcaaactaagtgttgttttgacctcaaattgcatataaatcaaatactaccacatataattcctcccaaattactaaaacccacaaattaatcactatataaaccattgcaagagctaatctagcaatgagagatgaaaagacaaagttgctaacctttgtgaacatttgaatggatgggggccttcaaatcttgacaaaatttgggcagaatgtgtgatgagctcgaggaagaagggaagaacagagcacgggtggacgaagggtttatataggacggcctttagtaccggttcgacgcacgaaccggtactaaaggtgctggaggggccccagactgacaacatcctgccaccactctctttagta

SEQ ID NO: 446164 - DNA, 401 bp, Triticum aestivum
gtcgacgggcagagacaacatcgccagggaaaaccccgtggtgcgcgccgccaagatcgttcggttctgatcaacaggacaccacgtctacgcgtacccggcgaaatctgaagcagcagaaccactcttttcctttctttcctttgaaaaattaaaggcgttcgcgagagtttcttaaaggtgaaaaaaaaggagaggaaggtgaaagattgcgatggggcagccacgacgaagaaacagtgcgatgataacgttgttgttgtagcggtggttggcggtggagaggagatgaggaggatggggttggtgtgtactgttgtcccacaatctctatttaattcaaatttccctattgtataaattattattattattatcatttctatgatgcactattcgtt

SEQ ID NO: 446165 - DNA, 475 bp, Triticum aestivum
  unsure (1)..(475): unsure at all n locations
ggggnnngnagattttctggcgttcggtacanacngnangggtcgnccagctcactannggaggccgctctagaggatccaagcttacgtacgcgtgcatgcgacgtcatagctcttcatagtgtcacctaaattcaattcactggccgtcgttttacaacgtcgtgactgggaaaacctggcgttacccaacttaatcgccttgcagcacatccccctttcgccagctggcgtaaagcgaagaggcccgcaccgatcgcccttcccaacagttgcgcagcctgaatggcgaatggacgcgccctgtagcggcgcattaagcgcggcgggtgtggtggttacgcgcagcgtgacgctacacttgccagcgccctagcgcccgctcctttcgcttttcttcccttcctttctcgcacgttcgcggctttccccgtcaaagctctaaaatcggggggctccctttaagggttccatt

SEQ ID NO: 446166 - DNA, 481 bp, Triticum aestivum
  unsure (1)..(481): unsure at all n locations
ggnngnntgntggtctcctcggnctgcacggtaccaatcncaaattcgcgggtcgacgggganagagaganaganagagagggagagagagagagacaaaaaaaaaaaaaaaaaaaaaaaaagcggccgctctagaggatccaagcttacgtacgcgtgcatgcgacgtcatagctctctatagtgtcacctaaattcaattcactggccgtcgttttacaacgtcgtgactgggaaaccctggcgttacccaacttaatcgccttgcagcacatccccctttcgccagctggcgaatagcgaagaggcccgcaccgatcgcccttcccaacagttgcgcagcctgaatggcgatgggacgcgccctgtagcggcgcattaagcgcggcgggtgtggtggttacgcgcagcgtaccgctacacttgccagcgccctagcgcccgctcctttcgctttcttcccttcctttctgccangttt

SEQ ID NO: 446167 - DNA, 351 bp, Triticum aestivum
tcgagggttggtttagaatttcgccgggcttcgttcgctttacaaataaaccggaaaataaagccccgtaggagacagagaaagggcattttcgtacccgatgctcatcttttggctgtgattatgaaaccatcattcggaacaaatcttcagttgtggattaaatcgttctgtagtgatctttcgggctgtttattttttcttttcctctttgaatgtgctgtagtggccttattacatcatcgtatttgtcttgcagaacaaaaaaaaaaacaataaaaaaagaaattactgcagcacaaaaagatacaaaggtgaaataagacgataaatgaaaaaacataaaaagct

SEQ ID NO: 446168 - DNA, 140 bp, Triticum aestivum
cctcttttattgataatttcatcggtgagttgtgcgctatgatgacgctgtaacttggaaaatgcatcaattgcttttgttcacagttagacctgtactgtgaaattgtcagtccatagttgaatgtgtgtgccatttgg

SEQ ID NO: 446169 - DNA, 450 bp, Triticum aestivum
gtaccggacctacattcgccggtcgacggggatggactcttttcggcggagtccgggaagtgaacacggtttttgggttatgtttgacgtaagtatgagtttaggatcacttcttgatcattgctagcttcacgactgtagcgacccgacccgaatggatcgaatatctatgcttaagtgtcatccctggatcggtatgctgacacatacagtactcgaggatttataacagaggtaaatcacatgtataaagtaacgtaaatattattacctcgaatacaaatagcggaagtaacaaggttgtggattcccatcaacaccaacgacaaagttgagtgtagaaaccgtaaccctaacgtatcacttactcgtcgtaagatatcttgcaacatgagacgttgcaaccatgtaggtcagtacattcaatgtactggcaaattcacaccatag

SEQ ID NO: 446170 - DNA, 402 bp, Triticum aestivum
gtcgacggggcatggaggaggtcaagactcggctccaagggaagatcagtgagtggtacgaggacgaggaggccaagacccgcgccaaggccgtctccaactccaagcccggcaccgtttccaagctcaagtccgtctccatctccaagcccaagtccaagatcggctccgccaccagctccgcccccggctccggctccaactcgtgataggctgataggttttcatatttgatagctctttatatgtggttgaggagagactgcatattatgtttgattgcaagcttcgagtcactcattatgatagctctttagttatatgatcttcttggtattgtccactgtaatgtatggcgcgtaacatatttgacctgctatagcttaattttcatgccttgcc

SEQ ID NO: 446171 - DNA, 422 bp, Triticum aestivum
gggtcgaccgggtatatcaattcatttctgttgattgtttcctctgcatcttgcttattgctgtgcaatcatcagaccagctggacgaggcttgtcctgttttgactaggatagttgacaatggaagaaattgatatggtgttgagctattagtaggaatgcaatagctgaattacagccctcttgatttttttcgatattggttcgatgctaaaaatagtacacaacctaacagaaagagaagaattgccctctgtaattcagcatttgctgctctgttttcattgttgcctctgcatcttgcttattgctgtgcaaccgtcatactagctagaccaggtttgtcttgttttgactagaataattcacaatggaagaaattgatatgatgttcctccgattattagagtgtaacggctgaa

SEQ ID NO: 446172 - DNA, 430 bp, Triticum aestivum
gggtcgacgggaggtactaagaggcgcatccggtcatgctgcctccgcaggcgccggtgcagctcacgcgggccgcgcaccgggcgatcgagaccgtgcagcagctcataggagagccgctgagggaggatgggccagtgcttggcgatcactttgatccgcttcctcctggtgcattcggagcgcctatgcctgttgttccagagcagcggaagcagccttatcgatcacatgagaccagtgtattttctgcacacgatcccaagcccatgaaggcatcagcattcttgccaagcatagacccttctgtttcaagtacagttaccgggaagaggaagtacatgtctggaaattcttctcatcttccttcacgggcagtacatgagtaccagtttcttccagaacacactagcgatatatatgagagaac

SEQ ID NO: 446173 - DNA, 438 bp, Triticum aestivum
cgggtccaccggcatgcattacatatgatatgtgccctctctctctcacgcacacacgcatcctcacgattcatgactctcctgagtcctctcgcacccagcgtctaactgtaggtagacgtcacacacatatgtgctattcacaccctaccctcagaacttctaaaaaataaaagacgccgcacaccttttattttaactcacacgtcacacatttatactagtactgttgtggcgaacattctttgggcgtagtatattgtactctcacggagagaagcagtgcacgcacacactagttctctcacagccactcgcgagtacacgtaggagcacattttttgaagctaggagcgcatttgtttacaaagaggcatcccaattgacattttgactagtctagttttcaacttgatagagggtcgaggaccgcacatg

SEQ ID NO: 446174 - DNA, 185 bp, Triticum aestivum
gtaccggatctacaattcgcgcggtcgacgggtagaagcaagcatgcacacaaattaagtaaactttattttgccacagctttagttaaccgataggctcaacatggaaagacacgaagggctgtgtccatatatagaagttgcctgtttgttaaagaaaaaacaaagaaacacaaaataaagaa

SEQ ID NO: 446175 - DNA, 384 bp, Triticum aestivum
gggatcccggaagtcacgaggagttccggaatggtccggaggtaaagaattatatatgggaagttgagtttcggccattcggaaagtttcggggttcaccggtactgtaccgggaccaccggaagggtcccgggggtccaccgggtggggccacccatctcgaagggccccgtgggctgaagtgggaggggaaccagcccatagtgggctggtgcacccccctggtccccccctctgcgcctagggttgggaaccctaggggagggggcgcctccacttgccttggggggcaagtctccccccttggccggcgccccccctaggagatcccatctcctagggccggcgcccccctggggtccctatataaagaggggggttgga

SEQ ID NO: 446176 - DNA, 436 bp, Triticum aestivum
attcgccggtcgacggggcgatggcacgacgctatgggcggcataacggatgacctcttcaccatgattaacattcttcaaataccaaattaacattttttggatacatggtcaacattttttctatacagattttacattttttaaatggttgattacatttagaaatacaagtttaacattttttaatacatggtcaacattttttgcatacgcatttaacatttttaactgcttgattaacatatttcatatatttatttattttcaaatgcttggattaacatgttttaaatacatgatcaacttttttcatacacattgtatatttttgtacacattttctctatacacataatatttgtcaaatgattgattaacattttttggaaatgttttgatgtagattatttttgtaatatgtttattaatagta

SEQ ID NO: 446177 - DNA, 415 bp, Triticum aestivum
gtcgacaggaagaagccaaaggaaggtatggagcgtatcaccggttggtgggcaaaggcggtccgcgtcagtttctttctgtccgtcctcttctcccaactgggtggagtgattgcggggtttgccttaaactactggttgcagatacaggagaagtgtaagtttggtggttttcttgagatcattcccttggcacttgctcttggtttctggctgctgttccatggtttctttggctggatctccatatcccaaaactgactctggacttgatgagtatgaagccggctatgagttcttcgaattagtttgatttatgctttcttcaaagttgatgtccatgtgcggacaagatcaacatttatgcttccatgtcttagtttttaaaaaaagctgtgccccgtgggcaagagca

SEQ ID NO: 446178 - DNA, 473 bp, Triticum aestivum
  unsure (1)..(473): unsure at all n locations
tggnngcaacttctattcgttcgncacggtccacacatcccgggccnacantttaggtgaacttttcggggaaatgtgcgcggaacccctatttgtttatttttctaaatacattcaatatgtatccgctcatgagacaataaccctgataaatgcttcaataatattgaaaaaggagagtatgagtattcaacatttccgtgtcgcccttattcccttttttgcggcattttgcctcctgtttttgctcacccagaaacgctggtgaaagtaaaagatgctgaagatcagttggtgcacgagtgggttacatcgaactggatctcaacagcggtaagatccttgagagttttcccccgaagaacgttttccaatgatgagcacttttaaagttctgctatgtggcgcggtatatcccgtattgacgccgggcaaagagcaactcggtcgccgcatacantattcccaagaat

SEQ ID NO: 446179 - DNA, 385 bp, Triticum aestivum
cgggtccaccggtggaaccaacattatttgttgctagaacctaggttttttgctgcatcgacttctttttatgctaatgtgtttttgctggtttgctgcatcgacttctttttctgctactgtcttttttgctggttccaacaaccttttcgccggcggagctgcaaccggtgtgttgcaaagctggaaccagcgtccaccgatgctggaaccatgcatatttttgcgacaagcatatccatgttttgttggaaaccatctcatttttgctggaagtacgcgatctatctttttgctggaaccatatcatttttttgctggatccttgatttttgctggaacgtctttgttttcgctacaaatggcatcgaaaattgacaccatg

SEQ ID NO: 446180 - DNA, 345 bp, Triticum aestivum
aattcgcgcgtcgacggggaaacctgggtacaacatcaatatggctagcctagatgactaggtttctttcttgtggtggaaccagcccatccaggttcaagtcctaaacttgacatgggtgctctcatagaaggtgtgtgcacgtgttgtgagcgtctgcgtctgcattgtgtttctaaaaaaaaaaatccccaccccactctttgcgagattcgctaagttcattgtgcttgtgcattacatactggaatgcgttagttacctagttacgtggcactagaacaacatttgtgtactgagtattcggacaaagtttgattttaaagtgagcaactttgtttttat

SEQ ID NO: 446181 - DNA, 180 bp, Triticum aestivum
gtaccggaccgacaattcgccggtcgacgggcagtttgcgttgcttcgacagggagccatctggtgaagagaggcgcctgtaaaatagctcagagtaagtgagattggggaggaagtgatgtaaatttccttctcgtctcagctgagctgcaataaaattagcatagcattttttgtcgg

SEQ ID NO: 446182 - DNA, 452 bp, Triticum aestivum
  unsure (1)..(452): unsure at all n locations
gtaccgtatcaagaattcgccggtcgacgggggaaaataatagttcctccaaggatccacattttatctctggcttctttcttatattaaaattatgactagggataacctgctgaagagaaatttgaacaagtccattgatttgtttttcttttctgaacctgagagtgtacagcacctgttgtgtgactgtttggtagctagacttgtatggaagcaaatcagttgcttattctctatgcaaattggagtttcagtagagtcagttacttccctttgggttgctggtaaaatacttgacgctctgaatactgctgtagctgctgtgctccgggctttgtggaaacacaggaatgccatgatctttaattgagttgtttggttttccttgaccaagatctggtcgctgaccttacgaatgctcaggagatggcgatcgctcttcanacatc

SEQ ID NO: 446183 - DNA, 91 bp, Triticum aestivum
acattttatctctggcttctttcttatatttgaattatcactagggatattctgctcaagataaatttgtatcacgtccactcatttgttt

SEQ ID NO: 446184 - DNA, 432 bp, Triticum aestivum
gtcgacggggatgatggagccatggatcgtgaggaggatctcttcctctcctcgttgctctccaagttggagacgctggaaaacgatgatgatccggacggtgccgaactgagctccatcaatcctcacccggagagcggcgaggaggcggggccaggcgacgtggcgaaagacctgagcaagatcaagaggcagaacatgatcacccacatcctgctcggcacggtgatggtgatgatcgccgcgtggcagttcaacgaggtgtcgttcctcctcgcggtgcagaagaagctgaccaaccctttcaagtccgtcggggacatggtcaagagtaccctcaagatagggaagaagccggtggtcgaggcgatcgaggcgtcgcctctgccccctgtcggcgtcccggacgttggtcgggctgatctgccgatg

SEQ ID NO: 446185 - DNA, 433 bp, Triticum aestivum
gtcgacggggagcatggcagggctggccgtgggtgcaaccatcctgcttaatgtgctgatagctgggccggtgtcgggggcgtcgatgaacccggcgaggacggtggggccggcgttgatcgggagcgagtacaggtcgatctgggtgtacgtggtggggccggtggccggagccgtggccggggcgtgggcgtacaacctcatccgcttcaccaacaagcccctgcgcgagatcaccaagagcacctccttcctcaggagcatgagcaggatgaactccgtctccgtctgattccttatcactagcaacgttgtattactactacaaggctatgtaattgtcgtcatcgtggccatatatccatggcgtatcgagtgggctacactctactcctctagtggtcttggcctaactgaacctgccagagtatgt

SEQ ID NO: 446186 - DNA, 423 bp, Triticum aestivum
gggtcgacggggagctcaaaccggatagttcgaaataccaatatgccagtagcagcagtcctcccatgccgacacgtcttccacgcagactgcctggaggaaagtactccgaagagtgaagcccatgaaccaccttgcccgctttgcacgcgagctcccgatagtgaaggatgtgtatcattctcggagcctcttcacgccgccctcagatccgctcgcaggaatcatggcattcgcttttcttctggtgatgcgggtggtagcagcagcagcgcaaacccttctcgcaacgaccatgtgctgaagagaaatcagtctgcgctcgcgccagcgcgcagcggctcgctgttccggaaccgtttcaagaagcagttccccttcaaggggaggctcgggaaggacctgtttggtggcaaggttttc

SEQ ID NO: 446187 - DNA, 433 bp, Triticum aestivum
cgggtccaccgggctcctgtatagattcctgatgtctccttgggcagtgaggttagggtttctcgtcatgtggggagatttggtatcaggtgcttcaaatctattcaagggttcgacgatgacgattacggctccagggcgctggttcttaggggcaggtacacgaagacttcccaactattatcgacaaggtcaagttgactcccgtaggtaagtggcgacaacagctcgttcagacgatggtagtggtcgttcgatggtctcgaaatctcgatgcatttttattattatgctttgggtgctttgtacttctggtgaactttggtaatgatctggatcattttcccaaaaaaatgcacgtgaaatgctacttatattctatagatacttacaagtatataataatcatatatgataaatcataatatgtgtt

SEQ ID NO: 446188 - DNA, 69 bp, Triticum aestivum
ggggtataacagataatatcgatataggttattctacaagattactctatagatccatcagctctaagt

SEQ ID NO: 446189 - DNA, 413 bp, Triticum aestivum
aattcgccggtcgacgggaaggatcaaatgttgcaaacaagttaaaccttgcaatcaccgaagccagaatgcccaaactataggtttcagggttataggtgattgtcaacagtgatttctataaatcttgtttgagcattagatttggtgctgccttttttttagccgtgacacatttgcacatcgcatgttcctatcttacaattggcaaccaggtgtctaagtggcatataggaatatatcaggcagcgtgtatgttcagttaaaccttagcccgtcattggaatgattgatgtcatattgcacattttccacaattaaaaaaaaagaaacaaaaaatgaaaggagaagacagaaattagagaccaaaaaatagaataaaaggcaaataaaaaatagcggccgctctaaag

SEQ ID NO: 446190 - DNA, 58 bp, Triticum aestivum
  unsure (1)..(58): unsure at all n locations
tnnttgtcttttttttctttttngntcttttttctttgnttttttttngtgttnttnt

SEQ ID NO: 446191 - DNA, 411 bp, Triticum aestivum
cgggtccaccggttctgtatattttatgtttcccttgtactatctctgtaccaaaaatgtcttatatttggtacagatatttctggaggttaaactactctaaaaaacgtcttatatttggtaaggaaggagtatacataaagccactagcccactgcgtataaatgcactgttcaagttcaatagatagactatcgctactcatcaaaccattctgccgcctctttatctatagcaaagtaactaaaccataactgatgataatggcaattctgaagttgacagacacacataaatgtgtggttatgcttgtataagaaaaccgagtcatccggttaacaagagaaaaactgaattaaagaccacacgacaacagattggctaactagcataaggagcatcatctgtcgc

SEQ ID NO: 446192 - DNA, 64 bp, Triticum aestivum
gagtcgtattatgtttggttggtttgataaatatgttctgctttctaaattggatataaacatt

SEQ ID NO: 446193 - DNA, 193 bp, Triticum aestivum
  unsure (1)..(193): unsure at all n locations
tntnttgttttttgtttggtgttttgtnttttttntntttctncttttnttcttnnttgtttgtttttttttttntttctatttngtntgttnttctttnnttttttctttgttttcnttctgtcttttcgtttttngntttgttctnttttttttttttnttntnttcngttgttntttttcntttttttnt

SEQ ID NO: 446194 - DNA, 427 bp, Triticum aestivum
gtcgacggggtgagtaaaccagcctcattttggaaacatgatctcaaggttgaccatacttccctcttcgcaagaactgcatcctgacatgaagttacttctttgttagatcaatactgagagcaacctagatccatttagtagaagccagataaacaagactcgaagaagtgaattcaaaaggagaaatataaaaacaggctccaaggtgagaacacccacttcctacatcaagctaaaaacgaaagcattaggatgattaagactcttcttattacacatcgaagaacatgaggctaagagaaacaaaaactacaacatatacacatcgaagaacacgaggttaaatgaaagtaattgaaagggtgttacttaccaaagctcgttttacaggttcggtgcagctcctctccaacttgccactttc

SEQ ID NO: 446195 - DNA, 84 bp, Triticum aestivum
  unsure (1)..(84): unsure at all n locations
tngttcgattngtttgngattgttnttttttttntttgcatcgntntcttgtnttttattntgttcntttgtcgntttttttna

SEQ ID NO: 446196 - DNA, 273 bp, Triticum aestivum
cgggtccaccgggaggacgaaatgtaagcaagcagctcgtacgtttgacgctgatggctcgtgttctaatttcatgctgcccagaccgaaaacaacggtgagggcgtagagatagggctatcacctatgttaattagtgttcccgtagaaagaaagtatgtgtcgtggttatgctgagacatgataaacatcgtttgcatatgtgttgtgtgtagtctgaagtctgctgttttctcattgatcttgaggtgaagaaacctgatcagtatggac

SEQ ID NO: 446197 - DNA, 183 bp, Triticum aestivum
gggtcgaccgggataggtaattcaagtcagcggaaagcaacaatcatcaggcaaacatggacatatgactgttcacaaaataaagttgtacaaaactaaaaaaacattcgggtgctcgacatgatccaatcttatctatgcttgcatgcaacattagctcgcttccacagtgtcacacatgat

SEQ ID NO: 446198 - DNA, 416 bp, Triticum aestivum
attcgcgcgtcgaccctggataacatccacatctgcatgcaatccacacagaccgatgtggagcgagcacaagctgatgcaaactgcagacctgttcgtcgatatcaagtgtaaaactctcaacacggatcacaccattgcggcgaacaacatcctgagcgcgatgcactagcaatctgtcacgcctgaggatcaaaggatcttgtgattaagtagaagtaggtaactcacacgcattgtcgagtcgatggattttgtacaattggcttggactttgtctttgttatgccgccccatatgcttcctagccatacgtacactttcgtacggttgttcaattgttttcttccggttgttacggagtccaaactagctttcggcatcaacaatgtctgactgacgtgccttacggtaaa

SEQ ID NO: 446199 - DNA, 415 bp, Triticum aestivum
ttcgccggtcgacgggttggagatatttgagcatttaaatattttatattattttaaatgcccaaattcaaatatttatgatttaaatcaaaaaccttaggatggcctaggaaaatgtgcaccacttttggcagaggttctgaaccaaggcaaaaatgatgggcattttagaagggcatttcaggttcattgaaaaattattttagtaaccctagttggtttcagaggggactgggggttctgtcatccccatttcaagtttctgatgaaagagtaaacatgatgcaacactctaatgcatgactagctagggtgtgacatcagcggaaccccaggccgcccggatagatgcatcggcctggagccaccctgagatcagccccaggcgccccaacgctgcgcgaaagtccaggcc

SEQ ID NO: 446200 - DNA, 423 bp, Triticum aestivum
cgggtaaaaacaacgatggtagtgaagtgtttgattggtttgagaaatatgttctgcgttcgaaattggatgtaagcattgatcacctagagctgtgctcactgttatcacatggtggtgatgcaagagataaacatatcaccttattgatgaatgctggtctcctgacacgccaactaatagatccaaacatgtactggttttctattccaagtattggtcctatcttgaaaggcctatcccaggggaggaaggaagttctttcattactgggccgtcggaagtacaaggagatgctactatcttcactggagaagacgaggttgaggttatcacctctcgacgtgcggttccacctccgcgatctgattgggtctggtcacgtaaagaccgttcaaacacccaccggcttacttgctcgca

SEQ ID NO: 446201 - DNA, 425 bp, Triticum aestivum
gggcaaggaggatcaccttatatttacccattgtatgggttgggtgagctgccacaggcttttgcacgtctaagtgctgtttatggtggcacttatatgttaaataagccagagtgcaaggttgaatttgatatggaggggaaagtgtgtggtgttacgtcagaaagtgaaactgctaagtgcaagaaggttgtctgtgatccttcttacttggccaacaaggtaaggaagattggaaaagttgcacgagcaattgctattatgagccacccaattccaaatgcaaatgattcccactcgattcagattattttaccacaaaagcaacttgggcgcaagtcagacatgtatgtcttctgttgctcgtacactcacaatgtcgcgccaaaagggaagttcattgcatttgtgtctgctgaagcaga

SEQ ID NO: 446202 - DNA, 60 bp, Triticum aestivum
  unsure (1)..(60): unsure at all n locations
gtngttgttgtgggcngtngatatttgntgncgaccttgtatgctgtngtattcnaantt

SEQ ID NO: 446203 - DNA, 440 bp, Triticum aestivum
gtacgagcaagaattcgcgcgtcgacgggatatatgcactttctagcaaaggtcgtgccgaaattttccgtgaatttcggcatgacttgtgctagaaagttggacatatcgagtgctcgattgtcgcgacgggaatgaaacaacatttccgaaacaaaggtcactttttttaattattcactttattataaaaagctcgataattaaacgactacgacattgaaccctaggaaacatgaccgacaccgatgaggccggaggttctcagtcccaattaggtcgagcacacgcctacctcgactttctggcggatcaggagagacagcaagctgggactgagactggcgctgatgacgacggtggtggcgccggcgccgacactgatgccaccaacgacaccgacactaagactggcgctgatgatgttgctaactacagca

SEQ ID NO: 446204 - DNA, 313 bp, Triticum aestivum
  unsure (1)..(313): unsure at all n locations
gacatagttagaaactaagccgacggccaagccgtcggcatattccttcatacagagctaccagtagctgacacgtggcacctatgccgatcggcatngtggtcgtgggaggatcggatgggttggtacaagtatttgtaggaagacgtcgtgtagcgtggaggcgggcgattaactgcactttctgatgatgcgcttcgatggtatgattcacagattgtgtatataggcgcccaggctgctgccgacacgatcgggggcacttacgtgtggtttctgcatggcatgcagctgatagtgctcgatggagtct

SEQ ID NO: 446205 - DNA, 192 bp, Triticum aestivum
tcgtattagttggtgagttagtatgtgaatgagataatttgtgggtattgatgtgattggaagttcgatttgtaggcttttattattattatagtatgtagagatgagatttttatgttttcatgtatatttgttttggtatggggaggtaagatttgtagtgagtaatgtgatattgaggattggttttag

SEQ ID NO: 446206 - DNA, 289 bp, Triticum aestivum
taattaataaaacatgggcttttctgaaatttttgtaaatctcgtttttatctagtcctttcctgtcaaaaaaaaaaaaaaaaaaaaaaaaaaaaaaaaaaaaaaaaaaaaaaaaaaaaaaaaaaaaaaaaaaaaaaaaaaaaaaaaaaaaaaaaaaaaaaaaaaaaaaaaaaaaaaaaaaaaaaaaaaaaaaaaaaaaaaaaaaaaaaaaaaaaaaaaaaaaaaaaaaaataaaaaaaaaaaataaaaaaaaaaaataaacacatcaaaaaatcaaaaagattacatt

SEQ ID NO: 446207 - DNA, 422 bp, Triticum aestivum
ggatcgaggagaaaggggatcaagaggatgaaggggcaccgcgccaccaccgcgggctggccaggcggccgttggcggcgagggaggagtgccggaggaggttcgctttctttggcagaatagggggtcgtctcgtatgtagaggtacatgagcttcctctactcacttttagtttccactccttctaagattttagcaatatcatctattatattagtactactactcagaagttttcggactggttcgtgtttacagtttagtcaatattgtgtgcattaacgctttcttggatatgcattttgatttgactggattaccttaatttatcatgtgtgctaactctaaagtctaaactatgaccatacggttgccacatacctacgaagacatgaaatcttcattcttggtaaaatacaat

SEQ ID NO: 446208 - DNA, 400 bp, Triticum aestivum
cgggctgaagcaggacctggagcgggccgaggaagagctcgacctcgttaagaagcagctggaggacagccaaggtatgtagtatcctgtgtgaatatttaggaaagatgcatggttcgtgctgacgaaagtgtcatgaactgtattaggggccacaaccgaggtggcagcccttaagaaggcgttagccaaggccgaggacaaagcggccaaggaacgcgcctcgcgcgagaagcgggaggcccgggtcagcgaggtccagcaagagctccaggacgtcgtcgagaagtacgagtccctggagcgtgattctaagactcaagagcccgaacttgccaaggcccgccagagcacacgagatgcccgagaaaaagctcagagcgccctccaagaaatccag

SEQ ID NO: 446209 - DNA, 131 bp, Triticum aestivum
  unsure (1)..(131): unsure at all n locations
ttacgcgttgcatgacgaacgttcatgagctcccttctgatagtgtcnnacctaaattcgaattcacntnnggccgtcagttttacanacgtctgctgactgaggaaaaannccctggcgtttttacccaa

SEQ ID NO: 446210 - DNA, 355 bp, Triticum aestivum
cgggttcaactaaggcattgatacccacgcaactttgcaagagaaacgcgcatttgacatcaaccgggcgcactaaggcggatcgatgatcacctgtgggcttcagcgggggcgcaaaacgatgcagtctgaggtactcctgtagccgaagtgatgtctcttctacagtgtcactctaggttcacttcactggccttcgattaacaatcatcctgtaagggaaagctctagcggtaaacatgttatccgccgtctctcaaatcgccctatctccaaccgggttaacaccgaaaacgcccgtaacgatcgcacgtcttatcatttgcacaccgtgatgcgaggcttggactctcca

SEQ ID NO: 446211 - DNA, 486 bp, Triticum aestivum
  unsure (1)..(486): unsure at all n locations
tttntncnggccgcacaggtcananctcgcgggtcnannagntcnccnaangnnngtcgactagaggatccaagcttacgtacgcgtgcatgcgacgtcatagctcttctatagtgtccctaaattcaattcactggccgtcgttttacaacgtcgtgactgggaaaaccctggcgtacccaacttaatcgccttgcagcacatccccctttcgccagctggcgtaatancgaatagcncncaccgatngcccttcncaacagttgcgcagcctgaatggcgaatgggacgcgcctgtatcggcgcnttaagcgcggcgggtgtggtggttacncgcagcgtgnccgctacacngccagcgccctagcgccngctcctttcgcattcntnccttcctttctcgccagattcggcgggnttccccgtcaagctctnaatccnggggnncccttttanggttccnanttantgnttaaggnncccccc

SEQ ID NO: 446212 - DNA, 426 bp, Triticum aestivum
gggtcggctgcatgcatggtctggcctccatccacgtctgatctggccgatgcggcctgctcgctgcgcgacggcggagatcgatggcagtcccgtgcacacgatgctggatggaggttcgtcgagcagatccgggtgaaaaccttgctctgggctagttgccaaggccggcaatggaaacgctcttttgtgtcgcccccttcttgaaggcatcgacatggagaagctccaaacctctatccgctacctccagggaaaaccctacaccagtcgattggatgatgtcggcgctcttgtgtcgtcctccctgggggcatcattcttggaggtgtgcattggctcgagggaccagtggacggtttcaatggtgaagcagcatttcatgtgacacatcaacgacgtggagtcttggcggcatggtgctgc

SEQ ID NO: 446213 - DNA, 504 bp, Triticum aestivum
  unsure (1)..(504): unsure at all n locations
gnnnnnnggnaactgtntacgccgggncggtacngctccaaaaattcccaaggtcgacggctcactantcggcggccgctctagaggatccaagcttacgtacgcgtgcatgcgacgtatagctcttctatagtgtcacctaaattcaattcactggccgtcgttttacaacgtcgtactgggaaaaccctggcgttacccaacttaatcgccttgcagcacatccccctttcgccgctggcgtaatagcgaagaggcccgcaccgatcgcccttcccaacagttgcgcagcctgatggcgaatgggacgcgccctgtagcggcgcattaagcgcggcgggtgtggtggttacggcagcgtgaccgctacacttgccagcgccctagcgcccgctcctttcgctttcttccctcctttctcgccacgttcgccggctttccccgtcaagctctaaatcgggggctccctttaggttcccaattantgcttaanggaactccaac

SEQ ID NO: 446214 - DNA, 419 bp, Triticum aestivum
ctcccgggtctacagatacagtcatctaactggtttattttaggctatggataaatgattctagcttcttgtaagagcctgacatggacatatgaggcatccatacctggtttgaatgacctccgacaccgtttacatgttacgacacgtccgaccatttatcacctattttcatcgagaaaactctagaaatgcaaaaaaaattaaaaaatctaaacaactctgcatttccttaccaagaaaactctagaaaaatacgaaacttgttgaaaaccaaaacaatttgtcatggtgccttgaattgttcatacgaggccatgaaaaaaattaggaaattttcaaggatgtcaaaaactgacgtgctctctaacacaccctttctggccaacctgaacaccttccgttgaacatgatgtttt

SEQ ID NO: 446215 - DNA, 430 bp, Triticum aestivum
ccgggtcgacgggttggagtatatttgaagtcaccattagttgatctacccacctctatgtgcaacccaagatatttctctgagaacaattatttgtgacctctaggatttccttaaccattgccctagtttctccggacaacccttcccccaaaaatatgttttattttatgtgttatctagaatagcatctaccagtattctcatctccggttggttgagtaaccgttgggcctaggaataaaaggcccattggcctgttccgggttggccatcccatatgactccacatcatgagaaaatcactagttaagaggtatcccttgcaaaagttactctcaaactccactcacgacaacaagtttgtcaaaacttatcgacatggtgttgataggttttgatgaactttaatttttgaagaaactttaat

SEQ ID NO: 446216 - DNA, 511 bp, Triticum aestivum
  unsure (1)..(511): unsure at all n locations
ggnnnnngnancnttaaaactncnacgccgntcggtaacggtcacnaattcccgggtcgcgggaccttgaaagcagctttttcaagtgtcagtagcgggacgttctgtcaatcggggaggtttttggtgacaagacctggagatatcagaagtgagaatgctgacatgagtaacgagaatcctgtgaaaaacacgatcgcctgccagtggaaggctttctgcgttcagtcaatctagcagagtgaatcggtccctaaggaacccccgaaagggctgccgtccgatgggtacacgaagtgacgaagttgtaaaaaaaaaaaaaaaaaaaaaaaaaaaaagcggccgctctagaggtccaagcttacgtacgcgtgcatgcgacgtcatagctcttctatagtgtcacctaaattaattcactggccgtcgttttacaacgtcctgactgggaaaaccctgggcgttaccaactaanccccctncaanaaantccccctttncccaaannggg

SEQ ID NO: 446217 - DNA, 394 bp, Triticum aestivum
gtcgacatgcctcctgcaaaggttattgacattcctcctgcaaaggcgctgcaaaaggttgatcctctggtgccatccaaggtgctccgaagagatgctcctccacagagtttgcctgtgttgccgaaggaaacaataaaagttgcttcttcccaccagccagacaggcagctgcagcccgttctgcacaaaccgaaggtgcctgtagtctctcccctcatcaaacagcagcagtcaagcaccttggcgaaagaagagccttgttcctctggcaggaagactgaaaaaaataccagaggttaagcagtcaaagtctgatcgtaagaagagccgcaaggctgagaaggaagagaagaaagagaggaaattccgagatctttttgttacctggaat

SEQ ID NO: 446218 - DNA, 403 bp, Triticum aestivum
gtcgacggggtccgatgaggcggcgacaaagtttaagccagcagctggcgggaacgccgcgggagccgacgcccagctcacggaggtgctggacttcgttgtggtggatgaggatgtggagaagtccagggactgggagtggaagtggagctgcaacgagtgcaaggcggaccccaccgcgccggcaggactcgtcgccaagaacaaggagttcgacaagatcatggatatcatacctgccatcatcaagcaagcagtcgccggcgcggacaattccaccaaatcggacaccaaatccaaatccaaatcctagggagccaactcttcgttatgtctactttcaaccttcgccgttgatgcatttctattgcgccatcccgtctgacccacaccagcagggtgt

SEQ ID NO: 446219 - DNA, 503 bp, Triticum aestivum
  unsure (1)..(503): unsure at all n locations
ggntnnnggnaacttctacgcagtatggtacgggtccacgaattccannggcnctagagatccaancttacgtacgcgtgcatgcgacgtcatagctcttctatagtgtcacctaaatcaattcactggccgtcgttttacaacgtcgtgactgggaaaaccctggcgttacccaactaatcgccttgcagcacatccccctttcgccagctggcgtaatagcgaagaggcccgcacgatcgcccttcccaacagttgcgcagcctgaatggcgaatgggacgcgccctgtagcgcgcattaagcgcggcgggtgtggtggttacgcgcagcgtgaccgctacacttgccagcgcctagcgcccgctcctttcgctttcttcccttcctttctcgccacgttcgccggctttcccgtcaaagctctaaatcgggggcccctttanggttccgaattagtgcttaaggnanctgancccaaaaaacnttaataagggtanngtt

SEQ ID NO: 446220 - DNA, 333 bp, Triticum aestivum
taaggtggtgctgatgacattttgaggtcgataacgtggaagagcatggattgaggtggctgttaaaaaaaaaaagaaaaaacaaagagaaaaagaaaccacaccgcctaaaaaagcaaaatagatcaaagagacgtcacatagacaacatcaccatcaacggaaacagaaataaacaacggacattgcaccctcattataggataacaaccacgtgcaacaaacactacgactccaacataatccccaacaaactaaatgccggagtacgctaacaaacctaacattcatggcaacaccctcaataacgcaaaattctaccacctcaacctc

SEQ ID NO: 446221 - DNA, 441 bp, Triticum aestivum
ggggcggcgggcggcgctagggttgggccgcgggtggctggcttcggctgggcctccccccggcttataaagcctagtgggccgggagtccgagtcggacacgacccctaggtcggttagtttttttttaaattattccgctcggaagaaaaataaaaagaaatactaaacggactccaaaaattccgaaataaattttcacgggcttctaaaatcaagccgcacaaggtgaacatttatttgggacctaaatgcaatttcgaaaaacgcacatttttcctaaattcaaataaaacaccaaaaaaatcttatttgatttttattattaaatcctcaatatttctttattttgggaaagtcattttattccctctctcatatttttgtaatagaaataattgatgataaaataaataaaatgaaatgattctattctcaaaa

SEQ ID NO: 446222 - DNA, 339 bp, Triticum aestivum
tcaaggggttaaaaattgtcagtactcaatgatgtatcgcgacctgaacgacataagcgacagatggcccttgtacaatcatcagaagcagagaattccgcgtggtggagcgcgtcgtgcgcgaggaatccggggcatccatgatgcacacccgcaccaaattaccaaaagtgggcgcttgtcatgcaagtcaagcggcaagtcgctcgtgtctagaaaacggtgatcaaagatggcgccgaccagaacgactaccggcgcgcactgcagcttattctcaccggcactcgcaagaaattcaaataaatgtgttgaagatcatcaaaggaaggaaaaaga

SEQ ID NO: 446223 - DNA, 442 bp, Triticum aestivum
attccgagtcgacgggggtaccgtgatgatcatcggggcagagattctagaaggcgaagtcggagtcggagtggagatagatatggacgtgacaggtacagagagagggatcatcatcgtcgtagcaggagtcgtagcactagccctgatgattacaagaggcgtggcagagacagaagtcctagtcgtagcaggagccgcagctacagccctgatgatgacaggaagggtggcagagacagtttgtcgcctgcacgcagaagcactagtcgctcccctcgcaagacaccacctcctcgcgaggggtctcctgctaagcgcaatgatgatcgatctcctgctaagcgcaatgatgaccgttctcctgttaggcgcaatgatgaccgttctcctgttaggcgcaatgatgaccgttcccctgttaagcccaattattaccggt

SEQ ID NO: 446224 - DNA, 427 bp, Triticum aestivum
attccaggtcgacgggatcacgttattcatggcatgatcatgtatataggcaatacgcctgtcacaagtagaccgactcctgcctgcatctactactgttactccacttcgagagcacttctatgcttgcctctccagatattaagttcatgacaaacagagtaatgcatgaagtatgatgacataatgtatacagaataaaaccaagcaatatgattaaaccatgtcgttttccccttagtagcaacaatacaaatacgtgccttgttacccctcctgtcatagagtgaggacaccgcaagattgaacttattagaaagcacctctccccctgaagataaatcaatctagttggccaaaccaaacggatggatcggagagaaatgcaaagctataacaattacacataataaagttaaaaaaagac

SEQ ID NO: 446225 - DNA, 314 bp, Triticum aestivum
cggggactgcgaaagccacgacatctaggttttaataggttgctcctagtattactcactgtataaatttgaaattcagaacaccctctcaaacatgatcagatctcataaagctcacatcacgtcacaacggaatggacacgcgcgtaaacgggtcgatcggtcgacctgacctggattgccgctgccgttaacgctgcacacattgtcgatgttccacatgttttactactattttctttcgaatcgtctcatctttttgtttagcggtgagatgtgtatattacccggtcctgggaaggggaggtgaattg

SEQ ID NO: 446226 - DNA, 393 bp, Triticum aestivum
ggggaggagcgagcagccgcgacgagtgcccctgctaccgcgacatgctcaccgccgggcccaggaagaggcccaagtgcccgtgatcctcgtcggtcgaccgtctgaacggaccaccggcttcaacccccatcctaccgagtaccgacaagagtaatggctgtgtgatattggacgcgcgtgcttatgtaacttccctgtgctgtgtgctcgtgctaaatattggtatgatacgtagacgtactctactagctgggatcctcgagtgagtgagtttgctgcctgtaaattaacaagtgtgtgtgtggctacctgtgtactcccatgtggttgtagcacgtactcgtagtagctgaaaaaaaaaaaaaaaaaaaaaaaaaaaaaagcggccgc

SEQ ID NO: 446227 - DNA, 127 bp, Triticum aestivum
cgggtcgtttcaatttgacaaataaaaaaaaaaaaaaaacatcaaaataaagaaaaaacacaaaaaaaaagaaaaaaaataaaaaatgggaaataagaaaaaaataaaaaaaaaaaaaaaggggcca

SEQ ID NO: 446228 - DNA, 503 bp, Triticum aestivum
  unsure (1)..(503): unsure at all n locations
ggnnnnnggnaacttntacgccgnncggtaccgcnccaaaaattcccnggtcgacgggtttacttncatgttttcaattataattgtccgttattattattgtttcgtcttaagtgagtaaccacatcaagtgttggtgcctggacacaaaagagagagaaagagagagagagagaggagagagagagagagagagagaggccaacagaaacagagtggtgctctgatggatacaagctcgtggtataaaaaggtgcctggtccaattaaaagagtgcatccttatgattgtgtaggtttggccaatggaaaatgaatgttttggtgtcatcatgatgatacagccatacaagacaccatgaggggtgttacatgcacgtttccaattacaattgcatgttcattattatgtttactctaaagtgtgctgaaccacataaagcattagcgcctaagatacacacacaagagaagatagatngagagaganaattnccacncca

SEQ ID NO: 446229 - DNA, 333 bp, Triticum aestivum
gggagctccgtagcctcgctcctcgcgacgccgctggacgggctgcccgccgcctctggtcgcctctggctgcactgcctagacgcccgatgggaactcttcttctctgtcacgtcgctcttctaggtctgtattcttctctgtttctctgttaacatctacgtgaatagattgatggatagatgcatgtattgatgaacaaatggtactgctaatgcattgatgtagttacggtcttttaatagcaaactagcccccctatgatactgtgtattatactttactgctatggtggttacacttttcctgtccgtaagatcggttaattacgat

SEQ ID NO: 446230 - DNA, 443 bp, Triticum aestivum
ggtccaggactccgggtcgacggaaggcaccatactattatgagtgcggtgatctagaaggttcagtccgccaagagcggactgactgaagcctgtgccagccttctaacaggctttgaggtaagtaaagaatatgtaaaattattatcgcatagatagtaacccatgatgctctgttcggcgttcagaaagaaaagccgaatagaggatctaataatcgcgggagtctaacataatcaagtcaatatgtgtacgcaggcttcgctgctggcctctgctgcactgactgcggaggtggatacgctgtagcagaaccttaagcggtccgagcaagagctcgtcctagccaagcagcagctcgaggagaaggatggtaagaaataccttattgaaatatgtgaaaggtgcaattgcaaaaagtgacaggattaacgcgggtattg

SEQ ID NO: 446231 - DNA, 505 bp, Triticum aestivum
  unsure (1)..(505): unsure at all n locations
ggnnnnngnaacttttacgccggttggtacggccccaaaaattcccnaggtcgacggggtgagctgccgcttcaaaaataaaaaaaaaaaaaaaaaaaaaaaaaaaaaagcggccgcttagaggatccaagcttacgtacgcgtgcatgcgacgtcatagctcttctatagtgtcactaaattcaattcactggccgtcgttttacaacgtcgtgactgggaaaaccctggcgttaccaacttaatcgccttgcagcacatccccctttcgccagctggcgtaatagcgaagaggccgcaccgatcgcccttcccaacagttgcgcagcctgaatggcgaatgggacgcgcccttagcggcgcattaagcgcggcgggtgtggtggttacgcgcagcgtgaccgctacacttgcagcgccctagcgcccgctcctttcgctttcttcccttcctttctcgccaagttcgccggtttcccgtnaagcnccnaanccggggggcccc

SEQ ID NO: 446232 - DNA, 421 bp, Triticum aestivum
  unsure (1)..(421): unsure at all n locations
attcncaggtcgacattgtctggaaaagattagagaagctcaaaaggatgacaaagaaattgctgaaataaaggagaagatgagtgaaggaaaagctaaaggttttcgtgaggtcgagcacgacaccttgtggttcgaggaccgtgtttatgtgccaaacaatgcagagatcaggaagttgatacttcaggaagcccatgagtcgccatactcggtacacctcggaaacaccaagatgtatttggatttgaaggatcgtttctagtggactggaatgaagaaggatattgccgagtatgtagccgtatgtgatgcatgtcagagagtgaaggcagaacatcagaagcctgcaggattactgcagcctatgcccatacccgaatggaagtgggataagcttggcatgggttttatcaccgga

SEQ ID NO: 446233 - DNA, 130 bp, Triticum aestivum
tcgacggggatcaatcattctaaacaaagagtagagtactcctaggagctatgtaggccgattccatcttccaagcctgtggagctgtggatctttttttgcagattgaaagcaaacttgtcgagctatg

SEQ ID NO: 446234 - DNA, 408 bp, Triticum aestivum
gggatcgatgaagaacaaaacaacctcctctcgactagatcgagcgacttgggaggacagaatcaagcgtggctacgaacactggctcctcatctcttgtttttctccaacatttcatagtactcggttgattgatatggcatccgtgaataagtcttgaacaagctacacctgaacaggggtttttataagttcggcatcatggaattccttttgttcctcatgcgaacctcatttcatgaaaggttcagtctattttttttcttctctttttgtaagtggaaacgaaacatggaaatagaacgatcacatgattctgcagtgtatactctcgtgtgataaaactaaaagagatggtaagatggttttagaatgacttgttcaatacttatcacacatttagctaac

SEQ ID NO: 446235 - DNA, 360 bp, Triticum aestivum
gggtgaggcccggacatccaagctgggtgaaggctcaacaccaaagtgaagcaataatgctgcatcgctcatagctactggaagtaaattatatcgataatttaagcatcagtgctagtataagatgtctacttatgcacggtatgatgccactatatgatggccagtgttgaagtacgaggcccctatatgatgcctactgatgaagtatgaaaataggctaatgtgtatctatctgtagcctcctgatctaagggagcaccgtatgtgtaatctctgaatgagtagaagactattatagcgtcaactttgaaaaaaaaaaaaaaaaaaaaaaaaaaaaaaaaagaaaaaaaaaaagga

SEQ ID NO: 446236 - DNA, 315 bp, Triticum aestivum
gggaacagcaatcagtagtagcacaagttgatctccgcataagtgttcttacatacaacgacggagatcttagatacaggcaacttgattaattgagaggttgtcagataattgtgtcataattggtaaatcccgtaccatgcacatatggtgcaccttgaagtaaagaactcgtaccataactgacgtaatgactgtcatgcttacaagtatcactcgtggacgagttatggaccttgcatagcaatcgagaccccctatgatcatgtgtataatactttactgctataatgattacacttatgctgaacgtaa

SEQ ID NO: 446237 - DNA, 307 bp, Triticum aestivum
gggggagcaggaagctttcgagggtgcgtgccctatttccgagtagcccgccctctgagagcgagttttacccccagtgatctcttgagaaataaggagaaaagccggcaaaccctccaagttgatgatctccctcccatgtttatttgtatgggtgaatagcgcgtcattgagctgctcatcccattcgctcgtctttcttcagcaattacatctctgttttgactttcgagttggatgccaaacttgactcaactgtagccctaagttgttgttgatgatgatgattcttcctttggctttggtt

SEQ ID NO: 446238 - DNA, 503 bp, Triticum aestivum
  unsure (1)..(503): unsure at all n locations
ggnnnngnaacttntacgcngtntgtacgggncccaaaaattccanagccatagtgtcnctaaattcaattnactgggccgtcgttttacaacgtcgtgactgggaaaaccctggcgtacccaacttaatcgccttgcagcacatccccctttcgccagctggcgtaatagcgaagagcccgcaccgatcgcccttcccaacagttgcgcagcctgaatggcgaatgggacgcgcctgtagcggcgcattaagcgcggcgggtgtggtggttacgcgcagcgtgaccgctacactgccagcgccctagcgcccgctcctttcgctttcttcccttcctttctcgccacgttcgcggctttccccgtcaagctctaaatcgggggctccctttagggttccgatttagtgctttcggcacctcgaccccaaaaaacttgattaaggtgaaggttcacgtaatggggcatcgnctgaaaaaaaggttttcnnccccttnaanntt

SEQ ID NO: 446239 - DNA, 439 bp, Triticum aestivum
ttccaaggtcgacctcgtcgatctaggggccagcgccgccggcagccggaggcgcatcgtcctcgtccatgccaccacgttgctgcacccggaccaaggaggagggtgaggcgccacgctgtcatgccctcgtcaaggaggaggaggactctgactaagcgtgggcgatgccggagccgggcttaaggaacagcggccctcgggaggcccctcccgttgtttgttttttgtttcctgcattaagagtcatgaagagccccatggggcgtgtaatgaactgtggcgcttgcacctttatatcagtgtttcccgcccatattctaggatttacattgttactaattgaaaggttcctgcctggcgcgattaggataacttagcttggtgcgcctgtgacccttggcgggtccctgcgtcaagggggcgcgctcctccggaa

SEQ ID NO: 446240 - DNA, 418 bp, Triticum aestivum
gggccataattgggcccaaatacgtagcaggccgttaacggtcttaaattgacgatgggctggaaactgtcaaatctagaattggcctttgatgggccaattctatgtaacttgtatgggccatgcttgtaaatgggcctgactcaagtaggccgctaatgggcaggcccgcttattttgatagtcccggccttttaacctgaatgggccactgttgggctgagacatgtgtcaacgtatcataggcgtgttccgtccattcgctggatgacaactgtccgaacgccgagccgacacatggatctgccggacaatgagaattttacacatggaaaatccccattggtctacgctgttaacgggttatcggatccaaaccggaacccgatagcttaatggcgaccagttacggtggatg

SEQ ID NO: 446241 - DNA, 510 bp, Triticum aestivum
  unsure (1)..(510): unsure at all n locations
ggnnnnngnnnnnttgnaaacgtctacgccggccggtaaccggtccaagaattcccgggcgacgagctcactagtcggcggccgctctagaggatccaagcttacgtacgcgtgcatggacgtcatagctcttctatagtgtcacctaaattcaattcactggccgtcgttttacaagtcgtgactgggaaaaccctggcgttacccaacttaatcgccttgcagcacatcccccttcgccagctggcgtaatagcgaagaggcccgcaccgatcgcccttcccaacagttgcgcgcctgaatggcgaatgggacgcgccctgtagcggcgcattaagcgcggcgggtgtggtgttacgcgcagcgtgaccgctacacttgccaagcgccctaacgcccgctcctttcgctttttcccttcctttctcgccaagttcgccgggttttcccgttaagctccnaaatccgggggncccnttaagggttccnatttaatgctttacnggaacc

SEQ ID NO: 446242 - DNA, 383 bp, Triticum aestivum
ggggagcacaagaaggcggaggagcacaagaagaaggacggggagcacaagaaggacggcgagcacaaggagggcatgatggagaagatcaaggacaagatcagcggcgacggccacggcgacggcaagaaggacggcgaccacaaggagaagaaggacaagaagaagaagaaggacaagaagcacggcgagggccacaaggacgacgacggccacggcagcagcagcagcgacagcgacagcgactgagccagctccggccgcgctccggcagcagcgtgcagtgtaggcgagatcgatgaacgcttgggagaagtgtggcatacatatatgttgcagggtttggagcgtgtggtagcatatgtatgtaatgcgtgacatgt

SEQ ID NO: 446243 - DNA, 510 bp, Triticum aestivum
  unsure (1)..(510): unsure at all n locations
tttccacgtctacgccgggacggnaacggtcatnaattcccggggtcgacggggagcacangagaagaaggccaaaaaaaaaaaaaaaaaaaaaaaaaaaaaagcggccgctctagagatccaagcttacntacgcntgcatgcgacgtcatagctcttctatagtgtcacctaaatcaattcactggccgtcgttttacaacgtcgtgactgggaaaaccctggcgttacccaactaatcgccttgcagcacatccccctttcgccagctggcgtaatagcgaagaggcccgcacgatcgcccttcccaacagttgcgcagcctgaatggcnaatgggacgcgccctgtaccgcgcattaaccgcggcgggtgtggtggttacncgcagcntnaccnctanacttnccaggccctaacgcccgctcccttcggcttncnccctttcctttnncgccctncttccccgggctcnccgttcagntcttcacncnngggggccccctttagg

SEQ ID NO: 446244 - DNA, 412 bp, Triticum aestivum
gggggcaagagacgtctcaatgttgagaggactaaatatatgcaaaagattgtttgtggatgctcggggaaacctgagcagcagaatagcagatcttgccgttgcgagtgccctgcgatggtgaggttactaagagctgcagacaatggatggtacattgctgagcatcgggcaagccacaatcattcgctatctcttacatgcggggaaaaggttcactggccatcccacaaacacacagatgtgtacacaaaggatctcgtgaaacagcttagggaaaacaatctgaacctcaacaaggtgtatagcatagttgggagcttcttcggattaacacagagcgtgccttttacaaaaaggtcattgcgcaatctgtgcgggagaataagcagagaccaagttgatgatgatg

SEQ ID NO: 446245 - DNA, 512 bp, Triticum aestivum
  unsure (1)..(512): unsure at all n locations
ggnnnnngcaacttttacgccggntcgtacncctcanaaattcccaaggcctcaagctcaaatcaggggctccctttagggttccgatttagtgctttacggcacctcgaccccaaaaacttgattagggtgatggttcacgtantgggccatcgccctgatagacggtttttcgcctttgacgttggagtccacgttcttaataatggactcntgttccaaactggaacaacactaaccctatctnggtcnattcttttgatttataaaggattttgccgatttcggcctactgttaacnaatgancngatttaacanaantttaacgcgaattttaacaaaatattaacgctacaanttaggtggcacttttcggggaaatgtgcgcnggaacncctaattgcttaaaattccaaatacaatcccaatatttnncccgctcaagaagacantancccttgnananatgccccaaggaacnntnggaaangggccaattttnnnttatnca

SEQ ID NO: 446246 - DNA, 448 bp, Triticum aestivum
attccttggtcgacggggactcggtgacgatatacttgtgccgaaggttactttttgagttgagtcgatcccggaacaggagccatgcaaagatcttcgcgtgatttggaacgcgtgaagaccagatggcaatggcatgcatgtcgtcgtcgtcatcgtgggagcccatggttagcgcgtatgctgccctcgtggagattcatcatcaccacccttgatgtctctcccgtctccacctttcaccttggcaccaacacccaacatcaccgacgcagtaatccatctatagttctgcacacaaaggccggggaaaagacaggcacaacagctacgagctcatgcacaggatcatagtctggcatgaatttcacctgattttgttcacgcgaatgatgcaacagtacttgttggatcgtggtgaactgtatatttaattttctcctcaagg

SEQ ID NO: 446247 - DNA, 419 bp, Triticum aestivum
tcgacaccgccacattaacaaccctaaagaacgaagccgcataatataatagataggagtaaacatacactagtagaacatagggctttcgttcgggccaaataagccccttagtcccggttcagtcatgaaccgagaccaatgggggcattggtccgggttcgtgaggctaaaggcattagtcccggttcaaatgggacctttagtcccggtttgagacacgaaccgggactaaagggtgcgatgccctttagtcccggttcatacctcaaatcgggactaaagattagacctttagtcccgtaggcctgtttgcaaatttctagaatcctcaaattctaaaaggaaaaaaagttatgctcaaaatttcatttttattaaaaaaatttggttaaatctggtcaaactaattattcaag

SEQ ID NO: 446248 - DNA, 519 bp, Triticum aestivum
  unsure (1)..(519): unsure at all n locations
acgtttagncgtctcgtacgccccaaaaattcccaaggtcnacgagctcactagncggngccgctctagaggatccaagcttacgtacgcgtgcatgcgacgtcatagctcttctatatgtcacctaaattcaattcactgggccgtcngtttacaacgtcnttgactgggaaaacctggngttaaccaacttaanccncttgnaanaaanncccctttcnccaactggngtnanacnaanaaggccgcaacgattgcccttcccaanaattgcgcaacccgaatngngaatgggcacgccctgttcggngcatttaaancggcgggtgtggtggnanacncanagtgacngcnnacatgncaaagcccnaaaagcccgcgccctttcgcnnttttcccttccttntcgncanttngnccggggtttccccntnaaaatctnaaaatcgggggggccccctttagggggccccttttaatngnttttaangggaccccgngncccaaaaaaacttnttg

SEQ ID NO: 446249 - DNA, 507 bp, Triticum aestivum
  unsure (1)..(507): unsure at all n locations
ggnnnnggnactgtttacgccggtcggtacggctccaaaaattcccaaggtcgacggggcgccaagaaaaaaannaaagnaaaaaaaganaaaaaaaagcggncgctctagaggatccagcttacgtacgcgtgcatgcgacgtcatagctcttctatagtgtcacctaaattcaatcactggccgtcgttttacaacgtcgtgactgggaaaaccctggcgttacccaacttaatgccttgcagcacatccccctttcgccagctggcgtaatagcnaanaggcccgcaccgatgcccttcccaanagttgcgcagcctgaatggcgaatgggacgcgccctgtagcggcgcataagcgcggcgggtgtggtggttacgcgcancgtgaccgntacanttgccaacgccctacgcccgctcctttcgctttcttcccttcctttctcgccacgttcgccggntttccccgtaaagctctaaatcnggggggccccttttanggttc

SEQ ID NO: 446250 - DNA, 537 bp, Triticum aestivum
  unsure (1)..(537): unsure at all n locations
gggnngnnnnnnggnnnnngnaacgtttancnggtttcccggccngaaacggtcaagaatcccgggccgctctagaggatccaagcttacgtacgcgtgcatgcgacgtcatagctctctatagtgtcacctaaattcaattcactggccgtcgttttacaacgtcgtgactgggaaaccctggcgttacccaacttaatcgccttgcagcacatccccctttcgccagctggcgtatagcgaagaggcccgcaccgatcgcccttcccaacagttgcgcagcctgaatggcgaagggacgcgccctgtagcggcgcattaagcgcggcgggtgtggtggttacgcgcagcgtgccgctacacttgccaagcgccctagcgcccgctcctttcgctttcctccctcctttctcccacgttcggccgggcttccccgtncaagctctaaatccggggggccccntttaggggtcnganttanngccnttaangggacctncaaacccnaaaaaactttattangggggaangttcncc

SEQ ID NO: 446251 - DNA, 313 bp, Triticum aestivum
ttccaagtccacggggcagaaggatccggctccgacataccactctgaacgcttacaattgctgtgctcatctctgctcttcctgacggcaccgttgtcgtttcaccatagaaggaataccaccacaaggtggatgagataaccatatggcactatcctctgatcacactcactcttgacactcaagcattgaaacatcagtagtttagctcacctctgacatcactgacggtatccgcgaattttccttggaccctatcgtggaaaatgctgtatcatcaaaaatgctatagccaaagtccaaaaattcatc

SEQ ID NO: 446252 - DNA, 428 bp, Triticum aestivum
tctacggggacagcggtaatgatgatgacagtgatgaggacaacagcgaagatgactctggtgatgatggagcgttgattcccatggaggatgattctgatgacagtgaggatggtgatgattcctctgatgatagcgaggatagctctgatgaggaggaagaagaaacacccaagaagcaagagactgggaagaagatggcggctggaagcgtgttgaagacccctgttactgacaagaaggccaagattgcaacaccgtcaggccagaagacaggtgacaagaagggagctgtccatgtggcgactccgcacccggccaagaaggcgggcaagaccccagcaaccagtgagaagtcgcccaagtctggagggtctgtcgcgtgcaagtcgtgcagcaagacattcaacagttagggcgctctagct

SEQ ID NO: 446253 - DNA, 211 bp, Triticum aestivum
gtcgacgggtcgtactcaaactaattgtacatatggagtttcgatcttctgctgttgtggcccggtttaaaatgccactgacaagtagtcttactggcgcatttcctatttcgcagtaggaaatttctgcagtgcaggcttcataattgatctgtatactccatagccgtatgtacattcagtttcagggtatgtgcaactgccatttctc

SEQ ID NO: 446254 - DNA, 411 bp, Triticum aestivum
taggacgtgcgcaatccgggggactcggacctgcagctggagcggatcaacgtctactacaacgaggccagcgggggccggttcgtgccccgcgccgtgctcatggacctcgagcccggcaccatggactcggtgcgctccggccccttcggccagatcttccgccccgacaacttcgtcttcggccagtccggcgccggcaacaactgggccaagggtcactacaccgagggcgccgagctcatcgactccgtcctcgacgtcgtccgcaaggaggccgagaactgcgactgcctccagggattccaagtttgccattctttgggaggaggcactggatctgggatgggcacccttcttatttctaagattagggaggagtaccctgaccgaatgatgctgaccttctct

SEQ ID NO: 446255 - DNA, 291 bp, Triticum aestivum
cagcgagtgatggcagtaactagtaggaattaagaacaaacctattctatgcaataaaaaattacgacatagtaactaagaataaacctacactatacaataaaggatttaaggtatattgcatccactgggcatcgaagttcgccacttgtgatcataaagtgcaacgaagaagcagattacaaaaacttggcaccattgcagcgtaataaaataatactgaaccgagaccacttccaagatagttcaagaaaggttagccttgccggggaactgctgtgcaagctgctg

SEQ ID NO: 446256 - DNA, 385 bp, Triticum aestivum
ggggaggatcaattgctaggaaaatcacatcgctcatcctacgaccgccagccatcactgacgcagcagaccagtgtaccgtcatgtatcccgtttagtgcatacctctcgacatctctgcagtccaccggattcaccatctctaacacacgcatccgcttaccttcactcaacagccatcaagcaaggcgtttaatatcataatctccacatcccagccaatctacctggtcgcacatttatcagaccatcatatcacattctatgagacattctatgagaccaatcctcaataccgacgattctatgcctaattctataatcatatcagatcacacgccgttcaaggttagtcttgtaatcagttgaatgcagtctccaagac

SEQ ID NO: 446257 - DNA, 443 bp, Triticum aestivum
gggttcccactcccaataatgggttgtgcttcaggtgtgaacaaccagggcatcgttctaaggaatgcaaccagaaccagaatcaaatggcccttccagcaactggccgtggaagcagtggtggcagcggcgtcggcggtgcggggcagtggcggtagcggcggtgcggggttcgagacagggcggctagggttttatcccaggacgggccggcggcttataaaggttgagcctggaggagtccgggcctagcacgacccgtaggtcggttcagttcttttgaaatagttacgctcagaaaaaaaaaggactactaaacggacttcaaaaatcctgaaataaattttccccggcttccaaaatcaagccgcataggatgaacatttaattggggcccaaatgcaattttgaaaaacatgcaattttcccaaattccaattaaa

SEQ ID NO: 446258 - DNA, 390 bp, Triticum aestivum
gggtcgtttccgttcagcgcattgcccttgacatccatgtatttttagaagttcatccaatcgtcattttgatcagcgatcacgtcatactgcatatcctctatcgaggtagatgcttggatggacacaatcagttgatctccgcaccttagcagattcaagcaacaagtgtgtattgccatcaaattgactttggagagatggcatgctcgtttaggccacccttccttcttccaggaccaaacacgttcttagtagaaataaactctctgttgttggggagcataattctgagacgatttatgactcttgccagatagcacaacaccatcagttgccttaccctgtttcaactaccaattcggtgaagccattgtaactcataatttc

SEQ ID NO: 446259 - DNA, 286 bp, Triticum aestivum
gggtgattagagatgagaggttaaaataattcataaattcgcaaaatactagattcacaccataatcttttttaaaaggaggcactataccctcgcctactcatcgccccgacgagcatgccgaggagaccaggaggcacacatccaagggagtgggtgtgggctagggttcatcttctgatattgccaatcgtgtctaccgcccggtgaatgccaatcagacgtgcgcgacaaaccttacttgggcctgcagccagacattttgactgcagcaccgatttcacgc

SEQ ID NO: 446260 - DNA, 276 bp, Triticum aestivum
ggagtcctagagctagggatggatctcgaggttctggccggcgggagatccaggttctggccggcggactgacgttccgcgcggtggatcgcgacgagcggactgagaaccgggtactgaattgtcatgatttcaaatttcggaagggccttagctgtcaaattgacttgtctacaattccgcttcgcctgaagtcatctattaccgtccggagggagtactatccaatcacgtgatcacctaatatcattctttctctagcggcgcactcaagcc

SEQ ID NO: 446261 - DNA, 263 bp, Triticum aestivum
tcgacggggaaaaatcaagaaaaataaaaataaaaaaaaaaataaaaaaaaaaaaaataaaaataaaaagaaaaaaaaaaattaaaaagaaaaaaagaaaataaacaaacataaataaaaaaagaaataacatcaaaaaaagcgcctgtcttaaagtttccaaccttctttacccttccagacaatttcaacctccgcaaaattttccccacatattcatttaagggaccttctttttacaagctcttgatgggaaaaccctg

SEQ ID NO: 446262 - DNA, 151 bp, Triticum aestivum
gtacaccggcagacaggaattgtccgatacaagcggctgagcatggaaatcccccgttgctcggtgagattcaagcgtgtgtcgtagggaaaatacaatccgttcgcgctatctagactctacaattgtgcaggatccaacgcctggggtc

SEQ ID NO: 446263 - DNA, 345 bp, Triticum aestivum
gggccgacgggttagtgaatgtgccatgtagaaactacaggataacgtatggtgatagttaatttgatgctgctgaaaaacagaatcgttatgcgcacgattataattttagtaatttacagaaacgtgcgtttgcaatgattcgtttctcggtagatgaatgtacaaattatccaggacatcctagtttggtaggattttttaagttcgagacgtttgcgtgacatagagattgctacagactgttctgtttttgacagattctatttttcgtgtgttgtttgcctattttgatgcgtctatggctagtacgtaagggtaataaacatacagaacttggaatac

SEQ ID NO: 446264 - DNA, 507 bp, Triticum aestivum
  unsure (1)..(507): unsure at all n locations
ggnnnngnnnntttgcaagtnttacgcgggccngtaccgggtcanagaattcccgggncacgagctcactaatcggcggncgctctagaggatccaagcttacgtacgcgtgcatgcgcgtcatagctcttctatagtgtcacctaaattcaattcactggccgtcgttttacaangcgtgactgggaaaaccctggcgttacccaacttaancgccttgcagcacatcnccctttgccagctggcgtaatancgaagaggcccgcaccgatcgcccttccnaacagttgcgcantnaaaggnaaaagnggnacgcccnttgtnnggggcnnnttaccccgcggcgtggttttgttaataacncncatnntnaccggnaaaantttnnncanccncnnntaaccgncccgcttttncaaacctttccgcccntttttttccnaacaatttttccggctgtntcccccannaanaaaaaaaggggggggngcnnttttgnngngntcc

SEQ ID NO: 446265 - DNA, 441 bp, Triticum aestivum
cccgggccgacgggaaagaaaatgtgtgaagttacttgtcgtggaaattgtgaggaaaccaataaaaggcagaaacaaagaaaagggcattctggcgaaacagctgcaggaccaagggaaagggaagtgaatgttacggatcagttcctaccagatcaaccaatgcagggacattatgtacttggccacaactttggtcttggtacctcacagaaccttcgtgatgatttgaaccattttggtcaggcttctgcagttccaaccctgcaacagcagccattccctgggaatggtcaactaaccgaaacccaagcctatactggtgacatgcacgcattgcaattcatggagacgaatccccagatcaaacatgagaatggagaagagggtcagtcgtcgataccggtgtgggattttctctgatgtatgacttcacattac

SEQ ID NO: 446266 - DNA, 492 bp, Triticum aestivum
  unsure (1)..(492): unsure at all n locations
tntnnnngcnnnnnngccntaaanngtcaaggctcncgggtcgacggggacagccnacatgtattggtgctgttgaaaaaaaaaaaaaaaaaaaaaaaaaaaaaagcggccgctctagggatccaagcttacgtacgcgtgcatgcgacgtcatagctcttctatagtgtcacctaattcaattcactggccgtcgttttacaacgtcgtgactgggaaaaccctggcgttacccacttaatcgccttgcagcacatccccctttcgccagctggcgtaatagcgaagaggcccgaccgatcgcccttcccaacagttgcgcagcctgaatggcgaatgggacgcgccctgtagggcgcattaagcgcggcgggtgtggtggttacgcgcagcgtgaccgctacacttgccaggccctancgcccgctcctttcgctttcttcccttcctttctcgccaacnttcgccgggttccccgtnaaagctcnaaaa

SEQ ID NO: 446267 - DNA, 438 bp, Triticum aestivum
  unsure (1)..(438): unsure at all n locations
aattccaggtcgacgggccaaaaaattccattgaagaaatgaccaattcccctaattctcctgacaaaggcaagctgttgagaataaatgacaccggtgcaccttcatcaagtacgagggcaagagttgaacacttcccaaaagagtggttgggtgtaaaatctagtgctctgacccaggtaaattttgcatcctccttgcatgcatgaaagcggtcatctgagaaccttgaataaactgcaggcccagaaattgttgtgtatatccttggtgcatacatgagctgaaacaaatattaaattaacattagtcaagataatatatattttaccaacttcagaattataganagaatttaaagagtgttgcgcctcaacaacttatagtctaagaagtatgacaatcagtaaatttagaaaagtaacgtgatgtgtattc

SEQ ID NO: 446268 - DNA, 79 bp, Triticum aestivum
aagaatgggtgtcgcacgatggtatccggtaggacatcctcggcgtcttatgcaacctccgcttcacgttcgtcaccgt

SEQ ID NO: 446269 - DNA, 434 bp, Triticum aestivum
tcaggcaaatcttttgatgttccccctcgacgctgtctggcacccttccttactaatttctctgcagccatgaacttaaaactgaatggcttcaatatgttcaaaggcttcaagggcttttgcttgctggtcaaacaggaactagcttcaggagagttaatgtgttactgtaagaattctgcaaacaaatgcagactatgagaaccaagggattcttccacggacatgtacctgtggcagcattaaagatgcgatggaagggaagaggtcatatgcattctcagaagattttgaagataaatcagtttgaagacattgacctcatgttgcgaagacattcacttatgtgttgagtgttggttccagatttgtacgaatcaatgaataagtacaagtgaggaatctaactatatgtgaagcttaagtgaatatac

SEQ ID NO: 446270 - DNA, 437 bp, Triticum aestivum
  unsure (1)..(437): unsure at all n locations
aagaattcncaggtcgacggggtctagcagaacatctctcacagattttgccactgattcgtgagtggggaagatatagatgccaggcgggatatggtgagatacaatgccgatgtctaacgacagcagtgggtcgagcgacacgggcttctgtccagcgacgccaagaaagaagcggtaatgacgggcgccgaccagtctacgcgtattatggtcttacagtccaattttgtgtttttcatatcaacatgattgttttaccgtcaattttctgaatattgttagtgactaactatttcctaattttgtttatttaggttgaatgttgtttcattccccacgcggctgaatccaactcggtctttatcctgccttggagttctctctcataactgaagccacgaggtattcgatttatcggatttcgagctacctgc

SEQ ID NO: 446271 - DNA, 187 bp, Triticum aestivum
gggttcgagcacgggcactgcatgctcaccagcaagcatgaattgcgcgagacaggcggctagcatggatatctccctttgctctgttatcttcacgcgtgtgtcaaagggagaataccactcaatcgcgctatccagaccgtttatttgtacaggatccaacgcctggcatcagaccggccaaaac

SEQ ID NO: 446272 - DNA, 90 bp, Triticum aestivum
ggggacgaaaaagaagagtacgaggacgaagaagagcaggacaacgaagaatagaaagccgagctcaaggaatggcaagatggataagat

SEQ ID NO: 446273 - DNA, 357 bp, Triticum aestivum
gggtgctccaatggcgtcgggttcgctcgggcggctcgctccgctacacttccggcgacgaaacagggtcagacaagctcattgtggagaggggaaacgaggagagcaagcggtgcggctggagatccccttacggcagcgataacgttcggcggcgacggcggtctgtggcgcttccccgcgagatcggttttttcctaatcgaggcgtgcggcgagcggaagaatcgggagaaagggtgcggcgttcctcgcggagtcttgcccgtgtacggtgtctctgaggagcatgggatcgaacatgggcgcagatcaatctgggctccgctcggcctgttcgcgctgtgcgtccgtccca

SEQ ID NO: 446274 - DNA, 373 bp, Triticum aestivum
gggaatgcttcaacagtctgccatacatgatatagaccgtagttctttttttttggcaaaaacaatgtgtattcaactgacattgagtggttttctctccaagaaaactgacaatgagtggttttgcgacatagagtactcaacgaagcagtacagagctccatgggagggatgcggcacgtgaaattttgttcactacgagtgactttgtatggccggagcatggtctagtttgtgcacaaagctttgtacccagcgatttagttactaagttcagtaattcattgaatcaacattgcttggaatccagggacttaatgctgtgaactcgtttcttccaaatgaatcaacgtggcttttttatttatatgat

SEQ ID NO: 446275 - DNA, 383 bp, Triticum aestivum
gggcaaaaagaggcaaatagagaaagagagggaggatagagagagagggtgaataaaacggcaagggtgaagtgggggagaggaaaacgagaggcaaatggcaaataatgtaatgcgggagatagggattgtgatgggtacttggtatgttgacttttgcgcagaccccccggcaaccccgcaaaaaatcctcctggcaactccggaacactgccttgggattcccccaagaagaaaagaagattccaaaaagttaccttagttattccccaagtttttgaaaaccaaggtatcaatccagtaggaggctacgcgcgagtccctcgtacctacacaaaaacaataactcaatgcaaccaacgtgcttaaggattgtcaatccc

SEQ ID NO: 446276 - DNA, 250 bp, Triticum aestivum
ggggaataaggaagggatgtgctgcaggatggttaacagcaaagcaccactcagatggcagcctctctgtccgtgttacagctgaaatcagaaaccaactggtgactctttagccttagtgattgtgaagtttgttgccttctgtgtatgttgtcttgtccttagctgacaaatatttgacctgttggagaattttatctttgctgctgtttttttttaatcaaaagagggggtttcctccgatttcatt

SEQ ID NO: 446277 - DNA, 433 bp, Triticum aestivum
gggatctccctctcattacattatttgccatatgcctctcattttcctctcccccagttcacccttgccgttttattcgccctctctttcccgtctgtctccctctttcgcttgcctcttgtatgctcgttgtcatggccagctcggtcttcatcccttcgtctcccgacattgaagtccttcacttcaagcatagacaaggagaaaatttaaaagatgcttggtttaggatgctagaatcttatcgtggttgcaatatagaaggagatttcaaaattttacttcacaatttttacgttgggctaaccatatcccatagacaacttcttgattttgctgccaaagggagttttattgaaattgatcctagcttcgcttatgaaattataagggggatagtaggagtactccccctacaaaatgggtcaaccct

SEQ ID NO: 446278 - DNA, 446 bp, Triticum aestivum
gggaggatcgactacagcgagttcgtggcgatgatgaggaaaggggcccccgagggggccaaccccaagaaacggcgcgacgtcatgctataggagacggcgggttggtggaggaagccgccggccgatcggcgacagaacagcaagcgatcgagcgcgcgtacgaggccgctcgcaacgacgacgacgatgggctcgtgtacatttttcacagaaggggtcgagtagcaaatgttcatatatataccgtgggattgggaatcgaaaatgttcgtacgctgtcgggcgctcatcttcttcttctctggttctgctggttcccttgacttgttagtatgtatacatcagttgagtaagttggcattttttagcctgaatttgtacacggtttcaggcttggaaatgtacaggtatgtaacttgagtgaactaacgagtgtgtttttg

SEQ ID NO: 446279 - DNA, 365 bp, Triticum aestivum
  unsure (1)..(365): unsure at all n locations
gacgggcacccgcaccctctcaccaccatcgccaactcgccaccctaataaaaaggggaagcatcgtcataaaaagggaaaggcaaaggataagtcgaagcgtcacacatacaaagaggcaactggcactgatgtggcttcagatatccgagaaaacggcaaggaagaggctgtgatacgcatcgcggacgacggggaatgccgcaagagcaacaaagggaanggccgccatgangacaagaacaacgtgaatgtttcaatcgtttccggcagcatagagaacggtgctggtgacgagcatgccaacaagtcgggctcaatggcaatgaaccctcgttcggaaggtgccaccgacaaactcaatg

SEQ ID NO: 446280 - DNA, 245 bp, Triticum aestivum
agcatcgagcgatagcacacggatgtccagattgctcagatcaacgacaaccattatctcctacggtaactggaaccggttcatcatatgcaaactctacgacaacaccgcaaccaagacctacggtcagttcatcataccggcgctcttctggatccatgctaagtcttcttacggttcagctcagatcacttcgaggttgcctcctacagtctatcagcgggccttatattccactcttttaa

SEQ ID NO: 446281 - DNA, 373 bp, Triticum aestivum
gggggcacgacccacgtaccgccgacgaggcagtggggccccgcggacccaaacaccatcctccgcgtcttgtgccaccgcgacgacgaggccgccaaccagttcttgaagcgcacgttccagctcgccaagcggcggtgatgtcggccaaatgctcgaagaatgagtctaggtgctactatacttttttagtcccattactgcaacaacaacagttgcggctacgtgggctgtatctgtgccagcccaagtgagcggcctatgtaatgcgttcaggtgtgagtgtgccttgttaaatagccgttgctaaagcgtgagggttgaggatccatgtactgccaagtgccaacttccctaaaaaaaatgtactatc

SEQ ID NO: 446282 - DNA, 411 bp, Triticum aestivum
  unsure (1)..(411): unsure at all n locations
gggtactagagtgcatcactttgttacataaagttttacaaaaatattcgaaacgtttataaactacactctgggtttaaaagataaaatacattcaaacttggaaatcatatgaaaaaaaacatgagtgagtagaacatggcattgactctgccacaaactagctatggcaaaagctgtcagcattgatggaggaagtgcaaaatggggacgcatatgcatgtgtaaccaagtctcgaactagatgaacggctgcaccatgcatgggatatcccgtgcatgcagtggcggatccagggcccaggcccaggcctggggcgcggagaagatttccttcgtgtgctatagcagtatgtgcactgtagctgtactgtagcagagtgtancagcctggggcccggggctttgccc

SEQ ID NO: 446283 - DNA, 82 bp, Triticum aestivum
aaaaaaataaaacggaccaaaaataaaaaaaaaaaaaaaaaaacaaaaaaccgtaaaaggaaaacataacaaaaaaaaaaaa

SEQ ID NO: 446284 - DNA, 115 bp, Triticum aestivum
  unsure (1)..(115): unsure at all n locations
tnnttttnttntnngttttttgtggttgttttttnttgttttntttttttctttttntgtttttcgnttttttttttgttatttcattntttttnttgttcnnttngtttnttnt

SEQ ID NO: 446285 - DNA, 420 bp, Triticum aestivum
ggggatggccagatcaactactaagagttcgtcaagggcatgattgccagatgagctcggacccatgtgctccgaagacaggaggagaattgtgcattgcacagtcactttaacatgcaactcttagttgatcaatctccagttaagcagcctaactaggctgtagtgctaaaactgatcagacgactgcaattcctgctacgttctccagtgtgtttcaagacatcttgagttttatgtgaacttgtgtccactctgatgtaaccggaatgctgtttggcccgtatgtaatatatttcttcacctggatctgcttgactcatctatcatcaatgcaaaaccggtgttacgtatccgaatactcggtttgttcattcgccacacgtccctagcagaactaaactgcaaactttcccccac

SEQ ID NO: 446286 - DNA, 114 bp, Triticum aestivum
gtacggctcaagaattccaaggccgacgggatggacgaagatgcaggagacgaacaggaaccagcgcccacagggtgccgaacagccacttcatcacatgacatatacatggag

SEQ ID NO: 446287 - DNA, 389 bp, Triticum aestivum
  unsure (1)..(389): unsure at all n locations
gggtggatcatcctcgtgagtccctcatcataccggaaggaaaccaggaaagtcatggtcttgggtagacacgagcttgtccttagtccctcatcgagacgagtatgtccggtatggcatggtgaggtttgatgagtggtgatttattccactagtggtaatattgttggaggatacttggaccacctgactcggtcgtangccgagtcttgatcagtaccttccctatttgttggtaccaccacttgtccctgtcacagacagggtatggtttagtaagttgttaaccccttaccaaagcacacatcgtacagagaggccatggtggaagataccggaggcctccggtaggcatgccacctggtccggnggcatgggtgtttccggtt

SEQ ID NO: 446288 - DNA, 201 bp, Triticum aestivum
cccgggctgacaagggtatgataaaggtagtgtatcatacttgaaagatgaactgtacgtggcttgtgcatcggtacaattggcggtcggcgacgagctacggcatttcattaacagtccatcgcctgatgagcatgcgcgtcatacttgacttgggatgaattccagtgttttgcatcaagtatagcatttctctggggg

SEQ ID NO: 446289 - DNA, 429 bp, Triticum aestivum
gggccctttcatcttcaaggaaaaccgacgcaagctcaagacgtagcaagaaggatttctggcaccattgtcggggaggtcttcgctcaagtcaagacattccaagtacccatcacaaactcatctccctcgcatttacattattttccatttgcctctcgttttcctctcccccacttcacccttgccgttttattcgccctctctttcccaatctcctcctctctttttcgcttgctttcttccaacttgcttttgtttgctgttatgttggaaattggggaaattatcgtcgatacgggcaataatgataacatggaaaattctgaggctccggctgaagaacccctatcttgcatactaaaaagtttcgaatcggtagtggtaacattattggaaaggatgttattcaagatttcattacttgta

SEQ ID NO: 446290 - DNA, 423 bp, Triticum aestivum
gagcggcgaggagcgcatcatcatcttcaccaccaactacaaggaccgcctcgacccggcgctgctgcggccggggcgcatggacatgcacatctacatgggccactgctgctgggaggcgttcaagacgttggccgtaaattatcacctcgtggacgaccatgctctgttcccagagatacaggaactgcttgccgcggtggaggtgaaggtgacgccggccgaggtgtccgagatgctgctgcggagcgaagacgccgacgttgcgctacgggtgctgacggagttcctccaggacaagagaagcaaggcaagaaaagaggcaacagaaatcaagatcggcgtagcagagaaggcaatgtagcagtagtagtagtattcagtgtcagtatccccttcaacgggaccgttttattggaggag

SEQ ID NO: 446291 - DNA, 467 bp, Triticum aestivum
  unsure (1)..(467): unsure at all n locations
ttgnnangctttacgccgccaagtaccggtcaggaattcccgggtcgacggggggttccattgtaatgcatgactacttaactgggggattcaccgcaaatactactttggctcattatgccgcgacaatggcctacttcttcacattcaccgtgcaatgcatgcagttattgatagcagaaaaatcatggtatgcatttccgtgtattagctaaagcattgcgtatgtctggggggatcatatccactccggtacagtagtaggtaagttagaaggggaacgcgaaatgactttggttttgttgatttattgcgcgatgattttattgaaaaagatcgtgctcgcggtatcttttcactcaggactgggtatccatgccaggtgttataccggtagcttcaggtggtattcagtttggcatatgccanctctgaccgaaatctttggggacgattctgtattacaa

SEQ ID NO: 446292 - DNA, 411 bp, Triticum aestivum
aggaaccagtgcagacataagcacatcagttcttgttcaataatgctgctgcaacaatctcatcgatcttacaaaaaactagcaaaagggtctgtgtgttacaacagcagaaaaaaaatcataatctccaaaggccatagcaacattttgctgcaacaccgataacattttcacgaacattctgttcaattttattaacattttaatacacaaacttttaaaaaaaatcatgaacatggtttgatttttcaaacatttgttttcaaatttgcaaacattttcttgatatggaagattttttataaaattataaacatttttttaacccacaaacattttatgatttattgagcattttacttaaaaattctccttttaaattatttgaagttacaaatttattaaaggagg

SEQ ID NO: 446293 - DNA, 158 bp, Triticum aestivum
ggcgaggtgggctccgtgcagtggtaccaggtccagatcgaatgaatagctagagctagaagtaccatccgaccaatgctgcgtgactgcatgtgtatgtggttcgaacttcgaagggacgaaattttggcctgagatatatagggccctttggcgtc

SEQ ID NO: 446294 - DNA, 102 bp, Triticum aestivum
atccccctgacacaatttccccctttccaaatggggtataatcgcaaatgggcccacacatatcccttttcaaaacattcgcacacccaaaagggcgattgg

SEQ ID NO: 446295 - DNA, 373 bp, Triticum aestivum
gggcgatgttgctgttgaccatatctggacgcgttcacaagttacggcaccagtttcacgtactagtagcactagtcaatgtgtacgtgcaatgcacgttaatttggaactatattaagtgcatgcagatattaagtaggatattatttgtgtgttattatgtgattagcactatttttggcatgaaattaactacacgctaaacgtgttgagcgctcgacattgaatcagtctaggtcattggatgagaaggaatacatgcggcttgatgacgttttatatttaatttgatatggatctagcagaacattcaatcatcacaccatagatttcattcagtctgactccgactttacattcatacgatgatcga

SEQ ID NO: 446296 - DNA, 424 bp, Triticum aestivum
  unsure (1)..(424): unsure at all n locations
gggggagaagaaggtgctgcaagcagagaaatggggcctaaacacgagggaacgcacactgaaagtcagagagatgaacgaccgcttgaccgcttgatgatggcagagcgagccttcaccaacagagaagggctcgcagggagaccgtggtacaaacacatgatttatgcgtcgtcggaccaggacgactggggcaccaaggcgttccccggcatcgtctcggccatggccaacgcacagaagctcaacacgtcggagtcttggcggctgttgcagcatgagatttacaggggtgcaagggccgtgtccaaggcctctgcagtcctggatggaaggctaacatgatgccggagtagacatcagcacagcacancacagcacggaatttaccggtgcaaataagtagggaaagggaaaaagaatc

SEQ ID NO: 446297 - DNA, 379 bp, Triticum aestivum
ggtcaggacttcccgggccgacgggaccggcagccaccgagcctctgaaggacgagctctgagcatcggtctgtctagcagcagacaggtaaaggagggggaaacatgttttggcaaggcagcttccaacgccagattttgcgagggggggacgatagttggtcgttggatgtgttggccccggttttgcctgattctgtatcccgttgcgagaaatactgtaacaaatccgtcagtggtgtacctagttaaattatcttcaagtgacagtagaaatggttcgtggagagctttggtaataaatggcgcttctgtgcttggaaaagtgacctattccaacaagacacgaaccggatgctcaataggatataggcacaca

SEQ ID NO: 446298 - DNA, 477 bp, Triticum aestivum
  unsure (1)..(477): unsure at all n locations
ttnnnnggcttcaccggcccaanaccggtcaaaganttcccgggncgacgagctcactatcggcggccgctctagaggatccaagcttacgtacgcgtgcatgcgacgtcatagctctctatagtgtcacctaaattcaattcactggccgtcgttttacaacgtcgtgactgggaaaccctggcgttacccaacttaatcgccttgcagcacatccccctttcgccagctggcgtatagcgaagaggcccgcaccgatcgcccttcccaacagttgcgcagcctgaatggcgaagggacgcgccctgtagcggcgcattaagcgcggcgggtgtggtggttacgcgcagcgtgccgctacacttgccagcgccctagcgcccgctcctttcgctttcctcccttcctttcctggcaacgttcgccggctttccccgtcaagctctaaatccgggggctccctttanggttcgaatt

SEQ ID NO: 446299 - DNA, 344 bp, Triticum aestivum
ggggatcactatgatgagtcggattacgaggaagaagatgaagaggaacgacgatgacgacgaagtagtattagtactcgatgaggatctagatttagatgacgagtctgacgacgaatacgaagatgatcaggacgaggaggacgaggagtaagttcaataactgtaagactactaacctgatgaagcatattcagatgtcgaatactaacaccattcatatgcagacgattatgtttatgatgaacatgacttttgcatcaagggtccttcatcggccgttattagctgcctctctttacgatcctagcttaccttccctttcttgcgatttcataactctt

SEQ ID NO: 446300 - DNA, 496 bp, Triticum aestivum
  unsure (1)..(496): unsure at all n locations
tttgnnaaggnttangcnggccgganaccggtccaagaantcccgggtcgacggggacccaaggagaagaaggaaaaaaaaaaaaaaaaaaaaaaaaaaaaaagcggccgctctagagatccaagcttacgtacgcgtgcatgcgacgtcatagctcttctatagtgtcacctaaatcaattcactggccgtcgttttacaacgtcgtgactgggaaaaccctggcgttacccaactaatcgccttgcagcacatccccctttcgccagctggcgtaatagcgaagaggcccgcacgatcgcccttcccaacagttgcgcagcctgaatggcgaatgggacgcgccctgtagcgcgcattaagcgcggcgggtgtggtggttacgcgcagcgtgaccgctacacttgccagcgcctagcgcccgctcctttcgctttcttcccttcctttctcgccacgttcgccggctttcccgtnaagccnaaatccgggggnc

SEQ ID NO: 446301 - DNA, 286 bp, Triticum aestivum
aattccagggccgacgggacgcacatgcccacggacaacgtggtgttccacaaccagtactgggcgagcaacacgcggcgcaggcggctgaagaagaagcacctccggtacgagagcctcgagggcctcatgtccatgctctaggagctcgttgttaccagcaccactacagaacattggcagcggcacgggagtttcagaggccccggcgggaggcacgggagctttgcttctgcttctgctttgtggccgctggcagccctggtcggccggcggacctcgtgcc

SEQ ID NO: 446302 - DNA, 396 bp, Triticum aestivum
  unsure (1)..(396): unsure at all n locations
atccaaggccgacgggactctctacttttgcttcccactgatattgtggtggctgataattttgctgcagatgctgagagcaagattgttcctgcctctgctattcctgatggttggatgggtcttgacgtcggcccggattctatcaagaaattcagtgaaactttggacactaccaagactgtcatctggaatgggccgatgggagtttttgaatttgagaagttcgcagctggcactgatgcgatcgcgaagaagttggctgatatcacagcaaaaaggcgtgacaaccatcatcggcggtggcgactctgttgctgccgtcgagaaggcanggttggtgagtaagatgagccacatttcaaccgggggtggcgcaagcctggagctgttgga

SEQ ID NO: 446303 - DNA, 442 bp, Triticum aestivum
  unsure (1)..(442): unsure at all n locations
attccaggccgacgggacaagcacaaganaaatgatgccctgcccaaagaagataaggatcaacttgcagaaaatgctcaaaagggccatgcagagccaaaaccactgcctagcttcaagaattttgtcgtggaagaggaggaagggtcaggaggttatgggatcgtttatagggctcggagaagcgaagatggaaaagtatttgccataaaatgtcctcgtgagaaagctcattcacatcatgttgacaatgaacgaaagatgttggaacgatttggaggcaagagttttgtgattagatacgaaggctgttttaggagtggtgaactagactgctttattctagaacatgttaagcatgacagaccagagattctcannagagaaataatgtctttgagttgcagtggtatgggtattgtctgttcaaagctctttcaag

SEQ ID NO: 446304 - DNA, 214 bp, Triticum aestivum
gggaagactagtaagaaggatagaaaggagaaggatgagaaaaagaaagaagatggcgaaggctcagaaaaggagaaggccaagaaagggaaagataagaagagcgagagcaaagagaaggataaaattagcgtcaaggagactggagctgatgcagatgacagtagccccaagaacaaaaagagggataaggacaaggcagagaagaaggatg

SEQ ID NO: 446305 - DNA, 437 bp, Triticum aestivum
gggttgacaagaggagtgtaaccactttctttgaatcatttgcctcgtctctataattgcccgttttagttagtgaaaaaaatcacctaaaaaaagttagtgaaaaaaaaacaagtgaaaaccgtcacggcaattcatagggcaacgctggccgatctgactacccgcgtaaagagatacacgttgtcaagaagagaacatcgttgtttcgttgagattgtcatgaagtgtcactgtcgtcacttctccacgaggcaacggctccgacttcaccattgacaaccgtcaacggaacccttactgaaacaaacgagactttgacaatgagccttgcaagagaaaaatggaagaaatgcccaattttttattaagtttgatattttggatgtcaatatttttctgcttacattgtaccacaaaattgcatcgtgtcaaaa

SEQ ID NO: 446306 - DNA, 310 bp, Triticum aestivum
atacgttgagtcatttgcctcgtctctatacttgcccgttgtagccagtgtataccctcagctctgcaaacttgatgtcgaccccacacctcacgaccctctcggcatttcatagggcagctctgttcgctctgactacgctcgtacatacatccctgttgtcactaacagaacatcgttgttgccctgagattctcatgaactgtcattgtcatcacttctccatgacgcaaccgctccgacttcacgattgacaaccgtcactggatcccttactgacggactaccgacttttgacactgacccttgc

SEQ ID NO: 446307 - DNA, 72 bp, Triticum aestivum
  unsure (1)..(72): unsure at all n locations
tttttnaaaagttcctgaactnggggaaaaaanccctnggggnttnccccaaantttaacncccctntgggg

SEQ ID NO: 446308 - DNA, 345 bp, Triticum aestivum
tcccgggcagacgggaagaaaaatgattaacacatgcgttgtgtttataatcaaaccgcaactaaaataataattattgtaagaatgtatacttggagcaatagatattaaatgttacaatggtgtttctcacggttccttttccaacattatttgtgtgtgcatgtgtgttttgtaaaaaaaaaaaaaaaaaaaaaaaaaaaataaaaaaaaaaaaaaaaaaaacaaaaaaaaaaaaaaaaaaaaaaaaaccaaaaaaaaaacaaaaaaagaaaaaaaaaaacgggccccccaaaaggttccaatctaacttacccttgaatgcaatttaaaacccctccaaaa

SEQ ID NO: 446309 - DNA, 418 bp, Triticum aestivum
tcgacggggcctaacgtgtagtaatattgtacttgtacgtaccaaatcaattcgcactttcctcaaccaaaaaaaaaaattgaaagcaataagaggcaatggatatcgtttcgtccccaaaggtgggacattccctaccgaaaaccatcatgcttgttgtgagaagctccggtttgtgagaagcgtatacccaaacctgccccaaatgggacaaaatttgtaccacggcatgttgatgccgctccatgatagcatgccaagtttcttgaatttcagatgacttttggatttacttgaatttaaaaaccaggcatctcaatgttttgctggcaatcaacggtgccctggtgttcgaaattcattcccatttcttgcatgggacctaagcatgcacccaaggacacagatttggtttttc

SEQ ID NO: 446310 - DNA, 482 bp, Triticum aestivum
  unsure (1)..(482): unsure at all n locations
aantgttanncngccggcacaggncnaagacncgcgggncgctcnaaangatnaaagcgatctnnncatgcatgcgacgtcatagctcttctatagtgtcacctaaattcaattcactgccgtcgttttacaacgtcgtgactgggaaaaccctggcgttacccaacttaatcgcctgcagcacatccccctttcgccagctggcgtaatagcgaagaggcccgcaccgatcgccctcccaacagttgcgcagcctgaatggcgaatgggacgcgccctgtagcggcgcattaaggcggcgggtgtggtggttacgcgcagcgtgaccgctacacttgccagcgccctagcgccgctcctttcgctttcttcccttcctttctcgccacgttcgccggctttccccgtcaagcctaaatcgggggctccctttangggtccgatttantgcttacgggacctcgaacccaaaaacntggntt

SEQ ID NO: 446311 - DNA, 311 bp, Triticum aestivum
agggactagacgtggtagatcggactcagctctccttcattccgccaaggaaaaatcccatccgcgagcacctccccatacgcacaagaaagcgcacctcccttgtgtcatgcaggaggaaaagatcgtcctcctcccgaacccgtccccctcaaggatgatgcgctgcctacgagactgacgggcagacattctctttgaaagaccgacacgcgtcattgttgatcgagttcccccgtgcatcgtcaaatgagatgccgaaggagagcgccttaaggtcggtctggtcgagaggcaattgcgggaagagt

SEQ ID NO: 446312 - DNA, 228 bp, Triticum aestivum
aaaacatacgactcacggaagggagtcctcgtcacttggctgactcacgctcgcgtctccgaagaaatcgaacgcacgcacacgacgtcgcaggacggatttctgggaccattgccagggaggtcttcgctcaagtcaagacagaccaggtacccatcacataggccatctccctcgcatttacaggagttgccatttgcctctcggttgcctcacccccacttcacc

SEQ ID NO: 446313 - DNA, 440 bp, Triticum aestivum
gattcacgggtctccgggaattgagtaaacctctgcactttgggggcaaacaacttcctaactaagaggaaggctaaccctaaaaacataaatccttgaagccccaacctccgttactagtttcctacaaagctctctctctctctctctctctctcaacgctaaccctaccctccacacgaacgctctgccttcactggacaagtccgcctccgttgccgctagctattcttctagtgcccggaccggtgaccatcccttctctgataatgtggaacagatatgttagaagctccaaaaattgaatgtgttgcacgagcagcgagcaccacacttgtgctagtgcagcttgtgggacgggacagggatccccgcaagaataaattactcaataggtagcggggacacggacgagaatgagcagcggacatagatgagtt

SEQ ID NO: 446314 - DNA, 439 bp, Triticum aestivum
gggtcgacggggaaccatagcatcattcgacacacatccatcgtccggtcggatgggaatggattctggagaggcgacggcaggggtctctgcttcctcccccggtctcaattttttggctcgagcagtagtttgtctacactccgattgatcgatcgatccacacgacgcgccatgtgtatatgttacccgcaccaacgtccctctctcccaagtggacatagtgtggagctcagctgtaaatatggtgggacatttgtgcttcggcctcctgcaaaagggatgagccgtgcggcagatgcgattgctgttttttcatcatcttcttcttctctctgttttagtttcaatcactggacgtcaccatgtctgacactctgaccgaaactgtgaattgtcaaaagaacgaaatttggcggactggtaaaattaatctggg

SEQ ID NO: 446315 - DNA, 485 bp, Triticum aestivum
  unsure (1)..(485): unsure at all n locations
tnancttctatactgnangncacangncacngncncgtgggncnntggganncnctatatgagtcctgtnaaaaaaaaaaaaaaaaaaaaaaaaaaaaaaaaaaaaaaaaaaaaaaaaaaaagcggccgcnctanaggatccaancttacgtacgcgtgcatgcnacgtcatanctctctatagtgtcacctaaattcaattcactggccgtcgttttacaacgtcgtgacngggaaaccctggcgttacccaacttaatcgccttgcagcacatccccctttcgccagctggcgaatagcgaanaggcccgcaccgatcgcccttcccaacanttgcgcancctgaatggcnatgggacgcgccctgtagcggcgcattaancgcggcgggtgtggtggttacgcccagcgtaccgctacacttgccaagcgccctancgcccgctcctttcgctttcctcccttcctttccgccacgttcgcg

SEQ ID NO: 446316 - DNA, 488 bp, Triticum aestivum
  unsure (1)..(488): unsure at all n locations
ttnanntncnnnnggcccncaaannactaangacncgtnggncnntnnnatacccnatnngagtcgtactagaggatccaagcttacgtacgcgtgcatgcgacgtcatagctcttcttagtgtcacctaaattcaattcactggccgtcgttttacaacgtcgtgactgggaaaacctggcgttacccaacttaatcgccttgcagcacatccccctttcgccagctggcgtaatgcgaagaggcccgcaccgatcgcccttcccaacagttgcgcagcctgaatggcgaatgganncgccctgtagcggngcattaancncggcgggtgtggtggttacgcncancgtgaccctanacttgccagcgccctaacgcccgctcctttcgctttcttccccttccnttctcgcacgttnncccggggtttcccgtnnaagccctaaaannggggggnnccctttaagggtgcactttaatngctttnt

SEQ ID NO: 446317 - DNA, 378 bp, Triticum aestivum
ggcatgggcggtatgcctggcatggaaggtttgggcggcatgggtggcatgcccggcatggaaggtttgggtggcatgggtggtatgggtggtctggctggtatgatgggtggaatgggcggtatgggtggtatgggcatgccgcctggtatggaaggtttgggtggtatggggatggatgattttgaggatgagagtgacgacgaaggagaagtgtcgaaacctcaagacgcagggaagtctgatgctgcggaaatctccgaggtggaaggcaaagctggcacagctgctcagagcaactgaaggctttctactcaataatccctactcgactgtatcctagcgtttttttatcaacgtgctaaactgaaggacaca

SEQ ID NO: 446318 - DNA, 285 bp, Triticum aestivum
atgggcctcgcatacaataagtagtcgaagtgctctgtttctcacatcaggtgctctgttgggcagagctactgatcgtgatcgccttgccccgaggcgcgggcggggtatatattgaccatcgagtgtcgtgttgtttcgctgtgccggggttttatcgtcagattttcattttccttcggttctttgtttctttcacacggtaaatgcagctaccactcgattcttggcgtctgttgcttgtaaagaagatcgtagcatgtaagtaaaatcgtttgcagcgtg

SEQ ID NO: 446319 - DNA, 326 bp, Triticum aestivum
agatctcacgactcacggaaagacgtagcctacactttgctgcatcaccctcgccccttcgaggaaaaccaacgcaagctcaagacgtagcaagaaagatttctggcagcattgccagagaggtcttcgcgcaagtcaagacatagcaggtacccagcagaaacccatctccctcgcatttacattatttgcgatttgcctcgcgttttcctcgcgcccacttcagcattgccgttttattgaagctctctttccgaatctccgcctctcttttcgcttcccttcttttgtgtgctcgtttgcttgtttgaccttatgggcgcgcc

SEQ ID NO: 446320 - DNA, 502 bp, Triticum aestivum
  unsure (1)..(502): unsure at all n locations
ggnnnnnggtaactgtttannctgnncggcagggcctcaaagactcnagggtcgangggcgcactaagannagtcntattaaaaaaaaaaaaaaaaaagcggccgctctagaggatccagcttacgtacgcgtgcatgcgacgtcatagctcttctatagtgtcacctaaattcaatcactggccgtcgttttacaacgtcgtgactgggaaaaccctggcgttacccaacttaatgccttgcagcacatccccctttcgccagctggcgtaatagcgaagaggcccgcaccgatgcccttcccaacagttgcgcagcctgaatggcgaatgggacgcgccctgtagcggcgcataagcgcggcgggtgtggtggttacgcgcagcgtgaccgctacacttgccaagcgccctacgcccgctcctttcgctttcttcccttcctttctcgccaagttcgccgggtttccccctcaaagctctaaatccggggctccctttag

SEQ ID NO: 446321 - DNA, 409 bp, Triticum aestivum
gggtcgaccgcctcaaggagcttcacatggacaagaatgactattatggtggagactccacatcgctcaatctcaaccagctatggaagaagttcaagggcgacgagacaccccctgcaagtataggagccagcagagactacaatgtagacatggttccaaagtttatgatggcaaatggtgctttggtccgtgtactcattcatactggtgttaccaagtatttatcctttaaagctgtggatggaagctacgttttcaacaagggaaagatccacaaagttccctcaactgatatggaagctctcaagtctccattgatgggattgtttgagaagcgaagagcagggaaattcttcctttatgttcaagattacaaggaaaatgacccaagtactcacaaggggct

SEQ ID NO: 446322 - DNA, 421 bp, Triticum aestivum
  unsure (1)..(421): unsure at all n locations
attgtgcaaagctggggatttggatggggcgttggaggtgcataagaagagtgggcagttcaagcatgtcctggtggatccgaggcagtacggtgtgttgatggagagcttgtgtgcaggtggtaagtgtgatggtgctgtgcaggtgctcgatgagcttctagagaagggcacactgcttagcccaaagagtccagtgatggaagcaccggcttataatccagtgattgagtatttgtgcgacaatgggaataccaacaaggccgagacgttcttcaggcagctgatgaagaaaggtgtggatgacaagtctgcattcaacagtcttatccgtgggcatgcaaaggaaggtgcgctanaggccgcaaaggagattcttgccattatgacacgccgtggcgtccctactgaccccactcgc

SEQ ID NO: 446323 - DNA, 437 bp, Triticum aestivum
ggggaagatcgtatggatctgatgagagctgtgattattggagcaagtggcacaccatatcaagatggtctgttcttctttgacttctatcttccacctgagtttccacgagctcctccgtcggcatactatcattctggcggcctgcgtgtaaatccaaacctttatgtggatgggaaggtttgtttaagcctcttaaatacttggactggcagagggaatgaagtatgggatccatcctcatctagcattctccaagtactagtttcactccaggggctggttctcaatgaaaagccctatttcaatgaagctggatatgagaagcaagtcggtactgttgaaggggagaagaatgcactgccatacaacgaaaacacatatctgctaagtgtgaaatccatgttgtatatcttgaggcgacctcctatgaattt

SEQ ID NO: 446324 - DNA, 423 bp, Triticum aestivum
  unsure (1)..(423): unsure at all n locations
gggtcgatggcaatgctgaaatatagtcgcatcaatttctttcgaattaatagtttccttcaatattgttgctatgtactacctcttactaacggataaactgttttaaatagtttccctcaatattgtactagcacacttccagataaactgtactccaacttactaacggatgagctgcactgaacgacggcctaaaggatggtgaggagaaatgataccgtacttgagtttcttctcaggagaaccagttttccgtttacctagttaagatggtcttttattcgtctagaattgtcagcactgtggatggtctttgatcattacattatacggcctcatttttacaaaaactgcgttctgacgaaagccgcactcaacaacccggggtctctcttaatcttangagaacaatanctatct

SEQ ID NO: 446325 - DNA, 203 bp, Triticum aestivum
gggtcgacgggcctgagtacatgaactcatcttcagacaaaagaaataaacctatggctggctgcacatatgtgttgtactatgtgttctgtgtgcgagtaattgttggtgatgtgctgcgaatggtgatgaacattttaacaagagtgtaaatgtatgtagtacatgtatgcaaaggcctgcttggcctgcgttttggagtg

SEQ ID NO: 446326 - DNA, 447 bp, Triticum aestivum
ggggcaatgaaacacccaatttttttgtgcagttccaccaaaatcgagcatccctgttggcacatatattgagagagtgagattactgtaatagtgggactacttgatgaaacatacactaacaaatagaagcaccgtcattatcttaatgggtaaagttagcaacatagtagtcttgcttaaagagaggtattagtttatttaatcagtgccaattagctcaacactcaaagcattaccatttatcataggttgcaaaactttaatgtgcaaagataaaggagtttctcatgacagtagcacgatacaaatagagatgacaacaaactaatatggatgaaggccttaggcccgtaacaacgtgagaaaaaaagcttattcatgtagtcccataagagatgataaagcactcactggaatcacactatagtatatatttttgtgcac

SEQ ID NO: 446327 - DNA, 426 bp, Triticum aestivum
gtcgacgggaactgaaagaagagtatggcgaagtgtatggcttggtaacaaaggctctgcttgaagttaacgagtataaccctagtggccgctatcctgtacccgagctgtggaacttcaaagagaagaggaaagcaactctcaaagaagctgtccagtacgtcctgagacagtggcgcacacagaagaggaagcgctgagcccagatatctaaattcctgtagtgaactagaagtgcgtttctgttattttcctcatgaatgttggtaaacgtttagttgtctaggtttccttggattattcagcctggtgtagcattgacatgaatgctagtacttggagattgtgaatcgccctttcaggataatctttttcgtgccaagctatgtgctagtatgaatgaacggctactagtttgttgattac

SEQ ID NO: 446328 - DNA, 261 bp, Triticum aestivum
gatgatgatgataaggcctgaaaagccattctggtatggtagtgtcgattgtattgtctacattttttatataccattacttgtgcaagatactatcatgtgaccaataaacattggtttagttgcgctgcttatgttatggatacgtgtgtaaactcaggcttgatgttataaagtggcatttggtaatgcatcaatttgctaatatgtttgtgttactgtaaatatgttgtttcatttgaccattatttcatttaatac

SEQ ID NO: 446329 - DNA, 415 bp, Triticum aestivum
gggacaccctatactgactcgtattaacaggctggtaggaaaacacttgctgacaagtatgactatgtcatgcatggaaagctttacaagatttcagaggacaattccagcaaggataaaggacctactaaagtggagatctatgcatcttttggcggcctcctgatgttgctcaaaggcgatccttcaagtgctgctaacctcgagctggatcaaaggctgttcctcctcatccgaaaggtgtaagcgtgtaatctaccggataaccagtgcttgtagttcactcagggctataccaagcctgtgattgtttggatgctaatcgtcctgcacccttatgtactcttttggcggtaatatgactagattggtaccattctctgtagcttattcctgttcccctggagcgcattat

SEQ ID NO: 446330 - DNA, 408 bp, Triticum aestivum
attttataaaaattatagtattattgaaaccaaaattatataaaatttatgcaactaaaattatcaaagtattttctgttcaaaacattaaaagaaaaaagaattttcataaagaaattttttgttagaaactttaatagcagaaagaattatcataaagaattttctgttagaaactaaaataacaaaatatgtttttgaatataatgataaaacacagtaatatttaatagcatgaaaaaagaatcactcaaaaatctacttttatagtaaagctattcaaaaactagtgactcacacaaatttccaaaaattcaaatttaaactattcaaattagaaaacaaatggcactaacagaaagtttaaattttttagtacataaaagcaaaaggaatcactgaaaaact

SEQ ID NO: 446331 - DNA, 448 bp, Triticum aestivum
ctcgtgggtcgatgggcatccatagattaattcgtaatattttaagagcccccaaaacacaaagggattggcggcccgcgaccaaggatcgaaaacagtgtcacgggtatcccctgccaacagattcccttcactatcgcacgataatctctactgtacaattgcaccatagacccagactacacgaaaaatcctagtcctgcctgaagtgggagtgaagaacggatgcagttgggcacacaaaatatgagttattcttttttccttttagtccttttctgcattgtcatctttcttttgttttcttttttgcgggaaacttttttttcatattcatcattttcatttttttccttttaattttatttcttatttatttgtctttctttcttttttatttccatttctttcttaaaagtaccatttattttcaaatattttgacattt

SEQ ID NO: 446332 - DNA, 373 bp, Triticum aestivum
gggtcgatggcgggcgtctagaatgactcctactaaggcaagggccctgaaggtccacagcgaggccgagcgccggcgtcgggtgaggatcaacgctcatctcacggcgctcaggaggatgatccctgataccaagcagatggacaaggccgccttgctagccagggtggtggaccaagtgaagcacctgaagaggagagcatgcgaggccgcacagcaaacgccggctgtcccaccggagaccgactaggtctccattgaattctgcgccggagacaatgactccagactgtacatgaaagcctcggtcagctgcgacgaccgcccggacctcgtcgccgggctcatccaggcgctccatggcctcaggctg

SEQ ID NO: 446333 - DNA, 76 bp, Triticum aestivum
ggaagactctatagtgattcgtaatagtcctggatattgttaagcttgtttactcaaaagacagagcgcacacaag

SEQ ID NO: 446334 - DNA, 434 bp, Triticum aestivum
cacgggtcgacgggatatgtgataacttgtcactgaacacagaacgttctttcttggtttgcatttggtgtaaccccccttgattgttctttttcctctgtcttataatcctctgattgtcaatccagtcatatattgatgatgtattgatcattgtttatcagaagttttctacacattgctgctggatagagcatctattgcaactacaattggcgatatctacacagatctatacataaaagataataggaagtaagcttctatagtgtgacgtagaggtattggccatacaccatgaatgatagaggttgtgcagctgatattcatagtttaattacttattcctccaaagagatacatatttttagctataatgtgttaccttgctgacagtacatcgatatattctccaatctggttcaactatgcct

SEQ ID NO: 446335 - DNA, 195 bp, Triticum aestivum
ggacgatggcattccctaaaatgactcgtattaacaagagatgaattggtttgcaacagtacttacagtggtgatttgatttagtacactaacggatcgtaccgacttttctgttgaagttttgtctggataaagtgtccagttgaggaggtctcgatatgaggaaaaggaagaggcaagatctcaagcttgggg

SEQ ID NO: 446336 - DNA, 399 bp, Triticum aestivum
ataatatgagcgagacacctttgctaaaaaaaacaagcggcacattaacataaaattctttttccttatgtttgtttcatttttcttcactttagaaaatgttccagaaatatatgtttggacaagtattctcattaagggcttgtgtattctcatcatgcatctctaataagtgttcacctatttaaaaaataatcattaactaaaaagttgtcagtattgtcaaaaggctcacatcaataaaattttcctcggacatttccaaaaaaaaaaactctaagttgaatagtttctagatgaaaccgcaaacattttcacaagtacataataacattttcaaaaaacaaacaagaataacaattttgaaatacaccacatttttctaaaacaacaacatat

SEQ ID NO: 446337 - DNA, 429 bp, Triticum aestivum
gtccatgggtctcgctaaatttattcataggatgtagaacaccgctgaggagcttgtccgcaggacgagctgctcccgatgctgcatggcaacccagccggatctgcctcgacaggttcgagccctccgtcacgggccccgtgcacatctggcagggtgttgggaaggtgatcaatgtgaacaagatgatcagggccagatggagtgaagatcctaataccggaccagaggccgacttggcaagatcaggaagcagctggaccacaacaaggacgtcggcggcggcttctccgccatgtgggattattctttgacctttcacaattccttcaggcgtccataacatcaagcataattttggtgtttcttaaccttttgcattctactctaatcatttaaattgggcctatgactcagaagttttttttt

SEQ ID NO: 446338 - DNA, 416 bp, Triticum aestivum
gtcgacgggcccatgtacaggcacacgatttaaggatgattccaattacttggccgtttgcagtctgggggcttgatatggttgggccttttaagagatccaaggataagaagactcacctcttggtggcagttgataagttcactaaatgggtagaggcagagccattgagtaagtgtgatgcagcaacgatggttcaattcatgaagaaggtgatcttccactttggctttccacacaacattataacaaacaatggcactaaccactcaaagggtgctatgaaggacttttgtcaacgtgagcatatccggcttgatgtatcattagtggctcacccccaatctaatggtcaagctgagagagccaatcaagagatcttgagaggcatcaagccccggtttatggttccccta

SEQ ID NO: 446339 - DNA, 217 bp, Triticum aestivum
ctcacgggtcgacgggactccatatagtgactcgtaatagcaggatcgcaagatgactgattcaaataagtcatacaacgtccttgttcaaccgtcatgctccagttcagtagagaactacactatgattttttgatctacaagagtaaacatatatgcatcatacggcggccgctcgatatgattcaaacgtaattagcatgtgctgaagatctca

SEQ ID NO: 446340 - DNA, 390 bp, Triticum aestivum
  unsure (1)..(390): unsure at all n locations
gggaccggagagagagatggggaggagcagagcttcaccgtgggggtgttgctggagtcgtactaggtcgaggctgaccggggacggaggaggagggcgctgacagggacgccgccggttccgtgaagaagaggaagcagagaagcatacgacgaggaagaagccttcggggtcctcgtggtcgcgtgcgagggtgaggaagacgacgaagagggtcggggttctctccccgtggcagcaacgcagacgacggaggtgttcaggccggggacgagcttaagctctcctcatccagggcgacggctatggtgggcgacctacctggtggctgcagcagggagagggggaaatggagagaggagaggctanggtanggtttggagaagtttt

SEQ ID NO: 446341 - DNA, 289 bp, Triticum aestivum
agacgaaaatcacaaggaagaacacattaatcgcgccacgggccttggtcaaaccacttgggtggaacaagaaagatgaaaaaccaaatgttgccgccggaaaactgaagtccaatgaagagttcaaaaatctggtgcttaagaagtgatgtccgtaggcaggttagttcgtcggtgtcttcacgtcccaccaaggacctctaccttgcacctgacctgtggaatgaatgaatataatgaagtgttaacttgacctttaaccggctaaaaaaaaaaaaaaaaaacaaaa

SEQ ID NO: 446342 - DNA, 415 bp, Triticum aestivum
gggtcgacggggaagaatattgaacctgttgaagcacaagacggtataacaccggataatgtcccagcagaagagataaatgacactgaagccatggagactggagaaatccctcatgagagcacagatgacagtttaacagcaagtgcagcacttcctgatattcaacaagtcccagaacaagaagcagtcgaagataaggcatgcactgacaccacagaaaaccaaggggaacctcaacaaagcattgtttctacttctgctgagcttactccaacagaagaagaaacagcagtagtaaagcatactcaagatacacatgtacagaatgccagcagtgaaccgggaactgacccaaatttgcttgtccaatcagcacatcaatcagaattggctgaagacagcaagggtcaac

SEQ ID NO: 446343 - DNA, 64 bp, Triticum aestivum
ggtcgatggggctcgctaggatgaatcatgctacgacgaagccttctaagcgcaagaaagaagt

SEQ ID NO: 446344 - DNA, 363 bp, Triticum aestivum
actgctagcatatcccacactactcacgctaacaatgtcaattatgttctcgcaggagcttcccagctacacagcactcgtgctacttgttcttcccctgtactacttgtactccaaggctagttgtagattaaagaagcctgcagtgctccccacaaactggccaatattgcacatgttcccttccttcctggccagcctccacaagatgaatgactatttcaccctggtcctcgccggatcaggccccaacttcagggggcacggcccacccgggaccgggatgcggttgttcgtcacatgcgatgccgccagcatccgggacatcttcacgaagaactagaccaacgtttccaaaggggc

SEQ ID NO: 446345 - DNA, 398 bp, Triticum aestivum
attctagagtcgacgggaccacacacactgccgccacggccgtgaccgccccagtgacgtcgtcggtgccagcggcggtggtgctcgtgtccgccgtggtctcgttccacctcatgctacacgcagtggacctgtcgtccattagacacggacggcacgcatgtaattgacacaccggtacgcgtgacttgctcgccccgcagcacttatacgatacacatcagaccgcgaagagaacactcctcgtgaacagtgccactatcattgcagactccttgcccgatactcctgttgcggtggatagtatcgtagtgtttacatcatcatggatcacaactgacaccttctatcagctaaagagtatttgcttagctgcttagtccttcagtcccatcctc

SEQ ID NO: 446346 - DNA, 495 bp, Triticum aestivum
  unsure (1)..(495): unsure at all n locations
ggntnngtacttctanactgtaangcacgccncatnnctcgangggccctagnngatccaanttnagtcntcntacatgcgacgtcatagctcttctatagtgtcacctaaattcaatcactggccgtcgttttacaacgtcgtgactgggaaaaccctggcgttacccaacttaatgccttgcagcacatccccctttcgccagctggcgtaatagcgaagaggcccgcaccgatgcccttcccaacagttgcgcagcctgaatggcgaatgggacgcgccctgtagcggcgcataagcgcggcgggtgtggtggttacgcgcagcgtgaccgctacacttgccaagcgccctgcgcccgctcctttcgctttcttcccttcctttctcgccacgttcgccggctttccccgcaaagctctaaatcgggggctccctttanggttccgaattaatgctttannggnacctcnacccnaaaaacnttgtttntgg

SEQ ID NO: 446347 - DNA, 118 bp, Triticum aestivum
gtcgacggggaccggtaaaggaacacataatatagacataatccacacagcaccaagaagtcctcaaacttcacaaagatcagttttggaaaatcaacaaatggacgaacaaacaaaa

SEQ ID NO: 446348 - DNA, 292 bp, Triticum aestivum
gggaataccaatagtcattcgaagtagaacaagcttatcatggatcaatggaagtttgcatctaacgtgcatgcagtccgctcaggcaggtcaatgtttcagaaaggcactgttcttgttcgcagctcatcttgctatataagcgtattcctactcagaacaatcatctgattccatcttgactgcgactacgctaaaggatccaaccttacatgcccgtgaatacaacctcatatcgcaactatagtgtaacaacgtttcaattcacaggactatcgttttacaatcatct

SEQ ID NO: 446349 - DNA, 398 bp, Triticum aestivum
agcactatagtgaatcatatgaagaaaatgacccaggagcaaatcttagcctttgagcaaagcggagagattttgttccttggtcattgccttacgctagatgatattaaggtggtccgacagttcaagcgtcctgtggatgtatcagagaaggaaattgatgccgcgggagatggtgatgtgttggtcattttggatctcagagctgatcaatcattgattgaagctggagtggctcgagaggttgtaaacagaatccagaaattacggaagactgctcagcttgaacccacagacttaattgatgtgtactacgagtctgtagacaacagcaatacacttgaagaaattttgcagtcacaggatcagtatattagggacgtgcttggtaattcgct

SEQ ID NO: 446350 - DNA, 486 bp, Triticum aestivum
  unsure (1)..(486): unsure at all n locations
tannctnccgncgccngtctaangactcacgggtcgangngctcncnaatcggcnagtccnctagaggatccaagcttacgtacgcgtgcatgcgacgtcatagctcttctatagtgtacctaaattcanttcactggccgtcgttttacaacgtcgtgactgggaaaaccctggcgtacccaacttaatcgccttgcagcacatccccctttcgccagctggcgtantancgaagggcccgcaccgatcgcccttcccaacagttgcgcaggcctgaatgggcgaatgggangcccctgtagccgcgcattaagcgcggcgggtgtggtgngttacgcncagncgtgaccgctngacttgcnaagngcgctangcgcccgctcctttcgcnttcatccnntccttncgcgccngttcgccggnnttccncgtcaaaggctngaagattcgggggctcccttnaagggttccaagtaaanggntng

SEQ ID NO: 446351 - DNA, 55 bp, Triticum aestivum
agtccagggatgtcgataagggcagtgttgtaatacctactctctcgatgccggt

SEQ ID NO: 446352 - DNA, 401 bp, Triticum aestivum
  unsure (1)..(401): unsure at all n locations
ggtcgacgggtggccctagattgaatcatcatatcattgctacctcgaagcatgactaggataccccactcatcaataagaacattggaggtgcaatgctaaatgtttcttggtcagttatccaaacaccgttgtatgggtaacatcttgattaatccttgcctcttacctaaatggttgggtactttctctcccaccctgtatgccatgttctgcttgtacatgggaaggatatactcctaataatagtgtgtaaacacaattttcctttccattgttctgtttaatcttataatcgtgttttcctttccattcttttgtttaacctttcctgaatctaacttaactgagcagagataaatccctgcttaagtangcaccttgttgtaccactctgtctg

SEQ ID NO: 446353 - DNA, 437 bp, Triticum aestivum
gggtgtccaaagggtggcacgagggaaagatctacttcgcgccgacgtacaagtacaagctcaactccgacacctatgccggcgagacgaccaaatccaagaggaaaaggagaacaccctcatggtgcgaccggatactgtggcacggcaaggggatagagcagctgcagtacatcgggggggagcaccggttctccgaccaccggcccgtctgcagcgtcttcgtggtcgaggccgacgccaacaacgggagcaggatcaggaacggctactccaccctggactccagggttcattgcgagtcgccgttgccgataccgcagagacacagcttctatgacttttgacctgttatagtgatcctcttttgtcgatacttcttctatacgttacaaggatcagaaatgtctattgagacggggggctgaacgtttttc

SEQ ID NO: 446354 - DNA, 77 bp, Triticum aestivum
aaacaggaggtcgcaatcgatggagtcggcttcagcaacatcagccagttcatctctttatgcagcgtcaagcaggg

SEQ ID NO: 446355 - DNA, 200 bp, Triticum aestivum
aaggcgagacgatcatcacaggcacgaacacattagtcgcgccacgggctttgggcaagccacttgggctggaccaagaaagatgagagacgagaggttgctgcggccgagctagacatcgaaggagtgagttcagacatctggcgctgaaggagtgaggtccgtgcgcaggtgaggtcgtcggtgtgatcacgtcccac

SEQ ID NO: 446356 - DNA, 408 bp, Triticum aestivum
ctcgagggtcgacgggtgtgtggaaatcgagacttataaagctagtgctttgggtttgggatgcatgatagcttggagagagtgttgtatttatagcctggtgatacggatgcatgcatggatgggatcgagctgtttgacgtacgtagtagcttacgtatgtgtgtatgatcagacgtggccatgtgtgattcgattgctttcaaaactgctaggttgtcctctcgatgtatcatttgttttagagagataagacaagatttaagcatgatatggtttatcaattctggagatatggcaacaagttgagcaacacccttgcatgttcatgcatgttacgcaacactgcaataccttgtcatgccacacaatatgggcgcgcatagacaccggaagctaagccgatat

SEQ ID NO: 446357 - DNA, 406 bp, Triticum aestivum
atgctctaaaagatgtgcgagaggagttgacaattcatggccccagcgagtcaccaaccaatcccatcggttccaatgagtagcggagctaggcaggaatcatgggggcagtcaaaaaatggaacaactaagagggtaaaaaataatcttttccttatctaatctccacacagtaaaatttcttcactgttttgcctaaggctgggggtcggccccctcagacatgcactagccttcgccactggttccaatatatgtgcgagaacaacagcacatcggaaattcttagtctacgccttgtgcaagcgattgcccctacttccgcggatgtggtgcacatattttggaggaaacagtaaaatgcaaccaaaaaaattaaaaattaatatcaacttcatttgtggca

SEQ ID NO: 446358 - DNA, 65 bp, Triticum aestivum
tcgatggggaacactaaaatgagtcatattaagaagaagaagaagaagaagaagaagaagaagcc

SEQ ID NO: 446359 - DNA, 254 bp, Triticum aestivum
agatatatcatggaggtatacccagatatataaatagtgctcgatccataatttatagctggatttcaacacttatatatctagatttacgcccctcaaaaaattatatatctagatctatgttattacagtagacacaatgtcatatatgacccacggtgattgtacttatactattcgtgcaatatatatgtatatatacattcgtgtaagcgtgcaaatatgtaatgatagctctattaaattatgttctc

SEQ ID NO: 446360 - DNA, 106 bp, Triticum aestivum
gaattggaaaaatgttaaatgtgtattagaaaaatgatcttgacatatacgaaaaatgtaggatggaaaccaaaagcaacaaagataacccaaaaaaatgtatacc

SEQ ID NO: 446361 - DNA, 123 bp, Triticum aestivum
taggaatcactataatgagctagtactatatgtatagaatgtttttagtttcttcccttttcctatgtaagcgatgtatcatcatgggaattgggaaataagaaggcaagagtatttctgagg

SEQ ID NO: 446362 - DNA, 433 bp, Triticum aestivum
  unsure (1)..(433): unsure at all n locations
gggacatcacaccaaagccacgccttcattcgaatcatttttgactgtcccacctcagtgcgttttgcgaggcagtttccttggcacatcttgttgaagcagagatcatgtccccttatcacgggattctcatcaatacgggcgttggtaacccaaccgtgccaatgattacgggacttgggggaaaagcgagttttgccaggctggtggggacacatagccttatccgcccatataaggggataaggattcatccttttatccacgccttcttcctcctttgctcatccatcttcgcacactcgagctccagcgcccaagtccgcatttcccacctcaaccttctccaaccatgtccggagtgggaggcangtggatggtctcctccgtcacgganggaaacatcaagaagctgaggagagccggatacctg

SEQ ID NO: 446363 - DNA, 401 bp, Triticum aestivum
agtccattggagctgatgtttctgatgctgagcagggaaaggcagttgaggtttctgatgctgagcagggaaaggcagctaaggtttctgatgctgagcagggcagggcagctggagatatcattttggaggaagatccagttgagggtgttgttgagactcgtggtagtgctgctgcaggccaggagaagtctcctgcagcagagccatcagttgatgttgatgctggttctccaactcttcctagtgctggagagccaatggtttttgttgtttcagattctccagctgctccagctgctggtggtgtccttcccgacaatgctgctatgtcaactggagatgatgatgaagagactgaaagcgatatctatgaagcccaaaaaaaaacaacccagggc

SEQ ID NO: 446364 - DNA, 366 bp, Triticum aestivum
  unsure (1)..(366): unsure at all n locations
gtccacggggcaccgtatgatcaatgtgatgatggccacatgctaacgtaatcacatccacccgctgctgaaatgcatcagtgagtggcattgcaaacccctgacgcactgctcatcacccatcgagatacagtaccaccangcgttcatataaacatctacactcgttctgaatatcgaattggttcacgactgttatacgtaaggttcctggtaaatctacgtatcattgtacctatttcacttgatacgactgttgttttttcacactgccaccatgccatgtccaagtgaggcacgcagcttctcaaacttgtgttgttgtgccttgtatgctcggatcttaagtacattactttgtttcac

SEQ ID NO: 446365 - DNA, 219 bp, Triticum aestivum
gggaggagtttatctaaattaattgttgcccctttggttagccgcccatgctgctgagaaccactgtctacgaaacctgcagcagcgtacattgtgattttttttctcccctttcccccatttgtgatatctgttctttgttgcttagagtatattatgtccgaattgtatttatacacactgtgacaccgactatttatataaggcagctgttgcatc

SEQ ID NO: 446366 - DNA, 159 bp, Triticum aestivum
acggctccgctcgacaccgccaccacggtcgcaatccgcacgtctctcaccgatcacggaatgagggtagaaacaacagcaggatcagcagctcaattgggcatgtaccgtacgatacagtgaaatcacaccgtgtcccagtcatgtcatgtcgactgt

SEQ ID NO: 446367 - DNA, 382 bp, Triticum aestivum
aattttcatgccttctacttcttgtgctaattttttggctttagattttatgaactatgcaagttacgcatctattcatgtgtcagatatggaaaaatcaagggaagtaaaaatgaatgacatatacatatacaacatgtacaccttgtctcttttgttaacgatatttcagattaagcaacgccgaggacggctttattttcaagaaggggaggatgatgaggacaggactaccttggatatgaccaataatattgcatatatgcatatttgtcaggtgatttctagtgcaaactattcaataatctacttatgttatccagaacacaaatacgtcacacacttttgtgttttgtacaattgcaggtgtatgggacatttg

SEQ ID NO: 446368 - DNA, 357 bp, Triticum aestivum
atagatctacgggttgtgctgatacattactatagcactacatggggaacctaagctacctaatcctcgtgtactttcgacatacgttcgtccagagtaagctctacgatgaaagcttgaacccgcttgtgatggagatgttattactgtggtgacctgaaatcttgagtcacagaggctttcaagcattatgcacagccactgaagaaatactcggacacatacacccataatccatcatgcgggactttgcctcagattcgtgaattacaggatgaatgatgtgatgttcaaactgctggatatggcttactgaagacgtaccacgcgaacaacgagtactgtccgttttcagat

SEQ ID NO: 446369 - DNA, 501 bp, Triticum aestivum
  unsure (1)..(501): unsure at all n locations
gnnnnnnnggtacngttnatactgncagactccctactnggnctcaatnggtcnnngggatccctatagtgaantcntattagtttcanatataactccatgctaccanaaacaanaannaaananannagaaaaaaaaaaaagnagaaaaaanaaaaaaaaaaaaagaaaanaaaanaaaaanaaanaaaaaaagcggccgcccaaaaggatccannctnanntacncgtgcatgaacntcatagcnctncaaaagtgtcacctaaattcaattcannggccgtcgttttacaantctnnacggggaaaaccctggcnttacccaacttaanccccttgnagcaaancccccttcgccancnggcntaataccaaaaaggcccgcaccnttcgcccttcccaacagttncncncctnaatggcnaaggggacccccctgtaccgggccattaaccccnggngggtttngtggntacccccnactttncncccnaaanttt

SEQ ID NO: 446370 - DNA, 420 bp, Triticum aestivum
tcgtgggtcgacggggatcgacgaaaatgggtccaatgagatcacggcagtgcagacggcgaggtcggggaggaactagagtggtcagggcgtcgagggggatctccggtgatgatcggtgaagacgaggctgttgcgctggtggggcaggaggggctcttctggttcgggagcttctggggccggacggagcagggcgaccccgtgtcttccgaggatcagatgtacgcaagcttgagcctgccggtagttctagagagagtgcggggttaggcaccgatgatgatgcagtttgatgcaagcggcttgcattgcagcttctaaatgaggtttctacttttccatccggccaaggattttatccagagtagcagctattacatcatttggtcagtgcactgaccccctactgtacatatg

SEQ ID NO: 446371 - DNA, 318 bp, Triticum aestivum
aaaatgacatgctgcaataagttgacaccgacaaagatggcaggcttaactacaaccagttcgtgtctattattaaaaccggcacatactggagaaaggcatcaccgcactacccgagaggcatattcaggagccttatcatgacgcttgtgacggacggttccgtcaaattggacgtgaattaaaagccatggtgttgacttgtgcatgtatgttacagcatttgggccccacgaatcaacagctcctttaatttttgtcatggtctttttgcgtggaaatttagatcagtggaaccccatcagattggctcacatg

SEQ ID NO: 446372 - DNA, 489 bp, Triticum aestivum
  unsure (1)..(489): unsure at all n locations
gngnnnnnnggaatttctttnnggccccggcccnnanaannnaaanggccntggncgttnnannccctatagtgagtcgtattaaaaaaagcggccgctctanaggatccaagcttactacgcgtgcatgcgacgtcatagctcttctatagtgtcacctaaattcaattcactggcgtcgttttacaacgtcgtgactgggaaaaccctggcgttacccaacttaatcgccttgcgcacatccccctttcgccagctggcgtaatagcgaagaggcccgcaccgatcgcccttccaacagttgcgcagcctgaatggcgaatgggacgcgccctgtagcggcgcattaagcgcgcgggtgtggtggttacgcgcagcgtgaccgctacacttgccagcgccctagcgcccgccctttcgctttcttcccttcctttctcgccacgttcgccggctttccccgtcaagctctaatcgggggctcccttt

SEQ ID NO: 446373 - DNA, 401 bp, Triticum aestivum
gtcgacgggcatatgcactcctggtacacacactcagcaaaatgaggtcgtgtgcgataggggagcgctcaaatatggaaatacgtataatagagctaaaatatacaatgatagacgcagaattgcttccggtcgcaagtacatctcacacagtcagtccgcgcgaaacgtttccattcgtatgtacatcacaatcagtcgctccaaggaaaacattttcgttcacaagtacatcatacacagtttcccccgttaaatcatttgtgataacgttgacaatgcacacgatattaacaattttaacgtttgcattaatgaatggatcatacattgtgcgtacaagaaactgtatgggaaaggttgtccatcagacacaatttttacttggtaaacgtttgccc

SEQ ID NO: 446374 - DNA, 384 bp, Triticum aestivum
ataatttcccaccttcggttggggtcatgatcaggacctactgtatatcagtaccgtggccacctgattcattcattgggttatgaggattctcatatttgtgtgtcatgcactatcaattgaaatttccatggacgtacttctgggggcctcttttcagagattactgtcatcagagtagccatatcacacggcaattgccttggcgacagctcaagtattcatggcaattggacagcttcagctttgcaatgagtaggctcggcaaaatgtacattggcacattgcttatcgagctctggtactgcacccactgggcgatcgtgccagctgctgcctctgaactgtttggcgtgaagaatttcggagcagtgtacaacttcc

SEQ ID NO: 446375 - DNA, 99 bp, Triticum aestivum
attattccctatactcaatcttattatcacgcgaggagcgcgtcagaaaagtctcaggaacgctccgcgcgtgacacttggcgcggggggaactataaa

SEQ ID NO: 446376 - DNA, 417 bp, Triticum aestivum
acggggtggcgaaattgccgtcgccgcaggaaccactgcccgggcaccattccttgccctcccatccggggatcacggtgccggcatcacgggggctctcatcgccggtggggattgcgcggatccagcgagacgacgtcgtttccgtgcatgaggaggcagatcaggatcgggatcgtgaccggtcctcgggctttctccatccggcgagatggcgagtcagattagaggatactcggacacccggccatcggcgcgagggtctgctgtattcttattcaccgttgaggtggacgacggtgactgatctcgagggagacatcctcgccggccggcacctggatgatggtgagcaactggtcgaagattatcttccgagccactgcgttgatccatatgtggtcgctactcactccg

SEQ ID NO: 446377 - DNA, 505 bp, Triticum aestivum
  unsure (1)..(505): unsure at all n locations
ggnnnnngnacnattnnnnnnctanggnncgacnnantananggncncgtangacgttnnacnccntanantgagtcgtatnatactattgcaaccataatcatctcattcttcccacgaataaaatgcatacacacatatgacatatcattctgcaatcacattgatgaattgggctcacacacacacacacacacacacacacacacacacacacacacacacacacacatgcgagcttaattcgctccttggatctgcgcgatagaacaaatcaggtaggagtaggctattacgacagtaccagaagatcggtgactcgttttaccagtagcgagtggttcatgagttcgacagcatggccgagacgccggcatatctggagcagcagacaagtgtggagtgagtatcgatttttcatactttccacttgcgctttcatactttctctctcaagatnnccancttcngancacnccgtgggnatncccntnnaaaaaancng

SEQ ID NO: 446378 - DNA, 373 bp, Triticum aestivum
  unsure (1)..(373): unsure at all n locations
atatgaagtgttctgtcgcgtagaatattctagtgttatggaacttcacatcgaattccaccttaacaggaacaagtactagattgtagcttggaagatcagtataagacataaaggttaaattagttactcctcgtacaacaattacagaatctagactacaacgaaacagattcaaaatccaacgatgcaataaattcactcacaagagacaatatgctcccatcagccccgaaggcatgtacagaacatcagctttctgcacagcatcggatntgatcagctggactcatagactcagcacagcaccagccggcgaagttcgtagagcgtccgataagccactccacaggatcagtaacagtcgatccaa

SEQ ID NO: 446379 - DNA, 362 bp, Triticum aestivum
aaagcttgcgtatgtagcccttgattatgaccaggatctggatactgccaagagcagctcctcggttgagaagagctactcagcttcctgatggtcacgtgatcatcactggcgcacagaggttcaggtgccctgaggtcttcttcgagccatccatgatgagcattgagtcttctggaatccatgatacgacctatacctccatcacgaagtgtgacgtggatatcagtaaggacttgtatgagcaacattgtgctcaatggtggcacaagcatgttcacaggtatcgctgatcgtatgagtaatgatataaccgcccttgctccgaacaacatgaagattaagttctcgctccacctgat

SEQ ID NO: 446380 - DNA, 347 bp, Triticum aestivum
aaactgggaaagatccaccaactctattacgtggaatcgttgttcgtaatacccttgtcacctatgaccgccacaatgaaaagattggattttggaaaactaactgttcagagttgtgggagagactccagagtgatggggctccttcaccagcaccttcgagtgatccaagttcacaagcagatttagcgcctgcgcctgctcgaggtggtttgccagaatatgatgttggtcgcagcgctgtttacatgtcgatagatgttacgtatccaaacctgagaccgcccctagatgagttggctgagctgttggctaaagcagctgagatagagtccagtcaggtccga

SEQ ID NO: 446381 - DNA, 59 bp, Triticum aestivum
atgttcggatcatgagcatagggtttgttgccatcgtggctgtgccccaggttttcggc

SEQ ID NO: 446382 - DNA, 377 bp, Triticum aestivum
ctcacgggtcgacggggtaccctacaatgagtcgaattaccattggaactctcgttcatagaacatgatcatcggcgagaggttcgcggtcgaccagcacatggatcacttcattgaccacagcatcatatccatcgtgtccatccaggcacggatcgtgacgcaataccctttccccatgcagatgcacgatagccaatcggagctctacccttgaggtcctgcactggcacgatgaaaccgtgcttccggatctcctgccggcagtcagtcaaacatatcgaacgcagctagcgttactccaaaatatactatcggtacgtcgggtcgcagaccaagcagcagtacatcgataacatcatctggaacatccatca

SEQ ID NO: 446383 - DNA, 344 bp, Triticum aestivum
acgggcatcgctatagtaaatcgtaatatatccatacctcgaagattggatcaccaaccacacgcttgctattgacatgggtgctttgtgtcttgctatccatgtgtcaatttcatcagttcggtgctatatcgtatgggtttcacctctagcctatcccaacttgtttggaaccagatgctttgttgttgtcgtccattttgcacacagaccaataaatgatttaacactcgctataacactccacgtgcatcacttatatctttctgagcttgataatttttgccccaatgattcacgcatatctttcatagcaccgtggtggatttgcttcaaagaaacca

SEQ ID NO: 446384 - DNA, 76 bp, Triticum aestivum
cgggacactccctgtaactgcgcaataaacgcggctggtgtagtgattgttctcaacgtgactgatacagttgaca

SEQ ID NO: 446385 - DNA, 303 bp, Triticum aestivum
aagtggtgagcgtcacctccctctctggcgtgctcaatggttccacgacagcctacctcggcggaatacgtccacaacatggccggtctataaggttcgtctgcctcgcccagatctaccgagtgggtaccaccatctaccactggctcgacataccctggctcaggcgctactacgacttcggcttcgaccactttggcatgtcttggcgcacagtcggtgtgtcaggcctacccagcctactcgctggcacctcgggaccgttcgccacacgagactggattctaccggacctcaccatcc

SEQ ID NO: 446386 - DNA, 416 bp, Triticum aestivum
ggtctagaagtcccgggtcgacgggcgggcgccctctcaagggggtggatgcggccggtcggcaagacgggctcctgtggtacaaggacgcaaggcagctcgtcgccggcgagttctcgatggccgtggtccaggctaataccctgctggaggaccatagtcacgtggaatccgggtcgctgagcacaacggatcccaagctgcagggcagcttcgtcggcgtctatgatggccatggtggaccggaaacggcacgctgcatcaatgaccacatgttcagccatctgaaaggatatgcatctgagcagaagtgcatgtcagtggaagtaattcggaaggctttccgagcgacctaggatggatttctcctctctagtcagtaatcaatggtcagtgaggccgcaattagcggcggt

SEQ ID NO: 446387 - DNA, 101 bp, Triticum aestivum
tcgtaggtcgatgggattccctaaagtgagtcatcttagcctcgtcattacggtgatgcaatatattgacaaggggtcgcatcttttgtgcttagttttta

SEQ ID NO: 446388 - DNA, 482 bp, Triticum aestivum
  unsure (1)..(482): unsure at all n locations
ttatgntgnncanggnngactcaaatangannganncgtngnacnttgnaanacccnatgngagtcgtactaagaggatccaagcttacgtacgcgtgcatgcgacgtcatagctctttatagtgtcacctaaattcaattcactggccgtcgttttacaacgtcgtgactgggaaaccctggcgttacccaacttaatcgccttgcagcacatccccctttcgccagctggcgtatagcgaagaggcccgcaccgatcgcccttcccaacagttgcgcagcctgaatggcgaatggacgcgccctgtagcggcgcattaagcgcggcgggtgtggtggttacgcgcagcgtgacgctacacttgccaagcgccctaagcgcccgctccttncgctttcttcccttcctttctgccacgtncgccggctttcccgtcaagctctaaacggggggnccctttangggttccggnttaantggg

SEQ ID NO: 446389 - DNA, 97 bp, Triticum aestivum
agcgacaccacaaaaggggcttaaaagaaccagagtgagtatccaggaggtagaaccgtccgagggagacgcaatagttcagagactgtaaatggtg

SEQ ID NO: 446390 - DNA, 199 bp, Triticum aestivum
atatggcaggatcccggcctagtaaacgctccctgatcatgccaagactacgagacttcacacgcccgaccatgtcaatggcgactacaccgtcttcgccaacgccaggataaacagcaggaagatccataaggccacgtcctgaacatgtgacaggcttgaagcaacactgtgtgagcaattccacgccgtaggacac

SEQ ID NO: 446391 - DNA, 501 bp, Triticum aestivum
  unsure (1)..(501): unsure at all n locations
tnngngcaacttccagcttacgtgcnctcataaattcatagggtccacgggncatgcatggatggatgcccgggcattgagaaggaaggacgctttcagaggcgaaaggccatggggaagatttttctgtgatccatggatctccgatcgggaaaccgtatccaagctccgtggctatctgcgctctttggacttttcaaacttagcgaactgaaacatctgagtagctaaaggaagaaaatcaaccgagaccccgttagtagcggcgagcgagagcggaacaagggttttcatcaaagaaatccgaagcggtttcattcgatttgttgtggattggatnatggaaaaaccagcatgcancaaagcntanttagaaaanttccgtancncgccctacnngagttttatcaactcccaaccgtttttggggggcnnncctctcggncaccccgncntnttaccngggntnttnccccctcttnatcgcnnttttntngantg

SEQ ID NO: 446392 - DNA, 103 bp, Triticum aestivum
gacgggcagtatatgtgcctagttgggctttaggggaaagagagaggagaggctgcgcgcccccaaaaggcctactccgaattcgactatggggactcagccg

SEQ ID NO: 446393 - DNA, 339 bp, Triticum aestivum
gttcactcgtctgatttttcaaaactgttggcacattattgcgaaagacttcatgctactgattcaagctctccacgaaagccggttttactcgtttggggcacttagctcttccataattaccttgcttcccaagaatgaggactccaatgcaccttggagacttcaggccgatcaacttgatacatggaactgcgaaaatctttgtcaaggctttggctactacgcttcactccctactgccttccttaatatcccaagcacaaagcacttttgtctgcaaacggagtatgcatgagaattttaaattcgtgctgaacactgcaaggacccttcaca

SEQ ID NO: 446394 - DNA, 381 bp, Triticum aestivum
acgagaaaaagcagggtacattatcccaaaatgttccatcttcctagaaaagtggattcgttccagaaaagttccagaagatgctaatggtaagcaggaggattgtttacgaagaaacaacagaaaaaattcatattctgatacagaggagttatataggaatcgaaatagtcgttgattttctttgtgaagaaaaaaaatggatttcattgaagtaataaaactactccaattcgaatagtagttgagaaagaatcgcaataaatgcaaagatggaacatcttggatacggtattgaaggagttgaaccaggatttccaaatggataggatagggtatttctatatgtgatagataatccaaatgcaaaaatttgtcttc

SEQ ID NO: 446395 - DNA, 185 bp, Triticum aestivum
agcatcgtcaggtgataaatttattcaatttttgtcagtagtccagtcatgctactcaatatacacttagtatagtgcttaccatcatatattcgttctatgtcataatgtaagcatctgtgcatccgctgtacagcatcagtctcactagtcccaatatgctcatatcgtcagtaacggatctg

SEQ ID NO: 446396 - DNA, 493 bp, Triticum aestivum
  unsure (1)..(493): unsure at all n locations
tnaanntnatantncngactncctactnngnctcaannnacgttnnaacncnctanagtaagtcntattatgcatgcgacgtcatagctcttctatagtgtcacctaaattcaattcatggccgtcgttttacaacgtcgtgactgggaaaaccctggcgttacccaacttaatcgcttgcagcacatccccctttcgccagctggcgtaatagcgaagaggcccgcaccgatcgccttcccaacagttgcgcagcctgaatggcgaatgggacgcgccctgtagcggcgcattagcgcggcgggtgtggtggttacgcgcagcgtgaccgctacacttgccagcgccctagcgccgctcctttcgctttcttcccttcctttctcgccacgttcgccggctttccccgtcaactctaaatcnggggctccctttaagggttcccaanttaanggcctttnnggggcnccnnaccccaaaaaaatntngnttg

SEQ ID NO: 446397 - DNA, 123 bp, Triticum aestivum
  unsure (1)..(123): unsure at all n locations
gggngccgnagggnngngngggcgcnggggagggggggcctgggggngggggggggggangtngggcggggnnggggtgcggtgngnngcggggggtcggtggtcacgggnggggnggngngg

SEQ ID NO: 446398 - DNA, 413 bp, Triticum aestivum
ggtcgacgggacggacccacatggcctgtggatgatgcaacccgaggggcgcccccagtaaagtaagctaaagatgtaaaaagggatacatgccgcggggacaggcccacggggcctgggaataatgcagctcggggggcgctcccagctaaatggacttggaaaatgtcatctggttttgttgttgaaggagcgttgtggtagctaaaggcgcgcgctaaagaaaccgctcctcatgagccgccaaaacccaaagccctcgggaggctctgggggctcgggtggctccctgaggaccatctctatctccgccaggaccacatgatgcccggcctcctgggtttccaggatgctccgtaggctgcgctggaaagcggctgccatgctcggcaggccaaatggcatgcgaacat

SEQ ID NO: 446399 - DNA, 398 bp, Triticum aestivum
aatacgcagaagatgccatgactcccatatctgaaaccttctcacttgacataaatgccaagctggatgtgtatgaatcttccaatttactgtgtgtttttatcgaaatatatggtactgatgctactatttgtctcttgataggcatacggtgggtacgataatgaccagagggcacagccgtattcctatatactctggaagaccaagcaatattatcggtcttatattggtgagtaagctgacattttcaagaattaactgcattgattgagatcacatctcattagttaggttcattctgctacatatgtttttacggcctccatgttatgagctctcactggcgaacatttttggagttgcactgttcagaccggtgtcctaacaagactttg

SEQ ID NO: 446400 - DNA, 222 bp, Triticum aestivum
acggcatgcaccagaagagctcccgcagcgtggaagtgctatcggcatcggtatcctgctcgtcgtcagtcctcatcatcatcatctcgatcgtgctcacgagtagctggaggaccaacagaaatcataacgagcggtagtaggaataggttgtgatgatatgatcctggcttgcatgcatgcttgctgggtgttgttgatcgcttattgtggaattttttg

SEQ ID NO: 446401 - DNA, 495 bp, Triticum aestivum
  unsure (1)..(495): unsure at all n locations
tgttcgngcaacttctatcatctcggtgcccgtcatgaattcanagggacncgcnttgcgcacatccccctttcgccagctggcgtaatagcgaagaggcccgcaccgatcgcccttccaacagttgcgcagcctgantggcgaatgggacgcgccctgtagcggcgcattaagcgcgcgggtgtggtggttacgcgcagcgtgaccgctacacttgccagcgccctagcgcccgccctttcgctttcttcccttcctttctcgccacgttcgccggctttccccgtcaagctctaatcgggggctccctttagggttccgatttagtgctttacggcacctcgaccccaaaaacttgattagggtgatggttcacgtagtgggccatcgccctgatagacggtttttcgcccttgacnttggagtccacgttcttaanantgganncctgttcncaantggtngnaannnncttnnctcatcnngggggntttt

SEQ ID NO: 446402 - DNA, 84 bp, Triticum aestivum
aggtcgtcaatttgattgatgacgggaagaaccccgatgagttcacgagggacgtgctcaacagctgcatcgccaagaggcaga

SEQ ID NO: 446403 - DNA, 93 bp, Triticum aestivum
gacgggcctaggataaggaaaggtggtcagcccaagcaagtgatcacgaagcggcatcattcaacgagaccgacagccaggagatccacgtgg

SEQ ID NO: 446404 - DNA, 401 bp, Triticum aestivum
gggacacccaaaactgagtcgtataaacgacagtaaacgctggattcagcggatccaagtccagtcagcggaagaagccgttcaaaagaaacaatcagggaccgtccagtctggaccgtatactggagcgctctgtcacacccaatatgcgatactatcctaaagagactcgaaggtcccaccaaggatagaaccgcatattgaaacgcttttgcaaggtggatatcattacatcaacattacataatagatggagatacatacaagaggcatcgaatgccatacgaatacaacatcatcatacataagaacatcatccgactacggatgaaacacaaacagaaactcaaatgacatccaccctgctagccccagctgccaacctggaacctattccccga

SEQ ID NO: 446405 - DNA, 417 bp, Triticum aestivum
gggcccatataaagcgccacatgcgagtgagtgtcctatgacaaccaccgactgcatgtggcccaaacatgtatgtatggaagggttgtgtaatgttttaaataacaaattcatgactttgatgtggcacttgcatcacaaaagggccaatcctagacggtggttgacgacccatagtgtactggcagcccccctcccccccaacacacacaccgcacatccaccgcctctatgaggcatgttaaaattttctgctatgaacatatgtgaccaaaggagtgtcgtgttaaaatttgaaaaaaaaatcagagatcattcaaacacttttgtacattgattaatttcctagggatataatgtgcggaaatcaaattagagctacatgcacacgtgatagtgcaccaaaatggttagaaa

SEQ ID NO: 446406 - DNA, 255 bp, Triticum aestivum
aagcacaatagttgtttcttacccgtctgcggtgccccctccacgtttactcctccggtcatattgtcgtagtgcttaggcgaagccctgtgcagatcacatcagcaacaccacgccgtcgtgctaacggaactcatcgactccttcgtacctctactggatcaagagttcaagggacgtcatcgagctgaacgtgtgcagaactcggaggtgccatacgttcggtacttgatcggttgattcgacaagacgttc

SEQ ID NO: 446407 - DNA, 497 bp, Triticum aestivum
  unsure (1)..(497): unsure at all n locations
ttnnntccccaanagnngactcanataagnccagacgcgtnngaccattnnnanaccctnagtgagtcgtattnnaggatccaagctnacgtacgcgtgcatgcgacgtcatagctctctatagtgtcacctaaattcaattcacnggccgtcgttttacaacgtcgtgactgggaaaccctggcgttacccaacttaatcgccttgcagcacatccccctttcgccagctggcgtatagcgaagaggcccgcaccgatcgcccttcccaacagttgcgcancctgaanggcgaagggacgcgccctgtagccggcgcantaagcgcggcgggtgtggtggttacgcgcagcgtacngcnanacttgccagcgccctagcggcccgctcctttcgccgttcntcccnttccnncgccgngangttccgcgggctttnccncggtngaagcctcgnanntccgggggggctccnttacgggtnccngangttangggg

SEQ ID NO: 446408 - DNA, 65 bp, Triticum aestivum
tgacccgcacgctttcggctcattaaactcagctggtgttgttgtcacccgcaacttaaccgcaa

SEQ ID NO: 446409 - DNA, 486 bp, Triticum aestivum
  unsure (1)..(486): unsure at all n locations
tttnnnnnngccnctggccgncaaantactaangnnncgtgggncnntgngnnacccnangngagtcgnactaagaggatccaagcttacgtacgcgtgcatgcgacgtcatagctctctatagtgtcacctaaattcaattcactggccgtcgttttacaacgtcgtgactgggaaaccctggcgttacccaacttaatcgccttgcagcacatccccctttcgccagctggcgtatagcgaagaggcccgcaccgatcgcccttcccaacagttgcgcagcctgaatggcgaagggacgcgccctgtagcggcgcattaagcgcggcgggtgtggtggttacgcgcagcgtgccgctacacttgccagcgccctagcgcccgctcctttcgctttcttcccttcctttctcccacgttcgccggctttccccgtcaagntctaaatccggggggccccttanggggtcccnatnaanggnttng

SEQ ID NO: 446410 - DNA, 491 bp, Triticum aestivum
  unsure (1)..(491): unsure at all n locations
ggnnnnngtacnttanatnntcnacgtngactcantacnggnctcgtnggncnnnnggntcccnagnntnagtcgtattaagagaaggaaagctttatatgcggaaaaaaaaaaaaaaaaaaaaaaaaaaaaagcggccgctctagaggatccaagcttacgtacgcgtgcatgcgagtcatagctcttctatagtgtcacctaaattcaattcactggccgtcgttttacaacgtgtgactgggaaaaccctggcgttacccaacttaatcgccttgcagcacatccccctttcccagctggcgtaatagcgaagaggcccgcaccgatcgcccttcccaacagttgcgcagctgaatggcnaatgggacgcgccctgtagcggcgcattaancgcggcgggtgtggtggttcgcgcagcgtgaccgctacacttgccaagcgccctaacgcccgctcctttcgctttcttcccnccnttntcgccaang

SEQ ID NO: 446411 - DNA, 485 bp, Triticum aestivum
  unsure (1)..(485): unsure at all n locations
ttacttnnccangattagactcaaatacacngncncgtngnncnntgggngnccctaangtgagtcgtattaaatnaaaaanaanannanncggccgctctanaggatcnangcttactangcgtgcangcgacntcatancncttcnatagtgtcacctaaattcaattcactggcgtcgttttanaanntcatgactgggaaaaccctggcgttacccaacttantcnccttgcgnncanccccctttcnccagnnggcgtaatatcaaagaggcccgcaccnatcgcccttcnaacanttgcgcncgcntgaatggcgaatgggacacngccnatgtagcggcgcattaacncggcgggtgtggtggttacgcgcancgtgnccgcnncanttgccanncgccctagngccgcnccnttcgctttcgtnccntccnttcncgcnacgttcgcnngctttcncnntcaagctccnnaatcggg

SEQ ID NO: 446412 - DNA, 371 bp, Triticum aestivum
aatcaaagttatttactcaaatggccagctgggcatgggtacgatgaaattaggcagaatggcaaaatcagcagcatctactgtgaacacaaggcgaagagaaaagggattgcttcctcgtccggttcgagctggaattgttggatatccaaatgtcggtaaatcttccttgattaatcgcttgctaaaacgaagaatgtgtccagcagcacctagaccaggtgtcacaagagaactgaagtgggttcgttttgggaaggatctagagctattagactcacctggaattttgccaatgagaattagtgatcaggcagctgcacttaagcttgctatccgtgatgatattggagaaaggtcatatgattttg

SEQ ID NO: 446413 - DNA, 392 bp, Triticum aestivum
ctacggaggcaccgtgtcacaccgtgacggacaatgcgccgcacgaaccagcacgccgcatgaaccagcagacacttcgacctatgcccccccttcaagatgtttatgaaaattaaacgagccgaaggcgagcaggaggttccctcgtgcctgaggcgccgtgtcacaccgtgacggacaatgcgccgcacgaaccagcacgccgcacgaaccaacacgccgcacgaaccagcacacacttcgaccagcacacacttcgacctatgccccccccccttgcagatgtgtatgaaaattaaatgagccgacggcgagcaggacgttccctcacgccggaggcgcggtgtcacagcgtgacggaaaatgcgccgcacgagccagcacgccgcagg

SEQ ID NO: 446414 - DNA, 494 bp, Triticum aestivum
  unsure (1)..(494): unsure at all n locations
gggnnngngtncntnnaanncgaacggccactnagncncnaangncnttnnnncacccttagtgagtcgtantanaggatccaagcttacgtacgcgtgcatgcgacgtcatagctctctatagtgtcacctaaattcaattcactggccgtcgttttacaacgtcgtgactgggaaaccctggcgttacccaacttaatcgccttgcagcacatccccctttcgccagctggcgtatagcgaagaggcccgcaccgatcgcccttcccaacagttgcgcagcctgaatggcgaagggacgcgccctgtagcggcgcattaagcgcggcgggtgtggtggttacgcgcagcgtgccgctacacttgccagcgccctagcgcccgctcctttcgctttcttcccttcctttctcccacgttcgccggctttccccgtcaagctctaaanccggggggccccttaagggggcccaatnnanggctnntgngggcnc

SEQ ID NO: 446415 - DNA, 505 bp, Triticum aestivum
  unsure (1)..(505): unsure at all n locations
ggnnnnnnggtaaattctatancngnngnctgccgtctanagnctcangggtcgacgngtcaccaancgnnngtcgnnctagaggatccaagcttacgtangcgtgcatgcnacgtcaagctcttctatantgtcacctanattcaattcactggccgtcgttttacaacntcgtgatgggaaaaccctggcgttacccaacttaatcgccttgcagcacatccccctttcgcnagtggcgtaatatcgaanaggcccgcancgatcgcccttcccaacagttgcgcagcctgaaggcnaatgggacgcgccctgtagcggcncattaagcgcggcgggtgtggtggttacgcgagcgtgaccgctacanttgccaagcgccctagcgcccgctcctttcgctttccttccctcctttctcgcccacgtttcgccgggctttccccgttcaaagctcnaaantccgggggctccccttaaggntccnaanttaangctttantgg

SEQ ID NO: 446416 - DNA, 277 bp, Triticum aestivum
tcgttgggcaactggaaattgagtcctaggagacgaacaaggagcttcttgccaagaatggaggaagcatcaaacgagctgtgatggacctcatcgccagggagaagaaggacaagtgaagatcgtgtgctctcgagcacctagttatctatatctcgttacatatgcgtaaataatgagacgagtggtactgctgttgtgctgctccagtatgtctcgtggtttgcttatgaactgctgtgaagcgtgttgctggtgtgactttgtgtgcggtgtg

SEQ ID NO: 446417 - DNA, 428 bp, Triticum aestivum
gggtctgcccatgatgtctgatactaactacatgggactgagcatgacagagctcgccgaaagctatgtcttctcccagctcaacgcgcgcagcgagggaccatgatccatccagcgaccacttcatgcaccatcctcttgtgcaatctgtctgtggaactacatgtggtagaatatgtgccctgaatcgtcaacgggtacaattcaccattgatttgcaggctacgattgacatgagactattgttgatgcttctcgacgcctcgcagtcatatgtaactgtctagagtaagttgttcttccacgtactagcgcaacttttaagcgtcagctttttatttcatggcctgttagaatgccaatgcaccttaatctcacctacacgcatggatcaacgtcgaattgagttatacgaaacttggaaaatt

SEQ ID NO: 446418 - DNA, 387 bp, Triticum aestivum
accccaaatcgagtcttatgatgatggactgtctatggatggatcatggataggtagatcttgatccgttcttttgcctaggtcagggtccactggaaagttgaaaagcgcttgaaagtttatgctgcctgttcaaatgatcttcttatttcaggggaaatgatctttacaacccactcaagcatccaggacgcagtccgcataataaagcagtttgatcgtgtatcgatcacgtagacggtcagcaccgcttttcattataatacagaaaaagtaagtagtaaattcagttattattatgctaatggacatagtaacaattttgtttctgacgtttttccaaccgtcttgacaacatctagcttcatgtttccagcttcagtcaaa

SEQ ID NO: 446419 - DNA, 433 bp, Triticum aestivum
gtcgatggggatcctgatagtgaatcttattataacgaaaagagatgcagctgcatatggttttcgttggttgcttcactcgagcataaacgggactcacctctaccacagataccttcacactatttgcgactaagagatgcaaatatacctgcttcctctatccaaaagtacctcgtgcatatactcagtctcccaagtgagtccgaggtggaaataaattgctgcgggcagccagtgaaccctacacaacctctgcgcaatttagtagagttgtggctgagggggcgatcagcacaggcaacaccggccattgtaggctcccccgcggaagagtttgtgatggtgctaaattatggacggccaaagcccatggaacctttgagtgcacagtaatgattcaacccatttccttttgaaaggtccggtcttt

SEQ ID NO: 446420 - DNA, 292 bp, Triticum aestivum
gacgatcaatgtaacgcacgcctctacctgatcatacccaattggataaagtgtgtagagatcatgtccgtataccgtacgtgctactgaagtaaaagattgagtctgtgtctaagggtacttatataacaaatcaagttattcctaatatctacatccctcatcatgacagggtacggcataacccacaattatgaagttacctagcacatgagcaactatacatgacatcatcgcagtctcttacaccgtgtgtgggccccccctcgagagtgcactacatgatccatac

SEQ ID NO: 446421 - DNA, 188 bp, Triticum aestivum
gggatgtagcaaacaatgaatcgatggacatgcatctatcattttgtaaacataccagttgtctcggtgataaaagcataaatgtttcctcctttcagttagtgaatattctcctttggtcctggtttagtattttcggagtacatgcaagttactgtaacttgattgatagtgttgttaagagatat

SEQ ID NO: 446422 - DNA, 500 bp, Triticum aestivum
  unsure (1)..(500): unsure at all n locations
gtgnggnntctntcggtgnncnctatactgnntcnactcantactnnganacncgtntgccntgagagncaccctaaattgagtcgtaataagaatcaatcaagcaaaaaaaaaaaaaaaaaaaaaaaaaaaaagcggccgctctagaggatccaagcttacgtacgcgtgcatgcgcgtcatagctcttctatagtgtcacctaaattcaattcactggccgtcgttttacaacgcgtgactgggaaaaccctggcgttacccaacttaatcgccttgcagcacatccccctttgccagctggcgtaatancgaagaggcccgcaccgatngcccttcccaacaagttgcgcacctgaatggcgaatgggacncgccctgtaacggngcattaaacgcggcggggtgtggtgttacncgcancgttgaccgctanacttgccancgccctaacgccgctccttttgctttccccttccctttctcgccaagntnggggg

SEQ ID NO: 446423 - DNA, 357 bp, Triticum aestivum
  unsure (1)..(357): unsure at all n locations
accgggctagaattcgcctatcgatcgcgggccgaagggtatccggattcgatccgaatcatcacacgtatccttggccggctgggggacaagactccatgtcttggcagtcgcagtagccaccgggacgctcggtgactgttccggccgtcatttccggcggcggtccgggaaacatcaacttgccgggtggcggccacttgcaccgggagcgcccgctaagctgagattattgtctccagctttgagggttcctagagctgcttcgcctgcagctgttgagaatgggagctctagcancagtaatacagtccctacaccaaaagttataatagatcaagactcagatccggatgc

SEQ ID NO: 446424 - DNA, 374 bp, Triticum aestivum
ttcgatccgaatcatcacacgcatcattggcaggctccatatccgcccaatatgtcttaacacgggcaagagctagccgagcgccctctgtgcacgctgacctcttcacagcttctaatcgaggcaccacgtcaaggagctgctgcaccaaattaaaataacttgtcggcttcgatccgcccaggcctaagcaatccatgacatatgtcatggcgagtccggacagtctattcagctcggcccactaggctaggcgatcgtccactgcaagtggacgccctggattggtaaactgcgaccagaagagtttctccacttcatgattgtccttatcttgaaagtacctggtcgcatcggcaacactagcctccaaa

SEQ ID NO: 446425 - DNA, 422 bp, Triticum aestivum
gggcaaagaggttatacagcagggttcacgatgcattcgttggagcattttgtcaaatgacttctcatgcagctcctagcttttcagttaagcatctctgtctattggaattcgcccaatgtatgtgcttgggctttgttttgattgatggaccttaaagctgaagcattaatgcatgaacttgctaaatggatggagcaacaggcatagaagaaatccacaaccaatttttcttggctgcgccatcttccgctgacagtaactctatacaacagcctgctaaggtacgtaagagtgatgataatgttacttaaaggaggccacaacttgcaccaaatatatgggcatgtgcaacggcaacttatgtaaatcgtttctaggtgatgctgatgaatcatgtaaggatggagcataactcacca

SEQ ID NO: 446426 - DNA, 426 bp, Triticum aestivum
cattcgcgggccgacgggtcaatgcaagctacgaggagccaccttcaccccatcacttcaacaggcaagaagttgttgaagactcttcaggatcaacccagaatcattccatcaaacaactacaagagacgtagcaacacctaaggaaaactcagaagactgcacggggcacagggcacgactactgagtccgagaacccctagggtaggatgagtcgcgtaccccctatgcgcagatgagtctgtatgatggttcaaatagaatcgtgattgtgtgttgcttgtttttattgtttgtgtttttagataggccgcaacttttgccctatgcaacaagtacgcaactatatcaccttccttaccttgtttcttttgtttggccctttcggcacttgtttgtttgcacttgcactataaaaccccctt

SEQ ID NO: 446427 - DNA, 386 bp, Triticum aestivum
  unsure (1)..(386): unsure at all n locations
tcgcgaggccgaagattggatgcaccaacgccgcctcaccgtaatacctcatggagcgcgtgtggcgacacaaccagtacaagtggatggagacgcggggcgtggacgatgacgggcttgtgagctgcctccccaaggacatccggcgagatgtcaagcgccacctctgcctccgcctcgtccgccgcgtgccgctcttcgccaatatggacgatcgcctcctatacgccatctgcgatcggctcaagcccagcctctgcacggagtccacctacgtggtgcgggaaggggaccccgtcgacgagatgttcttcatcatcagaggccgcctcgagagctccaccatcgacgggggccgcgtanggttcttcaacaaggagctcctc

SEQ ID NO: 446428 - DNA, 263 bp, Triticum aestivum
tacaacaccctcatgtgagtcgtattaaccatttagcgcgcgaacgagacaatttgtggccatccgcgtgattggaatttcgatttgtaggctttcaatactactatatatgctacaaataacatttgtatgctttcaataatatttgtcttgcaacggggacataatatttctagtgattaacagagaaagaaaggacacaagtaaaatcaagatcaagttcagcaaagaaatcaggaataatagtgacagtaataaggtga

SEQ ID NO: 446429 - DNA, 223 bp, Triticum aestivum
aaacggttagcgcgcgaacgagacaatttgtggccatccacgtgattggaatttccatttgtaggctttcaatagcaccacggtatgctagagataacagttggaggctttcagtgatagtttgtcttgcaatggggacataatatttctagtgagtaaaagacggacgtgggagagaggaatcagcgcagaggagatcggcgagtaaagaggcagtagaagt

SEQ ID NO: 446430 - DNA, 392 bp, Triticum aestivum
tcgcgggtcgacggggctccgcacggtggaacagagagggagccagagaagggggggagaaggcacggggagagtgcgaggcctgggagggtgcgtggcatcgcggacggggtccagggcgacgagaggaagcaggaggtggccaggggaagcaggaggtggccgaggcctctcgggcgcgcgccacgcctcggtccttctggcgaggaggaagacgacagggggagtggagatgggctgggccgtgctgggccaggtaagtgggcgccaggtaacttccttctctctctctcttttatttcttttctatttctgttatttttttttgatttgatttaaaataccaaatcatttaataaaatcctggaaacaattatgggtgctttctgaat

SEQ ID NO: 446431 - DNA, 397 bp, Triticum aestivum
gggactcttgaggtgcatgccgttgacggcgatgactgcctgattaagtatgacggtccagagtccatccggagtggagtgaatgcagccatcaaggataagttccccgacatcacgaacgtggtgttcacccagtgatctacaagtagcctggccggcttgatgccatcccagtgcactaagtggcgacatgtacgaaatgcagcgagattctgtatcatctacacacgagtttcgatgtatcgtttgggtatacaaagttgcagcacacacaaacactacaatgggaaatgacatggaataattcttgcctattggaagccgcctccagaactcaccatcctacgtgggccgcgtaaggttcttcaagaaggaactcctcaaagaacgggacttt

SEQ ID NO: 446432 - DNA, 209 bp, Triticum aestivum
gcttgtacgtatgaaattgtaattcttgatgtgaatgatggcagagaggagaatgcaaatttggctctaatacgtcaaaaaaaaaaaaaaaaaaaaaaaaagcaaaaagaaaaacaaaaagaaaaaaaaaaaaagaaagctcaaaaggaaccacacataaaatacacaaacataaaacaaaataaatccatctagacagtcatcaaaaa

SEQ ID NO: 446433 - DNA, 427 bp, Triticum aestivum
gggatgcgcgaacggtttaactagaccggccgcatgggcaacccgggaagaccggaaggaaccccttaccggcaaaaggtgtgtggcaatttggtccacaaagtggatgaggtgatcctggtcctcatcacaatcggcctgcttgcgctccaacctgctcccctgacggcctatcgtatctcctgctttctacagcaatgtcgctgatgcctcgagcatctttgtggtggacgcctgccgcttttgaaggtccatgaactcctgcacataatgaaggagcatgggactcctctcctccttgagctcacggagctccacgtccttggccctatgctccgcatccttggcctgcagctcctgtgtctggcgcttcacctcaaattccgtgatctgatgtgccgccatggcactaggtagaagcaatggg

SEQ ID NO: 446434 - DNA, 75 bp, Triticum aestivum
cgacggagttagaagttgtaaatatgcattgttgtatcgcgacctgaatgaatgaaataaacgaaataacgctct

SEQ ID NO: 446435 - DNA, 424 bp, Triticum aestivum
gggaggagaaaaggcggaaggagctgcctctcgagctgaagctgagggtatcgtatgagctcgtggggcggctgaacggcctatgggataacggcactgccatctagcaacgagaagctctggaatcatggcgtgttgagacgctaaaagatgcaaaaagtgcatctactcggaattcatcaaatttgggcctctccagtgaggaagcacgattgttaaagcgagccctggagttcaactggcatgcgctattggaggatattggtctttggatttcaccagaagtcccacacaccgagcatgatgacaaacctgagaatgaaccagaagaagaagaaataatagctggtccacctttgcatccacaatgcaacactgagctacatgccgattatggtggtgctgctgtgagatggggattaac

SEQ ID NO: 446436 - DNA, 489 bp, Triticum aestivum
  unsure (1)..(489): unsure at all n locations
ggnngaacgttcggnagcctntacccgnccagtaccggtccaanattcccgggtcgacggtatgagcgacatgatatgctctatccataaaaaaaaaaaaaaaaaaaaaaaaaaaaaaaaaaccaaaaaaaaaaaaaaaaaaaaaaaaaaaaagcggccgcncnanaggatccaagctacgtacgcgtgcatgcnacgtcatanctcttcnanagtgtcacctaaattcaattcacggccgtcgttttacaacgtcgtgacngggaaaaccctggcgttacccaacttaatcncctgcagnanatccccctttcgccagctggcgtaatancnaanaggcccgcaccgntcgccttcccaacagttgccccaccctgaatggcnaaatggggacgcgccctgtancggcgcataagcncggcgggtgtggtggttacncgcaacgtgaccgctanacttgccaacgccctaagcccggtcctttngntt

SEQ ID NO: 446437 - DNA, 342 bp, Triticum aestivum
gggggcggtgcccgggaccctgaactacaacaagcaacatagcgtggacatgcacctgctgccccctcaggtacagaatcctgtatatggctggtaagacagaaccactgctgttagtagtacatagataggcctgtaatttgtgacactaattctttttcctcctctccctgatgccaacggcaaagccttgttcattattaccaatacgaactacagactgcttgtagcactagataagacttgtgtattcgatatttcgatcccttgagttttgatggccattttcactgggacgctcaaaaaaaaaaaaaaaaaaaaaaaaaaaaaagcggccgctct

SEQ ID NO: 446438 - DNA, 478 bp, Triticum aestivum
  unsure (1)..(478): unsure at all n locations
gnngtanttttacccgcactgnaccggncananattcccgngtcgacgggcccnantatctctacntgttcacctgtgtcggtttggggtacggtcagttcaccggggagggattcgcctccccaatttcgaagttttttcctggaagtttcaaccgtcgttgactatgacaacagtgcgaccgactattaagatcctcgcgactatggcagggcggtacgctctgctctctcgcgcctccactctaatcaaaaagactaaaggcccctacggaagatgaaaaaggcgaggactgaattgagaaaggaaggagttctctcgacgcgccctagtatactctacttgttcacctgttcggtttggggtacggtcagttcaccgggangatcgccctcccaattcgaagttttttctggaagtttcaaccgtcgttgactatgacaacagtcgcgaaccgactattaagatcctccgacta

SEQ ID NO: 446439 - DNA, 405 bp, Triticum aestivum
  unsure (1)..(405): unsure at all n locations
gccggccgccacctcaggatcaccccgcaccacgacttccgtcatggctcctgcagcagccacggctgcgccctcgccacctgccctcccaacatgtgcaagggcaaggtgatggatgcgatgctgcaagaactgtccgcggcggctgcggcagggacgaggaggccgagtagagtggtgtacctcggcgatggtaggggcgactactgccccaccctaaagctggccgagcgggactacatgatgcccaggaagggctaccccgtgtgggacctcatcgccggagaccggcgggccgtccgcgcagacgtgcgcgggtgggccgacttcaaggacctgnatacggtgctgcttgacatcatacacgaatgcgccgcggccgccatgatggaacaagacggcggc

SEQ ID NO: 446440 - DNA, 151 bp, Triticum aestivum
  unsure (1)..(151): unsure at all n locations
ttaccnaacttaancnccttgcannanatccccctttcgcnancnggcntaataccaaaaggcccgcaccnttcncccttccnaanatttgcccaccctnaatggcaantggnacccccctntancggcncattaaccncggcggttntgg

SEQ ID NO: 446441 - DNA, 480 bp, Triticum aestivum
  unsure (1)..(480): unsure at all n locations
gnnnnnnngttnngnggccttnacgcngccaagtaccggtcaaagaattcccgggncgtactgggaaaaccctggcgttacccaacttaatcgccttgcagcacatccccctttcgccgctggcgtaatagcgaagaggcccgcaccgatcgcccttcccaacagttgcgcagcctgatggcgaatgggacgcgccctgtagcggcgcattaagcgcggcgggtgtggtggttacggcagcgtgaccgctacacttgccagcgccctagcgcccgctcctttcgctttcttccctcctttctcgccacgttcgccggctttccccgtcaagctctaaatcgggggctccctttaggttccgatttagtgctttacggcacctcgaccccaaaaaacttgattagggtgatggtcacgtagtgggccatcgccctgatagacggtttttcgccctttgacgttggagtccaacttccttaa

SEQ ID NO: 446442 - DNA, 488 bp, Triticum aestivum
  unsure (1)..(488): unsure at all n locations
ggnnnnnnnnnttcngnggccttacgccggccaagtaccggtccaaaattcccgggtcgcgagctcactagtcggcggccgctctagaggatccaagcttacgtacgcgtgcatgcgagtcatagctcttctatagtgtcacctaaattcaattcactgggccgtcgttttacaacgcgtgactgggaaaaccctggcgttacccaacttaatcgccttgcagcacatccccctttgccagctggcgtaatagcgaagaggcccgcaccgatcgcccttcccaacagttgcgcagctgaatggcgaatgggacgcgccctgtagcggcgcattaagcgcggcgggtgtggtggtacgcgcagcgtgaccgctacacttgccagcgccctagcgcccgctcctttcgctttcttccttcctttctcgccacgttcgccggntttccccgtcaaagctctaaatcgggggctcctttaaggttccgatta

SEQ ID NO: 446443 - DNA, 413 bp, Triticum aestivum
gggtacagaagacagacaaagaaaatgccgggtggaaagcttgttactttatcagatcaagatatattggagatggttttcttcccagtcgttaatgaggcatgcagggtcatggatgaaaatgtggtgatcagggctgctgatcttgatattgcatctgtccttgggatgggctttcccaagtacaggggtggcctcatcttctgggctgatacggttggagcatcctatatacattcaaagcttagcaagtgggctgaaatttacggtgacttcttcaaaccatcatcatacttggaggagagagcgaaaagcggccgaccactgggcgcgccgaagatggctcagcaagctccgacgaggtcacgcatgtgaggttcagcatatggcacggtttttgcttgaacagcatc

SEQ ID NO: 446444 - DNA, 414 bp, Triticum aestivum
gggtcactctacttcgacgtgttggtagcactacgttatgccatcaaatctatcgtagacacatagaaagatcaaagaaatgtgagagaagaacatgaacgacatgagaacacatgggaatgtgagacatccggggtagtcgtggaacgagttgtcattctggcacttgacggcaccaaactactagatatcgagagagcaaggatactgtggcttcatttattttagctgatcgtatattcgcattcatctcgtttgtctttttgcaatccatagctcgagagttcgaaactaaattctagggcacaagaccctattcttcctccttttatggttgggcacgaataatttctaattctagcacatcacaatcataatcttctagcatattcattgttggcattgtgtcatccg

SEQ ID NO: 446445 - DNA, 420 bp, Triticum aestivum
taagtactcaatctgtacctttatatagtgtgtgtttcatcctgactacaataccaaggagtgtggtggcatgtgtactttggatcctcataggttgatcccctccaccaagtatgtccacatgcatgtgcccaacgatggaaacttcccaggcacacttccaacccagccaggggtattttcatccaaaactccaaccgtgcactacattgtggaactttgctagaaaaataaggcgcactacatagaggaatggagggaataaggtaacatgtgttgtagacgacattaagtcttggattatgtgttaagtcttcgaaaaatattccttctatgcgccatgggttcctcaatatggcaacacatacctgctacctcgcgtagagctgatgtcacgcccggataattaagctacagtag

SEQ ID NO: 446446 - DNA, 419 bp, Triticum aestivum
gggttttgcaaaaaaaaaccctgccgttttctcgaatcaacccagagtacaacacaacacttgaattaattctgtctgaatcttcagttaactagaaattctagccactaaatcaagctcacgtaagcgaccagctagccctacgcaacgctatcttctccatcgttgtgtttagttcgtgcctgcgttttagctgatggatctttcacgttttgatgaagctgctggacgaccgctgcgcccgcgtgaacaggcggcgcggccccggcgtcgtgacagccgcgtacgatttcctctacctgcccatggatttcaggtgattcatttcatgctcgctcttctctcacggtttgacagggtgatttcttgcctgcattttttcttgtgccgtaccggaacagaatagtcgcactatcatc

SEQ ID NO: 446447 - DNA, 500 bp, Triticum aestivum
  unsure (1)..(500): unsure at all n locations
gnnnnngnnnnngnngnnngggnnnttcggnagcntttacgccggccantacnggtccaaattcccgggtcgacgagctcactaatcggcggccgctctagaggatccaagcttacgtcgcgtgcatgcgacgtcatagctcttctatagtgtcacctaaattcaattcactggccgcgttttacaacgtcgtgactgggaaaaccctggcgttacccaacttaatcgccttgcagacatccccctttcgccagctggcgtaatagcgaagaggcccgcaccgatcgcccttcccacagttgcgcagcctgaatggcgaatgggacgcgccctgtagcggcgcattaagcgcgggggtgtggtggttacgcgcagcgtgaccgctacacttgccagcgccctagcgcccgctctttcgctttcttcccttcctttctcgccacgttcgccggctttccccgtcaagctctaatcgggggctccctttanggtttcgaatt

SEQ ID NO: 446448 - DNA, 298 bp, Triticum aestivum
gggggagagcctggacaaatcacaaggggaaacactcaagaacaagtccaatcacacatccactagacaatcaaacacacaagatctacaaggtacatgaacaacaaagagaaagatacaaggtaaagttcatctccaagaggaggtcttgatggtatcctagacagatcttcccatgaggggggtcttgaatccaagaaggatcttctccgaagaggccgcagtctctcacgaggactagattcgtatggatgagcaaagctctatctcaaatgagctaaacctgtgctaaccctag

SEQ ID NO: 446449 - DNA, 303 bp, Triticum aestivum
gggcgtaccaggtttaccggagatcagggcgaaagaaaagggcacgtcgtcaatctgcgaggttgtaatgtccctcccgagctaacacattcatgacatacatggattgcacgaaacagggaatttgactagatgctgattatgtagcaaaacgatcacatctgcgtgtggaagtaactgaaactattgcatagaaaaccatgtctcaactcgggtcatgggacggtagcgctatacgatccacgcaaaagttgacgaccagccaatttacaacaccgactaaagtgtaagggaaaggcattc

SEQ ID NO: 446450 - DNA, 488 bp, Triticum aestivum
  unsure (1)..(488): unsure at all n locations
gnnnnnnnntttnngngccgttacgccggccaagtaccggtccaagaattcccgggtcgcgagctcactagtcggcggccgctctagaggatccaagcttacgtacgcgtgcatgcgagtcatagctcttctatagtgtcacctaaattcaattcactggccgtcgttttacaacgtgtgactgggaaaaccctggcgttacccaacttaatcgccttgcagcacatccccctttcccagctggcgtaatagcgaagaggcccgcaccgatcgcccttcccaacagttgcgcagctgaatggcgaatgggacgcgccctgtagcggcgcattaagcgcggcgggtgtggtggttcgcgcagcgtgaccgctacacttgccaagcgccctagcgcccgctcctttcgctttcttccttcctttctcgccaagttcgccgggctttccccgtcaaagctctaaatcggggggctcccttaagggttccaa

SEQ ID NO: 446451 - DNA, 471 bp, Triticum aestivum
  unsure (1)..(471): unsure at all n locations
gnngnangttacgccgnctttaccggccaaaattcccgngtcgacgagctcactaatcgcggccgctctagaggatcaaagcttacgtacgcgtgcatgcgacgtcatagctcttctaagtgtcacctaaaattcaattcactggccgtcgttttacaacgtcgttgactgggaaaacctggcgttacccaacttaatcgccttgcagcacatccccctttcgccagctggcgtaaagcgaagaggcccgcaccgatcgcccttcccaacagttgcgcagcctgaatggcgaatggacgcgccctgtagcggcgcattaagcgcggcgggtgtggtggttacgcgcagcgtgacgctacacttgccagcgccctagcgcccgctcctttcgctttcntcccttcctttctcgcaacgttcgccggctttcccgtcaagctctaaatcggggggctccctttagggttccga

SEQ ID NO: 446452 - DNA, 184 bp, Triticum aestivum
gaacgtcctaaaatgttggaaccggagtttggggaatatccactcaactggaagccggccccttaataccattgaatatccgggtttggccaatgcactttggtaatggcattgcccaactgaaaaggcattgcaatgatgtgatattatgatatgcttgaagcacgcctagtgactttgatgt

SEQ ID NO: 446453 - DNA, 473 bp, Triticum aestivum
  unsure (1)..(473): unsure at all n locations
gnnggnnnttnngnagctctacgcggtcagtaccggtcagaaattcccgggccgacgagtcactaatcggcggccgctctagaggatccaagcttacgtacgcgtgcatgcgacgtcaagctcttctatagtgtcacctaaattcaattcactggccgtcgttttacaacgtcgtgatgggaaaaccctggcgttacccaacttaatcgccttgcagcacatccccctttcgccagtggcgtaatagcgaagaggcccgcaccgatcgcccttcccaacagttgcgcagcctgaaggcgaatgggacgcgccctgtagcggcgcattaagcgcggcgggtgtggtggttacgcgagcgtgaccgctacacttgccagcgccctagcgcccgctcctttcgctttcttcccttctttctcgccacgttcgccggctttccccgtcaagctctaaatcgggggctccctttaagt

SEQ ID NO: 446454 - DNA, 389 bp, Triticum aestivum
tcgacggggccgtgaagggcaaggccggggagctgaaggcgtggctggaggtgctccgcgccggcacggacgggctggcgtgccagctggacgacttcctggacgacattgtggagggccgcaaggagctctccgacctctgcagccactgaccgtaccgatcgaccgtccgacccgatcgatgaaacgacgatggtggttcctgtcgcctgcttgcctggcggcaacgcgtggtggtggtgtacaagtaaagcaatgctgctccgacccataagtggcggcagtacgtagtcgtaggcgtcttttgcagtggcagtgccggtctgggatcggagagtggagtggagtggagtgtcgcagcgttttggtcaggtcatcatgttgttgct

SEQ ID NO: 446455 - DNA, 123 bp, Triticum aestivum
aaatctgcagtgtctctgacggcccaggtacgatttcttccggacatatagacgtcctcgtagtaagctttcaaagtatggggacactggcagcagatagtacgtaggaaagattgaagtacc

SEQ ID NO: 446456 - DNA, 475 bp, Triticum aestivum
  unsure (1)..(475): unsure at all n locations
gnnngnnnnntttnnnngccttnancggccnagtaccggtcaagaattcccgggncgacagctcactantcggcggccgctctagaggatccaagcttacgtacgcgtgcatgcgacgcatagctcttctatagtgtcacctaaattcaattcactggccgtcgttttacaacgtcggactgggaaaaccctggcgttacccaacttaatcgccttgcagcacatccccctttcgcagctggcgtaatagcgaagaggcccgcaccgatcgcccttcccaacagttgcgcagcctaatggcgaatgggacgcgccctgtagcggcgcattaagcgcggcgggtgtggtggttaccgcagcgtgaccgctacacttgccagcgccctagcgcccgctcctttcgctttcttccctcctttctcgccacgttcgccggctttccccgtcaagctctaaatcgggggctccctttggg

SEQ ID NO: 446457 - DNA, 391 bp, Triticum aestivum
ggggtattttgtgtcaaactttgtccataaatttaactagaaaaataataatgcatgtcatcaaaaattatatcgttgaattcgtatttaaacatagtttcgagtgatattatttttggttacatgtattattattttcttagctaaacctatggtcaaagtttgacataaaatactaaggggtccaataaaccaggaggtagtaagttggatggccaaaaggagaggaggatgtgcgttcgtccacgcagatgcggtgcgttgccgatgctcctccatgcccaaaagctggcatctgcccttgagtactgatattgagagcatctccaacagccgcgctaagcgccgcgcgcaaaaaacctgttgcagcgcgcgcttcggctggtttagc

SEQ ID NO: 446458 - DNA, 436 bp, Triticum aestivum
aacaagccataaccatggaatgaatgccgagcctctcagcattcattcattcactcaccgtgttatcacgaagcatcataatacgtcatcgccaatgatggagctggctgcaaaaaaaaaaaaaaaaaaaaaaaaaaaaaaaaaaaaaaaaaaaaaaaaaaaaaaaaaaaaaaaaaaaaaaaaaaaaaaaaaaaaaaaaaaaaaaaaaaaaaaaaaaaaaaaaaacaaaaaaaaaaaaaaaaaaaaaaaaaaaaaaaaaagggggcgccttaaaggataaaagtttaacaagcgggaaatgaaatcaaaaaactcttttaaaggggccccaaaattcaattaaaggggcctttttttaaaacagtagtatggggaaaacccgggggttacccaatttaacccccttggaaaaaaaaccccttttccaaaggggggg

SEQ ID NO: 446459 - DNA, 424 bp, Triticum aestivum
  unsure (1)..(424): unsure at all n locations
ggggacgctgctgatgaagtccaggctcgccggatgcggttttggctcaagctgcctccgcttgttggctgccttgccatccatctcaaccggcggtgacgcggtgtacacatgtgctggtgtgtgttgtgtgctgagtgtgcgcgagtgcgtccttctgtgcatgccactgcgcagtgctgaattgtgtgcgagtgcatccttcacgcggaagaagtgtgtcctcaatgcgccctcaatttactaacgtgcacggtgatatctactacgcaaccttctccttgtagacgttgttgggcctccaagtgcaaaagtttgtaagacagtagcaaatttccctcaagtggatgacctaaggtttatcaatccgtgggaagtgtangaataagatggtctatctcaaacaaccctgcaaccaaataac

SEQ ID NO: 446460 - DNA, 426 bp, Triticum aestivum
  unsure (1)..(426): unsure at all n locations
gggtccgcaaatgctatcttcttgaatctcatgtaggcatcatcatacgtattcaagccagtccggaaggtcgatcccaatggtggagaaggggtctaccggaatggccgcactgctgtggatgttgtgcaaaatgatggtggatccggtcggagatatgcaagccaatcttcattggcaccgacccagacctatatataagacggcgggcagcagagaaattacgggatggaaatggaataactaagtactacctgatcanactccattactgacctgctcatcggacaatatccgactacctctcaacgtcggcaactctagcggagtcaatgtgcaaccatggccaaggagcggtggactgttcgaaggattgtcccatagaagaaccttctcctcgaggacgtatggaagaccaacaagcat

SEQ ID NO: 446461 - DNA, 57 bp, Triticum aestivum
  unsure (1)..(57): unsure at all n locations
gctttggncgggntcatttnggtcgcccntgaccttganttggccgcngcccnttaa

SEQ ID NO: 446462 - DNA, 414 bp, Triticum aestivum
ggggagaattgtcttatgaattctcccaattgcaatttttctgatagactaggagctatatcttcgcgaaacataaaccgccgcaaagtaagctttcaagaaatggggacagtggcaccaaatagtacttggaaaacattgaggtaccaggatcagttcgtgcattcaccagcaaggaaaagatattatccatacccacccgagcattactacagtccccacacaccagctatgaggagtcccctggcgccaagtaaaacgcctttcacatcgacaaccgcgaggcgcaagatgatcttctggaccgaggcagaggaggtggctctgagggaggcagtggcgaagtttgccccgaatggggaggccgcgaaggagaagaggtccatctcgtgggtgcgcatacacgagtactgc

SEQ ID NO: 446463 - DNA, 242 bp, Triticum aestivum
aaaatttattttcctatcagttgtccagaactgtgctataggaagttatacatatgcatcatttttgtccagaccaatctgagccattgcaagtttcttttcattgtatgcatgacagaattatcggttgcatcgtcatgtcctgttgctgctcttatgatatagctcgattacaagttcctaattctgttcagactactcatatgttacagcagcatcgtgatcctttatgatgtgcaata

SEQ ID NO: 446464 - DNA, 355 bp, Triticum aestivum
gggtgggataagaatgtcgaaagggaataccggtatttcactaccatgactatacccgacgccaagagagctaccgtgaacgtcattgcaaaaatgagccatgggtacacgctaagcatgtgacacaatgctttttcataaccgacccaagcaatcccagccgtgttgtcgtgaggagaggcaaaaggaacatcattggaatggatggagtctccaacgaggaggactacgaccagtacggcaaccctatgagggaagatgacgatgacgatgaagtatacgtcaaaagaagaatcagtactacattacctaagaaagatcatactccatggaaaaggaaaagccacaatgaagg

SEQ ID NO: 446465 - DNA, 430 bp, Triticum aestivum
gtttgtcgtcatatgctggtgtggaaatgtttcactatatgaatttgctaattctcgtctgacaaagtctcgtctactactacactacttgattaatcaaacaaaaaatataaaaaaatcaatacgaattaccgtgtaaaatccaacggtataggagttagatgagacatagttatttctcgagctagactagagctagacacacccctttactgtatatattctttgggtgacgttttgtttttgaagtctgatctttactcagctcaactattggcatctgggtgtgggccggtttagtcatttctcctgccagtgtcaatttactgttacctttaagcccgggcccgtgtgatgaatggtagtgtatcctggaacctctctgttgttcacatgcatttttcttgagatataaatattgataaacttt

SEQ ID NO: 446466 - DNA, 177 bp, Triticum aestivum
ggccaagggccggcgccaaccgggcccggccaatttccggcaaaaccttaaaaaaaaatgccgcaaataaaaatccaaaaaaaaaaatataaaaaaaacaaaaaaaaaccggcggcccaaaagatcaaactaacttcccttaagcaattaaacctcaaatgtacaaaatcaataacg

SEQ ID NO: 446467 - DNA, 419 bp, Triticum aestivum
gggttctgttattgctgcatagtttgcttgttttgatgaaactatcgatttctattagtggattaagccatggagaagttatattatagtagctacaatgcaaacatcaaatatgaattggtttgcaacagtacttagagtagcgatttgcttcattgtactaatgatcttaccaaactttctattaagttttgtgtgattgatgttttcaagttttcggagagatcacgatggatgaaggaataaggagtggcaagagcctaagattggggatgcccgaggcacaacaagtaaatattcaaggactcccaagcaaccaagcttggggatgccccggaaggcattccctctttcttctaacgatcatcggtaatttcacttggagctatattttattcgtcacatgatatgcgtaaatc

SEQ ID NO: 446468 - DNA, 393 bp, Triticum aestivum
gggagtcagtgaagtctcaagccggaaggacaagctctgtacacacaggtatactgtcatcgaaagaaagacagcaaacacgtacatatgacgtctcaagcccgacggacaagctctgtacgggcgaacctgagcgaaagatcagttatactggagatggatcatctcggtcccagaacccttgctgacaattgtctcagcacaccgatcgatgttcttgccgtctgtgacttatactgtactcgttgtgccggtcctgttctgtatcctgcgcaagtataatgcgattttggatggctccttattatacatgtgcaaaatatggcatacttggcgtcaacaggtgcatcacaccagtcatagttgttctttctttgttgttgtctcagctca

SEQ ID NO: 446469 - DNA, 100 bp, Triticum aestivum
aggtcgtgtaattttggacgctatgtatgtatagcttggatcttgacgcctttgttctattgttatatgatgatgagtagtagatttacttaatcggagc

SEQ ID NO: 446470 - DNA, 222 bp, Triticum aestivum
  unsure (1)..(222): unsure at all n locations
cnggggtnaatnnngnttcaggggagggnggaantanttttcgcggaaagtnctnaggcccgggacaggggaggnntatcctngcgttgcgatggngaaggctggttcctattcgatgaactcggattggaacntgngactccttctattntgagnttctttngtgcnggcggnnacnggttgggggntctnannnntctntgagtttttncgctaagttnt

SEQ ID NO: 446471 - DNA, 495 bp, Triticum aestivum
  unsure (1)..(495): unsure at all n locations
gnnnnngnaacgtttgccggcccngtacngggccnanaanttcccgnagccntcgggggcgntggggngaccctnagtgtgagtggnnntagggcccccngnacaaccgttcccccggtnncnnnaagggncnnagggccntgggtnggggnggaaagtggncccggttaaccngaatngtcggatttccgnatccnnnaaaatgccnatccttncccgaaaaatccgcatccgaaccaaantggaaatnggaacctancngtanccgaatttatttaccaattaaaaattnaanagggtatgaccttttgccncaaatnnggttntggaattgggtaaacccttanccgaaataggnttatgggagggtaattttcaaaaattcctaagccccaacattccaattatccaaaataaaagccaaataagtggggccaaaaattaccctccgtatgattaaancttagaaattttatncctttacaatagggtttt

SEQ ID NO: 446472 - DNA, 418 bp, Triticum aestivum
gatcaggtcgacgggccatcggcgtcgcgccgcccaatcctggtcttcttcgccggcggtgaccatggccccgttcggccactgctcctgcagcactggaagggcaaggacaccgacgtgcaggtgagcgagtacctgccccggggtgtgtcgtacatcaacgtgatgcggcggagcaagttctgcctgtgccccagcggctacgaggtggccagccccagggtggtggtggaggccatctacctcgagtgcgtgccggtggtcattggcgacgactacgtgctgcccttcagcgacgtgctcaactggcccgccttctcggtgcgggtcgccatggcggacatacccaacctcaagaccatcctcgccgccatgtcgccgcggcagtacatacggatgcagcgccgggtgaggaccg

SEQ ID NO: 446473 - DNA, 70 bp, Triticum aestivum
accgggcgtatattccggatcacggggtatgactaatactatcgatataggttattctacatgattactc

SEQ ID NO: 446474 - DNA, 114 bp, Triticum aestivum
cgggggcacgtgaatcgtcgagcgagaacatggatcggctggtcgagttcttgcgtgccgggtgttatggtgctacctgaatgagttataccggtgttgtttggtaccatgcat

SEQ ID NO: 446475 - DNA, 499 bp, Triticum aestivum
  unsure (1)..(499): unsure at all n locations
gnnngnanttctanccgcnctgtaccggccnagaattcncgagntccncgcgggtctacgatgnccntaaacnnnacnanaataangaaggntaannntnaaaccnaaccttganattgtatnacnatgtttgagttttgcatgtanncnagtcnattgtggtgttcgtccgacaaagcttcaggtgaccccgccaaggaggtgagatgcaaggatgccgtgtaaggcggcaacacgcaagatcccaaggggctgccttaaaaaccggaaagaacttacaaaaggctggaaccctaangaatngaacaaattnggnccggttaaacngnccggncttccngtttgttggccnactgtccatccttaatttcgttnantccnaacctgaanattancnttgccnantanttgatcatgcatgtatttggcctggtcacaaattggttaccgaattcttttcaacnctggaatgntccaagaattgantaccttggaattt

SEQ ID NO: 446476 - DNA, 262 bp, Triticum aestivum
taattccaagcctggtggaacagaaaaaaggccaaccttagcccaaattggaaaggccccttaacaaccaacaaattcctaacgggaattgaaacggcaagccatgcaaccgaacaacgaaccaagccaaaaccaagggacaaaagccgtctttgaagaatttaagcctaaccccgggaccaagggtcctccccttcctccgttcaactttcaaaattccttccccaaccttggtttccctcctttttccccaacttttttc

SEQ ID NO: 446477 - DNA, 226 bp, Triticum aestivum
  unsure (1)..(226): unsure at all n locations
ttcccgggatcgcacgggcggcggtgacgtnggcggcgacgggagtggctgnaggctgcgggggttggcgacgtggcggggcgctgattgggtcgggagtgaggtgganggcggcggccggacatgttcaagcgggggaaaggatgaaacgtcccggcgatgcgganggggaatttgatctannggttttgccccgaaaactccggnggaaggggaactaatatat

SEQ ID NO: 446478 - DNA, 289 bp, Triticum aestivum
gatgtagaccaatccgatacaaaactcctaaattaataaaagaaacccgatttcaacaaacgaacaaaaaatcccaattgagaataaggtgaattccataaacccaagattacaaaaaggtccaaggtgcaaagataaaaaacttaaggttgaaggaataaaaaatcctcctgggttcgaataacagggaaattcattaaccacaaaaaccatcaaaactataatctgaaacattatcctaaataaacaattttctgaataatgaataaattctaaaccatggggctat

SEQ ID NO: 446479 - DNA, 369 bp, Triticum aestivum
caacaacgggaaccctttccaaaaattttcctaaaaaggcctgaatgtctccctctcaactgacaaccctcggcaaattcacctaacaaaagaacctcgggttgaaaaatacattgttgctgcttcgctgtggaaccttagttcatgtgacctgtgtgaaatacccaggaattctgtgtaccattccggtttctctcaaaggctgaattcacactggattggtagaaactactataaaagaggtcccgacggcaatgacatcaccagacaaatgttcctcacgtcaggattgaattccgacacaacatttggaaagacgagatggagctgatacatttcggaaatgttaagcctacagaagaaaacgac

SEQ ID NO: 446480 - DNA, 496 bp, Triticum aestivum
  unsure (1)..(496): unsure at all n locations
ggnnggnntgttggnaagccnagcngntcgaaactgccanagctccgggnccacgggtaggctgagagaagacgacagaagcgacggggatggcgcaaaaaaaaaaaaaaaaaaaaaaaaaaaaagcggccgctctanaggatccaagcttacgtacgcgtgcatgcgacgtcatagtcttctatagtgtcacctaaattcaattcactggccgtcgttttacaacgtcgtgactggaaaaccctggcgttacccaacttaatcgccttgcagcacatccccctttcgccagctgcgtaatagcgaagaggcccgcaccgatcgcccttcccaacagttgcgcagcctgaatgggaatgggacgcgccctgtagcggcgcattaagcgcggcgggtgtggtggttacgcgcaagttgaccgctanaacttgccaaccgccctaacgcccggctcctttcgctttcttcccttctttctcgccaagttcggcgggtt

SEQ ID NO: 446481 - DNA, 419 bp, Triticum aestivum
gggggttccgaagaagaaacaccaccaagcacccaccccgtgtagtagaaatagaaacaagtgcttcgaattgcgatccgcatccgccgacacgatgtttctcacgaggacggagtacgaccgtggggtcaacaccttctccccggaggggcggctgttccaggtcgagtacgccattgaggccatcaagttgggctccactgcaatcggcttgatgactaaggatggtgttgtactggctgttgagaaacgtgtcacctcaccgctgctggaaccaagcagtgtggagaaaatcatggaaattgatgagcatgtcggctgtgccatgagtggccttattgctgacgccagaacactggttgagcatgctcgtgttgagactcagaatcataggttctcatatggggagccaatgacag

SEQ ID NO: 446482 - DNA, 455 bp, Triticum aestivum
cggtcctaggaatcccgggtcgacgggataggagaatgccacagaagtgtggtatcatttaacatagtctggaggggttgaatagactaccattaacaaaggggactgcttgtcaacttttagtttccttgcaattttaagcttttctacagtagtatgttgcctcccaaaggagttattgggtttcccccaaagaggaaggatgatgtagaacaacaacaaagtatttccttcggttagagaacaaaggttatcaatcctgtagaaagcttccatgctaacaatataaacacacctacacacaaacaagatacaaacttgcacccaacatggcaagagggttgtcaagccccttgccttgctaattacaagattaaaagaaaattatagagataaatagtggtaaaatagcacgggaaataaaaagagtaaattgtgtacaagaatttattaat

SEQ ID NO: 446483 - DNA, 362 bp, Triticum aestivum
gggagtggtggagaaatggaggaagaagaaggaggaacgggcgtgcacagtgcagacgcctcggccccgtcgccttataaagggttgcttctgagtgactggcgcatgggaccagaaaatcctctcaaatcccgcaacagtcgcgcgcaatgtacgtggcaaaaaaggcagcacagaaatcgaggcatcgttgtttatccgctccgcccgcttcggcgctccccgtcccgcgcgcttccccgaaatttcttatcccgtgaaatccgggatacacagcagtcaatcgcgcccaagaccctgcgctctaatacaacactcggcgcatgatgccacaagttgagtcaacaactctctgaatgaat

SEQ ID NO: 446484 - DNA, 70 bp, Triticum aestivum
  unsure (1)..(70): unsure at all n locations
gaaaaagaaacngtgcnaanagaacaaaattggacaacaaaaaaaacaaaaaacgggcgccccaaaagga

SEQ ID NO: 446485 - DNA, 425 bp, Triticum aestivum
  unsure (1)..(425): unsure at all n locations
cgggtctagccaagttttttaggttttgggaaccttctnaaaggttcctggaaaccggtttttttattatttttattattttcgttttattttctatttttctctttcttttttctgccttttttctttcttcttgcgctttttctttttgattttttttgtgttttcagctaatgtgttcagaatttttcataaaaactgagattttcagatttttcttcagaaatttcatagaattttagaatttcacaaattgttcgcttatttaaaaaaagtgttcatcttttcaaattttgttcacaaactaaaaaatgttcggtttaagaaatatgttcccgctttcataatttgttcacaaattgctcaggaatttcataaaatattcccacttttgaaagttgttcaaaacaaaattctgaaaaatg

SEQ ID NO: 446486 - DNA, 369 bp, Triticum aestivum
ggtccaacccgaagccccggggcaaaacaaccggaataacccccaaaaggtcaaacaacacggggaatcctgggaaataaccggacccagaacgaacacaagccggcaaatccaattttcaacaaaccaatttaaaacttgcaaattttaacaagccggttaaacttgatttgggccccttggaaaaatttggtacccccggaaccggcaatttgaattaacttacaaggtagggccggccggccggtggtgtcattcaaaaccggctttccgcttgttgcaccaaattcttgcagggaaagtgtaggtccaaaattttgcaaaggaattggtgaactgggttcttttattagaaaccacacttcagcg

SEQ ID NO: 446487 - DNA, 413 bp, Triticum aestivum
actacgaaaagatgccgggcgtgaaagcggtggacatggtcgacgccgacgcgctggcgcacatcagcgggatgagctcctacatgtacaaccacacggtggagtcgtggatataatctgactcacgacgaacacgagcccgctaattccatttttcaccaacctattttacacgtgcagatttttaacagcctgtttaacttgattttggtcccgtggaataattttgtagctcctgaagcggcgagttgaatttacttaccatgtagggtcggccggtctgttgtgtcagtcgacatctgcttttcgcttgttgcagctaattcttgcacgtgaatgtgaagttctacagtttgcagaggagttgtgtacttggattcttttaattgaaaagcacagcttcagcgaataca

SEQ ID NO: 446488 - DNA, 352 bp, Triticum aestivum
cccgggtccacggggagttcagaggcgtcgccatggacatccaggaggagtgcccgcccgacgaccccctgctccggccgtggcagatcccgtaccctgccaccgccatgcccatcgccgccaccgccacgcacatgctccagtactgatcgatccggtgatgattgggtcaataattgaggatcccctgtaggagcggagctgagctgtggctggcaagaggaagaagatctaccctacttggctgctgccttgaggattattaccaaggcgtagtttgctgctatatgttgtgtttattattatgtttcagtaagtgtccgccgtcgtcgtcctcgtcctccatgtccta

SEQ ID NO: 446489 - DNA, 59 bp, Triticum aestivum
ggggaacacaaaaaagaagagagagaaaaaaaaaaaagacagagagcacaaaaaagaaa

SEQ ID NO: 446490 - DNA, 415 bp, Triticum aestivum
ggggacgtttgagattttgagttcatgaatttttccgtttcctaaggtgtttcggctacttagggacgagtctccatcatcttggtttctacatcaagaacaccgctattcatcatcgtcggacggtaacctccatatcatcttggtatcgtggtaaccctccattgtatattccccttgccattgcattgttaacccctagcccattttgcgttacttgcctatcgagactagccatttgagtattgccggcaacgttacttgtgcacattactgatcatacttcccatagcatacataccatatcatcgtggtgcatatattggtatcatatcttgtgtcacaagtttgttcccgcatatacacaattgctatcttggtttgtgcattgtgcaaagttggccatacacaataa

SEQ ID NO: 446491 - DNA, 220 bp, Triticum aestivum
cgggagatccacactgccgtatgcctcgtcctcgccagcgaggtcacgattccgcagtctccgagggcaccactcggtgtcgacaagttcacctcctcttaggctgttcgtcggccgtttctcggatctagccgtacgggtgcgtttatggccgtgtaaacctcgtcgaatcgtacccgatgtcactgtaccgcccgacatgttacaggtgcctgcctca

SEQ ID NO: 446492 - DNA, 381 bp, Triticum aestivum
ccacgggacacctaccaccccagctccagtgcctacaaggtcatcatcgactttggcctccaaaaattcttcaaattaaattaactaacaacctaacaataattgtaaaaggacaaaggggaaaaggaggaaaattaaaaggaaaaaccaaggattttgacaaacattcattaaggggttaacacgtttcccaaaaataaaaggaggaaaaatcctggactgaccaacatcagtccaaaaattttgtttcagtttaggtccaaattttttgccaattaagggtttacacttttccctaaaaaaaaaaaaaaaaaaaaggaaaaaaaaaaaaaaccaaaaaaaaaaaaaaaaaaaaaaaaaaaaaaaaccggccccccaaaa

SEQ ID NO: 446493 - DNA, 68 bp, Triticum aestivum
ttcccgggaccacgggaatgcgacatgatggaccgatatccctagacacatctcgaggaaaatggagc

SEQ ID NO: 446494 - DNA, 125 bp, Triticum aestivum
tccgggaccacgggtcacgttgactcactcagttgagctgatgaaaccggtaagcaagcaacaacagcctgtcagccaccatgttacaatccccaatacaataacagaaaggatacttaacttgc

SEQ ID NO: 446495 - DNA, 446 bp, Triticum aestivum
tccacggggacgaaggcacaactcatcctaaaggtccttcaaggcccgtaatagagttgccagatattcgaggtgacacagattgttttgctggatctgctggagttggcatgcctcataaactcaaacaagtacaaggcgatgattcatggatgtttgaggaaatttctgtatcacctagatcattatgtttgaatgaggaaggtgaaagtgtcgtctttgagcatagggaatctggatcttgtgttgagcacagggaatctggatctcctgttgatgattacttaccccatgcaattggttcgtgcgaagagagtaaaatttctccatatttccttgatcttgatccaagaacttcagggaagaaatgtcaagaagtagaccattggaatcataaacgacatcatgactgtcctgccggagactgtaatgaccagaatgaattt

SEQ ID NO: 446496 - DNA, 437 bp, Triticum aestivum
  unsure (1)..(437): unsure at all n locations
tccacggggacggttaaggtanggtttcgtccacaaattcaaggaaaggagcacatattaaaaggtaaaggaacctaggaaagtcaaaataaggtgcggtttttggccacccaatcgtgatcaaatgatcaaaatgataaaggaggtttaggtgggtttttgggcaactttggaagggtgttgggctgcaacactaacgaagccttttcggtcccctcggtaaacctttgagtatcaaacgaagtcaaaatggcacgaaacttgacaggcggtctaccggtagtgaaccaaggccgcatggcaagtctcggtcaaatccgaaaatgtttaacacccgcacacgaaaaangaggtagaaagggacaccgggtgacatangaacgccggattgcaaaacggacaacagggaaaatgcttggatgcatgaaacgaacatg

SEQ ID NO: 446497 - DNA, 286 bp, Triticum aestivum
gggcatgctgaagtcactgcaataagagaggcttgcaaaaagcttggaaagattgagctgtcggattgtgaaatgtacgcatcatgtgaaccttgcccaatgtgttttggggctgtccatctatcccggatcaagaggctggtgtacggagccaaggcggaagctgctattgccattggattcgacgacttcattgctgatgctctgagaggaactgggttctaccagaaggccaacatggagattaagcgagcagatgggaatggagctctgcttgctgaacaag

SEQ ID NO: 446498 - DNA, 438 bp, Triticum aestivum
ggggttggcgtaggtgatgtctgtagtattttcgtcctcgccagtcacacaattcctaggttatgggactggatctccatttccaagattcttagctgataagtatattgtgcggaaaaatctctactgaatgacagatccaagcaatctggatacgccatgggacaaagttgaagctttgtacatcacttctctacctgtttattaatgtgtcttcatgtttggcagtgatctgggtttccatgtacttgatagatgcattccttatctttatgtgttccatctacgtagatatgtttctgcccataaatgtatttatgagcttgctccgtttttactgctttcctacgtcaatttgaaaagtaccctttattcacctaataagggctatacatgcatttagacgagtgcacattttctataaacataagcattgtc

SEQ ID NO: 446499 - DNA, 353 bp, Triticum aestivum
  unsure (1)..(353): unsure at all n locations
ggggcagttaaagacgttgagctatggggcttcgtctatccttcaaggtacgaacagatgctcaagctctgtcgtactgagaagccaggggtatgccgattttgagtttaccggaccaatgtgtgttacatctgtacagttttaagtacgcgtcgctagaattttagtgtgcaggaccatggtagaagtattggaaagtgagaacttgtcttgtcgagcgagtttgctgagatttagaaattctgtaattttcatgttatgccagcggaacaggcttactggtggttgttcgaattacagcggcaaatgtactgcattattctcatgtcttcacaaaanagctataccatcgt

SEQ ID NO: 446500 - DNA, 433 bp, Triticum aestivum
gggggaggatgacgttgggttgctgttcagatacattacattgcttcagacctctggaactccgaagtggatttttgatgagcttctagccatctgcgagacgggattccactatcgagacaagagccctcctagcaattatgttgtcaatatttcgtcaaacatgcagatttttccaccagaagattggctgatcgcgtcgtctgtaccatcaaagttttcaccagatgctattcagaaggtgctaaatgaattgactacagagaatgttagaatattctgggagtcaaaattatttgaagggcatacagactttacagaaccttggtatggtacgtcatattgtgttgaagcagtgcctccttccattatgcagaaatgggtagaaaatgctcccaacgaagatttacacctgccaaaacctaatatcttc

SEQ ID NO: 446501 - DNA, 166 bp, Triticum aestivum
  unsure (1)..(166): unsure at all n locations
accgggcctaaattcncggatcgacgggggtgtgggtgagtagagggatgtcctggccaacggtgggaataataagaagccgtgaagcctccgccggaacaaaaccgggcacgggaagcaagaacatgcgacacgaccggcgctgccttgggccgctggagcaaga

SEQ ID NO: 446502 - DNA, 263 bp, Triticum aestivum
gggccaccatcaattactgcggtgctagcttcagactcgatccagagatacctatgttgactatcgctatgtagagaggttatatgctgagagtgtacattatgtgtcactcactcgtgatgttctggaatgacggttctgtcgtatcacagagttctgcgtcataagtatcctccgagtgagcctttaactgatcatagttcaggtgatgttgatcttgaaagagctagacactctgaaacgctccaatagtgaaagggatg

SEQ ID NO: 446503 - DNA, 242 bp, Triticum aestivum
tagcttcagactcgatccagagatacctaggttggctatcgctatgtagagtggttacatgctgagagtggacattatgtgtcagtctctcgtgatgttctggaatgacacttctgtcgtgtcacagagttctgcgtcttatatatcctccaagtgagcctttagctgatcatagttcaggtgatgttgatcttgaacgagctagagacactggaaggtcgccaagagtaagaagggataga

SEQ ID NO: 446504 - DNA, 279 bp, Triticum aestivum
cggggacgaagagtatgacgaggaggaggaagaggaggctgcctaagccacctgacctcatatggtcatcctgctgtctgttagatatgccttgtgtttactattgctgtcgatttggtggtgcttgtggtgcggatagatctttaggtggttggtaacacttatagatgcttttgctgcttcggcgaatcgatattttttgaactgttttttttttgtatgttgatggtggttttatgcgaactgtgatattagcgtaactgtgggcttgatacccgt

SEQ ID NO: 446505 - DNA, 55 bp, Triticum aestivum
caaaaggttcaagcctaagttacccttgaaggcaacgtcatactcctccaatatg

SEQ ID NO: 446506 - DNA, 279 bp, Triticum aestivum
ggggaagttgttgggaggtggctcgccaaattcaagtctgtcacctaagacggaggacgtgctgaacgacctggacgctgcagatcaacatggacatggacttttcactttctagagtaacacactgacatggcatagtagtaggcgacggttctttcattataacggcttataattatcatcagactcatactattatgcaaatgcttcctatgatttcattggttaaattgtataattgtgacaggttcatatatcaatgtcaagaaagagctgagc

SEQ ID NO: 446507 - DNA, 405 bp, Triticum aestivum
  unsure (1)..(405): unsure at all n locations
cgggatattgcctctgggctaaaaactctgacgatggggtcaaaagtaactctctcgcggcctgggaaattgtctgccgcccaaaatgctgcggaggccttggtgttattgatattaaaacacagaatgcagccctcctcctaaaacatctattcaaattctataatcatgaagatgttccttgggtggagcttgtttgggatgcctactacagggacaagataccgcatgcatctgaggcggtgggctctttctggtggaaagatgtgatgcaactcagtgggatcttccgagggatcactaaagtcacccccggggatggctctagtgctctgtctggaaggatgtttggtttgataatactcaggattccncaataatggatatatacccacgagccttttc

SEQ ID NO: 446508 - DNA, 353 bp, Triticum aestivum
  unsure (1)..(353): unsure at all n locations
cgcctgccggtaccgccccgaaattcncgagtccacggggggcgggcaacagctgctgctgctgcagcagcagcagacccggaacaacaccgcaaaataaaaaataaagcaaaaataangagcaaaccaaaggaaacaacaaaaccaaatattatatataaaaaaaggctccgcaatttacagatagtaatttgcaatacttccttccctgcttccatttttgtatggcctctcaaagcttgcttttgttcaagctggaattgtatcatttctcgaaaacttgtcaccttgaacatgaaactattggtttgcacagaaaaaaaaaaaaaaaaaaaaaaaaaaaaaagcggccg

SEQ ID NO: 446509 - DNA, 348 bp, Triticum aestivum
  unsure (1)..(348): unsure at all n locations
attcncgggacgacgggggttacatcactccctactttattaccaaccaaaagacccagaaatgtgaattggaagaacccttgatcttgattcatgacaagaaagtttcgaacatgcatgcagtagttaaagtgttagagatggctctgaagaagcaaaagcctctactgattgttgctgaagatctagaaagtgaggcattgggcactctgattatcaacaagctccgtgcaggcattaaggtctgtgctgttaaagctcctggttttggggaaaacaagaaagcaaatttacaggaccttgctaaccttactggcggagaagtcataactgaagagcttgggatga

SEQ ID NO: 446510 - DNA, 431 bp, Triticum aestivum
  unsure (1)..(431): unsure at all n locations
gcatttaggacgaagaagacaatcgacccccaagggaccataatgtattttcctangatgtctatacttattggtttgatcaatagatttgaggccttctgcaaacaataaaactaaaataggtcattgatgcatggtggccgtcggagagtacctcataataaaggaaaataattccgtctttgaaccaaagctaaattatcgtatttcggattgacgtaaacataaggaaatagtcggtatctgaaagtaccattcttctcccgagctcaaatgcacttgtcatgaacagtanaaaaataaaaattaagttaaaatataaaattttctgatttttcttgacagtaaacattgttgaatgttttacatacgtgcaattttcatgaagaaaaaacattcccagtgctctaaaaagaacaaagctccaacat

SEQ ID NO: 446511 - DNA, 374 bp, Triticum aestivum
catcattgggtaataataatgaaccaaacggaacaaggtcaagttaaatggaacaaagggttccaaaaaattggaccgctgtagatagagggggaaggtgatggaaatgttggtgaagatggcggaggtgttggtgaagatcgtggtgatgatgatggcccccggtggcactccggcgccaccggaagctagggggagagagccccccttcttcttcttcttcttcttcttccttgaccttctccctagatgggagaagggtttcccgtccgggtccatggtctccacggccgtgggaggggcgagaacccctcctgagattggatctgtcactctgtctctctctgtttctgcgttctctctattctgccctt

SEQ ID NO: 446512 - DNA, 434 bp, Triticum aestivum
gggaccatgggccgcaggcaggcaagtctgggaaccctcgttcccagaatgccgacaaacatgtccgtccatttatcgacctttttttcattgagataacttcaaaaaatgtagaacttatcaaaaacacaaacaactttgtatggtgccttgcattgttcatacaaggtcatgaacttttgaggggggggggggattttaaaagatgtcaagaaacaaagtgctctcagactgagtcttctggcctacccggacaccctccgttgaatattagctatttttagacattactaaaatgatcccaacttttacaagcaggtgggcatgtccatggtaagcaccaatgtgaggtttgaacgatatctgacaccgtctgtaagttgcgatagttagaccatttatcaccattttgatagagaaaactccagagaatg

SEQ ID NO: 446513 - DNA, 497 bp, Triticum aestivum
  unsure (1)..(497): unsure at all n locations
ggnnnnnnnnnttnnnnnggttacgccgccggaaccggtccaaaattcccgggtcgacggtctccangttaaccgaaaaaaaanaaaaaaaaaaaaaaaaagnaagcggccgcnctanggatccaagcttacgtacgcgtgcatgcgacgtcatanctcttctaaagtgtcacctaattnaattcactggccgtcgntttacaacntcntgactgggaaaaccctgtcgttaccnacttaatcgccttgcancanatccccctttcgccagcnggcgtaataangangaggcccgaccgatcgcccttcccaacagttgcgcancctgaatggcgaatgggacgcgccctgtaaggcgcattaagcgcggcgggtgtggtggttacgcgcagcgtgaccgctacacttgccaggccctagcgcccgctcctttcgctttcttcccttcctttctcgcnangttcgccggcttccccgtcaagctctaaaacnggggg

SEQ ID NO: 446514 - DNA, 383 bp, Triticum aestivum
acgggcgtaccatagtgtcggggagccggcgcaacaagcgcaagcgctgccaatagtgccgggagcaacggacttcggcgcaatgccgcaatgtggaaagaccggtgtggagcacgctctcttgggctgcgccaacgtctacgacaactgactcctctaagccgtggcttatggggtgtgtgttgttataagccacagcgtgtgtggtcaggctcgtcacgcgcgacggattcacgcgggacgtacgggacgcactgatgcattcggactcgtcggacacgactgatgcgcgcaggacatgcggggtgcaacggaaacgtggcgtgtgtgcatgtgtggtgtgcgtgtgtgcgcatgtatgtgtgtagcgtagtggccacgct

SEQ ID NO: 446515 - DNA, 53 bp, Triticum aestivum
  unsure (1)..(53): unsure at all n locations
attcncgagtcgacgggacacggctcgaatacctgcagcacgagaaattcatg

SEQ ID NO: 446516 - DNA, 489 bp, Triticum aestivum
  unsure (1)..(489): unsure at all n locations
ggnngnaatgttacgcctgccgtttacgcngncaagtatcccgggacgacgagctnactctcggcggncgcnctagaggattcaangcttacgtacgcgtgcatgcgacgtcatagctttctataatgtcacctaaattcaattcactgggccgtcgttttacaacgtcgtgactggaaaaccctggcgttacccaacttaatcgccttgcancacatccccctttcgccagntgggtaatancgaagangcccgcaccgatngcccttcccaanagttgcgcagcctgaatggcaatgggacncgccctgtaacggcncattaatcgcggcgggtgtggtggttacncccanctgaccgctacaattgccaacgccctaacgnccgctcctttcgcttcttccccttccntttcgccacgttcgccgggntttccccgtcaaantccnaaatcgggggngncccnttaanggttccnaatttaaaggt

SEQ ID NO: 446517 - DNA, 406 bp, Triticum aestivum
ttccgggatcacgggctgcggagagctcggcgccgccggcgctctgccacagttcgtgaacccagtcgcccgccggaacaatccgtgttcttggccccatttaatttcaaaaataaaaattagtaccagcagtgatctgtattaggttgtagtagcactagtaatagaagtagtagtagcgtcagttttagcaggtgtgtattttggattggtgacacattggttttggggtgccggcgataagcggtggagatggatgaacaagcaagagatccatgtctagtagtagtagttggtttgttagaagcaataagtgggtctctttcggaggcgagagagatgttttagctgtttgtagcaagcgctagagatgataatgttggagtgaaatgaggctaatctcaaa

SEQ ID NO: 446518 - DNA, 489 bp, Triticum aestivum
  unsure (1)..(489): unsure at all n locations
ggnngaacgttaccctgccnttacgccggnaaagtactggngnaacgacgggcagggttaaaannaaaanaaaaaaaaaaaaaaaaaaagcggccgctctagaggatccaagcttacgacgcgtgcatgcgacgtcatagctcttctatagtgtcacctaaattcaattcactggcctcgttttacaacgtcgtgactgggaaaacctgggcgttacccaacttaatcgccttgcagcacatccccctttcgccagctggcgtaatagcgaanaggnccgcaccgatngcccttccaacagttgcgcagcctgaatggcgaatgggacgcgccctgtaacggcgcattaagcgcgcgggtgtggtggttacgcgcagcgtgaccgctacactttgccaacgncctaacgnccgtccctttcgctttcttcccntccnttctcgccaagtttcgccgggntttccccgttnaactntaaatcnggggggc

SEQ ID NO: 446519 - DNA, 166 bp, Triticum aestivum
ttccgagtcgacggggtatgactgataatatcaataaaggtaatccaacagaataatccaaaaattcaacaactccaaattaaacggcttataaaccaggtaggtaaaaggaaggtgtaacggaggtaagaatttgatcccttgtgtaagggtgcggatgtaacgc

SEQ ID NO: 446520 - DNA, 408 bp, Triticum aestivum
ggggtcgatacatctggaagtggtgtcaagttaactgtggagcctgcagctggtggagagcagactgtcattgaggctgatgttgtccttgtatctgctggcagagtcccatacactgctggtattgggctggacgccattggtgttgagacagacaagggcggaagggtccttgttgacaatcgctttatgacaaatgttaagggcgtatacgcgattggagatgcgatacctggaccgatgcttgcacacaaggctgaggaggatggtgttgcatgtgttgaatttatcgcggggaaggagggccatgttgactatgacactgtacctggcgtggtgtacacacacccagaggtggcctccgttggcaagacggaggaacaagtcaaggcatctggtgtagcctac

SEQ ID NO: 446521 - DNA, 435 bp, Triticum aestivum
ggggcaggctaacatataggtgtagccatttttctgacataaaaataacagtaaagaagaccaagttaacatatgtatcaggttgcgtttacctgatcagaagaaacaggcaggtttacaatgttttgtgttgcacattgctactttggtaccttgatgcgaagtaataatgtctttaagctttattagcaccggaataacagcaacaaaagacagtttttaccactgcacttgcagagttctctgaacttctgataaccagacatcagggttctctaaaagaacagacattagctaacataattcagcacaagaataacagttcaaaatgccaaaagagtattagtacaccataagcaagtgttgtgtcgttagcagcgtcgaagtttctatttctgaacttgcagaacttcattgtcatgtaattcagattga

SEQ ID NO: 446522 - DNA, 545 bp, Triticum aestivum
  unsure (1)..(545): unsure at all n locations
gggngcaacgtatcgcgnccctgtaccctgtcnntaccggtcangcattcgcggggcccaaaagggctggannggnnggggcactaangcggtgggcgcagcacnttcangggggaactgtnnatgttcctcaagtgcatagttcgagggggnnaacagtgacacgccggtangtgcangccntccgngtntttcttcccgcnaactgcgnaggtgttnggcacccatcaaattcacttcnggccaactcngcggcggtgttccaagacttngcctcaanantagttttgggaaacncannggataancctnggggaancatggtttntcgcgcaangnggncgcacngggggccangatngcccccctggnnatcgttgcnncanngggtgcagtatnttnccggannncnccctgttcccctggtcaagggnanacnggtncctaagcctacctnnngtgggtcccttggtaggncttcttcnagggnnnggnntttnaatgggtnaagnaccnntnggggagcctggatnaatnccngnggg

SEQ ID NO: 446523 - DNA, 408 bp, Triticum aestivum
gggtggaccagaaaagattgataagccgcccgctcagccgcctgctgaaccgcccgctctgcctctgggcgtgtcctgtcctgatcaaccaagttaggggctccatcacgcgtcgggtcatgcccgcacggttggtcacggcgccgggcgttgcttgaaactgcagccgagtccatatgcctgctatagctcgggctccggcttgggcgaggggtcgaatgaatcctgtctcgactataagaatatgcttcctgctgtgccagagccgtctgaagaagttctgtgacccttcgcgtttcgaccgctgtcggagagtcgccttccactgggagagccgccaatcgtgccgccgcagcaatcatgttctccaacgggttagaataatgacccggaggtgtcggtacatac

SEQ ID NO: 446524 - DNA, 355 bp, Triticum aestivum
tccgggacaagcgtgagacgcaacgagatacaagactcctttgggttgaggatcgatactatgtctacgtaccatgctactcagagcttccagcccaagaaacttcagttcagtgaatgccaacttctgttcaatgtgcatctgtggttgttctgctgcgatatgctgaaccaccttgtatatcacgctagccggagtcatccgtgtgaccagtccaggaaccctgccatttttactttgtcgatgcagagttacgttcctgtactaacctaaaactcttcaccatgttcctagttaaataccttgtttaagtttgctatatatcctttatgtaagatttgatgagctaaaacaa

SEQ ID NO: 446525 - DNA, 379 bp, Triticum aestivum
gaagcgtgaactgggcaatccaattccaattccgaaagcctccccaaaacaatggccccttcggggccggaaacaaaacccaaccggcccttccaacttcaacaacggccggcaatcacaatgggtttttggaattggttgccgggcaagaaggccaaccaggaccatgaggcaggctcgtcatcaacctcaccagaaaccgcggccacctactcaacctcactgatggcattctcaatctcccacctgcagctcggccccgcttccggtcgtacgttaaggtggaggtatgccgatggtactggcagacctgcaccccgttgtcgtggtctgttgccaagcccgccccgcgagccgcgtgtgcgtgtgccgagcccac

SEQ ID NO: 446526 - DNA, 350 bp, Triticum aestivum
gggtttggtgaaaatcccaaacgatgcatacattgccacagaatacatgcgacagctgaacaatcatctggtcaaattgttcgccgtgttgtgtgagcatatagcacttgtggccactttgtcatgactccagcacatgctgagagtttgatgctacaacaatttatctgagactacatgttacaatacttcagtactatcgacttattatgagattgattcagttgacactaaaaactaggttggttaatgttgcgaaaattactggatatggctcgtggaaattcaaggatcgcctttattcatatgtaatcatcatctccgtgaatgcaagagcaattgtgaatgtc

SEQ ID NO: 446527 - DNA, 446 bp, Triticum aestivum
  unsure (1)..(446): unsure at all n locations
aaaaaatgaagggcacaaaattgaggggcaccatcctggcctctcgctacttctcgtctggatagtgtactcaacgccacacaatactataccgtatgcaagcctgcaggtagctagctagcctgagagagacagaccgaatccgacagatatctcagaagaattttctttacgtgcccaatatcaatatgggctctgaaatgaggctaggggcgcgtttgttacctgcatcgttttttgccactttgcatacttgtcccaactgggcctggctgagcatatacaggataaaaaccaacatctgcatgttgattggttacctgcatcncctccagcctaaacgtgctaaaacgaaaggcctgatgtttgcttgcggactttgtttgaggggaaacacangtccggttgtttggttatgtacaggacagttgtgtggtaacctccta

SEQ ID NO: 446528 - DNA, 449 bp, Triticum aestivum
  unsure (1)..(449): unsure at all n locations
attcncggatcgacggggttcgtgaacacggcggggccggacgggcaccaagcggtggcgctgcacgtgcanggggacatgtcggtgttcttcaactgcaggttcgangggtaccaggacacgccgtacgtgcacgccaaccggcagttcttccgcaactgcgaggtgctgggcaccatcgacttcatcttcggcaactcggcggcggtgttccagaactgcctcatgacggtgcggaagcccatggacaaccagggcaacatggtgaccgcgcacgggcgcacggaccccaacatgcccaccggcatcgtgctccaggggtgcaagatcgtgccggaggacgcgctgttccccgtcaggcatacggtgcctagctacctcggacggccgtggaaggaatactccaagacggtgatcatggagagcaccatcggcgacctcatcaagcc

SEQ ID NO: 446529 - DNA, 421 bp, Triticum aestivum
tagccgtcgtagaattcaagggtcgacgggagatacaaaatatattttcaaatatataggtcacgtgggcaatgccttggtgacggcaaaatgggtgcattcgtccggtgacacagatttgctatggccgcagtgacaaggtaggtatcagtttcgagatctacggtttcaagcatcagaaggtatctaaatagggtgaaccttgtcaaagaatggtcacatattatactctctgaatatcatcctactgaaagtaattgaagccttgccttcacgatcatcaaatggttgcatctctaacatagtggagcacaattttatgataacatagactcaaaaaaggaaaaatagacagagggtttagaaccctagacgccaccttctccacctcgctcctcctccgggtgccctgcactgctcc

SEQ ID NO: 446530 - DNA, 387 bp, Triticum aestivum
acggggcgaaaggaggtcaacggatggcacggaaaaacaggttgcgaagctgatggacgaggacatcggtgccgcaatgcaatttctccaatcaaaggctctctgcatgatgccagtctcccttgccatggctatctatgacacacaacattcacaggacggccaaccagtgaagcctgaacccaacaacactgcctagtatagtaacagcagctgcaacacccatccccgcagctgctagtaggcatgcatgaacctgttatcaaagtgttaagataaaaactgctggttctgatccactaactacaaggaggctggaaaagacctaaaggatcctctccactggaagttgtatcgacggtatatgatgtcacctactaacccttt

SEQ ID NO: 446531 - DNA, 409 bp, Triticum aestivum
gggtcctatgagaaccccttttaatagtatggatttcctacaaccaaataaattaaatgcatcggaaatgccgccttcgctcttttccatctggaggggtgcccaaccatcttgtgcctaataaagtatacatgcgtagcttaggcacgcgtttagtctgtaagttgcattgtcatcaacatcaaaacacttaaggaggaaaatgcccttccagtaatgtgccttgttaggcctttggcgttggaacccaagtccccacctatatttcaagataaagcatgcttatgtttaattcgtgacaaatatgtgttttcaaattaacgcaacaaaaagaatgttcaataaaagactagatgcttttcttcacagcttcttatgccaattggtccatcaatttaccttgtccaat

SEQ ID NO: 446532 - DNA, 378 bp, Triticum aestivum
cgggtcgacggggcttggtagaaggaggtcatgatgttgatattgcggaccttaaagtccagatgtcatcggctgttgtgttccttcaactttcatggctgaagtaaccttttgttcagtaatctgcgtaattgttttctgctttttttttgagcttgtatcatgaagagttgtagaataataattagccgcagatggttaagagaaaacaaagtgccggtattcaacaggtgctgatgctgaacttttggttaaacagagctcagtgtgctatgttagcaagggtgtatgaaaacccagcatcctttttttggatcccagtggtctctggttatgtagggtaaaaatgctatcaatagcagaattctggcttggtgt

SEQ ID NO: 446533 - DNA, 395 bp, Triticum aestivum
gggtcaccacatgcttagatagccgattacattgggcgaagactaatgatcaacatttaacttgacaatgcgtattttttttagaagaacagggaggctcctccccggttccattatcaaatgaaacctaaagtgtcttacatcagctcactgagaggagcagttcaaaggaaggactgcggcgaaaccgactcaagtttaatgacaagcttacagaatcaaaagcggcaaagacacgggccataagcgcccacacacgcactacatgttttctaagtgcacttgataatgcgtatgtccaggtgaacctccttggagcccccgtgcaccgagtcggtgggtaaaggatggaattgatgccatgtgttttccaagtccacattggcgggataatc

SEQ ID NO: 446534 - DNA, 80 bp, Triticum aestivum
gacggggtatcgagatgtaatcattgagttgtaaataaatagaagtgtgatgatcatcattcatagagcattgtcccaat

SEQ ID NO: 446535 - DNA, 292 bp, Triticum aestivum
ggtcgagggccaggaaggtggcaatcgtgacggacatccccaagaatgcgtctggcaagatactgaggaaggatcttatcaagctcacgacgtccaagctgtgaaatgtcgaccgttatcctgctctgtgttatcctctgaaatgtcaattgattcatccttggatcctcatcattgtacaattattattttctcttttgcccttcgtcacaatagcactctgagtatctgtaactgaaggatttcagcggatgtgtagtacatgagaggtctctgtgtaaattggttctgt

SEQ ID NO: 446536 - DNA, 292 bp, Triticum aestivum
agaacaaagagaggccgctggtgctccgcaacaaggtcccgaggtggcacgagcagctgcagtgctggtgcctcaacttccgtggccgcgtgaccatcgcctcggtgaagaacttccagctgatcgcggcgccgagcctgttggaaccgcagccctctctcactctcggctagaggaagaagaagacacaagacacgagattttccggtcggcgcacgaacgccgccacgggcgcacgaacgcccgaatctttttcctctttgcaatgtctacatggtgctcaactcagtac

SEQ ID NO: 446537 - DNA, 385 bp, Triticum aestivum
cgggtcgacgggtgttgatagcttgggcttgactctgggtagcaaacatggtgttgatggcgctccatacttcagccggcgtctggagcgtggcgacctgccaaaggatgtcgcgagagagggagcccatcaagtagccttggagttgttgctgttgtgcgtaccagagggatcgtgcaaagttgaccacctattcgtctttgtcgtccttggtgatggtgagggtggccggtagtgccggactctttgcgtcaagatgatgttccatttgcgcgcccttgttctggggcagaatgatagccttccagaacaggaaatctcccctcaccaggttctcttggggtggcgatccgagaaaggaattgttggaagtggatgattgggc

SEQ ID NO: 446538 - DNA, 377 bp, Triticum aestivum
ccgggtcgacggggtacaaaatttgaggcacgttccatagatttcaggccatatattagtccaatctataaagctatattgggccgcttggcgaatcaagatcaagatcaggaagttaaagagtgtgccatatcttgcatgagccttgtgatcgctacttttggtgatggtctccagagtgaattaccgtcatgccttcccatacttgttgataggatgggcaatgaaataacacgacttacagctgtcaaggcatttgcggtgattgcgaattcacctcttcggattgatctgtcatgtgtcctggaccatgttgtttctgagctcacagctttccttcgaaaggccaacagagccctcaggcaggcaacattggg

SEQ ID NO: 446539 - DNA, 61 bp, Triticum aestivum
cacgggggcagcgaaggaagactcggcatgaaggccagaaaatggtgtggaacgtagtggt

SEQ ID NO: 446540 - DNA, 387 bp, Triticum aestivum
gtagcgtcctacattcaagggtcgacgggcaatggaggatgtaggtgtgatatgtcaagtagtggacagataagccaaccactggatgtggttttgagggatttttgcagtggggtttgtacggtgctatgccgcgctgggtttgggatttgaaataaaacgaagggagatgtgccacgctcttaaatgccagtcttctgctctaatcttgctaaatttatgcatcttgttacatcttgcagccaaaaaaaaaaaaaaaaaaaaaaaaaaaaaaaaaaaaaaaaaaaaaaaaaaaaaaaaaaaaaaaaaaaaaaaaaaaaaaaaattttaaaaaaaaaaaaaaaaaaaaaaaaaaaaagggggcccccaaaaggttccaaccttaat

SEQ ID NO: 446541 - DNA, 432 bp, Triticum aestivum
tagccgtcgtaaattcaagggtcgacgggagattctaaatatattttcaaatagacatgtcacgtgggcaaggccttggtcatggtgatatgtgtgtattcgtccggtgactcagtataacgatagcctctgtgcacagtgatgtttcagtttctacattgatggtttcaagcataagaaggtttcataattaggtgagccttgtccaggactggtcacatattatgctttctgagtttcatgctactgaaagtaattgaagctttgccttcgcgatgtaagaatggttgcatgctgttaaatagtggagcacatttttttgataacatagactcaaaaaaggaaaaatagacagagggtttagaaccctagacgccaccttctccacctcgctcctcctccgggtgccctgcattgctcctccggggcgtt

SEQ ID NO: 446542 - DNA, 408 bp, Triticum aestivum
gggtcgaggcgggatactaatcgagaggtctcgagttcaaatctctagctgatagaaaaattggtgtgttcctgttgattgggcctgatcggcaggaaagcccatctcagcctcattaatcttgcatctcgtcgttgccctacccatcgtagccccagtcccaacgccaggacgatggcggccgcgggacctcctatctgccgcattctgcggcagactggcggggtttcgcacagggtactctttctctgggccggcccacacagaagcagccggtggtgaaaaaaaacaacgcataaaaagatacatgttttgaaaacaaactgcattcgaacttctaaaaaagtttagatctgccgtggattatgttcttatagtgtttgctgcttaatattgggaaagaacgtt

SEQ ID NO: 446543 - DNA, 315 bp, Triticum aestivum
cccgggtcgacgggctatggtaatagttaatttgattctggtgaaaaacacaaactttgcgctcacgagaaaaaattcaataaatctaagaaatgtgcttttgcgtagattatttttgctgtagatcaatagacaaatttcctaatacttcctattttggtaggatttttggagttccagaagtattcgaaagttacagcttgctacagactgttctgtttttgacagattctgcctttcgtgtgttgtttgcttattttgatgcatctatggctagtatgtaagggtatgaaccatagagaacttggaatacag

SEQ ID NO: 446544 - DNA, 254 bp, Triticum aestivum
cgggagcgccagacacgcggggttgctcgccggaagcatccgatgcaaggccgctcaccggaagcatctgatgctactgacggcgaccggcaggcggggtgacggcggatgctggtgttgcgaggatgacgaataccctagccaggtcgtttgcatcagcttttcatctcaaagatgtatctcctgttgatccatgtacgctcgaggcttcttacgaattttaattcaatgacgtatataaattggtatgatgg

SEQ ID NO: 446545 - DNA, 406 bp, Triticum aestivum
  unsure (1)..(406): unsure at all n locations
ggctctatgacatgaagcacaccacacagttctgcaaaattccagctcggtggctccgtacttcgagcaatacaagaatattttacgctcggacaacccggggaagcctgaatcctggattagaaaggcccacatggagactttcggcagttggttgcgaaaacatttaatgaatgacaatgatgttggagatcagctgtacatgttggccaagaaaccatcttcgactataacgactttccaagggtacgagataaatgggaatacattttacaccatcgcccaagataaaaagagcaccaaccaaaacagtggtgtccgctttgatgcagcaaccgagaatgggcaaaaggtcacatattatggttacatanaggagatatgggaacttgactatggaccctcc

SEQ ID NO: 446546 - DNA, 486 bp, Triticum aestivum
  unsure (1)..(486): unsure at all n locations
ggnnnnngcaacgttacgccggtcngtaggccgtcanaaattcaanggtcnacgngctcctagacggcggccgctctagaggatccaagcttacgtacgcgtgcatgcgacgtcatagtcttctatagtgtcacctaaattcaattcactggccgtcgttttacaacgtcgtgactggaaaaccctggcgttacccaacttaatcgccttgcagcacatccccctttcgccagctgcgtaatagcgaagaggcccgcaccgatcgcccttcccaacagttgcgcagcctgaatgggaatgggacgcgccctgtagcggcgcattaagcgcggcgggtgtggtggttacgcgcaggtgaccgctacacttgccagcgccctagcgcccgctcctttcgctttcttcccttccttctcgccacgttcgccggctttccccgtcaagctctaaatcgggggctccctttaaaggtccgaattaantgct

SEQ ID NO: 446547 - DNA, 181 bp, Triticum aestivum
gtcgacggggcgtaccaatgcatcgcctgcggctacgagatacacctccggtgcggccgggacgcggaagacggcggcgccgtgggagctggtcagtaggccggagtacgggacagtcttatataccattaaactgaatgctgtgtgtgcgtgctctgggaaatgtcatgttgctattgtt

SEQ ID NO: 446548 - DNA, 335 bp, Triticum aestivum
cggggaagatcagcccccggcgggaggagacccccgccgcgtcggtagatgagggaggaaggcagtggcgcagtcatggtttagatatgaaagttttggacaccgagcggaactcagtggagagcttatatatgaaaactagcgagagagagagagagagagagagagaagacgatatttatgcaattagaagagaactatagacattgtttttcccctaagctcaataaggtctgtgtcctttgtggactgcgtttcttctttgtagagacagaacataatataataccgaggattgcagtcaaatggaaattaatttcaggtttggaacttga

SEQ ID NO: 446549 - DNA, 69 bp, Triticum aestivum
gggaatgttaagagtcatgttctgtataatcatgtcgcatataccgtcagttgatgtgatggtatcgcg

SEQ ID NO: 446550 - DNA, 274 bp, Triticum aestivum
acggggcgacatgagcatccgagtggcagtgcttcgcactttgagcagtagggatacttgatcatagggaaagggaagggagatgagttcgtgcttgcatgatttttagggaaagagcgtgtgtattgtacttctatgtgcatgaagtgttttgtttgggccaagcccaaataatgaaaataaaacactatctctaaaactattcaaatccttttgcatttattatcttctgcaaaaaaaggggaaacaaacaatcgacgagaggggcgagctc

SEQ ID NO: 446551 - DNA, 265 bp, Triticum aestivum
ggtccacggcgatcttgtggggcaattagcagacctgggcgaagcagattacacagccgtcaacagagctctgtgtgcaatgtgccagtacaatgccagcggcagctacgtggtctcggacctgtcgaacgatccagacatcaggaaggctaccatggaggacatagcgcatcaaatccgccagcaatggtcagctcaccgtccgacgtgatcaacctgtcgtactcagtacaaccagtggttttccatttgggggttcgtgaag

SEQ ID NO: 446552 - DNA, 355 bp, Triticum aestivum
tcccttcaattatatttactttacatataagttttgtcttaagtcaaacttcgtaaagtttgatcacattagaggaaaaaatatcaatatttatactatcaatcaatatcattgcatcacggaattaattttcatattgtatatcttttctattatagatgttgatatatctttaatataaaactggtcaaaatttattaaatttgacttaaaacaaatttatatgcggagtaaaagagaaacagggggaggaagcggcgttctgtctccaaggcgcatctattcaaaaacttctgaatttttgtgtggtgaaagatgctttgggtccctgccaaatttatcttgtttggacatt

SEQ ID NO: 446553 - DNA, 291 bp, Triticum aestivum
ggggaccagtactgagggttgtcgcttggcacaagggtatgatcggacggctgacgttgggagctagggttaggcgaaaccccgcgggatttagagggttttgagatggtcaacggggtttcgaaggctttgactgagcataactaatttaaaaaaatcaaaaaaaatatgaaaccttcgccgttcgtcgttttataagacaaactaacgaggaaaaatactaaacttggtctatgctcattttcatgaaaaaaccctaactggtacgatcgaggtcaaatgagcaccata

SEQ ID NO: 446554 - DNA, 447 bp, Triticum aestivum
cgggggaggcgacggtgcacttgtgacctcaaccaggcgagcactcctcctcctcgccgtcgtcgtctccgatccaccgccgcttccgcagccatggtgaacgttccgaagaccaagaagacctactgcaagaacaaggagtgcaagaagcacaccctccacaaggttacccagtacaagaaaggcaaggacagcctttctgctcaggggaagcgtcgttatgaccgcaagcagtctggatatggtggccagacaaagcctgttttccacaagaaggccaagacaacaaagaagattgtgctgaagctgcagtgccagagctgcaagcattactcacagcgtgccatcaagaggtgcaagcactttgaaatcggtggagacaagaagggcaagggaacatctctcttctaatctgatgataacaacgttaagtttaaaaagttgtgc

SEQ ID NO: 446555 - DNA, 104 bp, Triticum aestivum
gctatgacacactgacccttcccatatttgcatacatacgtttaaaatctgaaatattttacaacatcaggatgttctttgattcggtaacattcttatcgaat

SEQ ID NO: 446556 - DNA, 406 bp, Triticum aestivum
acggggctggttaaagaggaagccgaggcaccacttttcaacggtgaacccacccacagctcattctgcataacccaacagaccaagcaacacaaatccgattcattcccctcccaagctccaatcccgcgaattctcaagcgtggtcgtcatcatcatcacccagcatgatccgtttcatcctgttgcagaatcggcaggggaagacgcggctggccaagtactacgtcccgctcgaggactcagagaagcacaaggttgagtatgaggtgcatcggctggtcgtcaacagggaccccaagttcactaacttcgttgagttccgtacgcacaaagttatctacaggagatatgcaagactatttttctcaatatgtgtagatatcacggataaagatttggtata

SEQ ID NO: 446557 - DNA, 496 bp, Triticum aestivum
  unsure (1)..(496): unsure at all n locations
gngnngnaacttttacttggccnggcccggtcanaaataaacgggtcgangagctcactnncggcggccgctctagaggatccaagcttacgtacgcgtgcatgcgacgtcatagctctctatagtgtcacctaaattcaattcactggccgtcgttttacaacgtcgtgactgggaaaccctggcgttacccaacttaatcgccttgcagcacatccccctttcgccagctggcgaatagcgaagaggcccgcaccgatcgcccttcccaacagttgcgcagcctgaatggcgatgggacgcgccctgtagcggcgcattaagcgcggcgggtgtggtggttacgcgcagcgtaccgctacacttgccaacgccctaacgcccgctcctttcgctttcttcccttcctttctcgccangttcgccgggtttccccgtcaagctctaaatcgggggggtccccttaagggttnaattantgcttaagggaaccccg

SEQ ID NO: 446558 - DNA, 339 bp, Triticum aestivum
gggctgcgtgaaggcccgattgtcctgttgacgagtgccatgcatggcagttggcagggaaacctcctcgttgttcacccttgtgttgtactactagttcatctccttgatacaatgctgcatacgtaagtaaaaatattgagtgaacaatgtgctgcattgagaaatctgagtaattaagtaaaaataagtagcaaaagtatcctgtaatcgactacataatcatctgtacgtgtgcagacgatatgcaacgaaccgtcaagcagtgccctgcccacgtacgtacagggtctcataaccatggcgtacgtgcatgactcgctcggccgggcgacagcc

SEQ ID NO: 446559 - DNA, 438 bp, Triticum aestivum
ggcacgatgaaacaatgacattgtctggctattcatacaattctatacaagatgcaatggacgttgcagctgctcgagtaatgaaatatatggagaccatgcgtgccaaggtattgaaagactatagttacaacgagttgcaacaaacaaaggaaagagaactgcatctgattggtttgttaggacaaagaaaaagaaatcaaagaacaggctctgaagattagagaacttagcaaagactttgcagactacttatatcaggttaaaagcacttcttctgagattcaccgcccagctaaaggaagtgtatgctcagccaattccataagtggttgcgagctccacaaagcggctatagatattcataatgcaattgctcatcttggccagttgagtgaaaaccctatgcaaggtaaccaaaacacatcggtatatcca

SEQ ID NO: 446560 - DNA, 282 bp, Triticum aestivum
attgtctggctattcatgcaattctatatgagatgcactggacgttgcagctgctcgagtaatgatattgtttgagaccatgcgttgcaaggtattgagagactatagttacagcgagttgcggcagacaggggagagagaactgcatccgattggtttgttaggacatagataaggacatcatcagtatatgctctgaagattaggtaacttagcacagactttgcagtctacttatatcaggttgaaaccacgtcttcctgagattcaccgcccagtctt

SEQ ID NO: 446561 - DNA, 394 bp, Triticum aestivum
gtgcaggagtgtagaacacatgtaataggataaaataggatgaaattttattttggtcgattggattgtttagtttcttcacgcaaactttgccggggcctggcctcaaacacactactcaaattcagatttcattcatcaagtggttccgccacaaaatcgctgaaccgcaattcaaatgttgcatgcttgatgagcccactctgcacaattagctggagatgcgtgcgtgtgtgcagcttacaagttggaaacacagtcacagaccaaagctctggtgtttccccacctgctggctcagctcagacacaatttggtcactggactagagggaaacagacaatgcattgagctcacacaaaccaaaactttggcacaagttcatggatcactg

SEQ ID NO: 446562 - DNA, 344 bp, Triticum aestivum
cccgggtcgacgacgtcatccacaagggctggaagcccgacacctcctacgaggccaagggcggctactgaagctgatgatgatgattcttcttccggccagcttaattaattaacttcttttggctccagaagaagaataaaccagccgcacatatatcatacatatgatgcgatgagagcatgagtatatatacttattcattcttttactatagggaaagagcgtgggcaactaataatttcttgttttgatgtatctaaacttgctcatgattgtaaacatgtcttattaatagaaattggtatgcacacaatacgatcaaaaaaacaagaaaaaataaa

SEQ ID NO: 446563 - DNA, 515 bp, Triticum aestivum
  unsure (1)..(515): unsure at all n locations
ggntgngtaangtctagtgtcacaggctctgtnanagtctataaggcccnggccnacggcaaaaanaaaaactaaaactaaatctaaacataaacctaaaactaaaaaaacagaaaaaaaaggaaaaaactaaatctaaacctaaaactaaactaaaactaaacctaaacctaaaacaaaactaaaattaaaactaaaactaaatctaaactaaacataaacctaaaacaaaaaaaaaaaaaaaaaaaaaaaaaaaaagcggccgctctagaggatccaagcttacntacgcntgatgcgacntcatacctcttctatantgtcacctaaattcaattcactggccgtcgttttcaaggtcgtgactgggaaaaccctggcgttacccnacttaatcgccttgcangcacatcncctttcgccagtctnggcgttatanccnaaagaaggcccgcacnagattgnctttcccagcaatttnnngnaanccttgaatgncnnntntggancctgcg

SEQ ID NO: 446564 - DNA, 304 bp, Triticum aestivum
  unsure (1)..(304): unsure at all n locations
taggcgtcgtaaattcgtagggtcgacggggaactcaataattctagaataagcaataggggatagtcgaattggtttnaacaccttcccgttgtgctcaatgnncaacccttcctttgggtattgtntnntagtaaacantnntttgcatgctgcccagttttgttgctnncgcaaacgatagggaactagttgcacttgaacacagctcaattctagggttnntctagtgcattggtttccttnngataatacgttggctttttgctttcgacatgtatttcgacagcaatttcaagtacac

SEQ ID NO: 446565 - DNA, 141 bp, Triticum aestivum
gatttaatgttgaattttgtgttgtaaagttttcaaggtttgagtaaagatttgatggattttggaataaggagtggaaagatcctaaccttggggatggccattgccctcaactggaacttctcccgcttcacgaactct

SEQ ID NO: 446566 - DNA, 375 bp, Triticum aestivum
  unsure (1)..(375): unsure at all n locations
gggtcgacggggtcaggaaaaagtggggcggtggcgtcatgggctccaagtcgcaggccaagaccaaggccagggaaaggctcatcgccaaggaggctgcgcagaggatgaactaagcctagccttatatgtgagagcatatgccatgtagtttccctttcagtgtgtcctgattttgacgaggaactcgaacccttttagcagcagtgtggaatcgtattgtggttttctgattctctgttcccttctccagacttatgcaaagatcagatgaggtttacccatgtttggattctatatagctttatgtcctttgtcgagtcaaaaaaaaaataaaaaanaaaaaaaaaaaaaaaaaaaaaaagcggccgctct

SEQ ID NO: 446567 - DNA, 79 bp, Triticum aestivum
  unsure (1)..(79): unsure at all n locations
tnttttattatcttntcttttgttttttttcnnttttgttttttttatnntntcttttnttttgttnttctttttgnnt

SEQ ID NO: 446568 - DNA, 207 bp, Triticum aestivum
cggggaagaatacgatgaataggaagaggaagaagaagaagaagaagaagaagaagaagaagaagaagatgaagatgaagaagaagaagatgaagaataagaagaagaagaagatgaagatgacgaagaagaagaggaagattaagattaggatgtataagaagatgaagaagaagaatatgaagcataatatgacgatgaagatga

SEQ ID NO: 446569 - DNA, 257 bp, Triticum aestivum
ccggtcgacgggccaccgaactcctccagcctccacctgcgattgttcaactagccctctccatgggctcctgttcaaccacccctccacgggctactgttcatccagctctccaccggcaactgttcaacccgccctccaccggctactgttcaaccttccctgcacaatctcttcgtgaatacccatttctctccttaggtttgttttctctcaatatccgatacacacacacatacacagatagagagatagac

SEQ ID NO: 446570 - DNA, 228 bp, Triticum aestivum
cgggcaagggtattcatcaaaacaaatccgaagcggtttcattcgatttgttgtgtactggatggtggaaaacttactccacagcatgcatttcaacaagatttccagtagcacgtgttaaggagtcgctccagcgtgatactgtggatgtcttcccgtgcacaatctcttcgtgaaacactagatctcctttgagctttctctggtcgcttcgacgtgcattggagc

SEQ ID NO: 446571 - DNA, 79 bp, Triticum aestivum
cgtgtcaattgtagtgattagccgattggtactctatatgtttgccaaataagctgtgcaccgtgtgcacctttggaac

SEQ ID NO: 446572 - DNA, 283 bp, Triticum aestivum
gttaattattttaagccagtgaaacttactaatagtagcaggccactagtacttacgttctgaggccatatatataggtaacaagtagtggcagaggccagtattttgccaacgccatatgtacaaatgtgttccgttttggctccacatgatttcccgtatgttcatatgaaatttaccgcagtgttcttttaaacatcagtgttgatacttgaaaaaaaacaaaaaaaaaaaaaagaaaaaaacagccgacctaagaagaatccaacaccgacgtccccat

SEQ ID NO: 446573 - DNA, 418 bp, Triticum aestivum
ggggtattggacaattataattcataacctgcactaaaaaatactcaaaattttataataccaccgttactttaactataagaaaaatggctatttgtatcaaatcctaacattaaacattaaaaatagacgggcgcagcaacgccgccatcggtgatctagttgtgcactaaactactccaatttccatcttatgggagaatttcaagctagactcctgctatatgcagattttgtcttccaggttatggatatcacattgcatgtattcaccgttgtggtgtcatctaatgatactttctaactatatatacatcattgacagttcatatcttcagttgtgcaatattttacacacaacttgtccttctattgcgggaaacaccaatatatcttggcaaagctggactgagaatga

SEQ ID NO: 446574 - DNA, 77 bp, Triticum aestivum
  unsure (1)..(77): unsure at all n locations
cntcnccctttcgcgggtcnggcntttctgtcctcnntgnccccgctcctttttccccncctcgcgcntttccncng

SEQ ID NO: 446575 - DNA, 373 bp, Triticum aestivum
ggggctcgttaatagacgaggagcattccatattagtaccactcctaccaagtttgtactcctaatactattatattactagtactaccactatacaactagtagatacgtgcacggcacaacatcgtaggaacaaaaaacgggaagatcttgttttgggtgatttatctttttttcaatcaacgtagtatgaataatatgatgtggggggcacccatgaagcttatgtggcttggttgcatggctacgaaaggttagagaaaaataaatagataatgtgtttagagtgcactccactaaatagatacactttggatccattgcaacagaccggcacatctatatctataccccctataaagtgtgtgaaaaa

SEQ ID NO: 446576 - DNA, 502 bp, Triticum aestivum
  unsure (1)..(502): unsure at all n locations
ggnnnnnggcanttctaantgggacgcgtacggngaaagtcagaaantcccgggncgacggcagaaagggcgaccaaaaaaaaaaaaaaaaaaaaaaaaaaaaagcggccgctctagagatccaagcttacgtacgcgtgcatgcgacgtcatagctcttctatagtgtcacctaaatcaattcactggccgtcgttttacaacgtcgtgactgggaaaaccctggcgttacccaattaatcgccttgcagcacatccccctttcgccagctggcgtaatagcgaagaggcccgcccgatcgcccttcccaacagttgcgcagcctgaatggcgaatgggacgcgccctgtagcgcgcattaagcgcggcgggtgtggtggttacgcgcagcgtgaccgctacacttgccaaggccctaacgcccgctcctttcgctttcttcccttcctttctcgccaagttcgccggcttccccgtcaagctctaaatccgggggtncct

SEQ ID NO: 446577 - DNA, 405 bp, Triticum aestivum
ggggaagaagaattttaacaagtcttctacttcctctcgcccaatctcctcacctgcccccgagaagagagagagagaaaagcagcgagacgcgaatcagcggcggcgatggctctcccggcgtccggctccaccctctcccgcttcctctcctcccgccgcatccagcccacggacatcaccgccctcgccacctggggcgtcttcgccggcagcgccgccatctacctcgtccagccattcgactggatcaagaagaccttctttgagaagcccgagccagaggcatgagtgtcatacattgcaacttttgatgcctacattttcaggacgattctctgagtttggatgacccagccaataatatacaagaccctcgtgttcccttgtttgatttcccatcca

SEQ ID NO: 446578 - DNA, 455 bp, Triticum aestivum
tagccgtcgagaattctagggtcgacggggttggctcaggatgttatgtgcacagcctgtgagatggctgttgtgtggatagagaaccagctccgtgaaaacaaaacaaaggagctgatattgcaatatgctaaccagctgtgtgagcgtctaccgagccccaatggagagtcaacagtcagctgccatgagatgtcaaagatgccgaatcttgctttcaccatcgcaaataagactttcgtgctaacaccagagcagtacgttgtgaaactggagcaatcagggcaaaccgtctgcatcagtgggttcatggcattcgacataccgcccccacgtggtcctctctggattctcggggatgtcttcatgggcacttaccacaccgtgttcgacttcggcaaagacagaatcgggttcgcagaatcagcttgaggagtccagagcactatgaaatt

SEQ ID NO: 446579 - DNA, 352 bp, Triticum aestivum
ggggtgtggcagcggcactggttctggaagaggttcttcgccgacgccgatgaggccaagattaataactgctacccagctgatgatgacgataatgcccggctttgctacacacacggaataatacggagttttacgggcctggacgcccaccccaccagttaaaatcagggggggcggttaagtaggtggagaagtttacttttgccaattacaacactaaaggtcagcgcgtccgtaaaacttgtgcgtgtgcggcacgtgtgtctagcatttttgcgataatgcctgtgtcctgaagtcgcacaagccttgcttccaagcaacatcacgagtactgaacacctttcct

SEQ ID NO: 446580 - DNA, 68 bp, Triticum aestivum
acgcaggcaggtatgttctggtcactgccggctgcgcgatttcggacgacggcaatcgattggagtcc

SEQ ID NO: 446581 - DNA, 431 bp, Triticum aestivum
gggattatatgtggccaagttcccaggaaaaataataaacttgtaatacgacaattattttaaaaaagtgttctcagaaacgagctatcacgtgtggagatcaatggctttcaggcgaaatgatcaatcttatggccacattcatggcatagtttgttcagatgatctcatattgtgcacaagggtgcatattggaatggcaaacaatgttgcctaaggaagttttcattttgtttggacgaaaaaaccattttccattcttcgagtgcccaaaaggaggtttttttgtgaaggacctcccaaataattgttgcataattgtaccaaatcatttttctaaaatactagtccatatttaatgcacaattaaccaaaatggttgggtgtaaaatgttttgatccacctctcgtgaaaaagacaaatttccgcc

SEQ ID NO: 446582 - DNA, 402 bp, Triticum aestivum
gtcgacgggctgcaggctggtgtacgggatgatacgccgctttgtctcggccacggggtggccggtcagccgcatccagcgctagtagtgtaggctctagtgcctcctcctcgaattgaggtaacaacctgcgctttgggtaactcttggttgggcgcttgagtctgtattgctcgggtgccaggacctcagtccatctatcagttagcagatcttgatcagcttgaagttgttgttgctttttctttaggcattttgcagtggctataagccggcgcttgaagcgctgctgctcgacgggatcctcaggcacgacgaattcttcgtccccaaggctcacctcatctttggagagggccatgtaattaacatcctccgagtctcatacattgcctgtttttc

SEQ ID NO: 446583 - DNA, 388 bp, Triticum aestivum
gatcgaaaccaactatctacataattaggtactgaacattaggagtagagatagatctgagtcgcgccaccgcacctttctgcctcgacgccggtgactctcacgtactggcggcgccgtgacgctggaaagtttagcgaactccacacatccaaacagacgttgatccatcgacccgaaccaagaatcaacaccgagagctcggcgagatgatgtcactgaagccctctgcatccgccgccgccgaaggctgcaggattgcctcaacccctcgctccgcgctgacggcgaggtcaacaccattgcaagtaattaatattttgggaaacttcgttagaatttggtctgtgtattcgttgtatagccacttgtccagtactggggattc

SEQ ID NO: 446584 - DNA, 480 bp, Triticum aestivum
  unsure (1)..(480): unsure at all n locations
aacttagccggccngtagcctgcaaaatcaanggnccagggcntngaaannccctatnggagtcgtactanaggatccaagcttacgtacgcgtgcatgcgacgtcatagctcttctaagtgtcacctaaattcaattcactggccgtcgttttacaacgtcgtgactgggaaaacctggcgttacccaacttaatcgccttgcagcacatccccctttcgccagctggcgtaatacgaagaggcccgcaccgatcgcccttcccaacagttgcgcagcctgaatggcgaatgggcgcgccctgtagcggcgcattaagcgcggcgggtgtggtggttacgcgcagcgtgaccgtacacttgccagcgccctagcgcccgctcctttcgctttcttcccttcctttctcgccagttcgccgggcttccccgttnagnctctaaatccgggggntccccntttaaggggttccnaattnng

SEQ ID NO: 446585 - DNA, 249 bp, Triticum aestivum
agttgttcttgtacatgcattcgccgtgtcagcagccaggcgacgcggaggggatgaagggcatacagagaacatgtttctgtctaggtcatcctgcttacttaggggaggtggatggcccgacagaaggcatgcacatattgacgagggccgagactaatttgttaacggttatttttaaggtttattgtctgtttatttctattttacaacctgaatgacaaatgggacacacactgtaacagaaca

SEQ ID NO: 446586 - DNA, 358 bp, Triticum aestivum
ggggattccttggacgaggatgacctaacttgatcccaaacgtgcccagcgagatgcagagagaagcacaatcaatcgagtgactcaaactatgtgccgttgatgaacaggaaaggttgtaaaaacacattctgaattacatagaaacttgtaggctgcatctgtatcatggattgtgatccccttattttcgttgttttggatctgtgcacatacaccctacacctatactgttggtttgctgttgccacattcttatttgttcgattacctggacagtgttctgttatttgtatatacaccagcatatgctgaaggacaaacggattccaaaaaataaaatcgtgcataataaaac

SEQ ID NO: 446587 - DNA, 84 bp, Triticum aestivum
tacaatcagtcggactacatgtcctattaagatttaggcaatttgtgatttggagcataacattaattgaataaagaagacgag

SEQ ID NO: 446588 - DNA, 401 bp, Triticum aestivum
cgggtcgacgtcattcatcgtggccccgtaggggcacacgaagcccttgaacgccgtgcagcaccgccgctgcgggatcgcctgtcccaagcagctgccctgtaccttgcccatctgcttcaggtgccccaactgcaccgggcacagccctgcctccatgaagccccccagtttgcggccgggcgacggcgatgcctccgggggcgaggctaaaagggccgcatttgatatgatgagtggtttgtccgacgcggcggagccggcggcgacaatggacagcacgacgcaggacagaaggacggcggtggcgccggtggaacccatctatctctctctcttccacggcgccggagcaagaccgaactctgtatcttcgtgggaacgaagctgaggtgaccggg

SEQ ID NO: 446589 - DNA, 129 bp, Triticum aestivum
ctcaagggtcaacggggtacgacagataaaatcgaaataggttattctacaagattactctatagatccatcagctctaagtaaactgcgtataaatcatgtatgtataaggtatgtgttactgatgtt

SEQ ID NO: 446590 - DNA, 420 bp, Triticum aestivum
gggtcgacgggtcccgctgttcaggctactgcgcctccgacaacatcgacaccgaggacctcgatggctccggcgaaacaggagaagatgagtggcagattctctgaatgaaagggaagtttaacttcagttgttcggttaaaccttcacatgaccactcattgggttaatgtcccgctgtgtgaagtaaagacttcaaaaacctcgtgtgaaatccagggtttccagttctacggaacaagcgggtgtgctgcttgttccgcgtagctgcgagtccggaaaaggtaggaaccgttacgctgatcatcggatcggcaccaagttggttcgatgggaaattcctctgtaccataccgtacgcgctgttgtgggtgactgcaaaatgtatctattgattggttaaaaactttcccttggtat

SEQ ID NO: 446591 - DNA, 415 bp, Triticum aestivum
cgggtcgacgggaaacaccattatctatggtttaaaccttcttttctcacaacccaacgacgaggaccccttgaatcatgaagccgcggccgtcctccgggacaacccgcagaagttccagagaaacgttcagatggcaatgtcgggaggctatgtcgataacacccatttcccaaggtgcaagtaaggcggccgggcgggcctgctatgtgcttgcttctggcttgcgcccacctaccctaccctagccctgaatgccaaaccattgcacaatctgaagaaatgcgggcggcatacccaggaaatgtatctatcatacttgtttgtgtcaagaagatgtgactgctattgtgcttgtttggtggatgttctggaattgtcgtgtaacatgaagaagaaatggggtgacgttatg

SEQ ID NO: 446592 - DNA, 257 bp, Triticum aestivum
ggtcgatgggtgtcaccgatactgagtcgtgttaggaccgtgaaacgcggcgacgagtgcaacaaataatcgtgtgttcgtgtgatgggtcgagttgtccaggttaattcatcagagttgctggtcgagttagcagtagtaaaatagggagtgatacaagtcgggtcgagtggtagtgcgtcaaagaggcacgcatatgtacgcgatatgatggaaaactttcatgcattttggcgtgtgtggactggacaatatat

SEQ ID NO: 446593 - DNA, 433 bp, Triticum aestivum
tcatgggtcgatgggatacctcatagtgaatcgtactaaacctattgatcattaacttagattttcccaagattttggctgctattccgaattactctattattccgaagccaatgaaaagtaagtagaacctacaaaaatggggttttctattgatgccttgaataacatatagcttacctatagacaaaaaataaaaaaaaaaaagtaattatgtttcggaaccaggcaaaaccagattgctgtgccataggaaggatagctatactaattcggtatactcaaaatacacctttggtacaaaattgacaatctcacaaggatgaaatatcagtaattttctatttactggtcgatcccatcttttacggaatcaattcctttttttgaatgtacaaaaattttgggagttcagcatgtctggaaacacggg

SEQ ID NO: 446594 - DNA, 473 bp, Triticum aestivum
  unsure (1)..(473): unsure at all n locations
ttanctgtcnncggccggnaaaggtcanaanctcgcgggtcgacgagctcactaatcggggncgctctagaggatccaagcttacgtacgcgtgcatgcgacgtcatagctcttctatgtgtcacctaaattcaattcactggccgtcgttttacaacgtcgtgactgggaaaacccggcgttacccaacttaatcgccttgcagcacatccccctttcgccagctggcgtaataggaagaggcccgcaccgatcgcccttcccaacagttgcgcagcctgaatggcgaatgggagcgccctgtagcggcgcattaagcgcggcgggtgtggtggttacgcgcagcgtgaccgcacacttgccaagcgccctagcgcccgctcctttcgctttcttcccttcctttctcgccagttcgccggctttccccgtcaagctccaaatcggggggcccccttaaggggttccaaatt

SEQ ID NO: 446595 - DNA, 298 bp, Triticum aestivum
ctatgcgatcgacgtcaaagttcttgtgcagtctacgtcatagcccgtccacgggccctcgttaatccacgtcatgggtggtagtttctcagcgtcacgcatgggaatcgcctggcgtcacatgtcggagtcgccatctggcgtattacccactcggcacctaacgatatccctatgcagcggttgctgatcgtgcttggcgacagggacgtaccctgaagcgccgcagggagctccacggttgcggtgcatgcacggagcttggtgtcgacgtgtcgccggcgcgcgagcgctcgag

SEQ ID NO: 446596 - DNA, 420 bp, Triticum aestivum
gtcgacgggcataacaaactgacatctgatggtgccatctcagtgaatgatgcacagacagctaccgtcaaggccgaagaaagcaacgcaaacaaaactaaaggtcctgtggaggagagcagttgatttatctcctgccatttactagtttggagcagctatgatttgatgctcgtcaggagttgagaacggaaaaagatgccgattcgagttcaggcgtgggctgctgctgcttcagttgtgaacatcatagtccttatttcgcctccacttaggttatagtttcaatatcatagttccaaaattcttgttcgtgggtccttgcttccgtgttctttcttgttttcttctctttatttttttacttgtgttgtgtcgtgaatgctgttaagttttagtggccttctcaactccttttgg

SEQ ID NO: 446597 - DNA, 443 bp, Triticum aestivum
ggtctagaactcgcgggtcgacgggggtggtcaaagaaactggatgcatgttttcattatttctggtgttcgttgtactgccatgattgcagatgaatagatatgaagttttctcgcaaaaaagaagtaagaggtttttcaatgttatcgctgtaacgcaagaataagagtcagttcttttgctagctcctagaataaactgaaacaagttgtcccttacccaacttattctaaaaatccaaccaaatttatctttttagaagcctactaattaaagacttaactagtaggattttaaaatttatttttggttaggttcctagaataaactgggtaggggtagcttattttacaagcccgaaaaggccacaaaaagaatagcccctaaggcacgttgctttgattacaactataacataattcaagtaatacactttgcaaag

SEQ ID NO: 446598 - DNA, 444 bp, Triticum aestivum
ctcgcgggtcgacgggttgccagaacgggtttcgcataagacgtgtttggaagtcctaggccaaacgagtatttcacggaaagccgacaaggaattccgttaataaccgaccgttttgattctttagaacaactcgatgaatttagtagatccttttaggaggccctcaatgaccatagatcgaacctatcctatttttacagtgcgatggctggctattcacggactagctgtacctactgtttttttcttgggatcaatatcagcaatgcagttcatccaacgataaaccaaattccaactatagaactatgacacaatcaaacccgaatgaacaaaatgttgaattgaatcgtaccagtctatactggggtttattactcatttttgtacttgctgttttattttccaattacttcttcaattgagaaaaagaaagagact

SEQ ID NO: 446599 - DNA, 199 bp, Triticum aestivum
agacgtgtatggaagtcctaggccaggcgactatttcacggacagccgaagaggaattccgtcaatccgccaccgttttgactcttgagaacaactctatcaactcagtagatccttttaggacgccctcagtgaccacaggttgaacctaacgaagttagactgtgctatggctcgatattcacgcactagctgtacg

SEQ ID NO: 446600 - DNA, 429 bp, Triticum aestivum
gtcgatgggcatccctaaactgagtcgtaatattcgcgacatggaaaacactctcctccaaattctacaatgctttgatgaaggtgtatgctgatcaaaaccttttcgagaagggtaaggagctagcaaagcgcatggatgaggatggttgcagactaggcatctcaacaattgattcgctggtgaagctctatgtgggcgctggagaggtggataaagctgaatctatactgcacaagctgtctaaaagtaacaagatgaagcctcagtacagctcatacctcatgttgcttgatacttattcaaagaaaggggacatccacaattcagagaaggtgtttgaccagttgcggcagatgggttataatgggagggttaggcagtaccagttgctgctaaatgcatatgtgcaatcaaagacacccgttt

SEQ ID NO: 446601 - DNA, 393 bp, Triticum aestivum
gggtcaggaggcatgcacgaatgatgaggggggatgatgtggctgtggtaagcagacgtaactacataggaagatcaatcgccctttgttagagaaaggagagacataacttgtgaggtacgtcgatcgatgggggggtagttaaagtcgatctaggtatatgttgggagatcaatcggtatacatgcatgtgtgtgttagaagcaaatgaggcacgaggagaaggatagagagagagagagggatgcatgtaggaggtggtacgagaggcatactatatcgagggtggaggagtgtgcgagtacgagaatgatgaaaagagtggtgggagtgaggcatggatggtgacaagagaagaggggaagcttgtgtttgtgctaggcacacctggct

SEQ ID NO: 446602 - DNA, 388 bp, Triticum aestivum
gggtatggctgcgataagtcgacataagtacgggagaagaagaagaaggagcagaagatgaagaagaagaaggaggagaagaaaaagaagaagaagaagaaacagaagaagatgaagaagaagatgaataagaagcagaataaggaagaaggataagaagaagaagaagaacatgaagatgacgggaagacaagtaagaaggataaaaaggagaaggatgagaaaaagaaagaagatggcgaaggctcagaaaaggagaaggccatgaaagggaaagataagaagagcgagagcaaagagaaggataaaaatagcgtcaaggagactggagctgatgcagatgacagtagccccaagaacaaaaagaaggagaaggacaaggcaaaga

SEQ ID NO: 446603 - DNA, 77 bp, Triticum aestivum
gacgggtaatttcatatactaacggagcttatgagttttctgctaagttttgtgttgtgaagttttcacgtgttgga

SEQ ID NO: 446604 - DNA, 374 bp, Triticum aestivum
acatcaaggtcacaagcactcaggtacctctttgtgcgttggggcctgcccgtgggcaacatgtacattgtcctcggggaacatggcgacaccgaccgtgaggagatgctttcaggactacacaagacggtgattgttaaaggcgtcaccgagaaaggctcagaggacctgctgaggagctcagggagttaccacaaggaagacgttgtcccgtccgatagcccattggctaccaccacgcgcggtgatctgaagtcggatgagatcctgcgggctctcaaggaggtctccaaggcttccagcggctgatcggttgcccggaagctcgatgatgccgaacatcttcactcatgctatttaatatcttccgcttg

SEQ ID NO: 446605 - DNA, 421 bp, Triticum aestivum
gtgaatcggaatagttgtatcgcgacctgaatgaatgaaataaacgaaataacgctcttgttcaaccgtcaaaaaaaaaaaaaaaaaaaaaaaaaaaaaaaaaaaaaaaaaaaaaaaaaaaaaaaaaaaaaaaaaaaaaaaaaaaaaaaaaaaaaaaaaaaaaaaaaaaaaaaaaaaaaaaaaaaaggggccgcccaaaaggatcaaacctaacttacccgggaaggaaaattaaaaacccttcaaaagggccaccaaaattaaattaaagggccgtcgtttaaaaaagtccgaacgggaaaaacccgggggtaaccaaattaaacccccttgaaaaaaaaccccttttcccaagggggggaaaaaccaaaaaggccccaaacaattccccttccaaaaatttgccaaaccgaaaagggaa

SEQ ID NO: 446606 - DNA, 68 bp, Triticum aestivum
aattgtatcgcgacttggatggatgagatcgacgatctaactgctcatggtcagtcgtcatgagggtg

SEQ ID NO: 446607 - DNA, 406 bp, Triticum aestivum
gtcgatgggctgcggtatatcgactcgtctaatccggtggtctccgcggtccatttggtggccgaaatggccaaaaccactcccgctgccgcgtcgggctcgccggcggctaaacgccggcagccgactttgactttgacccccggtgggccctggttgactcccctgagtcaatgacaggtggggcccagccctgttaattaaacaggattagttttaattaaattttaattaaaataatcaccctgacatgcgggacccactgtcaggtttgacccagacctgttcagttgaccactgacgtcacactgacgtcaggctgacgcagtaattgattttctggatttaaattaaatcaggaaattccagaatattatttaaacttcaaaaattcataacttttaat

SEQ ID NO: 446608 - DNA, 393 bp, Triticum aestivum
agcagctggaggaggcaagatggccggaggtcgcctgcccctactgctacgaggactacgacctcggctccctctgcgtccacctcgaggaggaccacccctacgagccacaccccgcaccttgccccatctgctctgaaaagattacaagagatatgctaaatcatatcaccatgcatcatggttacttgttcaaggcgcttctaggaggcggtcatagtcataggtcaaggaacaccaccactgccactacaaatatctatgctgatccactgctttcatcgtttggcctgggttttgcaacatcagatgccgaagaaccatcgaaatcatcagttccggttctcgatgatacttcaattcctaaggaggggcctcctcaaccttgggaat

SEQ ID NO: 446609 - DNA, 199 bp, Triticum aestivum
aggaagtggtggttgtctgcacgggtgaagtcgccagccactttcacttcgaagatacagaccttggggcgatcagcatggagagaatgcgaggccacctcggctagtagattactactatagacgagtacgacacggacgcagacttcagtgaattagtgcaactgcctcagggtgtatcacggtgagttgttcaggg

SEQ ID NO: 446610 - DNA, 197 bp, Triticum aestivum
aaactccctgcggcgcctgatccccatgtgtcgagggtgccaggcgtcggcgtgcggcgaagatccgggcgccggcggcgcaacggcgctgcagaagcacgcggcgttcatcgacggtgacagggagcgcgtcgtcaacttcgctgacacgtacgcaccctgtccggcccgcggccttcgagttgctgcctccaccg

SEQ ID NO: 446611 - DNA, 177 bp, Triticum aestivum
tattgagtcgtagtaatgtaaaagctacgtactggtggttgaatagttgatgcacccgagtttgtactggcatattgtatatctgtacagtacatgctggtggttgaacagtagatacttatggaattgtatgtattctatgcaattgtgataatgtacgctgtcggtgttgtgtgt

SEQ ID NO: 446612 - DNA, 368 bp, Triticum aestivum
aatagtactactgtagctacgatacctgtagttcgcctgccctgctgctacttcagtagtcatgcttgaataataatggtctcagtattaaaaaaaaaaaaaaaaaaaaaaaaaaaaaaaaaaaaaaaaaaaaaaaaaaaaaaaaaaaaaaaaaaaaaaaaaaaaaaaaaaaaaaaaaaaaaaaaaaaaaaaaaaaaaaaaaaaaaaaaaaaaaaaaaaaaaaaaaaaaaaaaaaaaaaggggggcccaaaaaaatttaaagctaaataaggtgtacaagaaatttaaaaaccttcaaaaatttcaccaaaattaaaattaaaggggctttttttaaaaagtttttagggggaaaaactgggggttta

SEQ ID NO: 446613 - DNA, 178 bp, Triticum aestivum
gggtgcttctatttcagtctgtgacagacctgggtattgtaaatcgtgattacttatgagcacttgtgaattggttaattgctgagcactatgccttgagactaaagatttccgcccacagcccaatacataatgttgcattttagtgaaaatatataacgtatacatgttgcatgtt

SEQ ID NO: 446614 - DNA, 404 bp, Triticum aestivum
tcatgggtcgacgggttccttgaaaggaaatgcttggatgagggtctggattgcgacactatttcaaggatatgccagacgtacgacttggacaaggttgatgtcctgaagtacagggatctggagtggcctagctcagcttctcgcactacctagggattctttgcccaccgatgtctgtacggtaaaacaactctactggatgataactgctggagggtgatcaggctggatcttttttgcttgggacatggacatttaaccggcatggcggatcatgcggtgcccgcattaatctgccgctagcttagaaagctgagaaacgaagaggacctctgaaaccgtagcaaccccatatggtgacccccgttgctctgtacccagagtgtaaatacagtttggtg

SEQ ID NO: 446615 - DNA, 505 bp, Triticum aestivum
  unsure (1)..(505): unsure at all n locations
gngcnngngtganncnatanncaagacncacnganagaggnntcnaaangacnttgnanaccctatagtgaggtcgtattaangtaaaaagaananaaacnnnaaaaaaangcggccgtcnatgaggatccaagcttacgtacgcgtgcatgcgacgtcatagcgcttcnatngggtanctanantcaantcacnggccgtcgtttnacaacgtcgtgacngggaaaaccctggcgtacccaacntaatcgccttgcagcacatccccctttcgccagcgggcgtantngcgaagggnccgcaccgatngcccttcccaagagttgcgcagccngaatggcgaatgggacgcgcctgtagcggcncagtanccgcgncgggtgtggtggntacngcgcagncttgangcgngattggcnagccccccntaacgcccgggcccctgnggtncngtgcgcctgcccgtcgnnggncnggnnnctcnggggngttcncggnggatggg

SEQ ID NO: 446616 - DNA, 80 bp, Triticum aestivum
  unsure (1)..(80): unsure at all n locations
tntgtgnctnnacgtgtatgggacaagtcnagagtgggagtctctntggcatcgcanntctgtggcnactgccaganaca

SEQ ID NO: 446617 - DNA, 288 bp, Triticum aestivum
atgaggtcgtgatgatgcaggcctctgtgtcgaggtccagggctgtgaaggcgctcaaggctgcagatggtgatattgtcagcgccatcatggagttgacttactaggtgatgatagggtgaggggtcccaaatcagtcttggtcatgtcatcttgaatgttgcagttgtggaattggaggctctatgtctgttgaaactagtactggcatgtagggtttagaggcgtttaacatctggggaccagagaactgcttgctcttatgcgaaaatctgaatgggctgtgcc

SEQ ID NO: 446618 - DNA, 476 bp, Triticum aestivum
  unsure (1)..(476): unsure at all n locations
ttnnanncgctangngangacacantacagngacncgtngnanattncnnctccctanatgagtcgtattaatgcgacgtcatagctcttctatagtgtcacctaaattcaattcactgccgtcgttttacaacgtcgtgactgggaaaaccctggcgttacccaacttaatcgcctgcagcacatccccctttcgccagctggcgtaatagcgaagaggcccgcaccgatcgccctcccaacagttgcgcagcctgaatggcgaatgggacgcgccctgtagcggcgcattaaggcggcgggtgtggtggttacgcgcagcgtgaccgctacacttgccagcgccctanncgccgctcctttcgctttcttcccttcctttctcgccacgttcgccggctttccccgtcaagtctaaatcgggggctccctttagggttccngagttagtgctttacgggancngcgaancaaag

SEQ ID NO: 446619 - DNA, 141 bp, Triticum aestivum
cgggcattcaaaactcgcaatatcaaacataaatggagactttgatgccaatgatccgaaaatggcggcctatctcaatgccgtccttaaaatgtcagctcggttcgtggggctggataaggttggaccccttagaggggg

SEQ ID NO: 446620 - DNA, 472 bp, Triticum aestivum
  unsure (1)..(472): unsure at all n locations
ttccgnntccgcggcccgcaaaggtcaaaaactcncgggncgctctaaaggatcaaagcnatctacgcatgcatgcgacgtcatagctcttctatagtgtcacctaaattcaattcacggccgtcgttttacaacgtcgtgactgggaaaaccctggcgttacccaacttaatcgcctgcagcacatccccctttcgccagctggcgtaatagcgaagaggcccgcaccgatcgccttcccaacagttgcgcagcctgaatggcgaatgggacgcgccctgtagcggcgcattaacgcggcgggtgtggtggttacgcgcagcgtgaccgctacacttgccagcgccctagcgccgctcctttcgctttcttcccttcctttctcgccacgttcgccggctttccccgtcaagtctaaatcgggggntccctttaaggttccgatttagtgctttaaggnacctccaancca

SEQ ID NO: 446621 - DNA, 434 bp, Triticum aestivum
gggttgtacagattttatgtgacagacaacaacctgcacggccgtctaccagctgatctgggaagaagccttcctagcatacaacagtttggatttggggataaccaattcactggagttgtgcctccatcactgactaatatctccagacttcagctttttgatgttggaaataacggattcagtggggttgtcccttcagagttgggaagattgcagtatcttagatggttttgtctggatgtgaacaagttcgaggcaaacaatgagcgagaatggcaattccttacttctttgacaaactgtagcaggctgcgactgatgtctatagaacaaaacaggttctcagggcaattgccaacctcaatatctaacttatccacaaacatccaagagctaagtattttggccaacaatatatctggtactatccc

SEQ ID NO: 446622 - DNA, 53 bp, Triticum aestivum
cccaagagcgaatcttaatattgtgatgcacagttaatcgttctgcccgttat

SEQ ID NO: 446623 - DNA, 476 bp, Triticum aestivum
  unsure (1)..(476): unsure at all n locations
ttagantgtntacgnttngactnannacagcngncncgtnggccnttncngctccctacgtgagtcgtattaatgcgacgtcatagctcttctatagtgtcacctaaattcaattcacggccgtcgttttacaacgtcgtgactgggaaaaccctggcgttacccaacttaatcgcctgcagcacatccccctttcgccagctggcgtaatagcgaagaggcccgcaccgatcgccttcccaacagttgcgcagcctgaatggcgaatgggacgcgccctgtagcggcgcattaacgcggcgggtgtggtggttacgcgcagcgtgaccgctacacttgccagcgccctagcgccgctcctttcgctttcttcccttcctttctcgccacgttcgccggctttccccgtcaagtctaaatcgggggctccctttangggttccgatttagtgggttacggnanctcgaacccaaaa

SEQ ID NO: 446624 - DNA, 155 bp, Triticum aestivum
aatggcatgtcatgcgacttcgaaggtgtacggaatgttcacatgagtggccgtcgtcatagaacagtgatcatggggataacgctgaagtcagccggtgtggtcgctgtgcagcagaggctccgtgagctcgctggggcaatcatgaggaggcg

SEQ ID NO: 446625 - DNA, 397 bp, Triticum aestivum
ctcgcgggtcgacgggaggcgtgaagtttgctcatagtcggttttctcaacggcggtcccacatgaaagtgaaaatgctaggcaacacgccttccctaagctatgtgtcgtgccggacgggccgtggagtactcccaattcccgggcgtgtgggggggagtgcgacgcgaacgcggcaagccttttccttttactagcaatgtgctcgtgtgttgcggcggatccaaagtagtagaatagtaatacttgttcacaaacttgaaagaaatcactcttgttttgatatactcctaatatattactccctctattcctaaaaaaaatgtctttttagagatctcaaatggactatcacatacggtttatatggacatattttgaagtgtggattcactca

SEQ ID NO: 446626 - DNA, 391 bp, Triticum aestivum
gggtcgttcacgaaattagtctgattgaagaggtatgatttcgccgacgtgactttcctactgtcaggaaattgagtgccccgacggaattgagagttcaagtgtccggccattgttgtgctagcgccagctgtcaagtggatttttatcctgacaactgtcatgtccgaagcggcatttatgtcttattagcacgtcgggtcgcccctggctatacatagcccccctaaccatttgttggttggctgctccaagagagagattgacaagtatcaaaggagagcagcccatactctgacgagcttgaaaatccaagtatggaattccccaaccaaatccagagtgattaagcatcattgaagatattggcatgtgtagtcccacgcctatt

SEQ ID NO: 446627 - DNA, 133 bp, Triticum aestivum
gggatggggcgcggcaagatcgaaatccagaggattgagaaccagagcatcacgatgtgaacttctccaaacgcattaacgggatcctcattaaggcaagggagatcaatcgtgcacggcgacactgaagtcg

SEQ ID NO: 446628 - DNA, 398 bp, Triticum aestivum
  unsure (1)..(398): unsure at all n locations
ccaatgttcgaagggcgtcgatgcaccggatcgggtccgcgggctgggtcacgaccgtgacgcgacaatgacaggagctgcagcaactacggcgatggtgggcacacggcatgtcgcagcgggcgcggaggtccgtgatgacggcgagcaggcgacacatcacagcgtcgggcaaaggcgtggcacggcatggtagcatggaggcgctgcacggcgatggcggaggctgcggcggctcggtgtgacggccatgtagcgatgacgagccgtatcaagactacgggggaaattgttagccatagtcttgatcttgcatctgttangggttgttagttgcacgcgttgtgtttgttagcagctagctccatgcatggaaaacagcaccgctccaaaaccct

SEQ ID NO: 446629 - DNA, 101 bp, Triticum aestivum
  unsure (1)..(101): unsure at all n locations
gggncgngngggggcggtngcnggggggggtngtgggcgggagggggggnggcgcngctggngnggggntgggggngnggggggggcggggggggcggnng

SEQ ID NO: 446630 - DNA, 352 bp, Triticum aestivum
aagggagatgacacttgaggatttcctggtgaaagctggagttgtcgctgacgggcatttgacggatccgattgacttgccagctaacatgggtgcggttgggagcagtgtaattgaggctgctgcgcccagtttgaaccccggagcgcattggttacagcagtacctggagccccagcatccacgcatggcaggtcctttcatggcaagtcatttgggtcctcagccattgtctgttgctacaggtgctatcatggaaccaatttacccggatggccaaattacgtcaccaatgctcgatgcgctttctgatcctcagacacctaggcgcaagcgtggtgcctcaaatggt

SEQ ID NO: 446631 - DNA, 349 bp, Triticum aestivum
atccgtgttttctgcagtgacacacattgcacgctcatcctcctaagccccaaatattccatggccacgtatttcgacccggaccgtcagtcgaacgtagagtagacaaatgtcacgaaggttcttgatgatgttcaccccggctacgtcaagtcaggaggctccttcaccatgcctattcgtaagtactgcaagcacgtgttctcccataatacgacgttctgctgcgtccagcagccgactggcagtcataacggttcctaggaggaaatctatcacatgcgggcgattgttgcgacccttcaggatcgtctgctaccgactatacgcagcgattgggccgcgagcg

SEQ ID NO: 446632 - DNA, 419 bp, Triticum aestivum
cgggcattcgttcaccttgatttcgagtgtgaccacaagccagagcactcgatcctcagcaagcttcctagcagccagccttgattaccatccgaattcactgtggaaaacgcaagatgttggatattttgcttgccgtgcaggattcgctacagtacttggtgtcttgcattgttggccatctaaatgagataagcaccagcgttggagactgtatagacttgtttcgcggagccctctaaatgtcgtgtttcgagtaaaagtaggttatttttgcttcttgaagctgtcattgtttgtctgcgatgagggctgcaatgtggaaatgttagctacaaaaagaaagcaagcgatttttgtgtgctcaaaatcagttttgtgaactaaggtcgcaaggagcgagctagcccacccgggct

SEQ ID NO: 446633 - DNA, 474 bp, Triticum aestivum
  unsure (1)..(474): unsure at all n locations
ggnnganntctatcgttcggcacggtctgtnaatcccgggccctctagaggatcaaagctacgtacgcgtgcatgcgacgtcatagctcttctatagtgtcacctaaattcaattcacggccgtcgttttanaacgtcgtgactgggaaaaccctggcgttacccaacttaatcgcctgcagcacatccccctttcgccagctggcgtaatagcgaagaggcccgcaccgatcgccttcccaacagttgcgcagcctgaatggcgaatgggacgcgccctgtagcggcgcattaacgcggcgggtgtggtggttacgcgcagcgtgaccgctacacttgccagcgccctagcgccgctcctttcgctttcttcccttcctttctcgccacgttcgccggctttccccgtcaagtctaaatcgggggctccctttagggttccgatttagtgctttacgggacctcgaccccaaa

SEQ ID NO: 446634 - DNA, 342 bp, Triticum aestivum
  unsure (1)..(342): unsure at all n locations
tcgacgaagcgaattcccggtcccaagggccacttcggttgtacgtgaccgaaggtaatcacaaacgggtgtcgtgccccgatcagccgattcgggaacacgactctgttgatccgtgcttgtcgcacgatcagtagcaggcacgtactatatatatgtcgtacgtttggtcatattgagtgatgaaatgtatttacggttgtcggtggtcggtggtctaactaacaaaatgtatgtttgactctctgaaatgagtaaggagatccattgtaatccaaatacagataaagctattcggttcgagaaaaaaaaaannaaaaaaaaaaaaaaaaaagcggccgc

SEQ ID NO: 446635 - DNA, 278 bp, Triticum aestivum
gggtcgaccggtggactaaaggataaggagtggaaagagactaagctgggggatgccaaaggaacccaagattatattaaaggataaccaaaagcctaaaccttggggatcccccggttggaacccccccttcctcctccgtcaaccggaaacttaacttgggccaaaattttaatccacaaaattaaaagtggtttaacttgggcaacaatttcccctggtccgaattgccttgcggtaattaaaataaaggttttgcaccttaatttccattaaaa

SEQ ID NO: 446636 - DNA, 428 bp, Triticum aestivum
  unsure (1)..(428): unsure at all n locations
gtcaacgagcggtacagagaatattgcttcgattcattcgtatcccagaaaacatcacactctctcgctcgagagcaagaacaccagataatacaaccagacaagcagcagtaggagtgttatctctccggagagctccgaagctgggtaaactgctcgtgtgcctcgccttgatctgctcttcgtgcgacctccgccccccgccgaaccgaaaggggcccggtccgccggccccataggtgttcgcggatcagtttccccgacaaagtatgtgagttctttattactaatgtttagtccatatattatacacactctcaaccttccaccattgctagcctctctagtatcgcgcaactttcgccggtaccgttacaccaccttataccttcctcanaacagccacaataccttactactatgcattt

SEQ ID NO: 446637 - DNA, 378 bp, Triticum aestivum
cggacgtaactaggactttagaggcattctctctaacacctcacatgtgctgatgcaggcagagatggcggagcgtccgctggtggctatcatggtgagctggtgtgctaccacctcgcccacggccgcaggtagcctcctccccggcatccattgtcatgaaccaggactgaatttgagtaattagatacaattctcagacgctacgatttggaggagaaactcgagctcgagtccttggagcaagaggaaggaagaaatgagacagggtctcgttacattctcgataccgagtcagacgggagctcatatacggcgctctaggcgcccgtttgggaagtggcgctcacgcagccgcgaatttgcgccggcccaacg

SEQ ID NO: 446638 - DNA, 63 bp, Triticum aestivum
  unsure (1)..(63): unsure at all n locations
gncnaatcttggggattacnaangcatcccacngtacaattnntnggcatccaagtnccaanc

SEQ ID NO: 446639 - DNA, 341 bp, Triticum aestivum
caacatgaacggatacctcagctacctgtccctcgagtatgacttcgtctcggacacaaatcctgcttgggtatcttcattttggaagcaggaatcctttcctcataagatggatgacctgtagtattaggaattcatgccttccagctctaattttttcgcattgttggtgtatgctgggagtcacattattatgctgctagcaaacagtaggattggaagtcttactctgtaggttagtaatatcttttccactataccgaggttcagcaatttaattcgtattaaggtcacacaagcagtttggttttcagatttgtcttgacaaacatatttggttc

SEQ ID NO: 446640 - DNA, 411 bp, Triticum aestivum
ggggatcaacgtacagcagcaactcctggccgcagcccaagtccctccgcatgtacgcagttctaagacctcacttctctcacttctcaacacctctccctcgggaacaatagccgccgcgggcgcatctgcagcagcggtatcctcaccaggagatcgatatggtgtttgtgtctatccaaaaaattagggcctactccaagcggttccaagtgacgttcaggagatggagacaggggactaccgattacagggccaggctcaggctcatcaatcaagacaacagcaggtataacagatccaagtatcggtttgttgtactatttactaacaaagatgtcactgcccaaattgtgtacactaccattgctggcgatatcgtgatggctgctgcctattcccatgagcttc

SEQ ID NO: 446641 - DNA, 491 bp, Triticum aestivum
  unsure (1)..(491): unsure at all n locations
gnnggaangtctatctaggncgggncgtaccganaccngnnattcgcggggccacgagccactagnaggcggccgctctagaggatccaagcttacgtacgcgtgcatgcgacgtcatgctcttctatagtgtcacctaaattcaattcactggccgtcgttttacaacgtcgtgacgggaaaaccctggcgttacccaacttaatcgccttgcagcacatccccctttcgccagcggcgtaatagcgaagaggcccgcaccgatcgcccttcccaacagttgcgcagcctgaatgcgaatgggacgcgccctgtagcggcgcattaagcgcggcgggtgtggtggttacgcgcgcgtgaccgctacacttgccagcgccctagcgcccgctcctttcgctttcttcccttccttctcgccacgttcgccggctttccccgtcaagctctaaatcgggggctccctttaaggtccgatttaatgcttacgg

SEQ ID NO: 446642 - DNA, 410 bp, Triticum aestivum
  unsure (1)..(410): unsure at all n locations
gggtcgaccggtggtcgtacgtacaactatggctattatctagcggatgtcatctatcaaaagtggaaaaccttcgtaaaccaattgaaaaacccttaaggtaaaaaaattcttgatttcaacaatgctaaggcggcggcaaaaaaaaatttggagaaagcattttggattttgcaagcccaatttgctattgtgagaggaccggctagattttgggatcaaaaaatgccctggtacatcatgtacgcttgtgtgatcatgcacaacatgatcatcgagaatgagcgtggccaagagatttagactactcacagtatgagctcttgggacatcccgtgcgagtgcgacggagggctgaagggtancccgttttgttgcctcctatcatgccattcggtgtcccgcaacgc

SEQ ID NO: 446643 - DNA, 384 bp, Triticum aestivum
cggtcgaccggatgccggatacatcatcatcggtaacatcggtgaccattggagcgacatccttggcgcgcctgagggcgcccgcactttcaagctgcccgaccccatgtacaacatcggctaggccactccggcttgggcatgccgccattgagttctcgaataagctggacgctcttagttatatgcatgtttagtcaataatccctccccagttgttgcttggttcatttccattgttgagaacttgagattaattgccattataggatgtgttcatggagaagttgcatgttgcttaatctatggatccacggtccactatttttcttcttgcgagaaaagtcatgcaacaaaaaggatgtgcgaaataaattggcatgt

SEQ ID NO: 446644 - DNA, 363 bp, Triticum aestivum
gggccgacgacgacctctagggcccacagagagagtcacacatgagtgtgtgtcataggacaaaaccaccgcgtgtatgtgcccgtgtgttatgtgatgtttgaatacccaatgcacaactttaacgtggcacatgcttcacaaaccggaaacgcactacaccatgatgcgtatctccctcacttcaagccggtgggagagcctcatgtgtacgcacgtgcccgaactttaatatggaatctcaccatgatccacaccacacgcatgccaagatgaatccaccttttggtcaaatgcctctcgttgtcggtggaaactacaaacctttgcgggctaacgaatgggcacgtcgctgataccgca

SEQ ID NO: 446645 - DNA, 375 bp, Triticum aestivum
attcgccggtcgacgtggaggcgtactggccggggaggcgtggtaaacccccggagtgttacgcctctcttaagacggatcaccatcgccttatggagaaagcattcagacccttcatctttgccatcctctttgcaatcggctcctccaagaaactttccccccctcctcctgtagaaacccagctagctagctagctagcgtgcgtacgtctccggccccaacattcattccatgtgagcacattatattatattggaggctcctttttttcttggtttgattatttttgttaactcacattcacatatcacgattggatcgagtcggatttctaaaaaaaaaaaatgcaagtcacacacaccacacaaatga

SEQ ID NO: 446646 - DNA, 151 bp, Triticum aestivum
ggggatcaaagtaccgcagcaaaccctaaccgcagcccaagtccctccgcaacgacgccgttccaaaaccctcccttctcccacttctccacccctctccctcgggaagaaaagccgccgccgccgcatccgcagcagccgcatccgcagc

SEQ ID NO: 446647 - DNA, 518 bp, Triticum aestivum
  unsure (1)..(518): unsure at all n locations
gggntgaantccatctgtncgnaccggtcancacataccgggtccaccggaacctaaaatnagcntcntcacannaattgtgccnaaccttgcaaagtagntttccttnaaacttgcntccngnttgnacgnngtaccaacatctnnaatcctttaatgataaagaagcnatacnngattatnctttgctacannacgctatgtgcttcngctgtagccattcaacgtcaatnttagctccaagngctccacataagtgctttnattnacanggtcggcactttgattttgaccaggttaggtcaacncccaatgcggcaactnaccattacttttggnaatccctaaaccagcanggggnaatttgncctagtggttaaaaaggctttgggtgtccncgnttncngnnanaccttccctttttgngctganttgaataacgaaaanaaaacttgggaggccgtttcnaanggtnnttacaaaccggttnggggtnaattaanccaaaanccccngna

SEQ ID NO: 446648 - DNA, 377 bp, Triticum aestivum
cgggagaagaggtcatagggtacctagggtttatgacgtctcgttgtttttgcaagctagcatgtgactccgggatgcctgttttaagatttcgcttgtgttgaaagatattattatttactgcttgtagcctacctgggataccatcatattttgctgattatggaactacttttatcctgcttaagttctgtattttgcccgatttgaaataaaaaaaaaaaaataaaaaacaaaaaagaaaaggtaaaaaacaaaaaatcgaaaaaaattcaaaaaaaaacaaatacagaaaaaaaaaataataaatcatcaacagaaaaaatccgggccacccaaagggttcaaaccttacttacgcttgaaagcgacttcaa

SEQ ID NO: 446649 - DNA, 410 bp, Triticum aestivum
  unsure (1)..(410): unsure at all n locations
cacgggggggaagaacacggcaggtcggggtcgtggcggtaggcgccagcgcccgtcaggcagctgttctggaaggtgaggcgcaccgtgctacggctgaagcgccgcactgcgagtttcgggtataaacgctaaagctataccagaacttcaacgacagtctcgtcactgcccaacgcctctagctatccacacccgcaggccgcatggtcttgttcctcgtcttcgcaattttttacttgccgcacggtcggaccactgcatgaggctggacattttgaagcgtgtccacaacttctgatatgctcctcgatctcagctaccagtgttcgagtattagattgtactgttcgtacacaacttgcatagtgtacanaatgacacagtgtatataatgtacctccatcctt

SEQ ID NO: 446650 - DNA, 335 bp, Triticum aestivum
  unsure (1)..(335): unsure at all n locations
ggctgataaggagaagaggcaccgcacgcttcagtggatcaagggcaaggtgcaaaaaagaatacagggcggccccgccggcgacgacgcgactgccgggtattgattagccaggccccgttcccggcgggcggatggaaatggatgcatggatgtccggtcgattgactgggcgatctcttgtttcctgtcgtttaaatggttctgtacatacaggtttgccgtttgattcacggttgacaccaccacgtagatcatctagcgttcagatctctgcttattgattggttctttgtacaaaatataanantaaaatctgtaaaaaaaagcggccg

SEQ ID NO: 446651 - DNA, 483 bp, Triticum aestivum
  unsure (1)..(483): unsure at all n locations
ggnnggaanttctatctggacggacgcggtcngnngntacncgggncgaccggggaagcanacagaaagcaacacaaaaaaaaaaaaaaaaaaaaaaaaaaaaaagcggccgctctagggatccaagcttacgtacgcgtgcatgcgacgtcatagctcttctatagtgtcacctaattcaattcactggccgtcgttttacaacgtcgtgactgggaaaaccctggcgttacccacttaatcgccttgcagcacatccccctttcgccagctggcgtaatagcgaagaggcccgaccgatcgcccttcccaacagttgcgcagcctgaatggcgaatgggacgcgccctgtagggcgcattaagcgcggcgggtgtggtggttacgcgcagcgtgaccgctacacttgccaacgccctagcgcccgctcctttcgctttcttcccttcctttctcgccaacgttcgccnggtttcccccgtt

SEQ ID NO: 446652 - DNA, 333 bp, Triticum aestivum
acggaaagcacaggaagaaaccctccgtgcgttcgcgacaacggattcttggtcaaccgggaaacccaccacttcggtaaacaattaggcggtaataccataccagacagaaaaattgagagtgcattgtgtgctacctttattttttcatttcgttttggcgaaaataatggaatgcggtaaggggttggttccaggtcccggtattagaaattcattgtagggcatcatgcctcattaattgtgaattgtgatcactcattttgaataacagaattcattccaaaaaaaaaaacgaaaaaagaaaaagacgcaaaaaaaaaggaggaagag

SEQ ID NO: 446653 - DNA, 83 bp, Triticum aestivum
atcactaggacgcgccttgtaactgcgcatcatgcgaggcgagtgtgctggttacgcacatcgtgaccgtgacacttgccaac

SEQ ID NO: 446654 - DNA, 432 bp, Triticum aestivum
attcgccggtcgacggggatgataacatcgtggaccatcgactagatcataaaggccagtatttgcttcgtgttgacatgaagagtaacgagatccagatctctccacagcctacaaggcgtatttgttaccaactctttgccagcgagttcagtgcgtaccgacagcatttacaggattgaccgaagagagatagaagcaagagagttcggtgcgagtggaaagacgttgaagatttgagatgttggcaacataacatgtggaactggtacttaaagtccactggagacatttactgttgtcattatctgatgttagtagttataaactgaatggtgggtagtatgtgttttcactcatggctttatgtctactgagtggcttgttttggatttgtaactggtaatggcatgtttacttttgtgactgctg

SEQ ID NO: 446655 - DNA, 131 bp, Triticum aestivum
ttcgcgggtcgacgggtggtactatgctgcatgttgacagactttaccttcaaatgaagataatacttgttttcgccttgtactttttgccacgatcaatcagttaattatcagagatacatgttcagctt

SEQ ID NO: 446656 - DNA, 432 bp, Triticum aestivum
gggagccttcaaatctccccttctatatcaccggtccggcggagtgcgagtcccaccgggactggtgtgcccgccatgggaatgagaggatgagggcagacaaggcccgcctcgctaccggcatggcggcggcagaggcggctgatacagcggcacgggcggccgcataagaacgagcacgcctcgcccgagagcagaatcgagtggtccgtgccatggccggactgccacccaagaacgagaaggtggacagcgacgggtcggacagcttcggcaacgagcagatccggctaaatccgtactgagtcttcgactggtacttccgcgagaaagacggcaatggcgcgtatccgggaagggcaagggcacccgtggatgatcttctccgccatagccgaacatgccaaattttggtagtccaatggaatgttg

SEQ ID NO: 446657 - DNA, 444 bp, Triticum aestivum
ccacgggggaaaaaggattcatggtctggttcatctcactcctcagctgcggaaagaacactgccattccaggtaaaaggtggggaatgggaaattgacaagcggcttctgaagatgggagagatgattgcttctggttcttgtggagacttgttccatgggacttactttggcgaggatgttgctgttaaagttctaaaagccgagcatttgaataataatgtttggaacgagtttacacaagaagtatatattctaagggaagttcatcataccaatgttgtgcgattcattggtgcatgcacaaaaccaccaaaattttgcataattacagaatacatgtctggaggaagtctgtatgattatgtgcacaagcagcgtaatgtcgttgatctcccaactctgctgaagtttgcatgtgatatatgccgaaggatgtgttac

SEQ ID NO: 446658 - DNA, 77 bp, Triticum aestivum
cggggataggagatgtaaatatgcattgttgtatcgcgacctgaatgaatggaataaacgaaataacgctgttgttc

SEQ ID NO: 446659 - DNA, 315 bp, Triticum aestivum
aatttgttaatccatcaatatctgcagaatggtgttgacttatactttttaacttgtcactctagcttgggatttagaggaattatgaagggccgcccgggttaagagaactgataatattgactcggaatgaattttttttgcaactcggttgggggattcatacttcaccattcagggagaatcagtcgtatgtatagaagctattattcaataggtttttattgggaagactccttgtacttcattgtgcaggagaccgggctgcaacttaagcagtgtcttaattggttcatgaaccagtgtacgcggaac

SEQ ID NO: 446660 - DNA, 90 bp, Triticum aestivum
  unsure (1)..(90): unsure at all n locations
cgnctaccanttttcngattaagnagcataaattttaangactgngaagnacatgattgantcctattcacactnnttgnccgggganca

SEQ ID NO: 446661 - DNA, 429 bp, Triticum aestivum
cgggtatatgaacagtgttaatgaagcatttgaaaaatattaaatgtgtatagaaaaaatgttgtccacatattaaaaagatgttaatcttgtattggaaaatgtcaaattatgcatttgaaaatgttaaatgtgtataaaaaatgttgaccatgtatttaaagaatgtcaatcgtgtatttcgaaaatgttaatcatgctttagaaaatgttaaccgtgtgtagtaaaaatgttgaacatttataaataaaatgctaatcttgtattttagaagtgttaacaaggcatttgaaaaatgctaaatgtgtatagaaaaaatgttggccgtgtattcgaaaaaatgttaattttctcttcaaaaatagttaaacatatatttaaaaaaatgtattagatatgtaccaaaaacctacaatgtgtaaggaaaa

SEQ ID NO: 446662 - DNA, 77 bp, Triticum aestivum
attcgcgggccgacgggttatctgacaaaatgtaatcagaataatatatccatgaataaagcttcttctgctttgac

SEQ ID NO: 446663 - DNA, 103 bp, Triticum aestivum
ggggagcacaaaaaggacggcgagcacaaggagggcatgatggagaagatcaaggacaagatcagcggcgacggccacggcgacggcaagaaggacggcgacc

SEQ ID NO: 446664 - DNA, 403 bp, Triticum aestivum
  unsure (1)..(403): unsure at all n locations
gatgtccaatgaaccgacgacgcaaagaggaacgtgccgccgcacgtcttggctaaacggcgccgaggctccccggaaggtcgacggcggcctactccatgtgcaccggcaaagggaggacgctcaaagggcgggaccttcgcaacatcangaacctcgtcctcaagatgaccggattcatcgagaaatgaaatggactcaacaccgtgggatgtggatacattgcttcgtcgtccatggacgtgtgtgaaagtttgtggcaacctaattaaagttttcagtgagcgcagaggtgaagaaagataagagatgtagtaataactctctgtttaattaattaaatttgtctgtttagtcgaattttgcatgtgtantgtgcgagcagcttgctcaagaataaatg

SEQ ID NO: 446665 - DNA, 140 bp, Triticum aestivum
taccggacctacattcgccggtccacggggagaagggaccgttgtgtccatcgaccaggatgatccactgagtttacaaaccgtttgtccctatttggttgcaccaaccattgtcgggaattttgtgttaacaatgggcc

SEQ ID NO: 446666 - DNA, 434 bp, Triticum aestivum
cgggggcgtcgcattttaaaatctgataaattcaagtccctttttgatttcttagacgttggcaggacttgcaagccagaaacctacagactggtaaggacataccccaggcgtgcttttaccactgctgacggcgaccaatcgtttactgatctcgggttaacaagcaagcaggaagccttatttatagagcagattactgattaggggaaaaagattgagcctcacctagggataccaccatctgagactgagttggggttttacatgtctatacttgcatatggcttttactagggaatctaaaattggtctgtgtcgaagagttcaaactgcgttcttttgtgatgtggaacggttcgcatcactttagtcttatgtagggggtataaaacagtgatcagcaacggattcaggatatttggttatgaatg

SEQ ID NO: 446667 - DNA, 484 bp, Triticum aestivum
  unsure (1)..(484): unsure at all n locations
gggngagttctttagcacgncgtacgagncagaattcgcgggtccacgagctcaaaagnggcggccgctctagaggatccaagcttacgtacgcgtgcatgcgacgtcatagctcttcatagtgtcacctaaattcaattcactggccgtcgttttacaacgtcgtgactgggaaaacctggcgttacccaacttaatcgccttgcagcacatccccctttcgccagctggcgtaaagcgaagaggcccgcaccgatcgcccttcccaacagttgcgcagcctgaatggcgaatggacgcgccctgtagcggcgcattaagcgcggcgggtgtggtggttacgcgcagcgtgacgctacacttgccagcgccctagcgcccgctcctttcgctttcttcccttcctttctcgcacgttcgccggctttccccgtcaagctctaaatcggggggctccctttanggttccgattaatgctttacg

SEQ ID NO: 446668 - DNA, 131 bp, Triticum aestivum
gggtcgaccgggtatgacagataatatcgatataggttattctacaagattactctatagatccatcagctctaagtaaactgcgtataaatcatgtatgtataaggtatgtgttactgatgttagaagtt

SEQ ID NO: 446669 - DNA, 480 bp, Triticum aestivum
  unsure (1)..(480): unsure at all n locations
gnngaattcctnagtncgnccggtctccaaaaacgggnccagncngctcactaganggagccgctctagaggattcaaacttacgttaccctggcatgcgaantcataactccttccaaagtngtnacctaaaattcaattcactggccgtcgttttacaacgtcgtgactggggaaaccctggcgttaccaacttaatcgccttgcagcanatccccctttcgccagctggcgtatancgaagaggccgcaccgatngcccttcccaacagttgcgcaacctgaatggcgaatggacgccccctgtaacggcgcattaancgcngcgggtgtngtggttacncncaacgtgacgctacacttgcancgccctaacgcccgctcctttcgctttcctcccttcctttntcgccngtttgccgggttttccccgtcaagctctnaatcgggggggnccctttaagggtccaattaatggct

SEQ ID NO: 446670 - DNA, 61 bp, Triticum aestivum
  unsure (1)..(61): unsure at all n locations
gacngggtgntttngntcgttntnatattttggtttggtttanctgtgtgggggggtncng

SEQ ID NO: 446671 - DNA, 362 bp, Triticum aestivum
tcgacgggaaggcgccgtttgcgaggctgatgctgcaggggaactacctctgcggagccctgccgcgtgagctgaggcagatgaaggagggcggtgttatggtgagcctggcggacaactgcttgctcaagtgcccgcacaagttcttcttctgccaggggccgccgcagaagaaccgtgacacatgtcccaagtgcgaaccatgagaggttccatactgtagataacgcattcatgtcgtataccttaatttcatcgggtactgtatttcatcgggtactgtccggatgatgaactttattgatcgaataatactacataactttgcttgaacgcggttaacatgccaaaagtggattgct

SEQ ID NO: 446672 - DNA, 472 bp, Triticum aestivum
  unsure (1)..(472): unsure at all n locations
gntngngatttctagccgttcggtacaatcttnaattcccgggcctctagaggatccaacttacgtacgcgtgcatgcgacgtcatagctcttctatagngtcacctaaattcanttccnggccgtcgttttanaacntcntnacnggnaaaaccctgnngttacccaacttaancgcttgcagnanatccccctttcgccagntggcgtaatagcnaagaggcccgcaccgatcgccttccaaananttgcgcancctgaatggcnaatgggacgcgccctgtancggcgcattagcgcggcgggtgtggtggttacgcgcagcgtgancgctacanttgcaagcgcnatagccccgctcctttcgctttcttcccttcctttctcgcaangttcgccggntttccccgtnagctcnaaatcngggggcnccctttagggttccgatttagtgctttanggcnccccaccc

SEQ ID NO: 446673 - DNA, 258 bp, Triticum aestivum
gggtcataggacagtctgaacgaaacgtatccggatttcaaggtgacttagcgtaagagtttgccagcctgcacgaacgatttcggaaagcaatgcttcttttggcgaaggctttatggccatacgattctcctcctgttctactcccgtgagctcgcgggactattcaactgaccacaccgtaattatgccctgtcgaatcgtattctcatctctacatggtgcacgagacgactgtgccatgatcaaaatccggta

SEQ ID NO: 446674 - DNA, 353 bp, Triticum aestivum
cggggcgtagtgaatgagatgtgctgccatacattgtattagctcggagagagcaaatggatcggatgtacctttgtgtgatgagtgtaattaagctgtgaccaatatgtacacggccgcatgttgcgttgcgtgggtgctgtcgccgttcttgtgtactccattgttgtgctgtgatcattcctttgaataaatcggctcgatcttcactttaaaaaaaaaaaaaaagaagaaaaaaaaaaaaaacaaaaatcagtataccggacttaatcagacatccaataacattaatcggccctccaagaggatcaaagctaacatactccggcaagctaggtcaaagctctcctaaa

SEQ ID NO: 446675 - DNA, 356 bp, Triticum aestivum
  unsure (1)..(356): unsure at all n locations
tctgaagatttacctgaacagaacacacaagatcttaagccagcaccgggggacaacatatcttctagaaagcccatggttgaagaaaagttgaataaaggagatacacagcctactgatatgtcaggcgcgctctccctctccctcgcatttccagcatcaaaggatcaataggctggtaaaatgcaaccggaatcgcaaagaagcatgagatgagcagtangaatataccgtcttcgattatccagtgatgatggctccttgcctttgcattcctgatgtcttgcgtgatgcaaccttgtagcatcaacccactgcacaaggagtctgcctaaaacacaactatcttgtcaatg

SEQ ID NO: 446676 - DNA, 384 bp, Triticum aestivum
tccacggggtccaattgatgcgggcccaacgtttggtactagctgaatctcaggtcacacatataaatatcagttccaagggacggtctcaatgcaccaaaccaccatgtactcctacatggcctcgcaacgatagctttaccacaacgtcttcaatacctcactctcattaacgacacatgctttcagtccaattgaggaccctgatgaatcagagcttatacgattctaatcgttgcaagcataacattttaggaatacagtatggctcagacagctcctacacatgctagtgcgtttcatcgacttactgtggcaatgacaagtcatgcataagaaagtgggtttaactaccgcagtatacactaatttgaatcgcattgt

SEQ ID NO: 446677 - DNA, 424 bp, Triticum aestivum
cctatggaaaaaaagggatgaagggagatctgaaattgcttctattctgatggatattgaaggtatctccggaggctttcatagcttcaatgtggctaatgtaaggcaagaggctaaaatggcacatctttgtgccggtcgagctagtcgtactagaagaagctgcttgtggattaattttattcctagctttctcacatctttgtgctatcttttctgccaacatttctaatcagttgtattgagctatataaaaggactattcttgagtgtgataaatacatgatgcattgcttttgcaggggtaaagacttggaaaagaaaaatccctcccttggcagcttggggcctcatttgtaaacccaaatatcaaggatgggtttttgcatttcaaactttgaggctcagaatgatgctttgctat

SEQ ID NO: 446678 - DNA, 221 bp, Triticum aestivum
cgggtcgaccggcggcaagacgcaccgcaagcagctggccaccaaggcggcgaaggaatccggccccaacaacgggcggcttgaagaaccccaacggcaaaaggcccggaaccgtggccctgcgtgagatccgcaggtaccagaagagcacggagctgctcatccgcaaccggccgtccaagcccctgatgcgggagatcccccaggacttcaagacggac

SEQ ID NO: 446679 - DNA, 499 bp, Triticum aestivum
  unsure (1)..(499): unsure at all n locations
aacttctattcggnacgnccaccggtcannanaatcccgggtcgacgggactcnttnannctcacncntgtgntcgntggangcagccaatggcaatcnaantgcatnttctacacacggccngntnttcaanggttaaantgggtacncgatgtnctccngttggctttaaaggannctaatgnccggancngtatcacttttgacttncctaggaaatnttnncgggcaatcttgggntactgnnaaangttgttaaactcaaggantaagatacctcgaagaagcaggcaatctgcttcttgaatncttcaagaaatggaccntttcattgctatnnaattctcgcaangngntatgcactntttnccncntgcnnttccacatnntcntnaacattanacgtntaatgaatcctcaaggcaatcaaatgaacnatgnaaaaangtgataaatgtcccgcacaaaaaccttgggattntcccntcccctaaaaaaa

SEQ ID NO: 446680 - DNA, 357 bp, Triticum aestivum
ggcaagataacacgcaggagccgagtcaatgtcagtgtcgggagcgccctatacatattcgggggagatttgccctacgacactgttgtccattggaacaaggagcaacacctggttagccaacggtgacaaggtcagatgatccttttatagagcatgttcaaaagttcagggctcatgtgggatgcccacctgaccatacgtcaggttatcaacctttgatgtttgcgggacattgtagtgtgaacattgtgtgtgtcctgtataacatgtctaagctgaaacggtcgtctgaaatcgatgtggtataggaccatgcggtagccatccagagttcttcacattctgatcgtagtg

SEQ ID NO: 446681 - DNA, 391 bp, Triticum aestivum
ggggaattggattggctttcccacttgttttttttccttctataagttcagtgtgtggcaaaagcttttcttttcaaatttttctttttgaggaaattttcttttcaattttgggcgaagaccgaagagcggcggcaactataatttccagtgctagcatctgtaaagtatcaccaaaatatgcatctccattcactattgtaagatgttctttctcctttctgattgagatgtatgtagacgaattttgacgtgattgttcattcaattcaatatatatgtaatctatattataaaatatattatatttgtgagcagagggagttgcagtttagatactccctccattcacaaatataagatgttctaacttttgtctgaattaggtgtt

SEQ ID NO: 446682 - DNA, 261 bp, Triticum aestivum
tcaacggtaacgctgccaaaacaccacagaagacgggcccgttccaattgcgaatgttggaaaagaataagaaattagctacaagaaaggaagggaaaattccaaccaagactcccccgcccttaaggttttaaaacaagcccgttaacattgggaatttccaagatttcaacaaatccggttggaaaccttccccggaaccttccaagtttccccggaaccggctcaaccaccattccattgcgccaaccttttgccaaa

SEQ ID NO: 446683 - DNA, 399 bp, Triticum aestivum
gggccatcacacgccctacttgctggttttcccgtgatatgtagaaattcgcttcttttcttgactctacttgattgtttttcctaattggctggtcatcatctgatttgtgcctcagatcctagcttacgttcaaccatggtctgtaagcacatggtttcttatctagtttccgtatttatcttttgatgatgttggttgttcactattttgaaacatgaataactttttactgacttcgatctctctcatatactacatgattcagcttcacgattttcttcatactatcttatgaaaatgtaacaaacacatttttgaaactttttaacattttaaaaaatgtaacgcacatttttaatatatgacactatttctattatgcaaatatattttaca

SEQ ID NO: 446684 - DNA, 181 bp, Triticum aestivum
cggtcgaccgggatcaatcattcataagcaaagagtagaataatcctaaggaccaagtaaggcgaatccaacctccaaacctggggagccggtggatcttttttgcaaaatgaaagcaaacttgtccaacaaaaaaaaagataaaaaaacgtaaaaaaaaacgggcggtccaaaagattca

SEQ ID NO: 446685 - DNA, 443 bp, Triticum aestivum
attcgccggtcgacgggaaatcacaaaagcgtttttttgatctgaattttttacaaaatattgatatagaaattgcctaggttttcctaagttttcaaaaaaattggagttacagaagtatacaaaattttcagattactacagactgttctgtttttgacagattctgttttctatgtgtcatttgcttattttgatgaatctatcggtagtatcggggggtatgaaccatggagaacttggaatacagtaggtataacacaaattaatataaatttagaatgatttcacaacagtacctaaagtggtgatttattttattatactaacggatcttacgagttttctgttgagttttgtgttgtgaagttttcaagttttgggtaaagttctgatggaccacgaaataaggagtggcaagagcctaatattggggatgccca

SEQ ID NO: 446686 - DNA, 412 bp, Triticum aestivum
ccacggggaggtgacggtggctacgggtttcacggcggtgcgggcgcggctgcatcggccatggtgggagaaggcgagggagaggaccagggggagaaaggaggtgtcagcaaggtcggggcgacatccaggaagcgatccacgtggcgggacggtgtctagggcatagtagagaggcggggtggtgcgtggcgagctcaggcgcgccggtgctcacctccctgcctgcctggcgggaggaagcagctgactggcgtgggccagcgcaatgctgggacgccaggtgggctcccaggtaagtttccctctctctcagttttctgttaatgtttttctatttttctgtaacttctgggctttattaaaaataccaaaacgttttcaaaaatcctgaaaataattgttggctctg

SEQ ID NO: 446687 - DNA, 438 bp, Triticum aestivum
gggattgatagaattttcacagttacaccagcatattgcttggggtagaatcagttatttgtaggcacaggtaagggaactcaccgagagataaacaatgtattcctaaggtcctcacgattcattacagttactttgttaacttgcaatgttaatcatgtgtatgtgcatgatatcacatatcatctgaataatatcgatcagagtcttatgttatgcagaccatcacagtgcaggataaatgatcaagttggtcaaactaccaagaaaatatttcagctatccacaaatgaaatatcatggaggataaatatctatgtgagggagtgcgaatgattggaatcttcataacaaggtaacagaaaatccattaatataggcaactggtagaatttggtgggtgtgcccggtcagtctactttcccatgtgttttacat

SEQ ID NO: 446688 - DNA, 292 bp, Triticum aestivum
  unsure (1)..(292): unsure at all n locations
gcaaggtgagaatagaagttggtggataggggttgaatggagacgcttaagaagcggcggggagccctgctagagccccggaggtgacaaagacgcagagttccggcaggggtgtggtgttgtggccggggtggtggagcggcagcgaaggcaagagagaacgaaggaaggagagaaaatgagtaggatggagtcacggagtccgggaagggttttgggtangatggggtgtcggattcgtatgtttcgcatgtccggactcccgcaaactgggcccacttttgtctccgat

SEQ ID NO: 446689 - DNA, 425 bp, Triticum aestivum
  unsure (1)..(425): unsure at all n locations
gggtgacgtagcgcgagcaggttggtcggagtgaggtggctgcgggcggcggacatgtccgttccgatccggacgtgtccggcggcggagagggagcggggctagggttggactgcgcgaaaaatcccgaggggatcgcatatttataggtagagggagctangagagtccaaatgaggagcggttttcgcccacgcgatcgtgatcgaacgaccgagagcgtggaggggagttagatgggttttgggctactttggaaggggtgttgggctgcaacaaaagaggccttttacggttacccggttaaccgttggagtatcaaacgacctccaaatggcacgaaacttgacaagcggtctaccggtgctataccaaggccgcttggcaaacctcgggtcattccgagaaagttaacacccgctcac

SEQ ID NO: 446690 - DNA, 393 bp, Triticum aestivum
gccgacgggcaaaatgacggaaaacagaagactttcccactagaagtaaaaacagtgaactcacttcatgtgataacacgaaaacatagtgcggcatctgctataccaagacaccgtccgcagaatggggatagaccctaccaaaattcgccgtagcagcacttccttcaaaggagtgacgccaggcctttacaccaattgtacaggctctgtactactagaggttgtgttcggttcatccgacaacctccatcgcgaaaagctcattttccatatcgccccattcaaaagtggccatcaagcactactgggacgcgaagctttcgcccgctttaacgcaatagcgcattacgtgtctcttacgcttaaaatgcccggtccacgcggcataat

SEQ ID NO: 446691 - DNA, 408 bp, Triticum aestivum
gggattcaataatctatttatgttatccagaacaaaagtacttcacacacttttgtgttttgtctaattgcaggtgtatgggacatttgtacaatccacatatgaagataggggaaaaggagaagtttaggttctgttcaaaaagtcctctcacgtcacttttgggccaagagaagatagagtccatgtctctcacgttctggattcagattcgaactgcacagacatacctgactcaaaacgccaacaactttttcatacggactccgaattgggtgattctttctttgttggaaagtagatttcatactctttccaacccaattggattcacctttaaattcgtccggagcgttgagatatggacgaaacaatctgacgctgcagcagaatctgagtcaaacaaca

SEQ ID NO: 446692 - DNA, 416 bp, Triticum aestivum
gccgacgggggcggtgatcatccaggtgaaccccttcggcaagatggagcacatcggggaggtggacttcgggacgccggcggtggacatggggctcaagtacatggcctactcgtgcggcatggaggagagcacgctggtggacacgctcgggcgcgaccacccggcggtcaaggacccggagtcgatccaccgcagcgggtggagcaaggtggcggagtactacctcggcaagcaggacgtgaagctcgacctccagcggttcgagccggtgctcctcaaggccatggccatgctcagagagtagccgctccgatcgagcttgcagccccggcgcattggttgattcgcactagcgtagagcagttccatttcttctaatttattcctattaattttacatatttttgggtgga

SEQ ID NO: 446693 - DNA, 438 bp, Triticum aestivum
ttcgcgcggtcgacgggccagcactgaactgactgtattcattccaaaacaacctatacgtatatagggcatccccaaattagtaccacctcgtttatattatatcttaaatataaaatcacctaagtgggacgaaaccaagaatatcaccttgctttattagtaggtatagatatagatatagatatgtaattttatatcatttcttgaactaatctattaactcagtgcccagtgccattttctgtttttgcctatttatttgtttcacagaaaaaccataccaaacgaagttcaaacacgatgaaattttatgataatttttcctggaccagaagagaccctagaagctttgagggaggctagaaaatatacagagagccacaaggtcatacggagcaccccaaggggtgcaccacctgagcttgtgggcccctc

SEQ ID NO: 446694 - DNA, 426 bp, Triticum aestivum
cgggtcgacgggtggtacaaaacagagcatcgagtgaagcataattgcgtaatggcaagaagttgcggagagatggcgcactggccatctcacaaccatattgatggcgcactggaaatcttctcaggcaaatactgtaatagccaccaatggtttgatgacattgcttattgcaagacttgaccatcgaaaagttattgcttgtttgactctgctgaaactaataaaggtttggtttttattcttttctctcatggttgagtgattctacttgtcaagtaaccaacaacgtttttagagtaagcttagaattttgggtcactcatgataaattaagccgggaattaggttaataaaaactaaggcgggaattttggatactctgtatcattgaagtgttccatgttgtcgtgtacaatgtgagac

SEQ ID NO: 446695 - DNA, 266 bp, Triticum aestivum
ttcgccgggccacggggcggacggagtaggaggccggttccccttggtagctgtaaccgtcgtcgtcctcgtaggtttggtcgccgggagggtcccggccgtggcgctcaccgtactttggtccgtactggttggctcgctgcagagattgcggcgggacggcgatgtaggaacctcccagggttgatgtacattagtgagtggtggtataatccttacatacataattgttgttcttaagttattaaaaagcttgagtgcattcc

SEQ ID NO: 446696 - DNA, 81 bp, Triticum aestivum
  unsure (1)..(81): unsure at all n locations
tncnttctcagccnngttnntccagggtttttcccgtcagggctctnnatctggggtttcctttacggttctcgntttttg

SEQ ID NO: 446697 - DNA, 390 bp, Triticum aestivum
cggggccaacggggcaatgcaaaaccataatggcacctcccaaggggcaataacaaaaaggttcaacctggcataacctaagcaacatgcagcctgcccaacaaatggctacggacaatttgggtggccacaaccttcatacggctgccatgctctccgcagctggacggggtggacctgaactcgtccctaattcattgctgccttttgaggtttccgtcgtgcttcggggcccataatggatacccactatatatcgcaagaagttttcagttgacatgcgttgcttcgccggggataaggtttggctaaagcccgcaacccctcctaatggtgggccttcagttggcgggtcattaccatgtccacaatttagacctttcataatgg

SEQ ID NO: 446698 - DNA, 477 bp, Triticum aestivum
  unsure (1)..(477): unsure at all n locations
ggnnnnngnatctctagccnggcggtaccgntcanaaattcccgggncgacgagctcacaatcggcggccgctctagaggatccaagcttacgtacgcgtgcatgcgacgtcatagctttctatagtgtcacctaaattcaattcactggccgtcgttttacaacgtcgtgactgggaaaccctggcgttacccaacttaatcgccttgcagcacatccccctttcgccagctggctaatagcgaagaggcccgcaccgatcgcccttcccaacagttgcgcagcctgaatggcgatgggacgcgccctgtagcggcgcattaagcgcggcgggtgtggtggttacgcgcagcggaccgctacacttgccagcgccctagcgcccgctcctttcgctttcttcccttcctttccgccacgttcgccggctttccccgtcaagctctaaatcgggggctccctttagggttccantta

SEQ ID NO: 446699 - DNA, 503 bp, Triticum aestivum
  unsure (1)..(503): unsure at all n locations
gnnnnnnnngggnnnnngnatttgtctagcctggnggtaccgnaccacaaattcncgggccacggggaagaagaanaataagaacgggaaaaaaaaaaaaaaaaaaaaaaaaaaaaagggccgctctagaggatccaagcttacgtacgcgtgcatgcgacgtcatagctcttctatgtgtcacctaaattcaattcactggccgtcgttttacaacgtcgtgactgggaaaacccggcgttacccaacttaatcgccttgcagcacatccccctttcgccagctggcgtaataggaagaggcccgcaccgatcgcccttcccaacagttgcgcagcctgaatggcgaatgggagcgccctgtagcggcgcattaagcgcggcgggtgtggtggttacgcgcagcgtgaccgcacacttgccaagcgccctagcgcccgctcctttcgctttcttcccttcctttctcgccagttcgccgggtttccccgtnaaactcnaaaa

SEQ ID NO: 446700 - DNA, 337 bp, Triticum aestivum
  unsure (1)..(337): unsure at all n locations
gggcaccaacaatccattctttaaatgtagacacaaagaattcgttgtttttaacagaaggacattcttcaaattgtttttggtttaaaaaatgttcaccattttaatattcaatatttccaaaaaggtatcagaatgtttcaaaaaaatggatgcatttaaaaatattcttattttaaaaaaaatctaatttcttttaaaaagcatgtattaaaaaatgtcagtcttaaaaaaccattttataaaaaagaaaatattaatatattttcaagaagtanaaaataaaatcaatgttgcgtaattgcacacacaaagaagattttnggtttttttggcc

SEQ ID NO: 446701 - DNA, 412 bp, Triticum aestivum
atgacaaaaaaaaagttccggaagaaatatggttactgcgaaaaggcagacgtgaagtggaagccatatgctcctgatttcaagcacaagaatctggctaagctcaccatctacggcttccaacccaacgacaattttaagcgatacatcaggtgtgttgtggaacatgcggttaatataacagagatatctctgtacgacaggaagctgtgtgggcgctgtggtgacaaggtttatcaatcaagatatccacggactgccgaggagaggaaacgaacggctgaagggttgggtttgacttcacctgctgtgattcacttccggtcctaactgaaaaatgatttgcatgatattcttatatgtagtttggaaatcaactcctatcatctttagtcggaaggagttcctgaac

SEQ ID NO: 446702 - DNA, 393 bp, Triticum aestivum
gacgagggaatgtaagcacagggttctgttctcttccatgtttttctgctgttgtgccccatttgatccgtgtgtgaaaagagaatgactatggttttttgtgtgcacgcgcgggtggcacttgaatggtgtgcacgtgtacatgtgtgtatgctaacaccgatttggtgtgtgctgatgatcatgtaaattattatgggttgattgctcgtggatgtaaggtctatgtacagttgttacatgagtgctgtacagcctccgcatgcatgcgtgctgcttggcattgcacgtttataatctcgggttgttacttgtaagccagcatcagttgtaaagtacgtgtgtcaaaataagaaaactctttcctttttttttggttcaagaaaactcttt

SEQ ID NO: 446703 - DNA, 142 bp, Triticum aestivum
caaggcctagttaaacttcaaggcaaaggcgttcacctccaaaattgtaacctaaatccaatgcatggacttccggttgacagcctgggaacgggtaaacccttgtcggttggaaatttaaccgcgtagcgtcaaatttacc

SEQ ID NO: 446704 - DNA, 318 bp, Triticum aestivum
gactggggaacggatcggcagctcctaccgccagggtcctggagaagtacaaggatgaggcgctcgagccagacattaagacactatacatgaggctggaagtgctggaggctgaccgggaatcgatgcgccaggctctgctgggaatgcgcactgagaaagctcagcttatgcttcttcgggagatagcacaacagctagccaaagacgccgctccagttggcactggggctgggtctgttccagttgtccaccatttgcccagaaagcaagctgtgggggtcgcagatacaacggtcagggaagacaagaagacag

SEQ ID NO: 446705 - DNA, 231 bp, Triticum aestivum
accggtcctacaatcccggggccgacggtccgaatcaaaaaaataaccccttggtccccaattccaaattaagcgaaaatccgaatcctgacaaaataaggctccccaaatttcgaaccaaccggaaaaaaaaaataagttccagttcaaaaaaaaaaactaagtcgggaaaatagggcaggcagttttaagacatttgtagactttttcggaaaaaatttgttgcggagc

SEQ ID NO: 446706 - DNA, 383 bp, Triticum aestivum
aatgcgaaatgagctcgtcgtcgccttcctgccatagctacatccacagatctgcaggttccacgcatcttcgttattcgctacgatcggctacaccgccgtagtgtttcatatgcatcatgtcgcaggcagtcaaatggattattgaaatgattcgggtgactaaagcttcctagattgtgaatgactttctacattggggcaaacagagggtccgcgttgatttttttgcacttgttgaacaacttagggggcaacaccattccagcaagcccgaggcgccactggcatggatatgggtggtcgttataacatatggagaatatgcacatggaagtactactattgggccaatttatgccaggtgtacatcaagatgtttc

SEQ ID NO: 446707 - DNA, 275 bp, Triticum aestivum
tgcggccaaggcagccatggagttcctcgactccctctgcatcgctggcgcgtccagaaatgggatccagctgctcaaaccgaaatccaagaagaaacatgtgcaggtcaagctcctgtagaggccgccgtcgtccaatggccgggcgatcgagggggcagaggatgctgttggtggtgatgtcactcccaagccgcatcgtcggcgcacggagagcgactagggggtcgctcgcaagctgcaccgcgtgatgaataactcgccccggatttcct

SEQ ID NO: 446708 - DNA, 490 bp, Triticum aestivum
  unsure (1)..(490): unsure at all n locations
gggnngantgtcttcttggacggacgggtccaggaaacgacggggcccgacnggatccagnttaantacgcgtgcatgcgacgtcatagctcttctatagtgtcacctaaattcaattactggccgtcgttttacaacgtcgtgactgggaaaaccctggcgttacccaacttaatcccttgcagcacatccccctttcgccagctggcgtaatagcgaagaggcccgcaccgatccccttcccaacagttgcgcagcctgaatggcgaatgggacgcgccctgtagcggcgcataagcgcggcgggtgtggtggttacgcgcagcgtgaccgctacacttgccagcgccctaggcccgctcctttcgctttcttcccttcctttctcgccacgttcgccggctttccccgtcagctctaaatcgggggctccctttaagggttccgatttaatgctttaaggcacctcgaaccaanaaacttgatttag

SEQ ID NO: 446709 - DNA, 421 bp, Triticum aestivum
gacgggaatgtacacaaaatcggatcctcaattttcactgtggctaaaaaacatatggcttccataaataaaaatttaaggcgccaccacttgaggttcaaaggttcaaaaggtagggaacaataagaacgggccaagaagcaccatttttccttccaaatcacaggtgtccttaatttggccaagtttattgcacacatcttagtgattagcatgaggaatacaaccatagtgattagcatggatagaaatttgatatgggtcagagggatttcgaatggcacatttgtgaggacgacaatcctgcactaataaccagtcctgacagtgtactgtttccaagtgcttggagcaagtgcaagtcagctgcataaatcaaaactcatagagtcaacttcttgtatgcagcaccgacacatga

SEQ ID NO: 446710 - DNA, 384 bp, Triticum aestivum
  unsure (1)..(384): unsure at all n locations
accggtcgaatatcncgggtcgaccggggagttgatgaatgatgacagaagactcttgcaatccatatgtagtatggccaatgaggaacagccaatggtgtaaggtatatgcatatgaataatcgctttcatctttatgtatataaaggcggtgtttacagcaccggcatagggaaagcttggcctttactagactcatacacctaatctgtcttctgcatgcctactgaaacatttgaatgctttcatgccaaattgcttaatcttaccaagatttgaatgatgtccttttcatcaataatactcaatctttgccttacagaggacacaagctcgtttaagctctctgagcctgtaccaacaacatacaagtttaaatttttg

SEQ ID NO: 446711 - DNA, 274 bp, Triticum aestivum
gacggggatagcgatgctccggccaaggagaagagatcgaggcatggtggtgagagctcatcgcgcaagagagatgctcctgcaaaggaaccagaagtggccattgatgttgaggacagccctcctatgcccagggacaggatcatggacacctccgaagatgcagcggataagggagaagctcctgcaaacaaagatgctgccatagttgaggacacccctatgcccagtaccaagcataggaagtcgaagagaggtagcaagacttcagcag

SEQ ID NO: 446712 - DNA, 379 bp, Triticum aestivum
ggggcctctgaaaacgctcagcgagaacgggaggggagaggaatgcgacgagagctcgatgtagcatgcacggaccagagagagccaaggggacacggggacgaagaagatacaggagggaaacgacggccggctacagcgcgttcgtgggcgcacggtgacgagcgccagcgaggaggcttccagagggggagatggctctaggaggacggtgacgacgccggaaacatgctagacatgggcatacggtgaggggatgagtgcatagatggggaggaggagacagaagcgccagagcgcgcgggtgacatgccaaaatggtggtcaccgcgtggacacgaagctaacccatgctctgatcggacaaatcatgtctggg

SEQ ID NO: 446713 - DNA, 363 bp, Triticum aestivum
attcgcgcgtcgacgggataacgtaacgggattcccgggagatgaactacgatagcaagctccaaaacatgagctagttctgctacaaacatgtgaacacgttgtcccagacaaacatgaccacaaagtactcttatcataaaacactaccgacttcacgagggggaaacatcaacgagggtaacgaactcttgtgcattaccatggattaacacttaactccttttgtcgaacaaatcagtcagtggcaagtctccaaaccacagaatactttcgcacgtatgcatgactgatttgggatgattccacacaaagcaacattgactttctcgaatccacggcgggatcttgcatcagttgcac

SEQ ID NO: 446714 - DNA, 436 bp, Triticum aestivum
ttcgcggaaagtatagatcatcctgatccggtccctctggcggtgctcccgcgagctgatgtcgcccctactgctcaggtggactcaaatggctgcttaggttgcgggcaaaactgttgggtgcgcagtcgcgggggagccgcaggcaatcaatggcgacaaggtctgctcaatcaacggacagggtgaacccgaggctccggcttaggcaaaaagttcagaagttactaaactacaagactattcagcgctggcacaagaggtggtgaggaatagcgactacgacgagcaaagacgcggtgcagccggcaacaacgactgtcgcctgctctctggtaaggcctccatcttttatctctttttgtgtcactttgaactatacacaagtgcaaactagttcggctcaagaaaagtataaacaagacacaaccctctt

SEQ ID NO: 446715 - DNA, 337 bp, Triticum aestivum
ggtgaatcatctaataaggaaactgcagatcttaaatctataagtattcatcccaatatttttgctatcattaaggaactgattgctacaaatgaatttgtcaatattgtgcctaaaagttttataatccctagaaagaaagaaattcctaagggaaatagatgcatcatcgaagaattgcctaccaaagatggtaatacctagatctatcctcgtttttatgcctagctgggggtgttaaacgatagcgcttgttgggaggcaacccaatttaattttaatcccttgcttttttccccggctaagtattaaataaattatttacccccggttttgg

SEQ ID NO: 446716 - DNA, 94 bp, Triticum aestivum
ggttcacgagagagaagcgacggagttagaagttgtaaatatgcattgttgtatcgcgacctgaatgaaataaacgaaataatgctcttgttcg

SEQ ID NO: 446717 - DNA, 317 bp, Triticum aestivum
  unsure (1)..(317): unsure at all n locations
acccccaagggcctgattgtaatcttgtttccttttctgnggtgtttttctgcttatgttctggacacctgtgtgttctgggtccttcgtctgggtgctactacatgtgttgtactcctgtttgctatatgaatggcatgtggtgcttcaaaaaaaaaaaaaaaaaaaaaaaataaaaaaaaaaatataaaaaaaaaaaaaaaaaaaaaaaaaaaaatcaaaataaaagattaaaaaatttaattcacaaaaataaaaaataaaaaaatattttaaaaaataaaaaaaaataaaaaaaaaagggcctccccaaaaat

SEQ ID NO: 446718 - DNA, 452 bp, Triticum aestivum
cgggtcgacgggaaaccggactaccaatcctaaaaccccccggcggcggaattcggcacccaccaccaagccgtccaagaagccccgattaaacctccggaacctccggaaggtaaacaaggtaaaggcccccgtcggccccttcaaaaccgtcaggaacaacaaccaaagccccgcaaccgcccgcatgccgcggctcaacctccacgcctgaactacgagtacattccaccagcatgaagctcgatcgcgtgcgcctcctcctttatcccggctactctttaatcacccatcaacccaatttgtcgtcgtcgcacacttatctataattacggtatcgcttatattttgcaaggaggaagatgatcgaagggttatcatgatgtaataataataatgatcatggagggaaaaaacccacccgttggaaaaaaaaaaagcggccgccccaa

SEQ ID NO: 446719 - DNA, 381 bp, Triticum aestivum
attcgcgcgtcgacaggattaattagattcatacccatcaagtcgaacataattgaggctcatatacatgctacagtcccttctgaactcagaatactcggctgaagaaattcagtctagtggtatgctgtctatatctgatctgcaatctcagctcgacagtcttctgtaggccatacttttgatctgttttgttatggtgtgtcctctgagtctgagtgagaaatgcactcgattgttcatctatagtgatgttacttttaatcctgtcatcaaatttaaacacactttgatatgacatcaattatggtggatggctaatacactattgttgctaatgtgttagcatatcagattgattaaatcgcccttcccaacaat

SEQ ID NO: 446720 - DNA, 419 bp, Triticum aestivum
attccggtcgacgggcgaactgatgatggcccgacgcgtgcatgcgcgtggcgtgaagtgatggcacgaagcgttcgatggaggagttcatggatgaataaatagtactgtagctactactaaatgtatttcgcctgccctgctactactgtagtcatggttgtataataatggtgtcagtatctaaaaaaaaaaaaaaaaaaaaaaaaaaaaaaaaaaaaaaaaaaaaaaaaaaaaaaaaaaaaaaaaaaaaaaaaaaaaaaaaaaaaaaaaaaaaaaggaaaaaaaaaaaaaaaaaaaaaaaaaaaaaaaaaaaaaaaggggccccccaaaaggttcaaatttaatttccccttaaagggaatttaaaaccccttcaaaagggcccccaaatttaatttcacgggcggtctttttaa

SEQ ID NO: 446721 - DNA, 380 bp, Triticum aestivum
attcgcgggtcgacgggttccaaaaatatatttaaaaaatatttaacaagtaaaaataacatcatattcagattgtacacatttttctaatcaaatttcatatataacatgttaaaattggagttacagtttaaaagatacagataatttagaaaagcatttgttttatttaaatatcttccaaaataatatttaaaaatatttaacaggtaaaaataacaaaaaatacatggagagttgttaaaaaggttgttaaaaagatacatgattttctaatcataaaaatatttttttgtctggaaaagatcatttttgtatggtcttctgtggacgcaggtacttgcgcccctatttcatcactatttcttgctatacatgtc

SEQ ID NO: 446722 - DNA, 409 bp, Triticum aestivum
accacaagaaccaacgtcagcgtcgccctgcaagcacaacagaggattggaactctgaatcggacgacaactgaagcaaaacaatcgaccatcgacagtaaacctctgaagaaatgttgaaatgctgctgctgcttggttgattacagagagctcagtaggcaattaaggcctcacatctgacattagcatccgtaacatttgctagcactactcctagcagtacacaagatcacaagaatctccatttgctagcactactcctagcagtacacaagatcacaagaatctccatttgctagcactactcctagcactactcctagcatctgacattaagttttgacggagaagagacaggaagaggaagagagagcaatacctcaaggagtcatcacccatggacgcat

SEQ ID NO: 446723 - DNA, 392 bp, Triticum aestivum
ggggccagcctgaacacttgagttcatgctcatggaaacaatgtagaatttttcatgaagattctcacaaaaaaataattatccccttgtaccattccattgtattataaaaataatgtgccatgatttgcctttaggatgagtagattgcttgttggtttgtgcggtgcaaaacataaactttggctgtagtgctcgattttacattttttactcaaatgtcaaatgattctgaaactttttgtaatgtctttatatataattttttttcttttttcctaattttttcagaatttttagagttacagaagtatggtggatgttcaaatctttacagactgtgtcctgttttcacatattgttgttatagcttcattatttgcgtatgtttg

SEQ ID NO: 446724 - DNA, 395 bp, Triticum aestivum
  unsure (1)..(395): unsure at all n locations
gtggcanaaatagcgccggaggctgcattctggccataataccgcctgggggaagaaggggtaggaggattttgttgcaccagccattattaaattgaatgcgtgcgaaccactattttcctttaaagttcaagtaaaactaaaactcgatcaataacatgccacagcatccaggaagcacaatactatatcattcacgtgcggtccccgaccctccatcaagttgaaaactagactagtgaaaatgtcaattaggatgcctctttgcatacaaatgtgctcctagcttcaaaaaaaatgcactcctacatgtacccgcgaatgggtgtgagagaactagtgcgtgcatgcaccgcttcccttcgtgagagtacaatatactatgcccaaagaac

SEQ ID NO: 446725 - DNA, 399 bp, Triticum aestivum
cggagcagaaatgacgctctagatgcggtcatagcgcacagagcgcgtgcattgccatgccagctgcacggtcaccacgacacaaggcacagggatgtcacgagaggattgcaaaccttgtctggtgatgtttccttccagggtggagcatttatgagtctatggcttgatctgaggtgctatggtgaagttggaactaagttctgaagtttgctgtagcaaacttggctgcgcactagtgatcaacagggatacaattggagccaacgaggttgtctggggtgttaagattaggaaagactaaaatccgggggagtttgaggaaaaatggaccaaggattaatatagttgctttaaaacttcatatttggtccaagaccaagattatgatgatgcact

SEQ ID NO: 446726 - DNA, 150 bp, Triticum aestivum
ctggggtagtataagaacattgtcaccacagtagaattggtcatgaaatttttgctccaggtgaaaccatgtactaatcgaaacgggtggtaacgcaaaaaaacacgagaaaggcgtaccggtcaaagataaagtaaaataacgtacttt

SEQ ID NO: 446727 - DNA, 376 bp, Triticum aestivum
cgggtcgacgggggcgcagcaggacggtgcagacgtcagcgggctcatctccatgatcatacaggctgtgctgacagcccggcacaataggttcgagtgcgagcagctcgcgcatcgggtcctcatgattgcgcagctcctgccgaacgtgaaggagccagaggcggcgcagccacttgccgggctggacagtactcttcggagagcccacgagcttgtcgtgtcctgccaggagaggagtgcggcgtaccagtttttcatggctagcaggactgccgagaggttcagggaggtagagagcaagatcgactcctacctcatcctcttcccggtgatcagctatatcggcataacacgccgccttgaacgaatctac

SEQ ID NO: 446728 - DNA, 304 bp, Triticum aestivum
taaatttcaaggcaatttcaaccacaacaataacaataacttaacaatccatggccaaatggctttgcaggttcatagaatacctaacaggaggtttccagggcttgtccattttttgatgtcattgctacgctactatcgttgcacatcccggtacatcgccaaaggcattcacatatagtctcagatatcgagttgtaacattgagttgtaagtatataacagtgtgatgatcatcattagtacaacattgtcccaagtgaggttatcacaataaaagtggtcatagaagccctcccccccc

SEQ ID NO: 446729 - DNA, 336 bp, Triticum aestivum
gcaccccatgatggcaaaaatcaacaccgacggtgacggtttcaccaacttaaccaatttaacccccttcggaaacgcaaacccggggcccataaaggacttcccaaaggtcttcaaaacaagtcaatttcacccaacccttccgtccaaagagccgatgcatctacgtatggcttcgtatatcaatttcatgcaactacctactccggtcacgatccagcctcagcttcacctgaggccggccctaaatttgtatgatcaaatcttttgctactactagttactactgatgatcactgttgcatcatttatttatttattttatatatcatcaca

SEQ ID NO: 446730 - DNA, 291 bp, Triticum aestivum
gtaccgaacaaaaattccgcgtcgacgggattaagaagtctccagtcacattattataaccttatggtaatacatttatcatcctgctgcagaccttggtcatatatgtaagtcacgcacatataattcacacaataaatcacatcataacaatggaattcatcggcaggccgtatattcatgggatgattttcgtacatagatctaaacaagaatggcatgtctaccttagggaaacttctatatacactcactcattgtttacacatacgtcaggtccaagactccaat

SEQ ID NO: 446731 - DNA, 381 bp, Triticum aestivum
ccggtcgaccgggatctgtacggacgcttaacgcgccgaatacgagtgcgcatcctgttagtacatttttttatcagatcgtattactagtgtgttgtacccatctccatgttagcatcccaagcccatctggtgggtccttccatccagcccggcccactctgacgacgcaggtctctaacacagacgacttcttgccattcaccaacacatacatgtcactataatggatgaatgtgcaaatctagcaagagggcatatatcactttagttcgatgatctgccatttctaaaacaactagtttcaatgagtgaaattagaccatgtgggcaggttggtaagctaccgacacgtgaatgcaaacgatgagtgaaatcaga

SEQ ID NO: 446732 - DNA, 276 bp, Triticum aestivum
gtcgacggggtgaagtagttgtagaaggggtacggccttgtcatggcactcgatgtccctaggagcatcaccatattcgttggcttcgacatcatacagttttttgtaataagtttgtgtgtgggtggatggctaatgttgtctcgtatggattatcggcattctcaccttcaatgtattgcaagactctcgacaatggcacacgtttcttcgttactgctcacttgtttccgacgtccttgaatatactgacaacagttacctaatagtggattt

SEQ ID NO: 446733 - DNA, 488 bp, Triticum aestivum
  unsure (1)..(488): unsure at all n locations
ggngngcntttctagncggncggtaccgaacannaattcgcgggccgacgagctcactancggcggccgctctagaggatccaagcttacgtacgcgtgcatgcgacgtcatagctctctatagtgtcacctaaattcaattcactggccgtcgttttacaacgtcgtgactgggaaaccctggcgttacccaacttaatcgccttgcagcacatccccctttcgccagctggcgtatagcgaagaggcccgcaccgatcgcccttcccaacagttgcgcagcctgaatggcgaagggacgcgccctgtagcggcgcattaagcgcggcgggtgtggtggttacgcgcagcgtgccgctacacttgccagcgccctagcgcccgctcctttcgctttcttcccttcctttctcccacgttcgccggctttccccgtcaagctctaaatcgggggctccctttangggttccattaatgccttaccgga

SEQ ID NO: 446734 - DNA, 274 bp, Triticum aestivum
gcgatgattttactggactgcttgccggactgtcgcagcgaggaccgaggtatgtatatgccatatagcactctcgatgcaacgaaagttacgtcccttacagttttcagcatcatgaccgcgtgccagattttgacgaagggcagtgtttgcatgcactcgcaatgtgacattacattcacatctgtcccaaaaggatcaacatcatgaccatcataatcgccgtgctctccgagtaagttgtcggcaggaacaaaccgaacctcgcaatcat

SEQ ID NO: 446735 - DNA, 398 bp, Triticum aestivum
ggggccacgggctgattcaaattttgaactgggggcataaaggtccatttgcccattttcacctggtcggaacatattccccagcgacttacatttcggaacggagggagtagtgactatctatttcatatctttattagtcatatgtatccccgatcgtttgctccatcagggataaccataaaataaagcagatgcatgttggttattgaagagacccagaggagcaacttctgaatcttaaatatgccaaaagcacattcaacatttaaataattgtgtttaccttttgattaccacagggtgggtacagactggtccttctgacccgtgatgataactcaaggttgggcagcggcggctgtggtagcaaacggtggtggcggcagaaggggaga

SEQ ID NO: 446736 - DNA, 445 bp, Triticum aestivum
ggggccaggggctctaacagcatgtagggttattaccggatgatgtttcccggggcccgaagctgtctaaatccttgtgttgtgttgcgtctctcgattccgctcaacccctctcaagctactacatagatgcgctggcctcgcgactaagtcctgacactaaggacatctgccgtgacaattccacgacacggcccatgtatggcccatgacgtctttcggcccatatgaggcccttattactctcggcccattaacgacccgtggtaaaactggcccgtaatgaacagtgtaccactttatacccattaacggcccgtggtgaaactggcctgtaatgaacagtgtatcactttatacccattaacggcctattattccgttgggccgtttccagcccatgttatctttcggccttctcggggcccatttgttcttgggctca

SEQ ID NO: 446737 - DNA, 488 bp, Triticum aestivum
  unsure (1)..(488): unsure at all n locations
gngngaattctttcggangccacggtcagnaaatcccgggtcgaccggctggacctaagntccatcatttcttaggcattgctgttgttcgagattcctcaagccttttnctttcccacgcaagtatatccttgatcttctnaatcgtgctggtatgcttgactgtcaatcatctcgactcctgtcgatactagttttaaactttcggctaccggtgaacccttttccgatcctacctctatcgtagcctaacaggtgctctccaatatctcaccattactcgtcctgaaatctctttgctgttcaacaagcatgtctctatatgcatgattcccgggttcctcactataatcagtttaaagcaatcctcgggtatttaaaagggaatccccaatcaagggncccaacctcaaaaatccttctcnaaactcgcttacggcatactctgatgcaaactgggctgggttgcctgaactcccaaaggtcaa

SEQ ID NO: 446738 - DNA, 86 bp, Triticum aestivum
attccgcgtcgacggggatcaaaaaatggtctgaaatcaggccttcactgggccacattggggagctgatgagcttgcgtgtcaag

SEQ ID NO: 446739 - DNA, 383 bp, Triticum aestivum
attcgcgcgtcgacgggggaaaaaagaaaaaaaaaaaaaaaaaaaaaaaaaaaaaaaaaaaaaaaaaaaaaaaaaaaaaaaaaaaaaaaaaaaaaaaaaaaaaattaaaaaaaaaaaaaaaaaaaaaaaaaaaaaagggggccccccaaaaggttcaaacctaacttacccttaaatgcaacttcaaaccccttcaaaagtgcccccaaattccatttcaggggccttcttttaaaaacttcttaacgggaaaaccccggggttaaccaaattaaacccctttgaaaaaaatccccttttcccaagctggcttaataccaaaaaggccccaaccattcccctttccaaaaatttgcccaccctaattggcaatgggaaccccc

SEQ ID NO: 446740 - DNA, 422 bp, Triticum aestivum
agagggcgtgataactcttcggatacatttggacaaacaagacatcggacgtagggggaattcgttgaagcagttttcaagaccgatgacccaagacgaagaagagctcggaagatccgagggatgtctccaaacttgaagactggtttaggagctactgatggtgtctcagaattggggtcattcaccatgtcgtgtcccggccaggtgggccgggccgaggaccccatgtcggttcactagtggaccacatcaaggcggaccatggcttgaagaaggaatacttccgaagacttggcgcctactccaaatacttagatgtcgtctacaacacaattaccttatacatagccgaccttggtataaccctagccaaccctggtatctatataaaccagggggacagggctcgtacatgaaat

SEQ ID NO: 446741 - DNA, 253 bp, Triticum aestivum
cttgcccggttttcccttggcccccttggttggtttcacttcctcttttcctttcctttttggtttatttttctcttcttgttgtgggggggtccccctgtgggttcctccttttcttctccgtcttttcgccttcttgtccctcttttgtggtctctctccttcttttcctggccctcctttttcttccttttcggcggggtccctcctgtttttcccctcttttctccttttttcgctttcccctcttttc

SEQ ID NO: 446742 - DNA, 400 bp, Triticum aestivum
cggggcccagggaaaccaattacgatgacagaggatcatcgagtagtcagtacaacagaacgagcgaggatagcgaaattagggaatcgcctgaaagatggcgaaagccgtatatgtggactgaatctttgcaggatgcttggagacaagtttctcaaagagcaagatccaaggttcagtaaagaaccatatgtgagcccagtagttcagatctcgaaatcgtgctcagcttttgcgcttatcgctagcgatggcctatgggatgtcattaccgcgaaaaaggcagcacagcttgtcctcgattataaggagaggaacatgggccaagaaatctcagcggacggagtagcagaccatgtgcttagtgaagccaggaatctgcggacgaaggacaacacat

SEQ ID NO: 446743 - DNA, 330 bp, Triticum aestivum
ggctaataaggaggaccttcctttaagtgccgcggagaggaagctaatgcatgcatacaacgagaagcctgtgctttctagacctcagcatcagtttttcctgggtgataactactttgaggttgacattgacatgcatagatttggctacatctcaaggaaaggtttcgagacattcctggacaggctaaaaatatgcatgctagatgttgggctaaccatccagggaaacaaacccgaagaattgcctgagcaggtcttgcgctgtgttaggttgaacgggatagattatgcaaagtatcagccactgatgacaaacggtgcctgaac

SEQ ID NO: 446744 - DNA, 261 bp, Triticum aestivum
gcgcggcaaaaaaaaaaaaaaaaaaaaaaaaaaaaaaaaaaaaaaaaaaaaaaaaaaaaaaaaataaaaaaaaaaaaaaaaaaaaaaaaaaaaaaaaaaaaaaaagaggaaaaaaaaatttaaaaaaaaaaaaaaaaaaaaaaaaaaaaagggggccccccaaagggttcaaccttaatttccccttaaaggaaatttaaaacccctccaaaggggcccccaaatttaattccaggggcgtctttttaaaaacttctaaag

SEQ ID NO: 446745 - DNA, 339 bp, Triticum aestivum
cagggagaccctgctgggcaagccgggtaatccaagggccgcatgggttggttcaagttcaaatttaatttaacttttgggttaattttccaataattgtggtttatattcaaaaaaccaaaaggtaaaattcatgtgagctttagaaaaaattataaaaatataaaaagatgtcgccgtatgttaaaatagatctatatagttccattaaaaatatgtacgtaatatttgaaagaaatattcatgtgtcttcataaaaatgtcattgaggattttaaaaatgtttatgcaatgttaaaaaatgttgtgagcagtaatttttctgtttccagtaaaatt

SEQ ID NO: 446746 - DNA, 394 bp, Triticum aestivum
gctctggaaggccgggtacctagccaagaaagtagccaatcggcttccggccaagggacaaatcgtccccaccccgaagccccaggagagggtggtgttcgtctctcacttcgtccgcgggctgggattccccctcgacccgttcgtccgtggacttatgttctactacgagcgggacttacacgatctggcccccaaccccatcctcaacatctcggcatttattgtcgtgtgcgaggccttcctctgcataccacctcactttggactatggctgaagaccttcaatgtgaagccaaaggtggtgagcggtcagcaaccagagtgcagaggcgccatggtgggcaagatgcccaatgtcacctggcccgaaggatcctttgtggagactgtc

SEQ ID NO: 446747 - DNA, 108 bp, Triticum aestivum
  unsure (1)..(108): unsure at all n locations
tnttcnntctttctttttncttttttttntttctttgttntgttttttttnggtgnnttgctnttnttctgtttttttttgntgtnttgttgnttttttttttntttt

SEQ ID NO: 446748 - DNA, 416 bp, Triticum aestivum
attccgcgtcgacgggattgagaaccggtctgtgagaaaatgggcatctgcatccagcagctcaagcaacagcatttcattggacacttacagttcttttcatagctatggcaccaaagagactgacagctgggtgaggccacacctggagcatgatggctcaggtttgctgctgcaagcatacgatgatgacattgagaaaatctgctatgtgatgaatgagctagcaggtggtggtgtcgatggttctgctgatcgtatcatggatgagacgctttactcgaatggcatcgatgatttcatgattttgccagcaggcaagaatggggagaagaagaagcagctaaccatcgatcaagaattcgagcagtacttctcaaaactcatgctttagcgtgaccgtaacagagaattta

SEQ ID NO: 446749 - DNA, 457 bp, Triticum aestivum
  unsure (1)..(457): unsure at all n locations
aaaangggcgggccgacgaggctcantaaaacggcggccgctctagaggatccaagcttcgtacgcgtgcatgcgacgtcatagctcttctatagtgtcacctaaattcaattcactgccgtcgttttacaacgtcgtgactgggaaaaccctggcgttacccaacttaatcgccttcagcacatccccctttcgccagctggcgtaatagcgaagaggcccgcaccgatcgccctcccaacagttgcgcagcctgaatggcgaatgggacgcgccctgtagcggcgcattaagccggcgggtgtggtggttacgcgcagcgtgaccgctacacttgccagcgccctagcgcccctcctttcgctttcttcccttcctttctcgccacgttcgccggctttccccgtcaagcttaaatccgggggtcccnttaagggtccnaatttangcttaangc

SEQ ID NO: 446750 - DNA, 446 bp, Triticum aestivum
ccgggtcgacgggaacatccagatcatagcccacaccatcactaacatttagagcaacatgtatgagtatatatccttcaatatatagtaggcacatctactctatctagtatacaaacattcactttacaacgtatctattgttgaaaagcagctggaaatatatagatgcgtggagcaagttgtgcataatatcaccatcactaattgttgaaaagcaactggaaaattgtaatttaagaaacctcagagcattgattcaaatatcacccatcatagctcacaccatcactaacatttagagcaacatgtacgagtatctatcctctcaatatatagtaggcacatctactctatcatacattcactgtacgacgtgtctgttgctgaaaagcaaccggaatagatatagatgcatgaaacaagctgtggacattgtgtggcga

SEQ ID NO: 446751 - DNA, 97 bp, Triticum aestivum
  unsure (1)..(97): unsure at all n locations
ttcttgtnttgnttntttttttttttnntngtcgtttttttgttgtttcttnttttttttttgttttttgttttgtttcttttttttnttttnntnt

SEQ ID NO: 446752 - DNA, 99 bp, Triticum aestivum
tacggtcgtacattccgggtccaggggttagaagaagtaaatatgcattgttgtatcgcgacctgaatgaatgaaataaacgaaataacgctcttgtcc

SEQ ID NO: 446753 - DNA, 490 bp, Triticum aestivum
  unsure (1)..(490): unsure at all n locations
gggntnnngnaacttnttntngcggncgtnncggatttaaattcgnggncccaagntcatagaaaagnggccgctcctagaggatccaagcttacgtacgcgtgcatgcgacgtcatactcttctatagtgtcacctaaattcaattcactggccgtcgttttacaacgtcgngactggaaaaccctggcgttacccaacttaatcgccttgcagcacatccccctttcgccagctgcgtaatagcgaagaggcccgcaccgatcgcccttcccaacagttgcgcagcctgaatgcgaatgggacgcgccctgtagcggcgcattaagcncggcgggtgtggtggttacgcgcacgtgaccgctacacttgccagcgccctagcgcccgctcctttcgctttcttcccttccttctcgccaaagttcgccggctttccccgtnaagctctaaatcggggggctccctttangtttcgaatttanggcttt

SEQ ID NO: 446754 - DNA, 372 bp, Triticum aestivum
  unsure (1)..(372): unsure at all n locations
cgggtaccaacagtcacattcaagtaccggcagtttcggtaaccccagttcctctcttttgattgaacagaaataagatgacagctgggtacacataagtctttccaattggcagtaaggagctgagataaagatcaccacaacgtgatccaaagaccgcaggtggcaccgcacgcgcagcgggcgacggcaaccgccagctcaccgtcgccaggcggaagcgagctaggcttccgcagagccgcaatgatcttccggcagcatgagactgncaggatgggttgtggtgctggtggcttggcgagccaaatcatgcctcggatgcatgatgccaaccttggccgggaagaagacangacgacggcgccattg

SEQ ID NO: 446755 - DNA, 398 bp, Triticum aestivum
cccgggtcgacgggcgcatagagtacaacgagttcgtggcgatgatgcagaagccggcgctggggctggcgaagaaggccggggccgggctggagagcagcttcagcatcggcttcagggaggcgctgaggatggcttgaaggaggaggaggagctaggtggtagtcatggcgacgctaatttcgttctgctcgtcgaagacgcttgttgtagagacatggtgaggcgattgagttttcatagggtcgaagtggcagcagctcctggcgagtagcggagggtcgggactcgggacaacatgtgtgtagtagaggcaggcaggcaggcccggtgattttcttctcgctactggattggttcaattgtgtattatactgagtataaactacagaaagctt

SEQ ID NO: 446756 - DNA, 415 bp, Triticum aestivum
  unsure (1)..(415): unsure at all n locations
attccgtgtcatgctctccgtagcagcatggagcaaactctcaaaagacgcgtgccatgcaagtgtccgttgttggttgggaaaagcatacgcatcaatgcatgcatgggatgcacacaaactttaaatgcgtgatcagtggtcatgtttatcttactgtatgtcacaacgtgtactgtagaaattcattgccttttgtttttcacatgggtcggccatggctatatttctatgaaagcgttgaaatgtgatttctttttgtatcacacggctaggcaatgatgcatacacgaatggtaattcactggcatgaagacatgggtactgcccactaggactacacgtgtcgaagttaagtctgtcattctgcangggtcaacggtgctcagatcaaatgttcatgtcaccatgacgt

SEQ ID NO: 446757 - DNA, 441 bp, Triticum aestivum
atgcccgggtcgacgggtggcgccaaggctgaggccaggttcaagcagataactgaggcctacgaggtactaagtgatccagaaaagcgtgcaatttatgaccaatatggtgaagaaggtttaaagggtatgcctccacctggttcgcaaagccggaccgccacagcttctggctcaagtgggccaagtaatttccgttacaatcctagtgatccagatgatatctttaatgagttcatggcgagcaacaagccatacacctttgatcaagaccgaaggcgctttcaaccagcacaccggacctcagcagtgaatggtcgaagtgaagcttcttccagttctcagaaggagcctggtaccagtacaagccatctggaaaagccaccgcctgtggagaagacattactttgcactcttgaagagctgtataatggaacaaaa

SEQ ID NO: 446758 - DNA, 421 bp, Triticum aestivum
ggggaagaagctcgatccgacgggaagcctcgacgccaccgctgtacatagagaggagaagcagagcctgagagtcagtcagcgaagcttgccattcgaccgtccatggaagcactctgagattcaacctaacagtgttgggcccttagcagtgtcttagctttctaatttccaccaatccatccgtcagtcccttccggtgtaatgattcttttgaacaagaaagggaacccggccgtgcaacagtagtagcttaggctagctctgcgtatcatcatcatcatctcctttcttcttgtgctaagcttccaagatcgatcggtacatagcgcggcacccttcctatccattctccctcaaatgagaggggattgcattgaagatgtgtaatagtatcatttgtattgccattatatatata

SEQ ID NO: 446759 - DNA, 99 bp, Triticum aestivum
  unsure (1)..(99): unsure at all n locations
accgttngccnttccaaaaatttgcccancntnaatggcnattggaaccccccctgtacggnncattaaccncggnggttttggtggttacccnnanct

SEQ ID NO: 446760 - DNA, 252 bp, Triticum aestivum
ggttccattctacctttcgagagcattgctcggtcaacttctttaaatggcacagacagatgatcaccccgtgttcgcctgaccatgcgctcaccttttcgacgcgcaattctgcgaccgaagctgccataatcatataatggatgtagttaaacaagggatatagggaaaccaatttggaagaaaggtgaatagatatagccagtaccggtaattttccccggcggtaaatcacccaaggaaccagaactc

SEQ ID NO: 446761 - DNA, 391 bp, Triticum aestivum
gggagggaacatcggtgatctctgccgaggtgaagcctccagtaaagcagcaagtgagcccggcgccattcaaggctgccgtggagaacgtctacatgaccgacgcgatcacacgggcttccaagatcatggctcagtgcagcgcagccttgttgaagaggtgagaccctgcgctaggtacgtcgccttgaggaagttgagtcagcggcagacgagagttttagttgcttggcgagttcactcaccagttgtcgttgcttggttggttgggagcataagatttggagtgcctctaccctagcgagatgcggggagcagcgaaacgtgaaagcagtgcatgtttctggaacgtgtgagaagcggagcatacttagtaagcttgttttgtcct

SEQ ID NO: 446762 - DNA, 407 bp, Triticum aestivum
ggggcaagatataaaataaagtttagtttgagtttttactttctttactttcttgttgcaattaaaagaaaagaaagaaataaaaagaaaagaaataaacaaaagaaaagaaataaatcaagaagatcatatactaatcttatggtaggtgatggcaccacataaggaaaagtataagtagaaaattttattagagattgacaaacatagcattagtcaatgatgcaactcatgaaagaattaataagggaagagaatattcacatacaaatagactatcctacaaatcttttgtgattgtgagcccccatcagaatattatatgccagaattgttgatgttggacaaggaacacagcttaatgatttacgtttgttcatattcacatagaagacatattgtcatag

SEQ ID NO: 446763 - DNA, 426 bp, Triticum aestivum
ttccgggtcgactctgacgacaaaaatacttgggtgttggactggatgaccgaaaacactcattataaggcaccggcctctgaattacttcacgccctgcccatcagtcctccacctgaaggagctcgttgcgtgtaccaagagcctgaattgactgcccattatatgcaagtaattatgaagcctctgaagcctggtcaagctccaaggaccaaattcctcgtgaggcaattgctctatgtgccaagaactgtctatcgcattctgacgaagacaatgagtccgatcaaaggccacgactcgtctgataaggaaattgttggcatcatgaagaatctgctattcagtgtcatacatgccattcctgtcaactagcatgatttcttcatgaggactctggaaaatgtcgcactctctccgtttgag

SEQ ID NO: 446764 - DNA, 487 bp, Triticum aestivum
  unsure (1)..(487): unsure at all n locations
ggngnnngnatntctattcgggaccggacggtacacntcnccgaattcccgggtcgacggcaaaccggacactacggtgagacgtgaaaaaaaaaaaaaaaaaaaaaaaaaaaaaaagggccgctctagaggatccaagcttacgtacgcgtgcatgcgacgtcatagctcttctatgtgtcacctaaattcaattcactggccgtcgttttacaacgtcgtgactgggaaaacccggcgttacccaacttaatcgccttgcagcacatccccctttcgccagctggcgtaataggaagaggcccgcaccgatcgcccttcccaacagttgcgcagcctgaatggcgaatgggagcgccctgtagcggcgcattaagcgcggcgggtgtggtggttacgcgcagcgtgaccgcacacttgccagcgccctancgcccgctcctttcgctttcttcccttcctttctcgccacttcgccggntttccc

SEQ ID NO: 446765 - DNA, 416 bp, Triticum aestivum
ccgggtcgacgggtgaacataatttgtaatgctggcttctgccccatgctcctggatgaaacatgtagattgcaagcattacatcttactagggggcttcataagcctctgctatctgttagtctgttgttgtgggtatagggttatgtaaaaaaactgcattttttttccggcaaataagcatatagtcaccgtcacaatttccaataggaaaaggccactacaccatctggcacctaatgacaaaacgaagttccaaagacaacaccaacaggtcttcacacaattgtgcctattggccacaacacaacaaatgttgagaagtttcaacctggtcatgaaatgagcacataggattaccagaccattttccttcctcatcacctccctagttaggggagtatcaccaaagaact

SEQ ID NO: 446766 - DNA, 488 bp, Triticum aestivum
  unsure (1)..(488): unsure at all n locations
gggggngganttcctgccgctccgtaccggtcatctattcccggggcnctctagaggataaancttacgtacgcgtgcatgcgacgtcatagctcttctatagtgtcacctaaattcattcactggccgtcgttttacaacgtcgtgactgggaaaaccctggcgttacccaacttatcgccttgcagcacatccccctttcgccagctggcgtaatagcgaagaggcccgcaccgtcgcccttcccaacagttgcgcagcctgaatggcgaatgggacgcgccctgtagcggcgattaagcgcggcgggtgtggtggttacgcgcagcgtgaccgctacacttgccagcgcccagcgcccgctcctttcgctttcttcccttcctttctcgccacgttcgccggctttcccctcanagctctaaatcggggggctcctttagggttccgnnttantgcttttanggaactnacncgaaaaaantttg

SEQ ID NO: 446767 - DNA, 426 bp, Triticum aestivum
ggggccgacaatacgacgatcagggagtacaacatcatggccttcaaggaccacaggaaaaccttggagaagttcgttcaagagcacattgacctcgccgaagccgctgccacttcacgtccccctaccggacaagcagagtaaaagctcgattgccattattaacctagctagctgcaaagacgaaggagggttgttgatgtatcctatttggcttccttatgtagtttgctgcatcatcgttgtcgagccaagaacaactacttatgtatgcattagtgtattacgctacttgtcagcgatcgagtctgtcttaactcttgagtagtagtaatagttgctatcaagctgtgcctgtgcgcttgctcgctataactaattttgtacaacgtaatttgtttggcaccaagttctgttagtaataat

SEQ ID NO: 446768 - DNA, 266 bp, Triticum aestivum
gccgacgggcaaatcaatgaggggcggacctgaacctgaggtcagtcggtacaagaatagagaggggctgtacattctggttagttaattacacagcaaaatcacagatcaacgttcctttagttttactgtgaagatcaatgaacatttttacatgagaggattagcataggactgtaagagagtccatcacagagggggttttactagcagaaatttggttttgtacaccaggtgtggattaccagaaatttggtttctgtcag

SEQ ID NO: 446769 - DNA, 389 bp, Triticum aestivum
gggttaacctgagttcattcctcaattgtagaaacatctgcgatatattattgtaaccaccccatgcatgtctaacaacttggatgtattccaattgtattgtgtcttcgccagtccttagagagccatatttgctttaatcctcacatggttacaaccataatagaatgcaccctcagcaatatgtttcatcacattgcattaattaaccaggcaattaactatttacaacattttatgttccagtcattagtcaatcaccatattgcacattataacacactcctatgacaatgtcaactagttacacataccatacgttcgtaacaccttggaaatccaacaattgtaattgtttctcatgtacttgttgcaaccaaattcgattt

SEQ ID NO: 446770 - DNA, 250 bp, Triticum aestivum
gggtcgacgggtaacacccacttactatgtttttttttcttaaaaatataaatcatgatgttttttttttcatatctagcaagcttcatccatgttcacattgattgtcacccaccctcctcgacctgagtacctagttttctatactacgtctcggctcgtacttcagttctagatttagattagtttaataaagtggtactagaaaacatcaccatcgcatgcatggacaaaaggcaaaagcgacaag

SEQ ID NO: 446771 - DNA, 63 bp, Triticum aestivum
  unsure (1)..(63): unsure at all n locations
gggtcatcantaatagagcattgtcncagaaaaaagagaaaggcaaaaaaaagggaaggcccg

SEQ ID NO: 446772 - DNA, 200 bp, Triticum aestivum
tactttaatgctgactcgagcttagatggaaactttatcagtttatggactatttgtggcacgagcgctatttatttgcgaagcctttggttgaatcttagtggaagattctttcgagttcgagtagataattttgtcggttttgaggaagtttgaggttgcttccacgtgtggaactagatcaggacgttatttagttt

SEQ ID NO: 446773 - DNA, 395 bp, Triticum aestivum
gggaaatcgaagagatgagtggcgggaaacggtagcgtgtttggatatataacaacattaatatagaaaacttagtagagaaggaagcactagcacaacgcatgctcacagtgcttacccatatactgcatgtgctatcgaaagggatgatgattgtcgttcgatctgggagcatccaacggtgtatacgtacgatccgtggggtttgggttctcgccaatcagaacgcacgacccagatcacgcgcgcagcaggagggggacatcggccacggttttgtaggcacacggctttcgtgagtgaaccgtgtgctatttgaaaacattttatgagaagaatctcggtttttaaatccccgtaaatccaaaactcacccgagaatcgtgacatggcca

SEQ ID NO: 446774 - DNA, 422 bp, Triticum aestivum
ttccgggtcgaccttcaatgccaatgaaaggtactcttcgggatcattgcttccagtaaatttgggcatggtgaactttagtttgccgtagcgttgctcttcattgtgttggggtcgagggtgatgacgaccttgacaaggaggattgtctccctcaacttgctcttatcatggagggttgtcaacctcattttgttcttggcgaacttgaggttcttgtcgaggagcttgtggaacttgacgatgcagtcgagcttgatggttcctctcttgaacttcctcgcgaagcgcttcttgttgctcgcgcgtgtgaccgttgcggtcggcgatggcgcgacttgtttcatggagggcacattgggccttgagtgcttgagcttcacgtcgttgttgttgttgtcggagcgcctcggtgtcttgct

SEQ ID NO: 446775 - DNA, 487 bp, Triticum aestivum
  unsure (1)..(487): unsure at all n locations
gggnnggnaactctacgcgctcggtaccggtaacgaaattcccgggncnacggggagaggaggaaatttagtgggttcatgtgatacaaaaaaaaaaaaaaaaaaaaaaaaaaaaaagggccgctctanaggatccaagcttacgtacgcgtgcatgcgacgtcatagctcttctatgtgtcacctaaattcaattcactggccgtcgttttacaacgtcgtgactgggaaaacccggcgttacccaacttaatcgccttgcagcacatccccctttcgccagctggcgtaataggaagaggcccgcaccgatcgcccttcccaacagttgcgcagcctgaatggcgaatgggagcgccctgtagcggcgcattaagcgcggcgggtgtggtggttacgcgcagcgtgaccgcacacttgccagcgccctagcgcccgctcctttcgctttcttcccttcctttctcgccaattcgccggctttccc

SEQ ID NO: 446776 - DNA, 147 bp, Triticum aestivum
gccgacgggatgatcaacattattagagcattgtcccagtgagtaaaggatgatggagactatgattcccccacaagtcgggatgagactccggacgaaaaaaaggccaaaaaaggaagaaaaaaaaaagaaaacaagagaaggccc

SEQ ID NO: 446777 - DNA, 487 bp, Triticum aestivum
  unsure (1)..(487): unsure at all n locations
ggttnnngnnnttctcttntgggccggcangtacagntcaagaattgncgggtcgacgactcactantcggcggccgctctagaggatccaagcttacgtacgcgtgcatgcgacgtctagctcttctatagtgtcacctaaattcaattcactggccgtcgttttacaacgtcgtgctgggaaaaccctggcgttacccaacttaatcgccttgcagcacatccccctttcgccactggcgtaatagcgaagaggcccgcaccgatcgcccttcccaacagttgcgcagcctgatggcgaatgggacgcgccctgtagcggcgcattaagcgcggcgggtgtggtggttacgccagcgtgaccgctacacttgccagcgccctagcgcccgctcctttcgctttcttcccttctttctcgccacgttcgccggctttccccgtcaagctctaaatcgggggctccctttaggttccgatttaatgc

SEQ ID NO: 446778 - DNA, 402 bp, Triticum aestivum
gcccgggcctgttacactgtactccctccgtccggaaatacttgtcatcaaaatgaatagaaggggatgtatctagagtatttccggacggagggagtacatgtcaacatgttgtgtgatattctcagctaatgctggagtgacagcggttcctggggagatggataggacgactggtctctcaagctctttcaggatctgcaaaacgcaatgtgaatttcccatgaattgatctcaacagattgccaattgtgatgtagtagctaattctagaatggagggctacattaattaattcaaacctctgaaacggccacgatttccttcgggctataatccgtgccaaagatgcaatccaactttactgcaaattgaacaatttggtgcatcatgttaccgttg

SEQ ID NO: 446779 - DNA, 392 bp, Triticum aestivum
  unsure (1)..(392): unsure at all n locations
gcgggggggacgagagtagagaggggggaaaggacttagcgaaattttgagcccgggctgccgggatttgagtcagactagcagtagcgcgttttgccgaagacgtgctatagcgaggagagctatagcgtgttccagcgaaatgcactacagctattcctttctgtttgatttttcttttgttttcgttacagttttatttgtttcatttcgccttttgataggtctttcatttgcagttacttttctacttattttgcgatttattggcttgggcatagcagtagggctctacaggatgagcgtgctgcgagagagtggttagcagtanggggcttctgggtgaagcgctaggacggagtcctagcctaccggcatgagtgagggaattt

SEQ ID NO: 446780 - DNA, 376 bp, Triticum aestivum
ggggaggcagagacagagaaccgcacagcggcggaaagactgcctggtgccggagaagatgatggaccggactcaaacaagacaacgtcggaagcagctacctcacggtagcaggcgactgattgtctgctgccaacttggcatgtgactgaacatgtataaaataggattatgagttgacaaaggttcaccgcacagggtgtatactggttcattctacaattattttggtaaaggtttaatgatcttttgctaaaaaaaaaaaaaaaaaaaaaaaaaaaaaaaaaaaaaaaaaaaaaaaaaaacaaaaaaaaaaaaaaaaaaaacaaaaaaaaaacccaaaaaaaaacccaacaaacgaaaaaaaaagcggccc

SEQ ID NO: 446781 - DNA, 60 bp, Triticum aestivum
  unsure (1)..(60): unsure at all n locations
ttctttgtgtgtgttttttgaattntctgtttttctggtttntgnggtgtnnttttnttt

SEQ ID NO: 446782 - DNA, 487 bp, Triticum aestivum
  unsure (1)..(487): unsure at all n locations
ggggnggaagtctaccgtgccggacggtctgcattcccgggnccccgagctcactagaaggcggccgctctaagaggatccaagcttacgtacgcgtgcatgcgacgtcatagctctttatagtgtcacctaaattcaattcactggccgtcgttttacaacgtcgtgactgggaaaccctggcgttacccaacttaatcgccttgcagcacatccccctttcgccagctggcgtatagcgaagaggcccgcaccgatcgcccttcccaacagttgcgcagcctgaatggcgaatggacgcgccctgtagcggcgcattaagcgcggcgggtgtggtggttacgcgcagcgtgacgctacacttgccagcgccctagcgcccgctcctttcgctttcttcccttcctttctcgcacgttcgccggctttccccgtcaagctctaaatcgggggctccctttaagggttccgattaagtgcttaacgg

SEQ ID NO: 446783 - DNA, 420 bp, Triticum aestivum
tacggtcgtaattccggggcacgggaaactaaaaatctcaagtacatggaaggatcttacagtagggtgttgcaagacttccaactgtgaccagctgcagttggttcagcaaaaatataaatctctggagcatcaacagcaaaaatataaatctctagagcatcaacagaaagaaaacgatagaaaatagactatttgagcagcagctggtgcggtagtctgagtagagatttcatggtagcgaaggaactttgccgtataattgaggccaacttcacagaaggatcaacacccgaagacaacaatctgaatcgtatttctcatagataagatatgttgctaatcatcttaatgatacaactttacaatgagacattgtacaaaaaacaaacaagtatttttggagtctggatgatgata

SEQ ID NO: 446784 - DNA, 485 bp, Triticum aestivum
  unsure (1)..(485): unsure at all n locations
tggggggnggaaacttccaccgcttcgtaccggtnattacttcccgggtccnaccccaaaaactanattagggtgatggttcacgtagtgggccatcgccctgatagacggtttttcgcctttgacgttggagtccacgttcttaatagtggactcttgttccaaactggaacaacatcaaccctatctcggtctattcttttgatttataagggattttgccgatttcggcctatggttaaaaaatgagctgatttaacaaaaatttaacgcgaattttaacaaaatattaacgttacaatttaggtggcacttttcggggaaatgtgcgcggaacccctatttgtttattttctaaatacattcaaatatgtatccgctcatgagacaataaccctgataaatgcttcaatatattgaaaaaggaagagtatgagtattcaacatttccgtgtcgcccttaatcctttttgcnggaatttgcc

SEQ ID NO: 446785 - DNA, 398 bp, Triticum aestivum
gacgggcatatacatacagacagacaggagagctgccttccgagccttggaaaaaaggcactgctgcctttgctctgctcatatccggactcagatgatatgaacatggattgcattgcagcaggcgatgaagaggccaacatagtctcggacttttggaaaaccagaagaggttattagcatgtaggagaagaggagcgtgtaaaggaaactcaaggcaatgcttgtatgtaacatacaaaaaataacaagttgtaaaagcggcctcaagttttcaaaaaaaaaaaaaaaaaaaaaaaaaaaaaaaaaaaaaaaaaaaaaaaaaaaaaaaaaaaaaaaaaggaaaaaaaaaaaaaaaaaaaaaaaaaaaaagcgggcgccccaaagggttcaagctt

SEQ ID NO: 446786 - DNA, 455 bp, Triticum aestivum
acggtcctatcttcccgggtcgccgggtccagaactccctcaatagcccctgaactagactttaatgatgatgtgttcggcgtgcagattgtcttcagcattgcaaggcaggttctttctccggatactccaatgcagtcctccacacataatagctgtatccggctccgttaaataattacagccttaagctgcaagggtaaaaatattcaaaacaaagtaagtcgcatccataagcaatttttccggtgaggcattatgtcctgaccttgttagtattctgaactgttttacaatcctcgcttcgtgttttgggttgtggctaggaattaagttaatggcaaacaaaccgtttttttggcgtgtgtttaatttctaaccctaagcggctgcatggttgaagcctgcaacactgcacggatgcatccattacattccttggcttataaaatttc

SEQ ID NO: 446787 - DNA, 433 bp, Triticum aestivum
cgggttatttgatatttttgtcttttttttcaaaaatataggagcaatttaagacatatcaaacccatgcttcaacatgataaattagtagaaactatgatcaaactatagtaggggccaaaacctgcgcattacatataattagcaactacaaatgtcatttaatgacattttcaaccttgacattggcacatatactatgcacactagtagcaggcgcatctagacatcctcatcctcctccgcggacgaaatatcatccatccacacataggggtcggactcatgagctgtagccacaatgtttgctcataatcgatggtatctgagatgtatttgatgatgatgatgatttttcttttggatgacgcttggcatgaccgcggcactgaggtgtcctgcgcattggacgtacgtgaagaaactcggtgct

SEQ ID NO: 446788 - DNA, 220 bp, Triticum aestivum
gcgggaaatacacacccaccctacctaaattcaggtagaatacaatacatttggtattggggcatgcttgtatcgatgcctatgcaagcgttgtaacctgtaaaccgacatactgaaaatgcgaggaacgttaagttaagaaggaaaaaaaaaaagaaaaaaaaaaagggcagagacgcgaaaagagaaaaagcaagaagaaacgatacatgcaacgtca

SEQ ID NO: 446789 - DNA, 262 bp, Triticum aestivum
gggtgaaatgcgtttttgttaaagtctggcaccctgcacaacggacctgttcctttgagttttggttattatcttgctggagttatagattgtgttatcgggattatgtgccgtgctggcatttggatattgatcttaatccgttcgtctggcacccttgtgttgtttttgtggctgtgtcgtgctggtgttggccttgggtcatggcctaaaactcttgtcatttcatcgtattcctaaccaatgtaggaatagattttac

SEQ ID NO: 446790 - DNA, 430 bp, Triticum aestivum
cgggcaaatggaacggtatgattggaggtacctttatgcagactgtgatcctggtgtgggttaccgtgaggaccgactggaacaaagaggtggccgaagcgaggaaaagattgaacaaatgggaaggcaacaagatgcctctattagcaggccaagaatgaaacagtggatcctgtatatgatcaacggaaatgtggtccgttcgcaagttgatctccctaaaatgtgtaaagtgcattgttcatcgtgcaattcaccattgaaattccctacttccgttctgctattcccgcttcgcaagcacggtagcagcggcgatcttgtcatgttactagcgagtaacgggattctatggcgatgatagattagtgtggatgagatcactttttttgtgtgagatatcaatattgttggactgcactaagggtac

SEQ ID NO: 446791 - DNA, 430 bp, Triticum aestivum
gggtggacgccggtcgtcctcccatagaagcaattatgtttaatcaagaagacataatgcgtttacaatccttagatcatgttgcttataatgaaaatcttagaaagagggttcctaccgatattctagttgatagaatttctgaacttaatgataattttgatattcaaaacagcgggttgggttttcctcttgaacaaaggctcatgactttttgccaaatgaatgcgtacaatgatgagttggttgtacaatatgaagggccaaaggaggaaacaattcatcccgagcttgatcatgggggacttttgtccattaaattttgcccttttgattactttttcttatctcaaaaaaaacttgctgctgaacgtagggagtacgagatgagttttcaagattttccctatcattattatggcaataccta

SEQ ID NO: 446792 - DNA, 471 bp, Triticum aestivum
  unsure (1)..(471): unsure at all n locations
gccctggcccncccaaanccaaaaangcccgggtcgacgagctnactaaacggcggccgtctagaggatccaagcttacgtacgcgtgcatgcgacgtcatagctcttctatagtgtccctaaattcaattcactggccgtcgttttacaacgtcgtgactgggaaaaccctggcgtacccaacttaatcgccttgcagcacatccccctttcgccagctggcgtaatagcgaagagcccgcaccgatcgcccttcccaacagttgcgcagcctgaatggcgaatgggacgcgcctgtagcggcgcattaagcgcggcgggtgtggtggttacgcgcagcgtgaccgctacactgccagcgccctagcgcccgctcctttcgctttcttcccttcctttctcgccacgttcgcgggtttcccgtnaagctccaaatccgggggnccccttaagggtccnattttaaggctt

SEQ ID NO: 446793 - DNA, 99 bp, Triticum aestivum
gggaagtagaacaaggccggtttcgaaggaagttatacctgagggtccccgggatgtcgttaggtgggcggcggaaggccggatctgccaacacaacgg

SEQ ID NO: 446794 - DNA, 73 bp, Triticum aestivum
  unsure (1)..(73): unsure at all n locations
cgggcaatggaaaatgtangtgtgntntctcggatactggaaaatcaaaacaaaagaacaaaaagagaataac

SEQ ID NO: 446795 - DNA, 156 bp, Triticum aestivum
aggagacgtggttttgttcctttccagttttcactaggatagagcactttcatttgcaggctatttttaacagcattgtctcccaaatagaacagccaagtcacattctttgcaatttatggattcacatttacacctatttttcacagcccatgt

SEQ ID NO: 446796 - DNA, 188 bp, Triticum aestivum
  unsure (1)..(188): unsure at all n locations
gtngcctttnntcnccnnntccgcccatcngtntnctcacnccatcactngcatttagggccncatgtccgagtanctatcctcncaatatatcgtaggcncatctactcnatcntacttcactgtacgacgtgntctgttggctgaaangctnnccggcataggtnncnattcatgnancaagnctg

SEQ ID NO: 446797 - DNA, 262 bp, Triticum aestivum
gtattttgaagcaaatggcatttaattaggatactttatctttattagattgtatttccttgtctcttcccgtgttgaattctctccatgcgtatagccaaaatatatcttttacaaggggtggcgttgatgctttgctgcaatcttatgaagaaaaacttgaattagaagtttctactctacaagaattttataatgagtgggaatccaatattataattaatattaaaaattattatcgatatgcattgtgtgatttggg

SEQ ID NO: 446798 - DNA, 391 bp, Triticum aestivum
  unsure (1)..(391): unsure at all n locations
tttttggcgacnggcnntanatngccattcgncgggcccacggggggaantaaaaccncancnnacananaaatttanngcggccgctctagaggatccaagcttacgtacgcgtncagcgacgtcatanctcttctatggtgtcacctaanttcacttcacgggccgtcgttttanaccgtctngactgggaantccctgccnttacccannttantcgccttgcagnacatcccctttcgccagctggcgtaatagcncnccngcccgcnccgntcgcccttcncancagttnccngcctgantgncnattgggancccccctntnncggcgcnttatncccgggngntntntnnttncncgccgngncntggctncacttgccannng

SEQ ID NO: 446799 - DNA, 490 bp, Triticum aestivum
  unsure (1)..(490): unsure at all n locations
ggaataaagnanttctttctttcgtttccntacattactctaaangnccgggccccacggctnaatcaaanggcggccgctctananggttcnaantttanttnncgtnnatgcgacgcatagctcttctatagtgtcacctaaattcaattcactggccgtcgttttacaacgtcggactgggaaaaccctggcgttacccaacttaatcgccttgcagcacatccccctttcgcagntggcgtaatagcgaagaggcccgcaccgatcgcccttcccaacagttgcgcagcctaatggcgantgggacgcgccctgtagcggngcattaatcncggtgggtgtggtggttnccgcagcgtgacngctncacttgctagcnccctatcgnnntgctcctttcgctttctttcttcctttctcgccangttncccgggtttccccgtnnaancttctnnatcnngggggctctttagngttncaattttt

SEQ ID NO: 446800 - DNA, 350 bp, Triticum aestivum
cggggaaaaatatgatgaatgacaaggcactggttcgcaacttagctgcatgtgaaactatgggctcagctaccaccatctgcagtgataagacaggaacactaacacctaatcatatgagtgttgtcaagacctgcatttgtggaaatatcagagaggttaacagtcctcagaatgcgtctaagttgtgttcagaacttccagaaaatgttgtcagaactcttctcgagtctatatttaccaatacaggtggtgaggttgttattaaccaagatgggaaacaccagatccttggtaccccaacagaggcagccatattggagtttgcaatgtcaataggtggaaacttt

SEQ ID NO: 446801 - DNA, 275 bp, Triticum aestivum
atttgctcgacttctggcacgtttggcagtttatcacttttattcaccaacgcagactctagattcatgtgaaacttgtcacacactcagataccttggcatggggccatggttttttcagcagttaaggaatgttcaacgagtttgacataatgttcacacacttacaactttttcggcacttattcgatgttctggtttcaaaagtctaacctatccacagctccatgttgggggaaactccccttggattggtcacagttttttcgccattt

SEQ ID NO: 446802 - DNA, 325 bp, Triticum aestivum
catctacgtcgagcccgaggaccgcaagggggtcttctggtacagcaacaagttctagccgtcaagatccatcaacggtgctcgagaaagaactcagagaagagatccgaccaagtaattccatccatctacctacagtcatatggttagtctttagatagcagagggcatttgggcacaaaagaagacgactattaccgtgccagtgctagaagagctgagtggtgcaaggaagagtagcgtgtccgtgactttggtcagttccgtcgttactttttctctgtgttccagtcgtcggcttaagtttgggcggctgtcgtcgtcg

SEQ ID NO: 446803 - DNA, 391 bp, Triticum aestivum
gcgggcgtgctatgtgctaatcacgatagattcggtcgggcccgcgtcgcctctgtgtcgactgtcgtccgcaatgattgggtcgggccccagatgacatgggtgggttagcgtcgccgtgcagcatccattctaagttagtcccacctcggtcgccgaaggatgtaccgatcagtttatatagccgcctccggtattccatgcatggtcatatcttaaattgttatatacctctatatatctgctccgcaatacactatcaggcaatgaactgccctggcagttaggtaaagtcattatacaatattaaatatgtttactttgtcattttttttaaccttccaactgtgaaacattttttttgaaatattgcctcccaacaccatttttt

SEQ ID NO: 446804 - DNA, 491 bp, Triticum aestivum
  unsure (1)..(491): unsure at all n locations
gntaaagaattttttttttttccgtacngtagtatctnatnggccnggccnttncntaagtnaagtcgtnctagatgatccaagcttacgtacgcgtgcatgcgacgtcatagctctttatagtgtcacctaaattcaattcactgggccgtcgttttacaacgtcgtgactgggaaaccctggcgttacccaacttaatcgccttgcagcacatccccctttcgccagctggcgtatagcgaagaggcccgcancgattgcccttcccaanagttgcgcancctgaatggcgaagggacgcgccctgtagcggcgcattnagcgcggcgggtgtngtggttacgcgcancgtnccgctacacttnccaagcgccctaagcgcccgctcctttcgctttcttcccttcctttccgccacgttcnccggggttttcccgtcaagctctnaatnngggggctccctttnggggtncgatttnagtgctttacg

SEQ ID NO: 446805 - DNA, 192 bp, Triticum aestivum
aagctagtatatgatgatcatgaaaacgacatcctccttgttggagatgacccatgggaggagtttgtgagctgtgtgaagagcatcaaaatattatcatctgttgaagtgcaacagatgagtttggatggcgaccttggcggtatcccttcacaaacacaagcctgtattggttccgatgatgcaaatgca

SEQ ID NO: 446806 - DNA, 52 bp, Triticum aestivum
  unsure (1)..(52): unsure at all n locations
ttnggnttttggttntctccttgntgtttntttttgtgctctcttntngttt

SEQ ID NO: 446807 - DNA, 58 bp, Triticum aestivum
  unsure (1)..(58): unsure at all n locations
atnttgtntnttctttttggtttttttnntnttntttttatttgtcattttttgntgt

SEQ ID NO: 446808 - DNA, 354 bp, Triticum aestivum
agccgcgcacgagatccagcactcgaggggatcaaccctaggcgcgggatgcgggtgatccgcctcgtgtaagaggcgaacctgtcgcccctcatggtgtacttcatggccaacaacgcgtgcttgcctgaccacttatatgcacaccacgacaagcccctcgaggagacagcagtcccacgtcttgccttgatctgatttcgttggcctgtggtcaactttctagcccatcgatacattatttttttccattacattgttgccgttcatatcgcttagcttctgcctcggttcgttgcttcattcagaactatgcctcttggtcgcatgttcttctcaatgtccgtcccttca

SEQ ID NO: 446809 - DNA, 345 bp, Triticum aestivum
gggcggacggagacggtgcacttcgacaagatcacggtgtggttcaagaagctcagctatgggctcagccaggagcaccgcgaccccgtgctcggtctgcgtcagggtatacatgggcgtcaccaccatccagctcgacgagctcgccgccgagaccgccgccgcgctcacggcctcccagcctgactatgcctccctcgcggcgaggattgttgtgcccaccctgctgccaagtgggaatactctgtgtggcgcttgtcagtagagagcattctggtacaaaggtacacgaactaatagggaaacttctgtcattttctttggtctctgatccataaatggtcc

SEQ ID NO: 446810 - DNA, 473 bp, Triticum aestivum
  unsure (1)..(473): unsure at all n locations
tggtccgngtttntttttctccacctgtttntttataaggnccggcctntntttcaacantnttttntgttngtttttntttgtttnatttttttgtntcttttttttttttnntttttttttntttctttttntttnttttttttctntttttgnngnntttttttttttttncttttntttttttttcntgtttttttttttttcttttttttttttttctttttttttnttntctngtncnttnttttctttttttttcttttttttctttttttttttttttttatttttttttcntttgtgtttnttttttttttttattnttctntttntttttttttttttttttttttttttttttttttctttttttntttctgagtttttctttctgtttttntnttttgagtttttttttttttctantttnntttttctntgttttttntttttgtctntntttacnttat

SEQ ID NO: 446811 - DNA, 163 bp, Triticum aestivum
gagataacacatggtgattaacaagtggaaggagtttgcatgtgagctgaactggagtatatgacctgaaaataatgcatgtgcattgatggagggtgtctcaggactatccttcgtttgtctgtttctagaccttttttattaatatgtatccatctcgttt

SEQ ID NO: 446812 - DNA, 299 bp, Triticum aestivum
ggagagcaagcaggacggtaagaagggagcagtcgccgtcccggacgccaaggggaatgggacggcgaccgaggaggctgccgggccgatcaaacacgatggcgtgggccataacgaggttgtccccgatcgggacgacggtgtggcatcgacgagcgacaccatcatcgtcgtcgaggagattaggaatggccatcccgtcgaggtgtcgatcgcgcctaccgtcgaggcgggaagagaccgtctgcggtgcgaggattatgaacggtggtcggtccatgcgaatgaagacgacgcgg

SEQ ID NO: 446813 - DNA, 116 bp, Triticum aestivum
  unsure (1)..(116): unsure at all n locations
tnttgggggngncgttggtttgtntctatnttcttgtgtgtttnttttgantctgttcttnttgggtngtgggtatctgttggtcntcnntgtgttgtnttntgtgtnntttttnt

SEQ ID NO: 446814 - DNA, 324 bp, Triticum aestivum
tgtttttttttttttatttgtaggggttgggttttttttttaatctatttttttgatatatcttcttttatggggtttttatgatgttatttttttgtttttttgtttttttttttttcttttggttttttttttgtttttggttttttttttgtttgttgtttttttttttctttttttttttttttttttttttgtttggatgatttgttctttttggtttgttgttttgtttttctttatttttttttctttttttgtatttgttttttttttgttgtttttgtttttttttttttttagtttgttttttctttggttttt

SEQ ID NO: 446815 - DNA, 245 bp, Triticum aestivum
cgggcccaaacagagcgtcacacgcaagtatcgagtgtcgtgtaggacaaccatcgactgcatgtggccaaaaaaatttatgtatgaaagggttgtgtaatgttttgaataacaatttggcgagtctaatgtggcatcggcctgcctaacaaaacggccaacccacaccatggctcacaactcgtactgtactacgacccagccaccacccccacacgcacacacccaaacagcacatcgtaaca

SEQ ID NO: 446816 - DNA, 497 bp, Triticum aestivum
  unsure (1)..(497): unsure at all n locations
gtggttanagtattttctttngtgttgtgtnttagnaatcgncgtttccactgnttcaataaattntttttgntttnnttttangtgntgttttntttttntnttcntttggttatngtnntttttttttgttttntttntttttntttttttttnnttttttttttnggggngtnnttttttttgtttttnttttttttttttntttttttgtttgtttgntttttttttttnttttntgttgtttttttttttttttttnttttnttntgttttttttttgtgtttttttttgtngntgttttttttttttttttttttttttnttnttnttgttntttttttgttttntnttgttnttttttttttttnttgtcttntnttttntttttgnntttttgntttnttgtttttttcttttttttnttttttgttttttttttttttttttncttttttttttgtttnttttttntttttttttttnattntttttt

SEQ ID NO: 446817 - DNA, 481 bp, Triticum aestivum
  unsure (1)..(481): unsure at all n locations
gcgngtngcagttcctcctttctcnctctgcaccnaccanttggccggccntctagagatcaaaagcttacgtacgcgtgcatgcgacgtcatagctcttctatagtgtcacctaaatcaattcactggccgtcgttttacaacgtcgtgactgggaaaaccctggcgttngggcanttaatcgccttgcagcacatccccctttcgccagctggcgtaatagcgaanaggcccgcccgatcgcccttccnaacanttgcgcancctgantggcgaatgggacgcgccttgtagcgcgcattaancgcggcgggtgtggtggttacgcncancgtgancgntacacttgccangnncctagngcccgntcctttcgntttcttcncttcctttctcnccacnttcgncngcttctcnntcnnnctcaaaatcgggggntnncttttatgtgtttctgatttantgncttatngnnctncng

SEQ ID NO: 446818 - DNA, 301 bp, Triticum aestivum
caacgcacaccaggtgttcgacgtaatgtttgcacggctgtcggtaaaagaaaatcacttcgatccatataccgtttcaaaggttatatgcgtgttccatcctaagcatacttatagttctttagatacaacttttgtgatattttagcttaagcattagcataggactggccactgattattgcagtttggaaatatgttgaaagaaaactttactgtcaaaaaaccctccaaatgaaataggatgcattgttaaatggactgtgccttaacccttgtttggtataaacttcatggatga

SEQ ID NO: 446819 - DNA, 515 bp, Triticum aestivum
  unsure (1)..(515): unsure at all n locations
gtgngttgtngttttntttntgtntttttttgtntntctnnaaaagttccgncccttttttcaanacaatttnttnnttttttttttnttnttttttnttttttttnntttntcttttttttttngtttttttttntttttttttttttttttttnttnttttttttattttcggggnntttttttttttntgtttttttttatttttttntttttttttttnttntttttttttttttttttttntttttngttttttgtttgttttttnttngttttttgttttttgttnttttttttttttggttttttttttttttttnttttnnttttgttgtttttntttttttnttnttnttttttntttttttttggtttttttttttttttttttntatttttttntntttttttttttttttttntttttttttttttttntttgttnttttttntttgtttctttttntttttttttttttttgtttntnttgntttnnttttnttttttnntt

SEQ ID NO: 446820 - DNA, 418 bp, Triticum aestivum
cgctgaagcggctgctgcggaaccgcgtgtcggcgcagcaggcccgcgagcggaagaaggcctacatgacggagctggaggtcaaggccaaggacctcgagctccgcaatgccgagctggagcagaaggtctccaccctccagaacgagaacaacacgctccgccagatactgaagaacacgacggcgcacgccgggaagaagccgagcggcggcaaggggggagacagcggcaagaagcaccaccaccacttcggcaagggctagtatcaagaccgagcttctctgctgcgacgatggttgctacgaaccacccaacgtctgcccatctgaccattgttaggacactgctgttgttgtttgctgccgcagtttgacgcttggcttgtcttcttctttttcactcctctcttctccac

SEQ ID NO: 446821 - DNA, 386 bp, Triticum aestivum
acatcttgtcaaggctgctccggcggacaagtcgggagctgctgtgcgagaacggacctgagctgtgtgcggtggtgtcataaggagcctatccatctccactagaattatcccaagtttcacttcacatcgtgatgttgttttacctttttcctgtaatccggtggataccctcccccgccgggctggcctggttaccctatgccatttgttccggtgcaagggtacggagctccacctggtgcgtaacctcaccccggaggattgcctccaactcggttgtcactagaacattaccaagttaacgtgtgctggttatgccgtcgatgatatatacacgaacaaagtcttcaaagaaaggaaaaaaaggtaagggtggtggcttc

SEQ ID NO: 446822 - DNA, 68 bp, Triticum aestivum
  unsure (1)..(68): unsure at all n locations
tgtcttntggntttnttnnctctgtcttctgtttttcttttgtnttgtttngtgtttcnttttcttct

SEQ ID NO: 446823 - DNA, 409 bp, Triticum aestivum
tttttttttttttttttttttttttttttttttttttttttttttttttcttttttgtttttttttttttttttttttttttttttgttttttttttttttttgggttttttttttttttttttttttttttttttttttttttttttttttttttttttttttttttttttttttttttttgttttttttttttttttttttttttttgtttttttttttttttttttttgtggtttgtgtttttttttgtttgtttgttttttgtgtttttttgtgttttgtttttttttattttgtttattttgtttgtttgttgttttttttttgttgtttttttttttttttttttttttgtgtttgtgtttgtttttgtttgttttttttttttttttgtttggttttttttt

SEQ ID NO: 446824 - DNA, 224 bp, Triticum aestivum
tacacacctacctcggcttagacctttgaacgtcgggccggtaggtttcacgggccagagttagaaaagtagtttccttctactactaaacattggtctcacggggtttcgggcgagtagagggtcttttggcgcttcgtttgatattttgatacagaagcagtcacatttagtgcactcatcagctttgaggtttggtctatactgacagcggtttactttga

SEQ ID NO: 446825 - DNA, 297 bp, Triticum aestivum
cgggcacaagcatgtgttttgcttggagcgtcattttattttattttgttttgcttgctgttttattttattttgttttgcttgctgtttgtatagcataccaagatctgaaattcgggggtgttaaatattcttcagatatttacttaattattcgattacacattggatattaacgatatgactttcggactagtttgtcgttgtcgctagtgcactgactcatatctttttataacattgtagttgtcattatttatgtagaaataagcataatgctcatgcttaaactagaat

SEQ ID NO: 446826 - DNA, 308 bp, Triticum aestivum
tatccatcaggcaaggatatgatttggtatgtatatgtgttggtatgcttgtcgaaagtattttcatatgtgtgtgtatatatatatgtgaaattgaatgaatttaaaaaaaaacagagaaaacatgggctatacatgctctttgccgtctgctggtacacagcaaagagctttgctgtctgctggctgacagcaaatatgccatgtgtcagctacctgtccaacttggggcaataagctggctatttggatgccttgtcgttaactggcaaacggcaaaacacgccgttaacccactaaccgcctgt

SEQ ID NO: 446827 - DNA, 237 bp, Triticum aestivum
cggctgaaagcaagtacgaaatcgggtccttcatgtcagccacgctaagctgcgaccaccgggtcatcgacggtgccatgggtgcggaatggctaaaggcattcaagggctacctcggggacccgatgaccatgctgctgtaagagttctttttctctgctgtaaatcatgatgatgggagcagtttttctgtgtagctctcacaaatatagaccacactcaccacgcctgattttt

SEQ ID NO: 446828 - DNA, 62 bp, Triticum aestivum
  unsure (1)..(62): unsure at all n locations
gntttgtgntnntgttcttntttttgtttggntggntttttgtnttttttttgggttttctg

SEQ ID NO: 446829 - DNA, 51 bp, Triticum aestivum
  unsure (1)..(51): unsure at all n locations
ttttttntttttntgnttttttngtttngttttttntnttttttttttttt

SEQ ID NO: 446830 - DNA, 222 bp, Triticum aestivum
cgggattaaccaatattctattattcttattctgttggcatcttggtagaacctaccttattggggttttctaatgttacctttatttattttataacttatctggtgagtatttttaggggtgtgcttacgttattgtgtttctgaatttggtatgatttgtggttgtctctttggttcgtttgttgtattttttcgttttagttatttttgttctttggt

SEQ ID NO: 446831 - DNA, 342 bp, Triticum aestivum
  unsure (1)..(342): unsure at all n locations
tttgttttntttnnttctntgttttgtggtntgtgtttncttttcttgtgtntntnttntcttttttgcttgttttggtttttttttttttntttngggggtggngttttnttttnttttntttttnttntngtttttttnttntttntttnnttcttttnttttgtttttgttttttttttnttttttttttttttntttttcttttttttttgnggttctngttttggtttttcttcttttttttttttnntttttttnttngttnttttggtngttgtnntntantgttttntntttgnntttttctctttttgcttttgttttnntttggtgntnttc

SEQ ID NO: 446832 - DNA, 317 bp, Triticum aestivum
acgggggcatcaacgaggaggatgaggatggtggatatgttgcgctggatggtggagcagccgaccagcctcaacttgaccgtgcctctagcaacgaagcatgcgcgagcatgccgcttgccgctggtgatgatcaagccaaactctccagtcggccactcctctatccaaaattgccgcctccacagagctgcgcaattcgcccgttgctctcttggcccgatcttgcatctttaactttgctttcctgcttgtttactttttgaatacctattcgttaaatttgcgcacttccacccagtggggtgtgtatttat

SEQ ID NO: 446833 - DNA, 254 bp, Triticum aestivum
  unsure (1)..(254): unsure at all n locations
attgtttctttctcggccccacttttggcctattgttatggactggttgantcttgttgcttttggtgattacatgttccgtttgctgatgtttaggatgtcaatgtatcttgatctcgccgaactaatgattggaagcatgatacccttcaacgtcgtgtccataatggcgttgattatttcatatttatgcatatttagtaagatgatgcacttttctgggaagaaacatactttgatttttggtcgatatc

SEQ ID NO: 446834 - DNA, 226 bp, Triticum aestivum
gagatctcaatgaaagagatttcggtctggttaaggtaacgcaagttatgccagtttgtcgagtctagccttgtaaacgccgggccctccgtatgtgggaattcaacccggagggacgaggagctattcaacatttcctcggcatgatgctcgaacaaatgtacaaatcgttctctggaccccaaataaagtgtccggatacctctaaggacgtgggtttgagctg

SEQ ID NO: 446835 - DNA, 492 bp, Triticum aestivum
  unsure (1)..(492): unsure at all n locations
gtgaanaaagaaattctncttantngggccnngtcancactnaacggggcccangtgtcagtgaaacaatttgccaactggtatactatatatgtttgccaaaaaaaaaaaaaaaaaaaaaaaaaaaaagcggccgctctagaggatccaagcttacgtacgcgtgcatgcgacgtctagctcttctatagtgtcacctaaattcaattcactggccgtcgttttacaacgtcgtgctgggaaaaccctggcgttacccaacttaatcgccttgcagcacatccccctttcgccactggcgtaatagcgaagaggcccgcaccgatcgcccttcccaacagttgcgcagcctgatggcgaatgggacgcgccctgtagcggngcattaagcgcggcgggtgtggtggttacnccaancgtgaccgctacacttgtccanngccntaacgcccggctccttttcgctttcttncttccnttttcgccangntt

SEQ ID NO: 446836 - DNA, 127 bp, Triticum aestivum
  unsure (1)..(127): unsure at all n locations
tttnttttctctttntttnttttntttcttttnttgtttgcntntgntttnttgttttncttgtgttttttgnttttccttngcgttgtttgtntttgttttnttctttttcttntgnttntatcnt

SEQ ID NO: 446837 - DNA, 110 bp, Triticum aestivum
  unsure (1)..(110): unsure at all n locations
ttntntttgttntgggntgtttttttntttttttnntntntnttnttttttgtgttttttggttttttttgtgtnttgttgttntttttttgtnttttttttnttgttnt

SEQ ID NO: 446838 - DNA, 513 bp, Triticum aestivum
  unsure (1)..(513): unsure at all n locations
gtgntngagtttttttttggttttttttgcttgnttggatnngngcgtccctntntggtaaanaaatntgtnttgggnttttttgtttnttgtgttttgngttnttnttttttttnttntgttntgnnttttngtttntgnngntgtttttttttttnttgttntntttgnnnggngtttttttttgttttntntgttttttnttttngttttgtttntgttttnttttttttngttgttttgttgttttggttgtggtntttgttttgngtttttttgttttttgnggtttttttntgtgttttttgtntttgttttntttttttttgttgngtnngtgttttttttntttgggtggtgttttgttntttttttttttttttgtttttttttgtcgtttttttnttttgtttgtttgttttttttnnttttttttntttngttttgttgttntntttttttntgtctgtttntttttgtnnttgttttttttgtttngtgtttntttttttg

SEQ ID NO: 446839 - DNA, 365 bp, Triticum aestivum
gggggttgttttttttgtttttttgttttttttttttttttgttttttgtttgtttttttttttttttttttgttttttttttttcttttttttttgtttttttttttttgttgtttttttttttttttgtttttgtttgttttttttttttttgtttttttttgtttttttttgtttttttttttttttgtttttttttttctttgtttttgttttttgtgtctttttttcctgtttttttttgttttttctgtttttctttttttctttcttgttttgttttgtttttttgttttttttttttggttttttctttttgttttgttttctttgttttttttttgtttttttcttttgttttttt

SEQ ID NO: 446840 - DNA, 538 bp, Triticum aestivum
  unsure (1)..(538): unsure at all n locations
gtgtntagaagtttntnatgnntntttnnttgacanntnnnannttggtcgttcccncnggtgaaataaaattttnttgnntnttnttnttaattttttttggtttaaggtcttttatnttatgnattnntttttttttttnttgntnttttttgttntttttntngttttgttntgtgngggtnatntgtgttttgtttgtgttattnttgtttatttttttntttgttntttttttttctnttttttnttnttttttttttttnttnttttntttntttttttgttttttttttttttnttttngtttgngtttttntttttnnttgttttgtttttntttttcttgtntttttttttttttttttttgttttttnttttgtttatnttttgnnttttttttttttttnttggtttttctttttttttttgattntgtttttttnttctttttctttntttnttgttgtttttntttntttttattanttnttnttttngtgntttattnttttttgtttttgttcttttttntgg

SEQ ID NO: 446841 - DNA, 66 bp, Triticum aestivum
  unsure (1)..(66): unsure at all n locations
tttttantgtgttgtcgttctgtttnntnttgtgttnatttttgggttatgtnttnttttngctnt

SEQ ID NO: 446842 - DNA, 311 bp, Triticum aestivum
acgggtctaaccaacaggcccaataaggcccatatacctcccggggggttccggtaacctcccggtactccggtatactcccgatttcacccggaaccattacgatgtccaaacatagggggcgagtatatcgatctttacgtctcggccatttcgagactcctcgtcatgtccgtgatcaaatcctggactccgaactaccttcggtacatcacaacagataagatcataataccgatcgtcagcgaacgttaagcgctgcggatcctacggggtcgagaactatgtagacatgaccgagacatgtctcc

SEQ ID NO: 446843 - DNA, 58 bp, Triticum aestivum
  unsure (1)..(58): unsure at all n locations
tntgtttctttngtntcgtcgttgttttttcttntnttntnttttttgtcttttttnt

SEQ ID NO: 446844 - DNA, 151 bp, Triticum aestivum
tcgtaggtgattatgtgatgctgaagtatcaatgatcccatttcacgttcgggttcgtgtaatgcatgcatgcatgtacattcaattcgttcactttcaaggtgtatgatttggactagtatttcacgtcgttgtttcgaaatctctcaat

SEQ ID NO: 446845 - DNA, 72 bp, Triticum aestivum
  unsure (1)..(72): unsure at all n locations
gggttttttngttttcgggtnttttttgnttnntttttttnatggtgtctctncttgttntgtttttatntt

SEQ ID NO: 446846 - DNA, 386 bp, Triticum aestivum
tccgccattttgggggatcacgagaggttcttggtccggttcggagagaccactgtagctttcagaagggcgggcccctgctgtccgcaggcatgagtgtgtatacgcccatgaattatcacgggctgaatcgctcccgtgatgcaacgcggcatactgagcctgggggggctcggtcacttctacgtcaatttcagcaaggccttcgggatgaacgtaacggtgatcatctcatcgacggggaagaatcacgaggtcctcgataggctaggcgccgactgcttcgttgtcaccagaaaggccgactaaatgaaggctgcgatgagcaccatggatggcatcatacacacggtgtttgcaaacatccccatggtccctctcttcgg

SEQ ID NO: 446847 - DNA, 365 bp, Triticum aestivum
cgacggggtagaatagggtgctatagctcgaagatgggaaggcaggagaaggaagaaggcatgagaaaagggaggaatctttatcctcttatataggcagtgtatatcaaacgccccccggcccgcccgctcaagccttaaaacttgcccgttcccatggggtcgtgcgaatggcatggttatattacccaaaccgtattgatgaggatcccgcaataagtggacacgatctccattttgacaagacatgtaaatagaggccgcgcctcgagacgctaagcgggaggcgaaaaacggtccgaaatgctaaagaggccacatgtggcgtttcgccgaaaagttgtgagttgacgggcattattttg

SEQ ID NO: 446848 - DNA, 90 bp, Triticum aestivum
  unsure (1)..(90): unsure at all n locations
tntttcntttttntctttttttttttttnntgttttttttttgntgtttnttttttgnttttttttnntttgtttttttttttngtnttt

SEQ ID NO: 446849 - DNA, 463 bp, Triticum aestivum
acttacgcgttcattttttctctttttttttctttctttttttttttttttttattttttttttttttttttttttgtttttttttttcttttttttttttttcttgggtggttttttttttttttttctttttctttctttttgtcttcttttttttcttttttctttttttttttttctttttttttttgtttttttttttttttttttcttttttttttttttttttttttttttttctttttttttttttttttttttttttttttctttttgtttctttgtttttttctttcttttttttttttttcttttttttcttttttttttttttttttttctttcttttttttttcttttttttttcttcttttctctttgtttttgttttctcttttgttttgtgttttttttttctatttttttttatgtttttctctgtttttctttctttttttcttt

SEQ ID NO: 446850 - DNA, 64 bp, Triticum aestivum
  unsure (1)..(64): unsure at all n locations
atttgnttttttttantcttnttttctntttcttgtttcnttttntggctngtnttctcttcnt

SEQ ID NO: 446851 - DNA, 99 bp, Triticum aestivum
tcagtatcaatatttttatactatattacggtggtgtattgccgaaatgtctgttaagctgatttttgtttcagttatatatatctttatccctctcat

SEQ ID NO: 446852 - DNA, 356 bp, Triticum aestivum
gtgtagggattgccatgtaacgattgcactagagctatgaatgctcaacagaataaaactagtgagtgtgcatccaactcgcttgctcatgggggcctagggcatttgaggaagcccatcttaggaatatacactccaagttccataatgaaacattcccactagtataaagcgacaacttatgagactcactacatgaataacaaggtgctattttgaatcacattatatgagattcactacatgaagaacaacgtgctactttgaagtacatgtgttgaagctacatactagcattgccccttttttttcgtttttgggccttttttggcctttcattttttctctgtttgctt

SEQ ID NO: 446853 - DNA, 486 bp, Triticum aestivum
  unsure (1)..(486): unsure at all n locations
gtgtgngnatttcttctnctctttcnttgcttgactgtaantggccgnccctagaggataacaaatacgtacgcgtgcatgcgacgtcatagctcttctatagtgtcacctaaattcattcactggccgtcgttttacaacgtcgtgactgggaaaancctggcgttnggcangttatcgccttgcagcacatccccctttcgccagctggcgtaatagcnaagaggcccgcaccgtcgcccttcccaacagttgcgcancctgaatggngaatgggacgcgccctgtagcggcgattangcgcggcgggtgtggtggttangcgnaagcgtgacngctacacttgcgangcgcctagcgctccgntcctttcgctttcttcnnttcctttctcgcnangttcgccgngctttcccggttannctctnaaatncnnngggtttcccttttangggnttctgantttatagtgnctttnntnnctgg

SEQ ID NO: 446854 - DNA, 80 bp, Triticum aestivum
  unsure (1)..(80): unsure at all n locations
gttttttttttntgtttnttntgntttgttgttnttntattgttttnttttttttttattttttttttnntgtttttgnt

SEQ ID NO: 446855 - DNA, 110 bp, Triticum aestivum
  unsure (1)..(110): unsure at all n locations
cnctctgctggntctganttccgnggacgtcntcgntccgnncgtntgttgaactcggggtgccgtacnttcggtacttgatcggtccgctcgtgnncncgtncgcttnc

SEQ ID NO: 446856 - DNA, 395 bp, Triticum aestivum
tagttcacactcagggctaaggtatgtaccagtagctatgtgtttgatctctctctctctctctcgtgctcttgatttggcacgatcttgatgtaccacgagctttgatactatagttggatcatatggtgtttctccccctctaccttcttgtgatgaattgagttttacctttgaggtttcactattatggatttgagaactcttgatgtatgtcttgcgtgggatacccgtggtgacaatggggtattctattgattcacttgatgtatgttttggcacacaactgcggattcccgaggtgacattggggtaatctatgcatatgggttgatgcacgtgttttccttgtttctcctatagaaagcttggggcactctttgaagttctctgtg

SEQ ID NO: 446857 - DNA, 213 bp, Triticum aestivum
ttttattgctcgatgcactacatgtcgccacgccatttcttcaaacctacttcacctcccgactttttttgcaatccgtatgcacaattcacagcgatctcacggcttgtgcccacgttctgacaccatctgcgacttttcagtcatttaccgatttgtgtagaaaccttatcgcgcgtcaaatggtccatcactacaaagtcgaactcggaa

SEQ ID NO: 446858 - DNA, 206 bp, Triticum aestivum
gagacctccgtcgtggtccccgtcaacagcgaggaggacgcccgcatgggctaagcctccgtcgtggtctccggctaatgaaaatcttacaaagagggttccggcctccgtcatggtctccggcaagggcaaggacgccgtcaagccctcatgtacggcgcagtatccctgcgtcaagcggcttcttgagcggcgcctcctctcct

SEQ ID NO: 446859 - DNA, 61 bp, Triticum aestivum
  unsure (1)..(61): unsure at all n locations
gttnttcttgggctntgtctnttctagtgctntgncgtcncgggggccnttttcnggggtc

SEQ ID NO: 446860 - DNA, 77 bp, Triticum aestivum
caccccgcccgctggtgtcgctcatggcttctttgctgtcgcgctcgctctctctctcttcccgccctgtcccgttc

SEQ ID NO: 446861 - DNA, 116 bp, Triticum aestivum
  unsure (1)..(116): unsure at all n locations
ttnngggngnntattttttttgttttanttatcttngnanttttgtttttnnttcatttcttttttgttttcttggtctcattagttatttnttngttggntntttttggnttcnt

SEQ ID NO: 446862 - DNA, 62 bp, Triticum aestivum
  unsure (1)..(62): unsure at all n locations
cccntccctgccgtctcnctgtccnccctcgncnntccttctncctcgtcctctcccngntc

SEQ ID NO: 446863 - DNA, 313 bp, Triticum aestivum
  unsure (1)..(313): unsure at all n locations
tngttttggngtgtgnnnttggtttntgtgttnttntttttttntntgtttggtnttttgttttttttnntgggggggnnggngttntttgcttntttntattttgngngtgnttttttttgtttttttttttttntttntttntttggttttnttttntttttttttttttttggttntttgttnttnttttngttgttgtgttttttgtngtgttttggttttggttttntnttctttttttnttgtgntntttnttnttttttttttnttnttgtttttgttttttttttgtgnntnntttnttggtntt

SEQ ID NO: 446864 - DNA, 191 bp, Triticum aestivum
catgcttcatctttgtcatattgctttgcattaccatgtcgttgacatcgtatttgtgccaaatccacctttcataattatttcatacatgtcgctcttgggggggtgcatatcccggtatacctcactgcggcacgcacatacactcatattctgttccaagtactgccttgtacttcctcatttctccc

SEQ ID NO: 446865 - DNA, 422 bp, Triticum aestivum
cgggaaagagttattcatcatcgaagggcaaggtttctgcatcgatcgaggatgacgatgatgacttcatgtagtttttatgctgtatgttgtgagttcagttacataccatttaatttatttgtagttatatctaattgtttgtaatgtctcgttgtatgaatattatgttctatctaaatttgatcttgtagttccgataacagagtactaaaatagagtaggcatatgtctcgtacataagtacatagtcatttttctcatacatagaatagacataagtctcacacagaaatagatggtaatgtctctactgatagatagaagcgtcagtgacgacgtctggcctggcggggaggcggatctggaatcagggaccatcccaacctgtcgggtgccctaacatgacgatgaagaatctc

SEQ ID NO: 446866 - DNA, 496 bp, Triticum aestivum
  unsure (1)..(496): unsure at all n locations
ggagtgaaaagagnatttcttntttttnggcctgtcattnctatacggggcccnnccggtccaaaattaantacgcgtgcatgcgacgtcatagctcttctatagtgtcacctaaattaattcactggccgtcgttttacaacgtcgtgactgggaaaaccctgtgcgttacccaggttaatcgccttgcagcacatccccctttcgccagctggcgtaatagcgaanaggcccgcccgatcgcccttcccaacagttgcgcagcctgantggcgaatgggacgcgccctgtancggngcattaagcgcngcgggtgtggtggttacgcgcagcgtgaccgctncacttgccaacgccntagcgcccgctcctttcgctttcttcccttcctttctcgnnangttnggccgggttccccgtcatagctctatatcggnggctccctttannggntcccgatttagtgctttaggtntncttgancncnnnnnaant

SEQ ID NO: 446867 - DNA, 486 bp, Triticum aestivum
  unsure (1)..(486): unsure at all n locations
ttnnnngcccgtancngtccacaaatcccgggtcgacgggtactggcaggtatacgcgttcttgcaaaaaaaaaaaaaaaaaaaaaaaaaaaaaaagcggccgctctagaggatccaacttacgtacgcgtgcatgcgacgtcatagctcttctatagtgtcacctaaattcaattcctggccgtcgttttacaacgtcgtgactgggaaaaccctggcgttacccaacttaatcgcttgcagcacatccccctttcgccagctggcgtaatagcgaagaggcccgcaccgatcgccttcccaacagttgcgcagcctgaatggcgaatgggacgcgccctgtancggcgcattagcgcggcgggtgtggtggttacgcccancgtgaccgctanacttgccaacgncctaaccccgntcccttcgctttcntcccttccntttcccgccaaatttccccgggtttccccgtaaaccccaaaacng

SEQ ID NO: 446868 - DNA, 307 bp, Triticum aestivum
ggctgaccactgggcgcctactaacaccaacaggcgcacctgacgctataccgtgtgttttcaatcaagaagcctggaaaaaacgctgctgcaaaaggcaaaacaacggctagggggtggacttgtagactgggatgtatcccaacacgtggagccgcggacaatgcgtacgtgcgtgcacacacacatgtgctgtacatgtgatgaatactgaataatcgagtcagatgaccgcctgtggtcgtcgtctcgaccgcctcgtacatgtagacgttgcacaacacctgtacatgtgattgaataaccg

SEQ ID NO: 446869 - DNA, 101 bp, Triticum aestivum
  unsure (1)..(101): unsure at all n locations
gcnggggngtgctgngggnggggttntttttggggtntgttnngttggngtttgnggccngttttggggggnttttngngtttggnggtttgttggnggtg

SEQ ID NO: 446870 - DNA, 374 bp, Triticum aestivum
ttatttgggcctagaggaacgcattgtgaagtaacaagtagatgattggttgctacagtgacacaagcttaaaccctactttaagcgttgcttcgtaatgggctgatttggatctacatgtatcatgctatggttaggtttaccctaatacttcgtatgtaattgcggatgcctgcaatacgggttaatcatacttgggatgcacgtccaagaaaggacagtattcaagcactggtccatccacatatcaaattatcaaattaatgaacgccaatcatatgaccttgatcaaatctagcttgacgataattcccatgtgtcctcgggagcgttttccttcatataagaacttgctatcgattgtcctttgctac

SEQ ID NO: 446871 - DNA, 294 bp, Triticum aestivum
catgtctagctgtagtcgtcgacgacatcgtctgcgcatcggttcctagtggacaactgtgatgtgtgctgcaggcagatggtggggtaacgtggctcgggcggataggttcgtgtcgtgtcccattgcggacgactaacaggtgctgatacgtggggtgaagcatgacctagggaaccgcttgtccggccgtgcacggtgtttccaacttatcatccccatcgtcctgaattatcggtcttctccgctttcggttacattggggatatcggctgtcatgatattacatctgga

SEQ ID NO: 446872 - DNA, 428 bp, Triticum aestivum
cggggacactgagatgtgtgtggagaggaggtaacaaaaattatcttgagtattgtccggagggaggagagtccggaatgcatcaatgatacggttttggtgctcatacccaaggtaacaagccccactgctttatctcagtatagacctatcagtttgtgcaatgtgttatacaagatagcatccaaggtaattgcaaatagactgaaactcattctgccagacattatctctgaggagcagtccgcttttgtccccggaaggttaattactgacaatataatttcagcttatgagtgtctgcactttatgaagcggtctagatcaaaatcaaataatttttgtgcactgaaattggacatgatgaaggcctatgatcgggtagagtggacatatctgagggctatcatgactaaacttgggtttgc

SEQ ID NO: 446873 - DNA, 380 bp, Triticum aestivum
actgagaaactgatgcggatcgtatctgacgatggcaggcggcgacttgtgatcatacttctgaacgcacagtttcaaaacatctggagtgtcacctaaggtaccaagtccttgcaccagatttccttggatcttaatgtgagacatttgtcaaaggaggcttgtcacatgttgccgaagacggtgtagatattcccagttatgacaaagctccagcacatgctcatttccaacaattgaaactcacttttgatttgctataactttaatatcgaagatgcaaaacactatcagacactgaataatgcaataaggttttaatatgtaaaacgatcttgttgtaggtcgtatcacacgatgtgtacagacatgatgccaac

SEQ ID NO: 446874 - DNA, 399 bp, Triticum aestivum
attcccgggtcaacggggatcacacagaagccgttcagcacatgcagaagcgacggcagagcacaatattgccggccatcacagcgagggcatgatggagaagatcaaggacaagatcagcggcgacggccacggcgacggcaagaaggacggcgaccacaaggagaagaaggacacgaagaagaagaaggacaagaagcacggcgagggccacaaggacgacgacggccacggcagcagcagcagcgacagcgacagcgactgagccaactccggccgcgctccggcagcagcgtgcagtgtaggcgaaatcgatgaacgcctgggacaagtgtggcatacatatatgttgcagggtttggagcgtgtggtaccatatgtatgtaatgcgtgacatgt

SEQ ID NO: 446875 - DNA, 411 bp, Triticum aestivum
  unsure (1)..(411): unsure at all n locations
atttgaaaaaccataaaaacctacatgtaaaaatatgtaatcttacctgccagcaatctattagtaggttggttaaaaaatatgcaagaaattagcatgaaatctttattaactatagatacattttacacatatatcacacggtgtttgacttctcatcctcttaggttgcaataagatttttactggtcattacttaggcaggctctaatccgttatcagtgagtatagttagtgatagtgttgtgggggctcggctagagggttatcacgagccgtcctaagacatactatcagtctgtgatgatgtgttcacgtcaacctcacccaaaatggactgctcaattgattggctcctaattaaaattagttagtctgttgattcanaattaatcctccattttttccgct

SEQ ID NO: 446876 - DNA, 102 bp, Triticum aestivum
  unsure (1)..(102): unsure at all n locations
tggnnanntttttcnttncttttgctgatcctgcttgttncttcgtctttttatggncgttgtgcgtgntttngttctgtntntcacgttctttngntccta

SEQ ID NO: 446877 - DNA, 376 bp, Triticum aestivum
acaagtgcatgctttgcaatgtaagcatcacgcgaaatattgtataacggagatatgcattaaaggcagatggtgccgccgcggtcgagatccttcggaccgaggtggcccgggccaaaaaagcaagccccggagtaacagtgccgcttgccaagaaggaatctgcagagtttaaaggccgaataggctgctcggcgccaatgcggggagaaaatatccacgatgacgcgtgagctaaaagatgccgctagccgctgtgcaatccttgatgaggataataaagccaaaacggttgatcttaacaaggccttacgagaggcgaaggaagcacggtccgaatctagagcgccccgggaggagatccgacaagctgggg

SEQ ID NO: 446878 - DNA, 375 bp, Triticum aestivum
ccgggtacacgggcaaggcgcagtgcagttggagatcaagaagggccacatgtacttgtctcgtgggtgggagaagttctaccgtgcctacgacctgcagctggggtacttccttctcttcaggtacgacgacgatgccaacatgctcatcgtgaaggtgttcaacaagactatgtgtcgcatgcgctacgctgccgatgatgatgccggtacattctgcctcttcttattcctctacatttggctttgtctcacatctattgttaacggtcattgttgcattttggacaggtaatgggagcagcagcagcggcactggctacagccaaagcagcagcgactatggctgtagcgaaagcagcagcgattctggct

SEQ ID NO: 446879 - DNA, 52 bp, Triticum aestivum
  unsure (1)..(52): unsure at all n locations
tcattttgntcncncgtggnntggacctgnccaatatgtccantggcaccag

SEQ ID NO: 446880 - DNA, 430 bp, Triticum aestivum
cgctggaatagatgttgagtacaccatagtcctgggacgagagaaggatcaaaaggacaaaaaaaggaaaaagcccgcaaggttcaagtttggcttgaaggactaaggctgggggtacaacataggcaaggccgactttgaaggccggaatttaaaggacttccttgaaagcaaccaattcaaattcgtaagggtaaactttggtaacaacaaagaagtcctgggtcggataggcatcattgtaggcaacaccttcaacctccagaagaatcggctggtgtcctctccttagccttcaatgctgaccctggcaagagccatggttcatccttcatacagtaaactggagaaacctccatacacgtttcatcattatgcatggcagcggaatgtactagatatagaccacatccactacgctgcaatggat

SEQ ID NO: 446881 - DNA, 364 bp, Triticum aestivum
acggggaagagtagagtgctgttaccgatgatacaggttagtcaagcagggagccagggaggatccatctgaactcttcgttctagcttatggtatctttgtttatggcatcgtctgtacatcgtctgtgtttttaggtttcggtgctcaatgttcttcgtgtcgaactcatccagtgtgtattctttccgtgttatactttgtcaagttcagagagacctgatgagtcttttccaacgcctctttcttgtttgtgagttatgatgttagccttcttcagacggataatagactttttcaataagtttatgagttctttatgactaatgtgagtctacggatgatctacaggctcaaactttaa

SEQ ID NO: 446882 - DNA, 253 bp, Triticum aestivum
cgacggggaagcgtagactgctgttaccgatgatacaggatagtcaagcagggagccagtgaggatgtagctgaactcgtcgttcttgcttatggtatctttgtttgatggcatcgtttgagcatcgtctgtgtttttaggtttcggtgctcattggtcttcgtgtcgaacgcatccattgtgtattctttctgtgttatactttgtcgcggtcagggatgtactgattgtctcttccatcgacgctttcttg

SEQ ID NO: 446883 - DNA, 438 bp, Triticum aestivum
acgggggaggtcagaaaagttgcttgcatgtgcgggtcgggaaaccttgctcaagtccgtgatccaatctattccaacctaccccatgagtacttttcttctcactaagaaagtttgtaagagcctgacttccccatggcaaaatatttctgaagcagctcacttgacaaaaaggcattgcattgggtgtccgggaaggaattggctatcccaaagtgcaagggaatgatgggttttcgagacccgcatcttttcaatctggccatgttgggcaaacacggctggcgtattattaccaatccaaactcactgtgtgctagagttctaaagggtcggtattttcctgatactgacttcatgcgtgctacaatccccaaatctgcatcggccacttggagggcaatagtagcaggaagaagcgccctacaaatgggtttg

SEQ ID NO: 446884 - DNA, 405 bp, Triticum aestivum
gggtcgaggcggagataatatactggggtgtggcgagtatttataaggacagggacggcgcagcgttattacgcaggtgcccctggcggttcacatctgaaggacacgtggcgatcatgcaacacattggaggttgttccatgttcccacgcatgcctggattgtcgggtggtcgttcccgcttctccggggttcaggcaagaaggattgagcatttaaaacagatttaatgcttgtctctgtatcttctgctgacaaggacgcagctaagacattcgacagtttcaatagaatgcatatgatttggatagatagatttgagacaggagcatagaaaggttagggtccgatcacattcacttagttcaaaagattcaaacgagaagacatagctataagtgaatg

SEQ ID NO: 446885 - DNA, 74 bp, Triticum aestivum
cgggcgagcctaaggcttcatggaacagggatggcggcgacacggcggtgatgggcgagaaattgttggccgcc

SEQ ID NO: 446886 - DNA, 306 bp, Triticum aestivum
  unsure (1)..(306): unsure at all n locations
attcccgggtagacggggggtgcgagagtgtaccgcattttttccttttaaactaggttcttcgccccctaaaagacacttgttgctttatgcgattcatcgatactaatactagtaatctagtaatcccgaacaaaacatcgtgtccggggtcttttcccgcgcgatatgctgggaaggttggcttagttgggttttttaggacgagtaatgctacaactacgtaatcccagttacgtaattaacgtaatgtgaaacgtgtgagcagttgattgtagattggggggagaaaaannnnnnnganna

SEQ ID NO: 446887 - DNA, 187 bp, Triticum aestivum
tgcgactgcgtccgcgattgcgactgggaaatgagcccggatgtccgcagtcagattacatcactcaagcggcatgtactcacaacacagcaggttcaaaggattgaagaggaactgggagatgtactccgccgtccagtcttcaatagcaagctgatgcaacctgagattgttgtattaagaaaaa

SEQ ID NO: 446888 - DNA, 283 bp, Triticum aestivum
acgctcggtggatctgaaattgttggatatttgccaggccctgtgtatcggttgctcaaacaataggggaaacccacggtaaatgcttgttagtgtttgtgtttttccttatgttaccacaacttgagttacatgaatttactaacattctcagacttagttgaattatatgcaagtttttttgtctaagagtatccttatgaatcatgtggcatcttgtgttccgtgacctgtaattactcaactgcttgccaaaaaaaaaatctcaggccctaaataaaaa

SEQ ID NO: 446889 - DNA, 420 bp, Triticum aestivum
actcggaagtgtaggccatttaaaccattatcaattgggactaggcatgtgtgtgcgcttagtaaagtactaatctcttgatcatttttcattaatcatcaatctccgaccatatggtgtactatatgcacttccaccaacaccgacagtagctgcaagtgcaagagtatgggggcatcctgttgcaattaggtttagcaatcttagagagcctctagtagagtcaccatatatgtgatcaccatcgtccatatggagcgcaatccatatggatatgaagatcgtggtgcctgtgcgcaaacacatattctgcatatcgcagtaatttttttcattttctcattcaaacactttgattccctccaaatttaaatgtttagcccatccagcacacatgtgcataatttttgataagttgca

SEQ ID NO: 446890 - DNA, 415 bp, Triticum aestivum
acgggttcagcaacctagaagacgaggctaggtaaaaaaggagagaagaaacattgtgtatggccaccgtgtaaacaataaggagcaccaaatgctgtgaacgacttgcgagcaatttgctttttgcttcaccggagtttgtgtagatgcgaattacgtttcaggaccccctcccccctttttttttgcgacagacagacagacagccttgttttttccccaggatttttacattgtttggtctccagcgccaggatgcacgccattattttttcaccatgtgtaccattatttgttgtataagaagactgagcaccggtggacatgttcataggaggaataagcacgatgtccatctacttgaacatcaataatgtctatatttatatttatatctattactgtatttgccatc

SEQ ID NO: 446891 - DNA, 364 bp, Triticum aestivum
aagccaaggagagtcctatgcctgatgcttctgagctctttacaaatgtctacgtcaagggtttcggcgttgagtcatttggcgcagatagaaaggagttgagagctacactcccataggtcaccaacctgaagatgaagacgagtactcttctaacacgatgatatatcgaggaggaataagcattggtgaacaaacccttgggtgttgctggcagtatttgttgcaaaacgaacctgtatagagatgtgatgtcaggggaattcgttccttatttgttatgttttccttttttttctcttcctgcaattcagtttaactgctgctagctggcgatttggcctgcataatcgcttctgttcgc

SEQ ID NO: 446892 - DNA, 411 bp, Triticum aestivum
ttgttcatgctcactgaaactttgagaatcatgacaacattcaattttcactaacaacacttatcccattgtacaattccattgtataataaccctaatgtgccaatgtttgccttaaggatgtttacaatacatgatggtttgtgaggtgcatgacagaaacattggctgtactgcgcgatatttaactttttactggaatgtcaaaaggttctgacacattgtgcactgtctttctatataaattggataattttcctaatttttgcagaagttttcacgtaacataagtatggctaatgtccatattaatacagactgttctgttttagacagaatctgtatttgaagcatattctacctgttatgaggaaactatcaatttataacactggattaagccatgaaaaa

SEQ ID NO: 446893 - DNA, 415 bp, Triticum aestivum
attcccggaacgacgggctgacggaaatacttccgctactttgctgcatcatcccttcctcttcggggaaaaccaacgcagtgttcaagaggtagcagtgatttgctttcttatactaacggatcttacgagttttctgttctgaagttttcaaattttggttaaagattcgatggaccacggaataaggagtggcaagagcctaagcttggggatgcccaaggcaccccaaggtaatattcaaggacatccaagagcctaagcttggggaagccccggaaggcatcccctctttcatcttcgttcatcggtaaccttacttcgagatatatttttattcaccacatgatatgtgttttgcttggagcatcattttctttcataggatttgcttgctgatcatttagagtaatgt

SEQ ID NO: 446894 - DNA, 422 bp, Triticum aestivum
attcccgggacgacggggaggcagaaagggaggcggagatggcgcaccgggtggacaacgagtacgactacctcttcaagattgtgctcatccgggaatccggggtccggaagtccaacaacctcccctggctcaaccggaacgagttccggctcgagtccaagtccaacaaccgggtccaattccccaaccgggaccctccaaaattaaaaggaaaaactgtaaaggacagttttggacacggctggtcaggagagataccgtgcaattactagtgcatattacaggggtgctgttggagcactcctagtctttgacataacaaagaggcagaccttcgacaatgttcagaggtggctccgtgagctccgggatcatgcagatgccaacattgttgtcatgatggttgggaacaagtcaga

SEQ ID NO: 446895 - DNA, 128 bp, Triticum aestivum
  unsure (1)..(128): unsure at all n locations
caagtaggaaggatcttatgttggtacaaaanannnnnnnnnnnnaaaaaaaaaaaagcggcggctccaaaaggttcaagcctaacttacccttgaaggcaagttaaaactcctccaaaagggccacc

SEQ ID NO: 446896 - DNA, 424 bp, Triticum aestivum
gttagtaaaaagatggatcatctattttggaacggagggagtaataatgaatataaaaactaccatttggacctttgaacaagtggggttggaggttccgggaattttccaaggtaaccaataaccaaggacatggtccgccaaaacaaaccctcatcaaattttggtaacaggcctttattgagtagattacaacattgcacatcttttctgtgtggagttaactttatagttctgtaatacactagacttgctctggctaagtttctcccaatatatatggtagaatagcctactaaattttttaagcttagcacataaattaaagcacagttactgggtttgtataattgtaggcatggttaattgtgtggtgtacctctattttttggaatttgtgagtggcatactggcaaccaactgt

SEQ ID NO: 446897 - DNA, 383 bp, Triticum aestivum
gacgggtgaatcaaaaggagatgaaccggtgcacgctgacccataatcctctacccgccaaggtcaagatcattaatctaaggactggcttagcatctgccacttacagatactttgtgcaccaaaacacttatccttttgggccatccggtgccatgtcacacgcgagtttcagaacattgatctgccaatccatcgtgcatgttgatttgcataacactgttaaaccgctcgatctgacgtttgaatatctggcacttatactttatcatatcatcagattacgcagaccatacttttcatatttcctgcacatactcatctaacatgtgccctgtcatatttaccccagggagggggatgcgatgtacatatttccatgg

SEQ ID NO: 446898 - DNA, 341 bp, Triticum aestivum
cgggccgacgggttataggactgcgtttgatttttagtgccgcctcctcgaattgaggtagtagcctgcgctttgggtagtattttgttcggcgctcgagttcgtattcttcggctgctcgggccttagtctgtctgtctgtgagcagatcttggtcagcttggagctgctgctgcttcttttttaggcttcttgcagtggctgtaagcctgcgcttgaagcgctcctgctctatgggatcctctggtatgccaaatttgtcgccattgaggctcacctcgtcttcggagggaggcatatagttatcatcctccaagtatccgtccatcgcctgttcgtct

SEQ ID NO: 446899 - DNA, 462 bp, Triticum aestivum
  unsure (1)..(462): unsure at all n locations
ggaattcnagccggacttctnaggtgcagnaattcccgggnnnacggggcacgatgtcctctacttgaacatcaaaaaaaaaaaaaaaaaaaaaaaacaaaaaaaaaaaaaaaaaaaaaaaaaaaaagcggccgcnctaaaggatccaagcttacgtacgcgtgcatgcnacgtcatgcncttctanagtgtcacctaaattcaattcactggccgtcgttttanaacgtcgtgacgggaaaaccctggcgttacccaacttaatcgccttgcagcanatccccctttcgccagcggcgtaatancgaanaggcccgcaccgntcgcccttcccaanagttgcgcancctgaatgcnaatgggacgcnccctgtancggcgcattaancgcggcgggtgtggtggttacncgcgcgtgaccgctacacttgccaacgccctaacgcccgcncctttncgttt

SEQ ID NO: 446900 - DNA, 418 bp, Triticum aestivum
ggggcaacatgactcgcatcctgcactgcgacaaggaactgccgccggagtgcctcaatatgtacatctcccaaagctgcctcagcctggcaccatgtacacaggtggattgtcacagggcatgttggatcagatgcgtccatatgcacccgtgacccaggccaaatccgggtccaactgccggcggagtctccaagtcgggtccatcgccatgacctgctactcccatgctaccgtccctgtcacccatgccgcctgaaccatgccccactgatgccacctaatgcgcccaagacaaagccgatgccgccgtgcccgccactagctgtatccgcgtcgagcaacaccagcaacaactgctgggtgtacgtgacgacgtctatgcacacatacttccaagtgaacacgccatattttc

SEQ ID NO: 446901 - DNA, 463 bp, Triticum aestivum
  unsure (1)..(463): unsure at all n locations
gngaatttnacgccggccggttccggtgacaaattcccgggacgacgagctcacnagncgcggccgctctagaggatccaagcttacgtacgcgtgcatgcgacgtcatagctcttcttagtgtcacctaaattcaattcactggccgtcgttttacaacgtcgtgactgggaaaacctggcgttacccaacttaatcgccttgcagcacatccccctttcgccagctggcgtaatgcgaagaggcccgcaccgatcgcccttcccaacagttgcgcagcctgaatggcgaatggacgcgccctgtagcggcgcattaagcgcggcgggtgtggtggttacgcgcagcgtgaccctacacttgccaagcgccctagcgcccgctcctttcgctttcttcccttcctttctcgcaagttcgccggctttccccgtcaaagctctaaatccggggntccccttaa

SEQ ID NO: 446902 - DNA, 396 bp, Triticum aestivum
acgtggaaactattggttcattatgtggatgttaggactcccgcaaagtcctgatggttttgcttccaatctccggctgaggttgaagaacgctccatgaagtgacagtgcaacatgtatcggccctagatatggattgggtctacgagtgtcgttcaaccttaacgtttgggctagattgtgctgtccggtttggttacatttttctgtccaagcagcctgatacggggctctgtttgtaggtgctcttagagcacctacaaccggaccccatacccgcctcaaatgttcgtgctggctgccatatcagtgctcagacgaaaaaaagcaacccaaccgggcgtcccgtattcggtccaaatgcccggactgactatcaaccccagcatccagctc

SEQ ID NO: 446903 - DNA, 402 bp, Triticum aestivum
ttgttcttgttagaggcagcaccaagattcccaaggtccagcaactcctcaaggactacttttaccggaaaggaccaaacaagggtgttaaacctgatgaaggtgttgccttccgaactgcaattcaaggaaacaaccttaaccggcaaggccgttaccaaaacaaaggtaacctcctcctccaatttgggccccttaaccttcggtaccaaaactgttggaggattcatgacaaacctgttcccaaggaacactgtcatccccacaaagaagtcgcaggttttcaccacctaccaggaccagcagaccaccgtctctatccaggtctttgagggggagcgcagcatgaccaaggactgccgtcttctcggcaagttcgacctttctggcattcccccagct

SEQ ID NO: 446904 - DNA, 427 bp, Triticum aestivum
gggtcgacggggtatggtatcaacacctatgttttctttgggtcaaagttaccgtggtgtttgtgcataagttatcacacccgtggtgtgtatttcaccttgccatttagacaaaagttaattgcggtatattttcaacaactttttcctaagtcaaaagttagcacggtgtttgtatgtgagttatcaactttgtggtgtgtaaaatatcatggtatttacatagaggttaccagggatatgttttcaacaacaaacaatcccgggtcaaaagttttcacagtgtttgtgagtgtgttatcagctttgtggtgtattaccatgatatttacacataaactaccgaaggtatgttttcaacgatttttttcagtatgctcctctctcttatatttaggaacagggggtgtacaaaacagaagcaacg

SEQ ID NO: 446905 - DNA, 170 bp, Triticum aestivum
acggggtaatgcaccatgtgtcactcattctacacgccatcttctgcaacgtctgcgactatctgcaagttatcacgtgctggccgtactacagtgtgatttacacgtgttctaactgctgtattgtatcatcatgttcatcgtctctttctacatgccaggcgcttact

SEQ ID NO: 446906 - DNA, 412 bp, Triticum aestivum
ggtcgaggcggactcccaatgtgagtggtgacatcggtgaatcgaagaaatatgtcatccatccccagggagggatgacgatcccatttggaggggaaaagcccactcccgaaagatggtcatggattgatccatctgtcttcaagctaaggagtgaaacattcctcagagataagaagaaatgtccagctccgaactatgccgcgtactacccaataggtgttgacttgtttgcaagccccaagaaggtttcgcacatcgccgaacacattgatcttccacaagtcaaatcacacgacaagctcccatcacttttgatcgtcaacatccagatgcctacctatcctgctgctatgttcctcggggacagcgatggagaagggttcagcctttgtttgtacttcaaaatctc

SEQ ID NO: 446907 - DNA, 420 bp, Triticum aestivum
attcccgggtagacggggtggctttattgcattatgagtcaacatgaatgtaactatttgacctaacataaactcaggatgtaacaatgtagaaaatagctgggtgaaaaacaacttattctgctccctcggtgttgaatagggtgcatagggtactaaatttgccccaagttttgttcaaccgaggaaagttggacttgttagttctcacaattgagcaagttttctaatactccctctgttccatattagttgtagttgatttagtacaaagtttatactaaatcagcgacaactaattatgaatggaggggtaatatgtttttgcacaccgaaggacgttcctaacataaagttttctaatataaagatgttccgaatttaaaactatccatgaattttgaaaactgttcatttttt

SEQ ID NO: 446908 - DNA, 457 bp, Triticum aestivum
  unsure (1)..(457): unsure at all n locations
gggatttagcaggncgttncggtgccaaattcccgggaagacgagctcaccaaacggcgccgcnctagaggatccaagcttacgtacgcgtgcatgcgacgtcatagctcttctataggtcacctaaattcaattcactggccgtcgttttacaacgtcgtgactgggaaaaccctgcgttacccaacttaatcgccttgcagcacatccccctttcgccagctggcgtaatagcgagaggcccgcaccgatcgcccttcccaacagttgcgcagcctgaatggcgaatgggacggccctgtagcggcgcattaagcgcggcgggtgtggtggttacgcgcagcgtgaccgctaacttgccaagcgccctaagcgcccgctcctttcgctttcttcccttcctttctcgccacttcgccggttttccccgtcaagctctaaatcgggggcnccttta

SEQ ID NO: 446909 - DNA, 172 bp, Triticum aestivum
tcacgggttagttccatttaaatcatgcaagttagagtccaaaacaagggcaaaagtgtttggaaaagtagatacgacagagacgtatcaccgcacaacctagtttatagcccgctcctctgaattactactcaaaaaaagttgtgcaattctgtcattaattgactatagc

SEQ ID NO: 446910 - DNA, 346 bp, Triticum aestivum
tggcgcaatgtagtggagcgataaaccaaccaacccagggggctttcttcaaaccggtgggccttccgttccaaggcaatgggcctgaattcggaggcgctcgcaaaggcttccttggacatggacaaaaaggtggtggtcaacttctacccgcggtgccccaagccggacctcaccctgggtctcaagcgtcacaccgaccccggcaccatcaccctcctcctccaggacctcgtcggcggcctccaggccacccgcgacggcggcaagacctggatcaccgtccagcccatctccggcgcattcgtcgtcaacctcggcgaccacggccacttcctgagcaatg

SEQ ID NO: 446911 - DNA, 403 bp, Triticum aestivum
  unsure (1)..(403): unsure at all n locations
gggtcgaggggctgcaatgataaatgggggcattgctgatgtcaacaatgctgatggagctggagctgtgaatggtgctgtgcctattttggttgaccatgctgatgtggagagcgagaatcctgagaacactgtagtgcctgagcaggtggatgagtatgtagatattgatgacgagatgccaaccgcaacttaccgatcagtggagatcgagaagggcgctgaggccacgagtgtctctggtggttcgggaagtggttcttcatcatccagtggttcagggtcagggagctcaggggacagcgcctcagaagctggcgatgctcgttctcttgtttagaggaggttgttctaacagtaggatttgagtangtggaggatgtgagtacttaattctgggatg

SEQ ID NO: 446912 - DNA, 168 bp, Triticum aestivum
atggtcaacttaagtgctgagtagaacaatttaaaagttggcaaaagatttaacttcccgaataaatgccccctggtcctcaattcggggcttttccccggggaaaacaattacgttaatgacttacggtttaacaaaaacttccccgggaaattcaagatttctcca

SEQ ID NO: 446913 - DNA, 500 bp, Triticum aestivum
  unsure (1)..(500): unsure at all n locations
ggnggnangttactcgnccngncngtacaagtcacaaattcccgggncgacggggctgccanttgaggttgatggaaaaaaaaaaaaaaaaaaaaaaaaaaaaaagcggccgctctanggatccaagcttacgtacgcgtgcatgcgacgtcatagctcttctatagtgtcacctaattcaattcactggccgtcgttttacaacgtcgtgactgggaaaaccctggcgttacccacttaatcgccttgcagcacatccccctttcgccagctggcgtaatagcgaagaggcccgaccgatcgcccttcccaacagttgcgcagcctgaatggcgaatgggacgcgccctgtagggcgcattaagcgcggcgggtgtggtggttacgcgcagcgtgaccgctacacttgccangccctaacgcccgctcctttcgctttcntcccttcctttctcgccaagtttcccgggttccccgtnaagntcnaaatncggggggcc

SEQ ID NO: 446914 - DNA, 354 bp, Triticum aestivum
cgggtcgacgggcaaacacatactcagaggatataagtgaagcacatgagtaaatgacaaactactccaaaacgatataggtgaagatcaatgagtagttaaataattatgtaactacgtgaagactctctctcattaccgaatttcagatcttggtattgtattcacacagcaggcaaagcaaaacaaaatggcattgcacggatagcacaacacatgtgaagaagcagaaacttaggttcaaccgatactaatcgatagttgttgaagaagaaaggtgggacgcctagcggggcatcccgatgccttagatgcttgagacttcttgaactactgtcatggggtgccttgggc

SEQ ID NO: 446915 - DNA, 362 bp, Triticum aestivum
acggggaaattcgctgtctaagatgacggttgagctgctgacgctggggtctacctctgcggaagatgtgcaactcatgatggttgtcatgaactcgcacggagattgcatcaaccatgtcaacagttcaactccttctgcatagccaacttcgggctcatgatagacgtcgccaaggacttcagaatcatctcaattcaccgcatctttcagatccaggagcagatgaatctagatacggctacgtgaaacatattcagtcaccgacctagccagggctcgatgcattctcagcttcagctggacgcaggcccaaactctgtgtgagtactctatttgcaaccaatagtcatcaatgatga

SEQ ID NO: 446916 - DNA, 463 bp, Triticum aestivum
  unsure (1)..(463): unsure at all n locations
ggganttctagccggacggttncggtcgagnaattcccgggacgacgagctcacnanacgcggccgcnctagaggatccaagcttacgtacgcgtgcatgcgacgtcatagctcttcttagtgtcacctaaattcaattcactgggccgtcgttttacaacgtcgtgactggggaaaccctggcgttacccaacttaatcgccttgcagcacatccccctttcgccagctggcgtatagcgaagaggcccgcaccgatcgcccttcccaacagttgcgcagcctgaatggcgaatggacgcgccctgtagcggcgcattaagcgcggcgggtgtggtggttacgcgcagcgtgacgctacacttgccagcgccctagcgcccgctcctttcgctttcttcccttcctttctcgcacgttcgccggctttccccgtcaagctctaaatcgggggntcccnttta

SEQ ID NO: 446917 - DNA, 217 bp, Triticum aestivum
ttccggtcgacggggaagcaatattcctgaggaaggacaaaggcagaataccattcccagttacactagcttctattggctttgtgatgttggccttactgccagcaatagtttaaggtcccacaagaggcatcagtgtgtaattaagtactcaagttggtatggtttatggttctctcgaaacacttgctctgatagtttcatgtgcaactagaat

SEQ ID NO: 446918 - DNA, 344 bp, Triticum aestivum
ttcccgggtagacggggatgatctgagtcttcttctcatcgagattggacagcgacgccttggtcgcaaggtatggatatatgtgggggagggaagttccaaaggggcatggtgtgcccgtggtcttgccggaggggaagaagtatctgccgaattcatatcgatgtttctgcgtgtatttcctctttgttctctgtcccccccttctcagatttctttgaggcgatgatgctggtgtacgggttccacctcttagattttacgccaaatgcaatggcatgcatggcgatttttgcccatctgtgtgagatctttgtcggggtcgcccccaacatggatctgat

SEQ ID NO: 446919 - DNA, 320 bp, Triticum aestivum
cccggcccggggcccaaccggtgcccaaggtcaaggaccggattctcaaggccgaaggcttccgcaaacggcaattcaagttaccaaaggccggcttaacatggccggccttccttgaaaccaagtttaccttcatgcatgcacggtgtggtgtgcccgtttccttcaacttttgtacaaaatcatgcatcagggcgtacataccgtatggcatacatacatacatagagcgagaaatatagtagagagcttcgtggtacattattggttttattacggcactcatctctggtttgctggtgtatggactcaggaggagg

SEQ ID NO: 446920 - DNA, 560 bp, Triticum aestivum
  unsure (1)..(560): unsure at all n locations
gggnntgcatgttccttctagactgngaccngtctntanctntaacgtggcccggcccntgtgcaatntaaagtnncatgttctacnaggccaancccacgtcnganaccaatnatttcnnctccactttatnntttaangcgngtaaaaagcaanttnncagaatattttnattgcgcnaangtcnntttcctctcatatgggggtctaattaaggttnacntcaccatgggatctnagtncnatctcananttctngntctttttggnttntcgaaggnatcatcangatcattnaccgggtcacngttccatgangtccattatngctcanagtccaatcntcgtgntcanatcnaaccntcaacgtntatcgactgttccttttcnccntggtcatcttttcntgcantccattaattnttngtttgttcctgatgttnntntcggtgccactnnttaagttctnnttaaacggtgnaatgnngggtcctcggtttnngtcgtttaaaagtntgtcaattccnttncttaaaaaaaggggttnaaacccntgnggt

SEQ ID NO: 446921 - DNA, 326 bp, Triticum aestivum
aagggtcaaccaagggaaaatgcaatacctccaagggtccaaaggaaaaccctaagtgattaacctggtcccgccccaccaccaaggcaactcctggaacccgggccaataaaacggctttggcccaaatttggaataagcaaccccccggtccggaacccttggaccaaatccgggaaattggcgcaatcaaccaattcaaagccaacatcgtgtaccttgcctgcggcgacaaaattcttggcgtcgatgtggttactaagaagataactaggatttctggtctagctatagctgtgccagatctccccctactaccatgtgtg

SEQ ID NO: 446922 - DNA, 258 bp, Triticum aestivum
gacgggaaaagataaaaagatagaaagtcacattgtgctggttcccgtgacaaaggacgggactggatctgctctgcaaggccttgtctgatttggttcatttctacatgtaattcagcatagacagggctagtcagctgtttagaacttcaattgtctggatgataggcgagtgatactcggtgattgtagctatatttgttctattcattggattgttgaaataagtcagcagtataagtgtgtttttattttgtt

SEQ ID NO: 446923 - DNA, 143 bp, Triticum aestivum
ggggaccacaaaacggcggaggagcacaagaagaaggacggggagcacacgaacgacggctatgcacactgagggcatcatggataagatcatggacaacatcagcggctaccgccacggttacggcaagaaggactgcgacc

SEQ ID NO: 446924 - DNA, 384 bp, Triticum aestivum
gggtcgacgggtattatccagtgatgtttaatacagttacaacaccaccgtgacacatagtatccgttatgtgttcgtgacgatatgatcatacgctttgagtgcaaagatgaaattttttgctgttggcaatggacatacttgtgatagcaatcaccctcatatgcctctcatgcctaccgggaaagatccgggaaagtctctttcttgggtagacacgagcttgtccctcgtcgagacggttacgaccggcggggcagggggaggtatgatgagtggtggttgtgtctgatggatgtgagatattatccttgagctaatcatgcaggaaatacttaagcctcctgagtcggccgtagatcgaatcctgttccagtaaccccc

SEQ ID NO: 446925 - DNA, 402 bp, Triticum aestivum
  unsure (1)..(402): unsure at all n locations
attcccgggaccacggggggacaaaagtgtggcgccagagtagccgcctcgccaaccgcgtatcattaatgtgggcggtagacggatggacggacggtacttctgtcatttgaaggcggagcaatcacctgcactangaagcgcgacgggcgacgctgaccgtttcgggcggaaagcacgcacaagcgagggaggaggtctgggtgggccagggcagtcagactcgtgcttggcaacgggtcggtccagcagccggacatgctggctcgccagcaagctcgcctagctgagcgacgacaatcagatgatggacgtagcttccaaccaggagccggcgccactgtccaagccggttcatgccatgttcaccatagagcaagtgcggctgcacttcgacgccct

SEQ ID NO: 446926 - DNA, 518 bp, Triticum aestivum
  unsure (1)..(518): unsure at all n locations
actgtttacgcttgcccncgntcggtacaagncaccnaaggcccgggnccganatggtcnatttaaaggatcacttttgccctcaattagaaagaaatttccngtnanttcaatttncnanaaaaaannnaaaaaaaaaaaaaanaaaaaaaaaaaaaannnggcngcccaaaaggtcaannctnanttacccttgnangcaanttnanancnctncaananggtnacnaaatttntttnatgggccntcgttttanaangncgtgactgggaaaaccctggngttaccaaacttatcgccttgcagcanatccccctttcgccagctggcgtaataacgaagaggcccgcaccatngcccttcccaacagttgcgcancctgaatggggaatgggangccccctgtnaccgggcaattaanccccggcgggtttttgggggtaaccccaaacgtnaancggctaaaantngaaacgccctaacgccccggtcccntttcggtttcctccccttcctt

SEQ ID NO: 446927 - DNA, 390 bp, Triticum aestivum
tacacttaaaaacgctcatcgatttgaaggcccgcacagtatccttaaacggcaacctaaaatttacatcaccgaccgacaaataaaaaattgatggccattgataaggccctggtttgatcccttcggtaaactaccactgacctgcaagccattaaataccgtttgtgatgacaaagtcattactaaccctgatgggtcattcgcgcatcagtgatgatacaatttggccgatcagtgctattcgggtctgcagtagtggtaaacaagctaggattagatataaccgaatatacatggagacgaagatgtatcccgatgttctcttccttggaggagaactagtcaccgctagagaggtgggaattcatggatacggtccaaatatgt

SEQ ID NO: 446928 - DNA, 410 bp, Triticum aestivum
ctaaaacactgcagaatgttcattcgtgcgagaattggctgccaaggtgggtgatgagcgcgtggcgcgtcgcggggatcgttcatgcgttggagggatgggacgagcacgagtgcggggacatggtgctcgacatggacaaagtttggtctgccgcacttctgcacgggtttcgccccgttgctgaggcttgatcgtctggttgcaagtcgagtgaataagcgttacgcagataaggtcatatgctcgctgaagggccatgctgaggaagaagaagcagacttattggctagcagatgagtggcctataattaattaagtactactactagtttgatctactactaccaaggttacttggttagctattactactgcattattcatctcctacgataatgaggtaatga

SEQ ID NO: 446929 - DNA, 195 bp, Triticum aestivum
aaacgctcatggatttgaaaaagttcacaaatttgaaaaaaatgttcgcgaatttgcaaaaagatcatggatttgagaaaatgttctattatttttttataatttttcccacatttaagaaaattcaggaatttagaagaacaatgaaaaagaaaatgaaaaacataaccatacaaaccttgaaaaatacacagg

SEQ ID NO: 446930 - DNA, 418 bp, Triticum aestivum
attcccgggacgacggggcagacgtactacgcctgaaaccgggtcactgggccgccggtcatcatcagccccatcatcagctatcaacttcatcgtcaaggatctcagaccctgaggctcactcaattaacgattgcggtcggttctaacctttactctgaatgcgatgcctgttgcgaaatctacctatatgtgctggctttactctcaaagctatttggtctatcacagtaactaaatcaacactaatgtgtacggcagcgttggatagattctcgctcagatctaacacaatcatgaaactgaatcatatttgctcttgaactttttgtcacccatcgtttgcataaacatatgtatacttttcaatttgtacttgtccggacaagcggcaaccgtgccgcccgccatgcaaatc

SEQ ID NO: 446931 - DNA, 376 bp, Triticum aestivum
ggggaaaggggggaatggaggacttagcaaaatattgagccagtgggtggttaattcagaagtagcagtagcgcgttcaagaaagcacgctactgctaagttagctatagcgcattctggtatacacgctactgctactcctttctcttttttccctttttcatttatttttcttcacattttattttttcctttcaccttattcgatttctttcattctcaattacctttctatttgctttcaatttaattttatatcctttagcagtagcgagtttagaagaaaacacgttgctacaaaggacgtagcggtagcgcggttcaatatggatcgctactactatgtgtagcctatcggctaagccgtgggaataat

SEQ ID NO: 446932 - DNA, 465 bp, Triticum aestivum
  unsure (1)..(465): unsure at all n locations
gggngnnttnnngngccttcnacgcngnnnggtaccggtcnggaaattcccgggnccgaccaaccttataagtattcggactataacagttccgatgaacagtcactcacttttgacattatacgattccagaagatgatccagaattgggtcaatcacgtttattagaagttgacatagagtggttgtaccagccaaaactcatctacgtatgattgtaacacccgctgatgtactcatagttgggctgtaccttcctcaggtgtcaaatgtgatgctgtacctggtcgttcaatcttacctccatctcggtacaacgagaaggagtttactatggtcagtgcagtgagattctggaactaatcatgcctttacgcctatcgtcgtagaagcagtgactttgaaagattatgggattgggtatccaatcaattaatcctccaaaccaactaaaccggggaagct

SEQ ID NO: 446933 - DNA, 400 bp, Triticum aestivum
gggtcgaggaagtgaagctcttcctcaccggcgtcgatgaaggtaacgatggcgctagggcttgagagctcgagcgaggggagtgagatcgagcggggtaaatgcagtctgaggagggtgaggggtatttaaagccgaggtgaaaaaccgctcgcccaaggaaaatggacgaacgtgcccctgacccttctcatcctagcgacatgtggcacccacgtacagtgtggtgcaaatcgtgtgagatcgtgggtgactagataactcttatcgtgggatgtgggacattttgagcggcaaaagccgaaaattcggataagaatattttaatgtttcgttctcaaattcttcagctgacaaggatacagtgatgattttgaacgagtttcaaatagaacgcaca

SEQ ID NO: 446934 - DNA, 463 bp, Triticum aestivum
  unsure (1)..(463): unsure at all n locations
gnnnttttngaggacttctacgccggccagtaccggtcacaaattcccgggtcgaanagtcactaancggcggccgctctagaggatccaagcttacgtacgcgtgcatgcgacgtcaagctcttctatagtgtcacctaaattcaattcactggccgtcgttttacaacgtcgtgatgggaaaaccctggcgttacccaacttaatcgccttgcagcacatccccctttcgccagtggcgtaatagcgaagaggcccgcaccgatcgcccttcccaacagttgcgcagcctgaaggcgaatgggacgcgccctgtagcggcgcattaagcgcggcgggtgtggtggttacgcgagcgtgaccgctacacttgccaacgccctaacgcccgctcctttcgctttcttcccttctttctcgccacgttcgccggctttccccgtcaagctctaaatcgggggct

SEQ ID NO: 446935 - DNA, 404 bp, Triticum aestivum
gggtcgccttgaggtaacagaattaagtttattagaatgaagatgtaaaataggaggaaaagtgcttacagatcgcatccaggtgctgcagaaaacagtggttaaacttatttagtatagcatttatttgaggcacttgggcctaatattgaaatattaagatagagatttaaattatgtactcttgttttgtaaacactatcttgcaattgcttcgtggaccatgggagggatgattcctagaagccatgttttccaataatttcaacagctctgtgttaagtagcttagttattaatttttatttctgtagtataatcctgggaggttgctggaccaggaaacataatctcatcggtaatttcctaaggaaaatattaggggttctctgttgtgaatttttt

SEQ ID NO: 446936 - DNA, 111 bp, Triticum aestivum
gtgtccattgggttcagctcgatgaaaataggaatggttaagctcaaaattgaacaattcatccatcaaagggtgccctttgatggataatttgatagaacaacactatgg

SEQ ID NO: 446937 - DNA, 285 bp, Triticum aestivum
ggtgtccatgggcgaggacgtgctgacgctggtggtggagcccaacgtggaccactcgctcatcatggggctccttgtggtgcatggcctcataaaccactccatgtgagcatcgcatcgtacgtgcagggacagggtgtaattttcttgttagatgcatgctcagatgcatctatcctgcagaccagtcttcttctttctttctttccttggaaaaccttttgtggcgtgatttgtttaagccttaggtctgccaatcaatttagcaagaataagtttatgttc

SEQ ID NO: 446938 - DNA, 257 bp, Triticum aestivum
ggggtgtccatgtgctagcgttcttcgctgtcggtggtgccatcgtggtactcactcatcatggggctccttgtggtgcatggcctcatctgcactccatgtgaacatcgcatcttacgtgcatggacagggtgttattttcttgttagatggatgctcagatgcatctatcctgcagaggaatcttcttctttctttcattctttgggataccttttgtggcgtgatttatttaggcttcaggtctgccagtcaat

SEQ ID NO: 446939 - DNA, 391 bp, Triticum aestivum
ccgggccgacgcttcgatttacgtgcgccgggcaaatacgaatggtccatgctttttttgcaagggatttttacatctgtgctcctggttccttagctctactcattcatccccgcgctctaaattttggccaattttccccaatcccttgccagaaaccctcataactgggcacaacgaacattgccgtcgggtcataggcttgaccgttaactctgactagtggggccacgctggactgtgttgtccgttcaacctgacaagtggggctgcgctgggtggtgtcgctgtttgaccgttgggccgtggtttcgttgggccgtcccttgcattaaacgtctgcgcgcactaccaggacaaaagcctgctatgcatgcacccagcaaaccct

SEQ ID NO: 446940 - DNA, 380 bp, Triticum aestivum
ggctgaccactgggcgccggcgaacaccaacaggcgcacctgaagcgaagcccgaggcaggcctcgacggcggcgatggccgcactgcgtggcaggggtagaattccggtgcaagcgcgcgcatgcgcatggctgacccaattcggtcaatctcctaacacaatcgtttcgtttcgtttcgtttccgtgaacctcaatcagcagaccctgtgctggcgccggtagtatgtaatgtgtaatcgtcgtgtatagcgagacgacgcaccgccgatcgatcgatcgtggtcgagtcgttgcgtcagtgactatgtgcatgtggtttaacatggtagcgacctgttgctgtcgccgactaatcatcaaaatcagcagttccattc

SEQ ID NO: 446941 - DNA, 398 bp, Triticum aestivum
aattcgcgagccgattgaatttttacagatactcagccacatattgatttccttggacaagcgcgagaaattcacgctgcttggccttcataactccagtagggatgtgatatttgcggaacttatccttgaatttttcccaggtgacttcctcattaatcggccacatggcttttgtattttcctaccatatggcagctgcgccttcaaggtaatgggttgcaaatgggactttatcatttccttcagtacgggcgatctcaagctttttctccatggtgcgcaaccaatcgtctgcatccaatgggtcagcaacctgactgaaattgggtggattggtcctctgaaaatctgacagctttgagtgatgaccattctgatttccattttgtccaact

SEQ ID NO: 446942 - DNA, 409 bp, Triticum aestivum
  unsure (1)..(409): unsure at all n locations
ggtctacaattcccgggccgacgggattaaaaagtaatatgaatattttccttttgggggcataaggtgcaactcttcaactgtgtaaatattcaagtttggtcacaataccttgtcagtatcaaccagaactgtcaaatgtgaggttgaaggcttgtcatgcctcgccacattagcacctggcagatcagaaggtttattcgtgctttgattctggtaagcacgatgggaggaaccaatagctggacttgcagaagggacagtccgagaagccattgtatttccagacatttgatgtgtatcttttatgctagtattagcaggcctactagcancagatgtgccagtactgaatacaggaggctccaaagaaacggctgatcacaaatctgtggtgtgctgaaaatat

SEQ ID NO: 446943 - DNA, 152 bp, Triticum aestivum
gggttataaaagatctcatatagtttgtgtcagtaatccggccagtggtgaatcccagctggttgttgaagttaaccaaaatgcaatagcggtgacttgtgtgcctgtccattgatccatcctgtgtaggcaagggctatagcttgatggcg

SEQ ID NO: 446944 - DNA, 402 bp, Triticum aestivum
ttcccggttcgacggggaaaaaaaaaaaaaaaaaaaaaaaaaaaaaaaaaaaaaaagaaaaaaaaaaaaaaaaaaaaaaaaaaaaaaaaccaaaaaaaaaagaaaaaaaaaaaaaataaaaaaaagaaaaaaatgaaaaaaaaaagaggaaagttaaaaaaataaaaataaaaaaaagggggcgtttcaaggggttcaagttttatttccgggttatgggaatttaaaacctttttaaagggtccccaaattttaatttaagggggttttttttaaaaggttgtatgggggaaaaccctgggttttcccaattttaccccttttgaaaaaatcccctttttccaaatggggtttattactaagggggccgaaaggtttgccctttccaagattttgccaacc

SEQ ID NO: 446945 - DNA, 491 bp, Triticum aestivum
  unsure (1)..(491): unsure at all n locations
ttnngagccttctacgcgggtnngtaccggtcatgaaattcccgggccgacgagctcacaatcggcggccgctctagaggatccaagcttacgtacgcgtgcatgcgacgtcatagctttctatagtgtcacctaaattcaattcactggccgtcgttttacaacgtcgtgactgggaaaccctggcgttacccaacttaatcgccttgcagcacatccccctttcgccagctggctaatagcgaagaggcccgcaccgatcgcccttcccaacagttgcgcagcctgaatggcgatgggacgcgccctgtagcggcgcattaagcgcggcgggtgtggtggttacgcgcagcggaccgctacacttgccagcgccctagcgcccgctcctttcgctttcttcccttcctttccgccacgttcgccggctttccccgtcaagctctaaatcggggggcccccnttaagggttcngatttagggcttaacgg

SEQ ID NO: 446946 - DNA, 470 bp, Triticum aestivum
  unsure (1)..(470): unsure at all n locations
gagnagttcttangggacttctatgaggcgaanncttgngnggaaattcccgggccgaangctcactaaancggcggccgctctagaggatccaagcttacgtacgcgtgcatgcgactcatagctcttctatagtgtcacctaaattcaattcactggccgtcgttttacaacgtctgactgggaaaaccctggcgttacccaacttaatcgccttgcagcacatccccctttcgcagctggcgtaatagcgaanaggcccgcaccgatcgcccttcccaacagttgcgcagccgaatggcgaatgggacgcgccctgtagcggcgcattaagcgcggcgggtgtggtggttagcgcagcgtgaccgctacacttgccagcgccctagcgcccgctcctttcgctttcttccttcctttctcgccacgttcgccggctttccccgtcaaagctctaaatcggggggtnc

SEQ ID NO: 446947 - DNA, 336 bp, Triticum aestivum
acggggagcacaaaaaggcggagaagcacaagaagaaggacggggagcacaagaaggacggcgagcacaaggagggcatgatggagaagatcaaggacaagatcagcggcgacggcaagaaggacggcgaccacaaggagaagaaggacaagaagaagaagaaggacaagaagcacggcgagggccacaaggacgacgacggccacggcagcagcagcagcgacagcgacagcgactgacccagctccggcccgcgctccggaaccgttgcagtgtaggcaaaatcaatgatgaacacttggaaaaagtgtgacagacatatatgttgcagggttt

SEQ ID NO: 446948 - DNA, 466 bp, Triticum aestivum
  unsure (1)..(466): unsure at all n locations
ggnannttnnngggccgttctacgccggtnaggtaccggtcacaaattcccgggccgcttagaggatcaaagcttacgtacgcgtgcatgcgacgtcatagctcttctatagtgtcactaaattcaattcactggccgtcgttttacaacgtcgtgactgggaaaaccctggcgttaccaacttaatcgccttgcagcacatccccctttcgccagctggcgtaatagcgaagaggccgcaccgatcgcccttcccaacagttgcgcagcctgaatggcgaatgggacgcgcccttagcggcgcattaagcgcggcgggtgtggtggttacgcgcagcgtgaccgctacacttgcagcgccctagcgcccgctcctttcgctttcttcccttcctttctcgccacgttcgccgctttccccgtcaagctctaaatcgggggctccctttagggttccgatttantg

SEQ ID NO: 446949 - DNA, 495 bp, Triticum aestivum
  unsure (1)..(495): unsure at all n locations
gacttntagccggcctnttcggtgnacaaattcccggatagacgagctgaccaancggcgccgaactagaggatccaagcttacgtacgcgtgcatgcgacgtcatagctcttctatatgtcacctaaattcaattcactggccgtcgttttacaacgtcgtgactgggaaaaccctgcgttacccaacttaatcgccttgcagcacatccccctttcgccagctggngtaatancaanaggcccgcaccgatcgcccttcccaacagttgcgcagcctgaatggcgaatgggaccnccctgtagcggcgcattaatcgcggcgggtgtggtggttangcncagcgtgaccgctcacttgccagnnccctagcgcccgctcctttcgctttcatcccttcctttctcgcaacgttcgccgggttttcccgtnnaagcccnnaaatncngggggccccctttangggttccnattaangnctttacggnacccncg

SEQ ID NO: 446950 - DNA, 193 bp, Triticum aestivum
ctacacgatccacgcttacgaacacacgaatgacgagctagcacactcatcgcatgtgtcaccaagatcacagttcacatcacctcctactgcaacagggacactggcgacaacgctaacgatggacaacattaatcaccatgccacacatcaccgctacggcaacacgggccacaactgccatgccaccacc

SEQ ID NO: 446951 - DNA, 418 bp, Triticum aestivum
tacggtcgacaattcccggttcgacgggtgtgtgaactcgttctccaccttgcaggctccgtcgtggtgctcccacttctttcgtgtcactccgggtgaaaacttgatcttcaagatcagacggtcacggcttcctatggtcgtatccttcctggtcgtcttggagtcctcgcttcggccgtatccttggtggattgctcatctacatggtggtctccagcttatcatcagggtgcttggtcgtcgttggggtggtcttttcagtgcccggccatcttcatggtgtgtgcattgagtgtggtggtggagtgcgtttgtatcttcttactcgaatgttgtggtgatggttgctttatatataaagcagggaacccctttttcgccaaaaaaaaaaaaaaaagctaaaaaaagaaaaagc

SEQ ID NO: 446952 - DNA, 77 bp, Triticum aestivum
tccgggccgaagggtgtgttaactcgttctcgacctttcacgctccgtcgtgttcgtctctgatcgtacttgtctct

SEQ ID NO: 446953 - DNA, 461 bp, Triticum aestivum
  unsure (1)..(461): unsure at all n locations
ggatttanngggccntctancgggtncgtacggtcncnaattcccgggccgacgagctcctaancggcggccgctctagaggatccaagcttacgtacgcgtgcatgcgacgtcatagtcttctatagtgtcacctaaattcaattcactggccgtcgttttacaacgtcgtgactggaaaaccctggcgttacccaacttaatcgccttgcagcacatccccctttcgccagctgcgtaatagcgaagaggcccgcaccgatcgcccttcccaacagttgcgcagcctgaatgggaatgggacgcgccctgtagcggcgcattaagcgcggcgggtgtggtggttacgcgcaggtgaccgctacacttgccagcgccctagcgcccgctcctttcgctttcttcccttccttctcgccacgttcgccggctttccccgtcaagctctaaatcggggggcc

SEQ ID NO: 446954 - DNA, 492 bp, Triticum aestivum
  unsure (1)..(492): unsure at all n locations
gngaatgttacgccgccntctncgggggacaaattcncggacacgacgagctgactaatggcggccgntctagaggatccaagcttacgtacgcgtgcatgcgacgtcatagctcttcatagtgtcacctaaattcaattcactggccgtcgttttacaacgtcgtgactgggaaaacctggcgttacccaacttaatcgccttgcagcacatccccctttcgccagctggcgtaaagcgaagaggcccgcaccgatcgcccttcccaacagttgcgcagcctgaatggcgaatggacgcgccctgtagcggcgcattaagcgcggcgggtgtggtggttacgcgcagcgtgacgctacacttgccagcgccctagcgcccgctcctttcgctttcttcccttcctttctcgcacgttcgccggctttccccgtcaagctctaaatccgggggncccctttaagggtnccaataangggctttaagggcacc

SEQ ID NO: 446955 - DNA, 411 bp, Triticum aestivum
gggatgtgtgagatctggctatctagttgtttatccttagtagcctctcttaccgggaaatgtctcctagtgtttccactgagccatggtagcttgctactgctccggaacacttaggctggccggcatgtgtccttcttcgttcctgtgtctgtcccttcggggaaatgtcacgcgatgaataccggagtcctgttagcccgctacagcccggttcaccggagtcctgctagcccagtgctacagtctggattcactcgctgatgaccgacacgttcgatgctgggtcatggatgcctgtccctgtaagttagtgccactttgggttcacgactagccatgtcagcccgggttctttgtcatatggatgctagcgacactatcatatacatgagccaaaaggcgcaaacg

SEQ ID NO: 446956 - DNA, 392 bp, Triticum aestivum
gtggggagcaacggcggcaagtgggactgggtggatggtgttcctggatatggtgatggtgtataccgcggctttgtgttcgacggtgggttcacagcaatgccgtgacccgcgaggctcatggaaaaagatatcccagactggtgcgtgactaaatgcgctcaactaacgattttccattgatctgggacatccatctactgctgaagaggaactgatatctccatacattttatttacatcgtacttggttcttagcttgatgaaatacttccagttgttgtacttaatgaacatgaaatgatctgttggttcgttgtttcagacattgaaatgatgcagactgttatatgtttagacgataaaatgttaaatgtcgcatttataggaac

SEQ ID NO: 446957 - DNA, 402 bp, Triticum aestivum
  unsure (1)..(402): unsure at all n locations
atgccgccaaagaggaggccgcttggctccagcaccaggatgagctgaactcccaggaggaggaccttgccgcttgcgaggagaagctcgccgtgacactccgtgacaaggacgaggaggtccaggagctcgtcatgcagcggatccgggaactggaggagaggcacgaggagggcctcaatgcttaggcccaggcccatgccggcaaggtggacgagctggaggcagagcgtgacgggctgaagaggcaggtccaggagctaacggggtagagggacgcggccaagggtgctttggctcacgcataggccgtagtcctcgagaaggccgcgctactctccatggccaacgagtccatcaaggacatgaacctgaagctgganggcattgaagggacactct

SEQ ID NO: 446958 - DNA, 387 bp, Triticum aestivum
gggggggcctagccggagttgacgattccggcgaggcagggccgttccagcagctccaacagcaccatcgcggccagtggagcaccacgaacacccaggagaggtcgaaggaagatgaggggcgccggaggaagcagaatgccgaggcgcggtcggcggcgagctccagagcaagacggcggccagaggcccgcctgtcctggacgcggttatctagaggaagtgtgggcgccataggaggagggtggtgtggtcgaacgggctcggaggggtcttatttataggcggggcgaggaaggggatcgagagcaccggcgagctctcttggaggaggtgcacgacgacgagaggcgtcagggagagagaggcgggagtggtcaggggtca

SEQ ID NO: 446959 - DNA, 390 bp, Triticum aestivum
attcccgggacgacgggcaggcaaatgctcttgacacaaggatacctttggtttcattcacaggaagtacaaaggtaggtcaaatggttcagcaacaggttagcgcgagatttggtaaatgccttcttgaacttagtgggaacaacgccattattgtcatggatgatgcagacattccgctagctgtgcgttctgttctgtttgctgctgttggcacagcaggacagcgatgcactacatgtcgtaggctgcttcttcacgaaagcatatatcaaacatttcttgatcaacttgttgaggtttataaacaagtccgtattggggatcctatggaaaagggaccttgctggaccaacggcaactactacatcaaaaggaaagctttttgaa

SEQ ID NO: 446960 - DNA, 411 bp, Triticum aestivum
cggggtggctcaggcggcgctagggtttcgggtgctcgggtgctacggctcgggcctccgcggctttaaagggttggccgggctaatgttccaggcggacacggcccggttaggtctgttgacttttttaaaaataaaaaataattccacttagaaaaacaaagaaaagaaatactaaacggactccaaaaatcctgaaataaattttccccttcctctaaaaatctaacggacaaggtgaacatttatttgggcctctaatgcaaattttgaaaaacgcatattattcctaattcaaataaaatagcgataaaaactccgaataaaatcttatttgattttaatattaaatctccaatatttcttgactttggggaagtcattttatcccctcccttttaatttcaaaaa

SEQ ID NO: 446961 - DNA, 491 bp, Triticum aestivum
  unsure (1)..(491): unsure at all n locations
gannttannggccttcttngctggtcagtatcngtgatgaaattcccgggccgangagccactaancggcggccgctctagaggatccaagcttacgtacgcgtgcatgcgacgtcatgctcttctatagtgtcacctaaattcaattcactggccgtcgttttacaacgtcgtgacgggaaaaccctggcgttacccaacttaatcgccttgcagcacatccccctttcgccagcggcgtaatagcgaagaggcccgcaccgatcgcccttcccaacagttgcgcagcctgaatgcgaatgggacgcgccctgtagcggcgcattaagcgcggcgggtgtggtggttacgcgcgcgtgaccgctacacttgccagcgccctagcgcccgctcctttcgctttcttcccttccttctcgccacgttcgccggctttccccgtcaaagctctaaatcggggggccccctttangttccnnatttaagngctt

SEQ ID NO: 446962 - DNA, 408 bp, Triticum aestivum
ggggatgggacgtaagactgcaatctttctccaattatctacctggattattatattcggtgtctatgttgtttaccgtttactattagccagtatgtgccaaaaagggaagatctgagatggagcaaaccaattcatggctcttctaacgcgaatgtagatgcgtcatacaatgaggattaagcagcaccatgtgccacatgagctgttatgcatgatgaggggggtcaattcattgccatagcaacgtagtttataacatacgtaccgaatgcggaagccgctgaaacactcgcccttcgaattggtcttcttccggctgagcagccaggatgtaacaaactgatggcgccatggcggaatctgattgttccctggttatcgatgctatcaacgatgctgagaact

SEQ ID NO: 446963 - DNA, 417 bp, Triticum aestivum
gagaggaaaaaaatatttttcttaaatgaatctagtcaaaccaaaatattgatttaacccgaatcggatgatttttggagtctgtatttattggtggaaaagaggcttagagtcaaaggctaggcaatgtgggactaaacgtagacaaaaatatatgaaacagagaagaaaagaggcggatgggcctaaaggccttcggcccgccgcgcgcacgctgcagctgcagttttttttaaacaaaattcggcctaaaaatgaaaaggctggctaggcctggctcatttaagagaggaaaaaaacaatggggcgccagaagctactatactgcgcatgtaggcgacaaataaatatgggccgcacgtacatttttttaaatagaaacagaaggaaaaccgaatagcaaagattaaataaaaa

SEQ ID NO: 446964 - DNA, 407 bp, Triticum aestivum
aaggagtgggtaattatgaaattgagaaatacttttgttgaagttggcaagtcccatagcatgcacgtatggtaaaagttgtgtgacaaatttgttgcatgaggtgctcttttcattgtcttccttatgagtggcagacggggacgagcgatggtcttctcctaccaatctatccctcttggggcatgcgtagtagacttttgcaataagtatatgagttctttttgactaatgtgagtccatggatatacgcacactcatccttccattttgctagcctttattattaccgagcaactttcgccggtatcatgaaccctttatttaccttcctcaaaacagccaccatacctacctattatggcatttccatagccattccgagatatattgccatgcaactctcc

SEQ ID NO: 446965 - DNA, 408 bp, Triticum aestivum
gggagcagccacaccgaccactacccgagggaccacaagatcttcaaggaccccatctccttccacaagcgtgggttcgagttcatcaggcgcaccttcatggacaagcagaacgtgaggctcgactgcaagaggttcagacctgtgctgctggaggcactggacaacctcaaccagtaaatttaaggcaacttgccacccatttttaccattcgtttcgtgaaatttgatgttcattctctcatggcgtgtatgtatggtctaaactatagagattttgtctaggaattactcgtgtaaactgtataaattaaattgcccgccgctgcaaagatggaacgaaattcattgaaaaaaaaaaaggataatacaaaaaaaagaaaaaaaaagaaaaaaaagaggaacaac

SEQ ID NO: 446966 - DNA, 378 bp, Triticum aestivum
cggggtgacaaattgtaaataaaattgttgtatcgcgacctgaatgaatgaaataaacgaaataacgctcttgttcaaccgtcaaaaaaaaaaaaaaaaaaaaaaaaaaaaaaaaaaaaaaaaaaaaaaaaaaaaaaaaaaaaaaaaaaaaaaaaaaaaaaaaaaaaaaaaaaaaaaaaaaaaaaaaaaaaaaaaaaaaaaaaaaaaaaaaaaaggggcccccaaaaagattaaaactaaatatccgggaaaaggaaattaaaaacccctaaaaaggggacacaaaattaaattaaaggggcgacttttaaaaaaattcaaacgggaaaaacccgggggtaaacaaaataaaaccccttaaaaaaaaaccccttttcc

SEQ ID NO: 446967 - DNA, 494 bp, Triticum aestivum
  unsure (1)..(494): unsure at all n locations
gnnnttttngnggccttctncgcgggtcagtaccggtctgtaaattcccggggccgacggctcactaatcggcggccgctctagaggatccaagcttacgtacgcgtgcatgcgacgtatagctcttctatagtgtcacctaaattcaattcactggccgtcgttttacaacgtcgtactgggaaaaccctggcgttacccaacttaatcgccttgcagcanatccccctttcgccgctggcgtaatagcgaagaggcccgcaccgntcgcccttcccaananttgcgcagcctgatggcnaatgggacgcgccctgtagcggcncattaagcgcggcgggtgtggtggttacgacagngtgaccgctacanttgccagcgctatagcgcccgctnttttcgttttctcctctcttttctcaccatnttcggngtttttcntcaancancnnaanangggggggccctttangggnnncnnttattggttnacg

SEQ ID NO: 446968 - DNA, 372 bp, Triticum aestivum
gatgccggctacctgcacttctttacccaagtcgtgacctgccatgaaagcagggccgctagggctcgtcagctcattaaggagaagagtcggtatctccctgggcgtgcattctcgcgcgtcttcagctaccttctcagcctggatccggattttgacttcaacaccgcgatagcccccctgcccggggtcgtacagggcgacctggcgagatgggtggacgatcatcttgacgacctgattaaggagtttgctcttgctgacgacgtggctgcactcgcaaccaaggagggcggagccaacgatgatggcgacaacgacgatatgggcaacatcgcgtcccgctaggcctgtacttctttgctcttcctg

SEQ ID NO: 446969 - DNA, 259 bp, Triticum aestivum
ggggttttgaatacatcaaaggcgtagtgttggatcctgtaccttttgacattgaaagggatttggtcactgcaacaatgaagaagagaagaaactacatgctaaaatattatcagcctgagattgacaaattatacaaagcattggagggtcagagggctgcgaacaaagcaaagtaaagctatgtgttttgttaggtcacatgccggaatattattgtaaatctaccattgaacgacgttggtaatcaagactacat

SEQ ID NO: 446970 - DNA, 431 bp, Triticum aestivum
attcccggttcgacggggtggtgtagtgtgggtgatgctgcgctctgacgaaacatctgtgacggtgttactggcaatgaatttataggattttttccctcttcacctttgagttagtaacctttctccccaaaaaaaaaaaaaaagaaaaaaaaaaaaaaaaaaaaaaaaaaaaaaaaaaaaaaaaaaaaaaaaaaaaaaaaaaaggagcaaaacaaaaggaataaaagctaacaacaaaataaaagcaacgtcaaagtccctgaaacgtagtcaaccaaattcaattcatcgagaagtcgttaaagaaaatacagagaggtaaaaccctgtagtcacccagtataacagcattgtaacaaaacccggtgtcaaaagcaagaggaatacccaaaaggcccgtaccaatagcggtgcacaagaattgggca

SEQ ID NO: 446971 - DNA, 241 bp, Triticum aestivum
gggaattacccacggttgtcgtccggcgagcgctgagcggcacggcggtggctgcagagttttttggctgcagagttagcatagggtgtttttagttcttagtttctttagtttttctagctttgaccgatgtatggtccgaaaatgtctgtaattttaagcttttttgtgtaactttttcttgctgtgtttatattttttttctctctatgtaatgacatgagcattttttaagaaaaat

SEQ ID NO: 446972 - DNA, 411 bp, Triticum aestivum
gggcgtcccgggcttgataacagggagatgggttcctacctcatgcattctactgaactacaagaattcaatatcactactggagggattatgaatggtgacaataaatgcaataaaacataggtgtgaataacatggttaaattgaacttacctggtaagttgatgaagatgttaacgctcttggaaactttgataaactattcgttactccaagaaaatctatatagtcaaacattgcattcacataagcaacaatcctagcaatcaattataccaatcaaaaagcaataaataaagcaataatgatttcaaagaaaatcaaataaaattccaaagaaaactctaaagaaaacaagggcgaaaccaactcacagaatatcaatcaatactcgcataacaactctaaact

SEQ ID NO: 446973 - DNA, 96 bp, Triticum aestivum
gggcggcggacggatgtatttgctctccagtgcacgtgttgtctcgattgacgacttgttttcttctatgtatcgaatatgtggaatattatttgc

SEQ ID NO: 446974 - DNA, 237 bp, Triticum aestivum
gggggcgcctaaccggtgctgccgaaacccgctattctgccatgagctagatgcataattcacactaccgatacaccattcatgatgagcatatatatatgtacgcactcacttcgagtgttacatattagctatatatacatatagctaatataattgtacgtagtacttgttttattctgcaaaaatgtctcttatcaataaattaaactggttggcgaatagcttatctcggac

SEQ ID NO: 446975 - DNA, 407 bp, Triticum aestivum
cgggatgccgcattcgtcctgttacatcgtcttcacttcatctcgcccgccgtcaaaaccacctccaccggcacagaagtcgtgatgatcgatgtctccccaagctcaggttggatggccaccgtccgcggccgatgccttgccctttcccttggaacaggttgtcatgtggcgcactggaagcacccattcacagtgagactcctccaaggctgcgaggagcaaggacatggtgcattgatcgcattgttgtagaaggttaatccaacgcactcacgccagagccgagacaccatacctgcatgcatgttgttgtgctgtgggtgtgcatgtactccctttgtaccgaaatatttctagttgaaaagttatcacgtaaaatgtaaccgtttttaaggaaagaaaaa

SEQ ID NO: 446976 - DNA, 448 bp, Triticum aestivum
gggtttggcacaattgcctgtttgcttgcctggctagtccaaagtcatgatatttttgttatagaattatttttcatagtctaaaataattagagataaatattggggccatgcgtagctatcatcatgggtagcaagttatttctctatgcacaatgccttcctctcaaagtctggctctttttgttttgcgagggaaagtcttgctctttttaacgggcaacgatgcaacgactccttatgcgatacacaaataagtgtaccccgctaagctcgcacgtataccacaactcattcactctattgtcaaattttcacacactatactagaagtttattttaaaaagaatcgcctcgtagcactagtaattctgttaccaaatgaatgtacatcctcctttagttcctccaagtctaacaaaactttcccgtaaaaaaatgtcatacc

SEQ ID NO: 446977 - DNA, 371 bp, Triticum aestivum
  unsure (1)..(371): unsure at all n locations
gattcttcatctatagtgatggctgcaccaattttacgagtcactaccatgcatatcaattcggccattcttgctgcaanaagccctttctttttcaagcttttctcaaacggcatgaaagagtctgacaagggacaggcaacacttcgaatagctgattcagaggaaaatgccttcatggagcttttgtactttatgtatagtggaaagttgacaccaacaactgagcccactcatctggttgatatcttgatggctgctgacaaatttgaggtcatttcttgcattaagctttgcggtcagttgctcacaagcttgcctatgaccccagaatctgcagtgctgtgcctagatctaccatattccatttc

SEQ ID NO: 446978 - DNA, 496 bp, Triticum aestivum
  unsure (1)..(496): unsure at all n locations
gnnnnnnttnngngccttctacgccggnnangtaccggtcanagaattcccgggccgacgggaaaaaaaaaaaaaaaaaaaaaaaaaaaaaagcggccgctctagaggatccaagcttcgtacgcgtgcatgcgacgtcatagctcttctatagtgtcacctaaattcaattcactgccgtcgttttacaacgtcgtgactgggaaaaccctggcgttacccaacttaatcgccttcagcacatccccctttcgccagctggcgtaatagcgaagaggcccgcaccgatcgccctcccaacagttgcgcagcctgaatggcnaatgggacgcgccctgtagcggcgcattaagccggcgggtgtggtggttacgcgcagcgtgaccgctacacttgccagcgccctagcgcccctcctttcgctttcttcccttcctttctcgccacgttcgccgggtttccccgtnaaaccnaaaatncgggggcnccctttagg

SEQ ID NO: 446979 - DNA, 128 bp, Triticum aestivum
  unsure (1)..(128): unsure at all n locations
ggggggtctntttatntnntntatttcatnattgtgtactttnttanctgttcctcnctcatttnctttgtctcatnaatccttttacttttngtttcgnttgnantgtcgattgantctgagngttt

SEQ ID NO: 446980 - DNA, 395 bp, Triticum aestivum
  unsure (1)..(395): unsure at all n locations
ggggagccataggaatcttgcttgtttatgacgtcacggacgagtcatctttcaacaacatacggaactgggtacgcaacattgagcaacatgcctctgataatgtgaacaaaattttgataggcaacaaggctgatatggatgagagtaaaagggctgtttctactgcaaagggacaagcactagccgatgaatatggcatccagttctttgaaactagtgccaagacaaacctcaatgtggagcaagttttcttttccattgcccgagatattaagcagaggcttgctgagactgattccaagcccgaggaccggacgatcaagattaacaagacagaaggttctgagaatccagaatctcagaaatctgcctgctgtggctcatgangagta

SEQ ID NO: 446981 - DNA, 95 bp, Triticum aestivum
gtcatccaagaagatcctataggttttacttggcacaaacactaattaaaacataaaacacatctaaccagaggctagaacaaatatttattcct

SEQ ID NO: 446982 - DNA, 320 bp, Triticum aestivum
cggggaggcagatggtcggcgtatccttggcgcgggatggctcagaagaacagaccaaggcgatgagataagaggagggctcagaattgcctgccaccagtgtgcgtgccgtccagaagaagcggcctgcatcaatggctctgcagttgttctacgtactagtacttctttgttcgaaagaaacacaattctgtagttgatcgtggcaaaattctttgacatggatccaccaacggggcatccatctgaacttttgttgcagcatcagtatgtgcactgtttaacccgcaaaaaaaagcatgtgctatgtttttttggcg

SEQ ID NO: 446983 - DNA, 68 bp, Triticum aestivum
gaaggactggatgacacgcggagaagagaacagggttaacgggttcggctgccggtgaagaagttggc

SEQ ID NO: 446984 - DNA, 397 bp, Triticum aestivum
gggtggagctagtaggggccggatccgtgtgcagcagaggctggggaggccgattcggaggcaggcggcgaggcaggggtcgccggtgacgatgaggaaggccgaagcgtggtttccctggcagatccatggcatccgcggttcctgggcagaaagaagagtggagatgagggagagaaggaggaaggaaggaggggaggtgtggtgtgctaggcaggagctcgccggagccgagcgacggaggacgtgcgctgcagacggagggatccagagccggccggtcgggcgacagtacaccaaccaggccaggggtggcatacgaatgaggacttcatcaccatcagttcaatcaagtcaggatatcacatgtctacaacgccattttttcctcacattc

SEQ ID NO: 446985 - DNA, 400 bp, Triticum aestivum
ggggcatttaaattagagatgacaaaaaacatgtctacaatgggtcatttcttagccttatcttaaataataactagttattcctaaaaacgtggtgagacatattgttttaagagattatctcatgtcttctcttaaataagagaagacaagcattctcttagggcatgtaaaatggttgataagacagtcttatcttaagtcttgcatgtaattagaggcgacccattaggtcatgtacaatggctcataagatagtcttatattaagtcttgcatttaatttagaaatgacaaaaaacatgtctacaatgggtcatctcttagccttatcttcaataataactagctatttctaaaaatgtggtgagacatattgttctaagagattatatcatgtc

SEQ ID NO: 446986 - DNA, 376 bp, Triticum aestivum
ggcgaccgaggcgatggactgctgagggttctgccttggtgaaattacgggtgcaacgtcgtgtccaattgctgggcctaaagtccaatcctttaaaggttcgagttccgggccaaaatttgtaagccggcggcgcaacaacaccattgccccgggcatctacaacaacggcaccgaatccgtatccatataccaccaccaatccgtgtccatataccaccaccgatccatatccatatactaccaaccccaacagcccccacaacctcaactgcagctgcatcctcaagcacagcagcctcaacaaccccaatcgcaactgcatcatcctcaatcacagcagcccctgcatcctcaactgcaaccgtatactcag

SEQ ID NO: 446987 - DNA, 388 bp, Triticum aestivum
ggggagtgaacaaaaaaaaaaaaaaaaaaaaaaaaaaaaaaaaaaaaaaaaaaaaaaaaaaaaaaaaaaaaaaaaaaaaaaaaaaaaaaaaaaaaaaaaaaaaaaaaaaaaaaaaaaaaaaaaaaaaaaaaaaaaaaaaaaaaaaaaaaaaaaaaaaaaaaaaagggggcccccccaaaggttccaatttttttttcccttcattcgcactccaaacccctcccaatggtccccccaattttatttccagggccctttttttaaaacctttttccgggaaaaccccggggtttccccaatttaaccccttttgaaaaaacccccttttccccaagggggtttaatccaaatggcccccccccttttccccttccaaaaattttccccc

SEQ ID NO: 446988 - DNA, 412 bp, Triticum aestivum
ggccgacgggtgtacccagcggaggccatctatgccaacgctggggtctacctcttcaacaacgccaccagcgcccgggtcaacgtcacgaggctcgtcgtccacgagatggactcctcctacaatcaggcctacatgacctcactgtaaaaagaaaatgcaaatattatttttgtttagtaaaaatatgatagatagcacattgtatgtactgtttttagaccaaggaaggtcgtctcatttcttcgttacaaaaaaaaaaaaaaaaaaaaaaaaaaaaaaaaaaaaaaaaaaaaaaaaaaaaaaaaaaaaaaaaaaaaaaaaaaaaaaaaaaaaaaaaaaaaaaaaaataaaaaaaaaaaaaaaaaaaaaaaaaaaaaaataatataacataaaaaaaaaaaaagggggc

SEQ ID NO: 446989 - DNA, 387 bp, Triticum aestivum
ggggaagatgacttgtttataagctcagttgcctcttgctcaaatttgtgggctctaataatggatgctggcactggctttacttctcaagtctatgaactttctccatattttcttcacaaggaatggataatggagcagtgggagaagaacttctatatcactgcgttagcaggtgcaaacaatggtagttctctggtggtcatgtctagaggaacacaatatgcacagcaatcctacaaagtaggtgactcgtttcccttcaagtggataaacaagaagtggaaggagggtttttacgtcacagctatggccactgcaggaagccgatgggcagtggtcgtgtcccggaatgctggctttgtagatcaggttgtggagcttgac

SEQ ID NO: 446990 - DNA, 377 bp, Triticum aestivum
gtaaccacggactgaatttcgcccacaaccggaacatgccggtaatggaccgtaattaaccgaattctggaaatgagcccaagaataaatgggcccttagaaggctgaaagttaacacgggctggaaagggtcaacggaataatggactgttaatgggtataaagccatacactattcattatgggtcagtttcaccttgggcctttagtgggcccatagttacaaaggaccttgcatgggccgaaagacgttatgggccatacatgggccgaaagttacaactgattgtaatcatattggacggtccagatgacgttgctgggcctaattcggataggccataacgggccgtgagttagcgaactgtaaatgggct

SEQ ID NO: 446991 - DNA, 354 bp, Triticum aestivum
ttctgacaagcaaatgttagattgcctaggagaggcacacacaccaccagaacccgctatacagctctccacggcaatgcttttgagcggcggagcgtcatcacactgctcagctttaactgatttccttttcctggcataggtcaaagctgctgcattgatgctaggagcattattagatgaattctcatgatccactaacagcgttcctgcgacggtcgcgagcaaatcaaacggggacatctcatctttctttctcctggctgagcgtttcccctgaatcatcaccgggcgttaatacataatatccagcacgaaaattgcgcggggtcatggcaggtagtacaggatatc

SEQ ID NO: 446992 - DNA, 120 bp, Triticum aestivum
tggactgtttctagggtatactccatacactatgcattatgtgtcaatttcacgttcgccctttaacagctccatgcctgcataggaggttgcatcagctgactgacgttatccaccaca

SEQ ID NO: 446993 - DNA, 219 bp, Triticum aestivum
  unsure (1)..(219): unsure at all n locations
taccggctcgaaaattcccgtagtcacggggggtgtttagtgcctgaaggagcattcaggttcaacgatctggccctcgccattgagaccaacggtgtcgtcctccagtacatcctggtacgtacacatgaaaaagtgggggatcttcatggggggcaaacctgcgtggtgaccccctatccaacatctgcggacttancaaanaagaaaaaaacggat

SEQ ID NO: 446994 - DNA, 423 bp, Triticum aestivum
tcccagcggtactaccggccacatgaccggtactaccggcttgcctgcgcgtagtgaagggggttttcacctcatgtatcctctcccacttaccccttcgtggcttagactttaaatagaccacctccaccttctttctaggggaagcaaatatgatagctcattcttaggtgagctttgctcctacctctacctaagaggcaaggctctatacactagaatagttttgatgtgtcccgtcaactcacagaacgaggagaagctttcttagtatgccgtctcccccgccaacgggcacggtggcttgcaggatgaggtgaagcttgcttactagtacgccttatgcccgctccctggcccaagcgcgtggttgatcacaggacaaggagaaaattttactactccgtcgtttactcctcaacc

SEQ ID NO: 446995 - DNA, 424 bp, Triticum aestivum
cgaggacgaaaacagctacaaatgggccagctgcctttggttcagatatgatgaaacttgagcctgctaacgatggggaaaaagaaagtgctcgtcataagaaggggaaagataatgaggagggtaataattctgataaaggtgaggagaatgaagaagaggaagccgctcgtaaagataggctcgggctctctaaaaggggcatggatgacgatgaggaaggtggaaaagatctagattttgatttggatgatgacattgagaaaggtgatgactgggaacatgaagaaacattcaccgatgatgacgaggctgtggatattgacccagaggagcgggcagatttagctcctgaaattcctgctccacctgaaattaagcaggatgatgaagagaatgaggaagaaggtggcctgagcaagtc

SEQ ID NO: 446996 - DNA, 495 bp, Triticum aestivum
  unsure (1)..(495): unsure at all n locations
ggnngnnnnttggnaaggnntacgccggacggaaacggtcagnnantcccgggtcnacggggctagcnntggcgctagggtttgtgtgagagccaaaaaaaaaaaaaaaaaaaaaaaaaaaagcggccgctctanaggatccaagcttacgtacgcgtgcatgcnacgtcatagctctctatagtgtcacctaaattcaattcactggccgtcgttttacaacgtcgtgactgggaaaccctggcgttacccaacttaatcgccttgcagcacatccccctttcgccagctggcgaatagcgaagaggcccgcaccgatcgcccttcccaacagttgcgcagcctgaatggcgatgggacgcgccctgtancggcgcattaagcgcggcgggtgtggtggttacgcgcagcgtaccgctacacttgccaacgccctancgcccgctcctttcnctttccttccttccntttcgccaaantttcgccnggtttccc

SEQ ID NO: 446997 - DNA, 187 bp, Triticum aestivum
  unsure (1)..(187): unsure at all n locations
attcaagggccaacgggaacccaaaangnaaaactttnnntctaaaatcagacaaaaaagaaaggaaaacaaatcaaaggataaaaaggaaataaaaaaaaaaattttaaaaaaaaaaagcgggcgccccaaaagatgtaaacttaactttacctgcaatgaaagttaaaagccttccaaaatgtta

SEQ ID NO: 446998 - DNA, 412 bp, Triticum aestivum
cggccgcgagaaacacggaggcatcgggcggacgagacggcgatgacgagcaggcggccatgtcatgtcttaggggtgagtgttggcaataagccatgcatgtgatggtggcgaccggcttgaaggcaactaggtcaagtctgtaccgtgtgtgtgcactcaagtccgacacgtacggcatagccgatggcaagtgtgccggccaagtctgctagatgcatgcacgtagttagttggagcgcatctcatgctcgaccatgtcgttgccgttgaggtatgatgcgcatgtgctatatgtacgtgcatgcatgtaggagtcagcaagaagttagctggttagtggccggtgggcgtgcgtgtgtggtggccgggttagtggtgtgcgtgcatctgtgctagcccgggtataaaa

SEQ ID NO: 446999 - DNA, 226 bp, Triticum aestivum
tgtgatatgtcaagtagtggacagataagccaaccactggatgtggttttcagggatttttgcagtgggatttgtagggtactatgctgcgctgtgtttgggatttgaaatagaacgatgggagatgtgccacgctcttaaaatcaaacacataaggcaaaaaccaatagcaaatgtgccagccaaatctgcaacatgcatgcacataaaaaattggccgcccatc

SEQ ID NO: 447000 - DNA, 378 bp, Triticum aestivum
gcaggttcaagggaaagatgcgacggagttagaagttgcaagtatgaattgttatatctcgacctgacagaattatactaaataatgctcttgttcaatcgtcaggctccggttcaagtactgcaaaaaaaataaactagatcagatttaagaaactcaagattatgttcaaaaagaagtttgaatatgaatctgaaaaaaaatttgaaattttaaaatctcaaaaaagttgatgtgacaggtgcactggatacgtgaaaacaagacgaacctataggctcaggtttcatctaatttggatacatgagtgaaaacttatggctatttgaaaaatcatggttaaacggttttacggaaaaaaattagctacgggaaaag

SEQ ID NO: 447001 - DNA, 398 bp, Triticum aestivum
  unsure (1)..(398): unsure at all n locations
ttcccaagtccacggggtcgtaccaaggcaagtatcagcttcgactgcttcacccacaggaaggcggtgctgatccgcgggttcngtggccaggcgaatgcaatgtacccgccctacacggcagagaaacagaggatcttgaggggcctcatcanaggcaccttctttgcgctgatccttgcgctcctggggttcccaagggagaagcgttagctgagttgagctccctcccttctccagtagagcatagcaggattgttcatgttcatgagggcgatgtggtgcacttctgcactgtgaagcgccagtgcgcgagtgtgttcaacaggtgtaaaatatgggactatcatcggatttctggatgtaatttaattttacataaataaacctggtttgcc

SEQ ID NO: 447002 - DNA, 407 bp, Triticum aestivum
cggggaccaaaaacataccggagtgaccggcacggggacgcacgacatcggcgagaagaagagcctcatggagaacatcaaggagaagctccctggcggccatggtgacaaccaacagaccgctggcacctacgggcagcagggacacgtcgccacggggacgcatggcaccccggcgaccggtggcacctatggggagcagggacacgctggagtgaccggcacggggacgcacggcaccggcgagaagaagggcctcatggagaacatcaaggacaagctccctggtggccacggtgaccaccagcagaccggtggcacctacgggcagcagggacacaccggcgcggcgacacatggcaccccggctggcggcggcacctatgagcagcacggacacactggga

SEQ ID NO: 447003 - DNA, 365 bp, Triticum aestivum
attcccgagtccacggggtcattgaaaagatcgacggagtgtgcacggacgctaaatctcatgtcagaacaatgtcagggacatcgccaacttcattgatgtagcactgatgatcattgaaactcacttctatattatcatgtcaggttagacccaatatagtgacccttccagtcagtcgagaattgcataaagaaggctacacccttgaggagtcctttacatgcatctagaggtttactcactacatgatacgtgctctagacttcagcatcatagtagatatgagtccccacgtttggattcaacacaatcattctgtgctttagccaccttttgagagagacacacatgattcagaactt

SEQ ID NO: 447004 - DNA, 420 bp, Triticum aestivum
  unsure (1)..(420): unsure at all n locations
ctcgccaccaactcaacaacggccgctgcatcaacctgatttgaccagagttcatccgcgtgcctccactattcaacaactttggtgagttctcctcctctagatcttgttagggttttcacgagtttgttggtagttcatcctcgttcttcgctgtagcttgtaacttttgattcagacttagtaccctcctacgcggcggtagacatggtaatcatttttgttattagaacatctcccttgcgtaagaaaaccaatctggacacatgaactgctcacgtactgcaacttaggtctaaatattttccattctctgaagtgtcgtagatccaaaattgtagcatcaatctgtgaaatctgtntttccaacacttagcaattttcccattctcagatctgtgaaattaatatttgtgcgtg

SEQ ID NO: 447005 - DNA, 411 bp, Triticum aestivum
cggacatcggcactgcgccgtgttgcctggcacaaccaaggagaacctaaaaaatgccaggaaaaggaaaactccgttccggttaatggcttcaaccaagccctccctccaaaaggggcaacgcttgaccctgaccaagacccaagtgaccacggtaacgcaaataatgatgatggtttgccaaatgagtatgtcctccgggcaaggcttaatctgcttcttcaaaaattggctgagaatgaccccaacccgtatgggacacccccaacgaagaaagaagcagtctaaaccctgcccacggtcaaaatctaagaggttgtcaactgttcaatctgtcttgatgatcttgatataaggtcccacgctaagcaattgccctgtgaacataaattccacccaccatgtatcctg

SEQ ID NO: 447006 - DNA, 495 bp, Triticum aestivum
  unsure (1)..(495): unsure at all n locations
ggnnnggnnnntttgnnnnggcttnnnnngccgaaaaccggtccannnnntcccgggtcacgagctcactanacggcggccgctctagaggatccaagcttacgtacgcgtgcatgcgcgtcatagctcttctatagtgtcacctaaattcaattcactggccgtcgttttacaacgcgtgactgggaaaaccctggcgttacccaacttaatcgccttgcagcacatccccctttgccagctggcgtaatagcgaagaggcccgcaccgatcgcccttcccaacagttgcgcagctgaatggcgaatgggacgcgccctgtagcggcgcattaagcgcggcgggtgtggtggtacgcgcagcgtgaccgctacacttgccagcgccctagcgcccgctcctttcgctttcttccttcctttctcgccacgttcgccggctttccccgtcaagctctaaatcgggggctcccttaagggttccgaattaatgctt

SEQ ID NO: 447007 - DNA, 54 bp, Triticum aestivum
  unsure (1)..(54): unsure at all n locations
tatttttcttncatttatgtttctnngttttgttgctttttttntngtttgtnt

SEQ ID NO: 447008 - DNA, 144 bp, Triticum aestivum
gtcaaaaattcacgggtcgacggcgagcacaaaaaggaaggcgagcacaagaaggacggggagcacaaggagggcatgatggaaaagatcaaggacaagatcagcggcgacggccacggcgacggcaagaatgacggcgagcac

SEQ ID NO: 447009 - DNA, 195 bp, Triticum aestivum
tcttgaaacccgatagcccagaaggaaagtcccgtaccaaaaaggaaactggttaaataataaatggggcaatttaagttttgccaccatccaaaccgaaaggaaaacctctgtccgggcgaatttaaccaaaaaatcatttatactggaaatggaacagtcccgttcaaaggatccatgctgacaaatgcctca

SEQ ID NO: 447010 - DNA, 377 bp, Triticum aestivum
  unsure (1)..(377): unsure at all n locations
ttcccgagtncacggggtccgtcgacggcatcgctctccactgtgggaggatcgccacttgcagtgcaacgtgatcaccgctccaacctccgtatcgctgcgcatcacggtgacctgatcctctcaccatttcactcactctctcagcaagctccgccatcatgatcctctgctgtganggggaatccgctgtcgagcacaagtcctcgtgtccatcatcgaggcaccatcatatcctcacaccacggcaaatggtacacacatactacgcataatgaggggatgtacgctattgcagaatggcaccgtcactctcccgttttacacactggccggacctagcctcccaaccccaaaggccttagccctgctcgacc

SEQ ID NO: 447011 - DNA, 73 bp, Triticum aestivum
acgggggagaagaaactgagaaggaaatttctgacgatgaagatgaggatgagaaaaaggaaatgaagaaggc

SEQ ID NO: 447012 - DNA, 421 bp, Triticum aestivum
gggacgtgtgttgagttcgtggttcgtggatggcaggtatggtttcctccttcgacgtcttagtcgcggtggggtgccagatctggagttcgatggcgtgttaagggtgttgtccccgtctgattcgttcaaccgcaatggcttcacttttggtgagccaccttgaaagtcctcaaagctgcatatcagtgatggcgccacgtcgagttaaggtgaggaggtgatccgtcattcttttcttcggtggctgttgtgatggtgcaggaggcaggtgacgggcattgacgtcaagctcaaagatgttctactatcttttcagttttgtcatgtaggtctttacatgacttgtattttgttcaatatgatatgaatgaaacgcgtattgccaagcaaaagaaacattccttgataaatattaatt

SEQ ID NO: 447013 - DNA, 488 bp, Triticum aestivum
  unsure (1)..(488): unsure at all n locations
gtnngnnnntttgnnggnttagccggccgaaacggtcannaantcccgggtcgacganccactagacggcggccgctctagaggatccaagcttacgtacgcgtgcatgcgacgtcatgctcttctatagtgtcacctaaattcaattcactggccgtcgttttacaacgtcgtgacgggaaaaccctggcgttacccaacttaatcgccttgcagcacatccccctttcgccagcggcgtaatagcgaagaggcccgcaccgatcgcccttcccaacagttgcgcagcctgaatgcgaatgggacgcgccctgtagcggcgcattaagcgcggcgggtgtggtggttacgcgcgcgtgaccgctacacttgccagcgccctagcgcccgctcctttcgctttcttcccttccttctcgccacgttcgccggctttccccgtcaagctctaaatcgggggctccctttanggtccganttaatggctt

SEQ ID NO: 447014 - DNA, 398 bp, Triticum aestivum
gggttgaagtacgcagatcacagatcaaagtgccctttgtgccgacaggctggggtctttcctaatgctgtgcacttggacgagctgaacatgctactaagctatagttgtccggagtactgggagaagagaatgcagatggaacgagttgagcgtgttcgtctggctaaggagcactgggagtcccagtgcagagcattcttgggcgtctgatggaacatgtagacttcgtacaaaaatgggattccccattgctgttggttagatcttgatttggcatgactgtaatatatttgtatctatcctgctgaatgaattggtctgtaattgggaggtcacttgtgcgcctagatgtaaaaaggggtaaacttgtagtgattatctgaatgtaaaattgc

SEQ ID NO: 447015 - DNA, 97 bp, Triticum aestivum
  unsure (1)..(97): unsure at all n locations
aangccngcggggnngtttcttgcgttggttggcngtttggcttctntccnacgnncggtnccttaattttccntggggtcccattttttctnnnga

SEQ ID NO: 447016 - DNA, 404 bp, Triticum aestivum
cggtcaaggactcccgggtcgacggacgccaccaacgcgaccaagtacgacacctacgtcgccagtctcaccgagtcgctccgcgtcatctccggcgccttcgaggtccatccgtcaagcccgccgccgaagaggtcaaggggatccccgccccgcagctcaagaccatcggccagatcgacgccgcctacaggaccgccgccaccgccgccgacgctgccccggtcagcgacaagttcaccgtcttcgagtccgccttcaacaaggccatcaaggagaccacgggcggcgcatacgacaactacaagttcgtccccgcccttgagtccgccgtcaagcatgcctacgccgccaccgtcgcctccgcgcccgaggtaaagtacgccgtcattcaggccgccctg

SEQ ID NO: 447017 - DNA, 364 bp, Triticum aestivum
gggggattctattgcgatttcgttggcaaggatgaatgatctaatcgctcccagtgacagctgattgatctaggttcactaacaggacgcgagaggctatggaagtcaggtttgttcgtatggataatgtttgggagcagtgataatcgatgagacgttaatctcaatatgtacgataataattcctcaagatataagtgtaattccaaaatattattcgtaaggaacttaaaaagatgccctttgattttgagaatagtgtgaaagaatttatgatctcggacgataattttaatgcattgctagatgaacaattgcgtacagttaaagatttggataggaacgtctatatacattcgattga

SEQ ID NO: 447018 - DNA, 427 bp, Triticum aestivum
cggtcaaagactcccgggtcgacggggttgagcaaactaggaaaagaatttgaaaacgatcttggagaagacatttgactgatgataaatcattcttacgtcaaactttgaaaagaatttgcgaatacctccgggaaaataagaagagtcaggtaagatcctggaaaagacatgtgggttagggcccactcaaaagaaacaccgtagaacgattgcttgaaaagagagagagcgccggttgaattaaatggcttgaatgagataacaacctcgaaatattttgaactgatcttgaaagacgagacgagccttttgagatatcttgagcactccgggacaatagaatagcgagagatgaacgattaagaattgcaccggcatgagaaagcattgaaatacggaaaagaatatgatcacacaccgaaag

SEQ ID NO: 447019 - DNA, 421 bp, Triticum aestivum
ccgggtcgacgggcattcgtacaccttgatttcgagtgtgaccacaagccagagcactcgatcctcagcaagcttcctagcagccagccttgattaccatctgaattcactgtggaaaacgcaagatgttggctattttgcttgccgtgcaggattcgctacagtacatggtgtcttgcgctatatggaagggctgaagttgagctaggcattgttggccatctaaatgagataagaaccagcgttggagactgtatagacttgttttgcggagccctctaagtgtcatgtttcgagtaaaagtaggttacttttgcttcttgaagctgtcattgtttgtctgccacgagggctgcaatgtggaaatgtttgccacaaaaagaaagcaagcgatttttgtgtgctcaaagtcagttttgtg

SEQ ID NO: 447020 - DNA, 142 bp, Triticum aestivum
gacggcgacgaggacaacgacaaaaccttacattctgtgagctctaggtctttttgaggtttataatctagatcttatactgttccatctgccgtgtcatggtttgtgatgcggattatcttagtaaatgtatgcttcgttg

SEQ ID NO: 447021 - DNA, 302 bp, Triticum aestivum
attcacgggtcgacggcgtcagggacgtcggtcgcccggctggcaggtagttagccggtcatgccactgattctggtatgaaatctagcagtagcaccgacgacgtcacagcttattcagaggaactgatgtgataaagatccccattatcgggcgaattttggttgttatttaaggtctgtagaccataagctcagatgaagttgatgagtgcgtgaacccctggtgctagtgccatgaattttctgctctcataaatcgggtcttgcacttgtatttcatataacatgttttgtcattgt

SEQ ID NO: 447022 - DNA, 160 bp, Triticum aestivum
acggaactctgaagagaacactaacctttttgattccgccatggcaaagggaaagcaaaccgtaaagaagtgaacaagaaagaaaaggcaaattaaattgcaaaggttaaattggggaaaagaaaaccaaaagcaaattgcaagttataaaatgccaagg

SEQ ID NO: 447023 - DNA, 372 bp, Triticum aestivum
ccgggtcgaccgaggagagctgagctgaccaactggtttgcgccatgtcataacccgtcgattgcggcagctcatggcaacttcatgacctgcagcatagaatctccatgggagacctgccgtctggtggcacacttcaatcggcatacaacagatgacccgttcatcagactgtatacaaaggccaacgatggctcatatatcgatcacaaggagatccccctggtgtggcatcactacgacgcggattgaaacttcggttcatgccaggcgaatgagctgctcaaccatctcgagagcgtgatcgctaacaacccggtcgtcgtgaatacgtgccattacatcgtggcggttcatcctcagggcatcagc

SEQ ID NO: 447024 - DNA, 494 bp, Triticum aestivum
  unsure (1)..(494): unsure at all n locations
gggngnnnntttggnaagctctacgccggtcgnaaccggtcatnnattcccgggtcgacagctcactaaacggcggccgctctagaggatccaagcttacgtacgcgtgcatgcgacgcatagctcttctatagtgtcacctaaattcaattcactggccgtcgttttacaacgtcggactgggaaaaccctggcgttacccaacttaatcgccttgcagcacatccccctttcgcagctggcgtaatagcgaagaggcccgcaccgatcgcccttcccaacagttgcgcagcctaatggcgaatgggacgcgccctgtagcggcgcattaagcgcggcgggtgtggtggttaccgcagcgtgaccgctacacttgccagcgccctagcgcccgctcctttcgctttcttccctcctttctcgccacgttcgccggctttccccgtcaaagctctaaatcggggggtcccttangggtcccaatttaangcntt

SEQ ID NO: 447025 - DNA, 140 bp, Triticum aestivum
ggtcaaagactcccgggtcgacggaggcctcctctggtcgcgtgcgtcggtgtgcagctccatggggtcgggacggagctcctgagctcatcggaagggcgaggggtggtcggtggccatgggtacggcgacgatgacgg

SEQ ID NO: 447026 - DNA, 493 bp, Triticum aestivum
  unsure (1)..(493): unsure at all n locations
ggnnggnnnnttnnnaagcnntacgccgntcggaaaccggtcacnaattcccgggtcgacccaaaaaactngattagggtgatggttcacgtagtgggccatcgccctgatagacggttttcgccctttgacgttggagtccacgttcttaatagtggactcttgttccaaactggacaacactcaaccctatctcggtctattcttttgatttataagggattttgccgatttcgcctattggttaaaaaatgagctgatttaacaaaaatttaacgcgaattttaacaaaatataacgcttacaatttaggtggcacttttcggggaaatgtgcgcggaacccctatttgttatttttctaaatacattcaaatatgtatccgctcatgagacaataaccctgataaatgctcaataatattgaaaaaggaagagtatgagtattcaacatttccgtgtcgcccttaatccttttttggcgnaatttgcct

SEQ ID NO: 447027 - DNA, 345 bp, Triticum aestivum
gcccctcccctccaattgcaaggcgcccaaatccggagttccgggccaaccgatctaacgggttaacctggcccgaacaaccaaacccaaccggggataaccaccaaatgggggtgtggaaaaatagaaaaaggaatttctcgataagttgatttcgcggtaatatttgttctcccgcctcggttcatttgctgtataaccatcaaactcttgatatcaagagttttgtgttttaacttccagtgctgctgttcatatatgactaatatattctcccccaaatgatataaaaaaaaaaaaaaaaaaaaaaaaaaaaaaaaaaagaaaaaaaaaggataagaaggt

SEQ ID NO: 447028 - DNA, 465 bp, Triticum aestivum
  unsure (1)..(465): unsure at all n locations
ggntnngnaattctngcngttcggtnccggtcnnnaattcangggncgacgagctcactnacggcgggccgctctaaaaggatccaagcttacgtacgcgtgcatgcgacgtcatanccttcnatagtgtcacctaaattcaattcactggccgtcgttttacaacgtcgtgactggaaaaccctggcgttacccaacttaatcgccttgcagcacatccccctttcgccagctgggtaatagcgaagaggcccgcaccgatcgcccttcccaacagttgcgcancctgaatggcaatgggacgcgccctgtagcggcgcattaagcgcggcgggtgtggtggttacgcgcaaggtgaccgctanacttgccagcgccctaacgcccgctcctttcgctttcttcccttccntctcgccaagttcgccgggtttccccgtcaagctctaaatcgggggggcccct

SEQ ID NO: 447029 - DNA, 272 bp, Triticum aestivum
aaatactcctatgtttttctggaaagaaccctgtatggtaaaaagtatttcatttgttaattcgttgttcgttatgagtaatatatatactccttgggattaataaatcatgggaagataaaagcacttggcgtatacgtatttgacgtgccaaactctgtgtatccagtgtgtatcggtgtacgcatttgagacttccaaacgcgtagcacgtgtgaaagtaattgcatctatagccgacttcacaaaagaaataaaagaaaaaagacaaa

SEQ ID NO: 447030 - DNA, 494 bp, Triticum aestivum
  unsure (1)..(494): unsure at all n locations
tgtntacgatggttacnccggtcganacttcccanagtcnacgaggtcactagacggcgcagctcctaagagggttcaancctaanttancctngaangcaantnnaaactcctncaaanggnnactaaattnaatttaactgggcgtccttttnaaaacgtcntgactgggaaaaactggngttaaccaacttaaaccccttgcaacaaaatcccctttccccaactnggcgttaaaccaaaaaggccgcaaccgattcgcccttccaaacagttgcgcagcctgaaatggcgatggggacgcgccctgtagcggcgcattaagcgcggcgggtgtggtggttacgcgcagcggaccgctacacttgccagcgccctaacgcccgctcctttcgctttcttcccttcctttccgccaagttcgccgggtttccccgtcaagctctaaatcgggggntccccttaagggttcaattaannggctttaanggaac

SEQ ID NO: 447031 - DNA, 503 bp, Triticum aestivum
  unsure (1)..(503): unsure at all n locations
ggnnngaanntttgnnnggcntnnccggtcgnaaaccggtcngnnantcccgggtcgacggaaggcacnaagtaaaccacacctacatatgcaaactaagaggtagcaaaaaaaaaaaaaaaaaaaaaaaaaaaaagcggccgctctanaggatccaagcttacgtacgcgtgcatggacgtcatagctcttctatagtgtcacctaaattcaattcactggccgtcgttttacaagtcgtgactgggaaaaccctggcgttacccaacttaatcgccttgcagcacatcccccttcgccagctggcgtaatagcgaagaggcccgcaccgatcgcccttcccaacagttgcgcgcctgaatggcgaatgggacgcgccctgtagcggcgcattaagcgcggcgggtgtggtgttacgcccancgtgaccgctacacttgccaacggcccntaacgccccggccccttcggctttcttccttccctttnncngcnaagttttg

SEQ ID NO: 447032 - DNA, 486 bp, Triticum aestivum
  unsure (1)..(486): unsure at all n locations
tttgnaaggnctacgccgggtcggaaccggtcannnattcccgggtcgacgagctcactgacggcggccgctctagaggatccaagcttacgtacgcgtgcatgcgacgtcatagctctctatagtgtcacctaaattcaattcactggccgtcgttttacaacgtcgtgactgggaaaccctggcgttacccaacttaatcgccttgcagcacatccccctttcgccagctggcgaatagcgaagaggcccgcaccgatcgcccttcccaacagttgcgcagcctgaatggcgatgggacgcgccctgtagcggcgcattaagcgcggcgggtgtggtggttacgcgcagcgtaccgctacacttgccaagcgccctaacgcccgctcctttcgctttcttcccttcctttccgccacgttcgcgggctttccccgtcaagctctaaatcngggggcnccctttaagggttcnattttaaggctt

SEQ ID NO: 447033 - DNA, 378 bp, Triticum aestivum
gaaaccgaaaaactttcgtaaatcacaaatttacctcaatggggaaatgcatttccccaacattaagcatttcaaatttctttttgacagtaggtagaggtatttgaaaacttccaatagtgattgtcggagatttttcaataacattaataccattcacctggaattgtttcttcgaaaagtgcaccgtatgctcattaccattgatatgaaaagtgatcttgcttttattgcaatcaataacagcccctgcggtattcaagaagggtctaccaaggataattgacatgttgtcgtcctcgggcatctcaagtataacaaaatcagtcaaaatagtaacattagcaacaacaacgggcacatcctcacagataccga

SEQ ID NO: 447034 - DNA, 61 bp, Triticum aestivum
  unsure (1)..(61): unsure at all n locations
ttttntgcntttttctctccntttgtttntgcgtttttgttttttnccnttgtgttctggg

SEQ ID NO: 447035 - DNA, 397 bp, Triticum aestivum
cggcggttcggaggaatacctctgaacgtattcggcttgggcattggtgggggatgcggatttggccttggtttaggatggggctttggaactgcttatggttgtcaatatcgatcttcaagggtccagtttcagggcattgagtttcagaaaaagtctgaaggagatgaagcaccaaagcttgttgaaaagtctcgtccttatggctagtatagctgcgatcatacaattggcacaggcaatgttaccattgcccccttgattgtagtcaattgtctacctggaaagttgtttgaaagcattttgatgttttgatgaacttggacgttttcatggtaacataatgaggataatccatggtacttttttcgtttcggaaaaacaaaagaaacacaaa

SEQ ID NO: 447036 - DNA, 119 bp, Triticum aestivum
ctgaagactgtccaacacactaaatcacactgtgtatgtatacttagcctctggcactgtcgctctgaggatcaaacttacgttgacgttcagtcgacgacgcatgacatcaagttagg

SEQ ID NO: 447037 - DNA, 310 bp, Triticum aestivum
gtaggagtgatatgtcaagtagtggacagataacccaaccactggatgtggttttcagggatttttgcagtgggatttgtagggtactatgctgcgctgtgtttgggatttgaaataaaacgatgggagatgtgccacgctcttaaatgccagtcttctgctctaatcttgccaaattacttgttgcaatttggaacttggccaaaaaaaaaaaaaaaaaataaaaaaaaacaacaaaacaataaaaaaaaaaataagaaaaacaacacttgatgaaaaaaatttcattaaaaaaagggccggttccaaa

SEQ ID NO: 447038 - DNA, 413 bp, Triticum aestivum
tcccgggtcgacggggcaagcgacatcgctgccatggaccgcgtgcttcatcagtaaatcctcatatacatcaggcgagccattcactatgattattgcaacataaccggtgttgcggaaacatagtcagtgttgcaaaaacatagctgcttcaaaaacatccctcgtgcttcaacaagaacggcagagctgcaagacaaggtaaccgctatggcgggatgtttctgaaacatggcctatgttgcagaagtccacgagaccatgagaaataaattccgcaacacaatctttgttgcaaatatttccgttacacgagctctgttgcaaagatccgcaacacaatctttgttgcaaatgtttccgcaacacaagctctgttgcaaatgcttctgcaacactacctttgttgaaaa

SEQ ID NO: 447039 - DNA, 228 bp, Triticum aestivum
ggcgagcacaagaaggacggcgagcacaaggagggcatgatggagaagatcaaggacaagatcagcggcgacggccacggcgacggcaagaaggacggcgaccacaaggagaagaaggacaagaagaagaagaaggacaagaagcacggcgagggccacaaggacgacgacggccacggcagcagcagcagcgacagcgacagcgactgagccagctccggccgcgct

SEQ ID NO: 447040 - DNA, 364 bp, Triticum aestivum
gccgagtcgatgtcactgtcgggagcgccctagacatattcgggggagatttgccctacgacactgttgtccattggcacaaggagcaaaacctggttagccaacggtgaagaaatcagatgatccttttatagagcatgatcaaaagttcagagctcatgtgtgatccccacctgaccataggtcaggttatagagctttgttgtttgctggacattgtagtgtgaacattgtgtgtgtcttgtgtgacatgtcaaagctgaagcggaggtgtgaactcggtgtggtagaagaccactcggtattcagatactgttcttcacattctgtttgtattgtggtactggtaatgatgaataaacag

SEQ ID NO: 447041 - DNA, 161 bp, Triticum aestivum
ggcctcatccaaaaggaagaactgcagctagcattattcaagactcctagcgggcagaatctttttattgacagggtttttgatttgtttgatgaaaagaagaatggagtaatagagtttgatgagtttattcatgctctcagtgtcttccatccatgttc

SEQ ID NO: 447042 - DNA, 453 bp, Triticum aestivum
  unsure (1)..(453): unsure at all n locations
ttnnnnntcctnngccccntnnanggtcacaagtcccngggccantggaatttccaatgcgaacgggtgagtaacgcgtaagaacctgcccttgggaggggaacaacaactggaaacgttgctaataccccgtaggctgaggagcaaaaggagaaatccgcccaaggaggggctcgctctgattagctagttggtgaggtaatagcttaccaaggcgatgatcagtagctggtccggaggatgatcagccacactgggactgagacacggcccagactcctacgggaggcagcagggggaattttccgcaatgggcgaaagcctgacggagcaatgccgcgtggaggtggaaggctacgggtcgtcaacttcttttctcggagaagaaacaatgacggtatctgaggaataagatcggctaactctgtgccaacaaccgccggtaaanaaaag

SEQ ID NO: 447043 - DNA, 352 bp, Triticum aestivum
gtttgccggaaggccacgatgtcgtggtgttcgaatttcatccccgtttcttgcatgggacataagcataaacccatggacacatatatgattttacaacccatgttggtgtaccggagcatgtgcatgtagtttaattttgaattgtgcacctgaaatggctagaaaaccaatttaatgtgtaaaatgttcaaactaatcctgaataattccatttcttttacgacacacatatatttgcttgttcactgtagataaagggtctagcatttcaaacaccgtccattgccgctgtgaccccattatgtaattcaactcaagatgaaaactcatgtatatcccacacatttta

SEQ ID NO: 447044 - DNA, 266 bp, Triticum aestivum
cccgggtcgacggggagcacaagaaggacggcgggcaccacgagggcgtcagcgagcacatcaaggacaggatccacagcgacggcatgatggacagcatccacgacgagatcaacgacaacagccacagcaacggcaagaaggacggcgaggaccacgaggacaacgacagccacagcaacaacgacagcaaccacgacaacgaccacaccgactccgacccgcactccagcagcatcaacgccagctccatcaacagcacctgc

SEQ ID NO: 447045 - DNA, 402 bp, Triticum aestivum
tccgggtcgacggatagtactaataaaaaggctagtcacaataatggtgtccagcacaacccacccctcaaataaaactaagggggtgcttggatatgttttagtcccatgactaaaagtagtgggactaaaacatgctagcctcacccatgcttggatccgaatactaaaaaggctaaaatcaagttaatgagcatttattatcctccaaaccctccaatccataactcgcctgtgttaaaggagaggagttaaatgactagagagaggactaatccacattttactaggggtacccctgactaaatttttttagtctcaagactagttttagcccctctttagtcaggggtgcttggaactttagcctcttaaagagactatttttagtcagactaaaat

SEQ ID NO: 447046 - DNA, 54 bp, Triticum aestivum
  unsure (1)..(54): unsure at all n locations
gnggttggtnctgtcctgntttntgtgttttntntttttttttcgtcttnggnt

SEQ ID NO: 447047 - DNA, 426 bp, Triticum aestivum
  unsure (1)..(426): unsure at all n locations
tacggtcctacnattccgggtccacagccaggctccaggacaccgccaatggactccgaactacttcgcggcaggatagcccggcccgtccagagctcaattaaacactccggcgaaggctaggacaggccgcataccgcggctcaaccgctctccggcacacaaacatttcttacatttgctttgcaggttcacctttgcaccgaccaggactggcgatatggaagcaactcgaatgcgcaagggaatccttagatattccccgcagtgaccatccgaatatactctggatccacacacagcttctttccccctgatctcagcaggttccacagtcatatccctttttttatctcattacctgtcctcatacgcatcaacgtactattcaaatacaacatatggatttatatgacgcttatctgc

SEQ ID NO: 447048 - DNA, 410 bp, Triticum aestivum
gacgggaaggtcaatactgatatgcttggccccacgcgtagtagtcttcttcaccctgcaaaaaaataaagcacatgaaaaaggtattaaaaatgaacaaaaatatgtttgccttggtagaaatcttaaaaaaatgaaaaacaagtggaaaggctggtagttgccatgtaaggggaacgtgagttgccatgtgtcataattagcagttgccatccagcagcagttgccatgttagccaacttgaagaatgataaaaatgtctaatctgtcatgaatacaatttcaaacctaggtgtaggatgagctcacaagccaacggtaaagatggcagttgccattaggtacattaaagttaccatttggcctagattccagttgccatgtaaaaaacaataggagttgccatacac

SEQ ID NO: 447049 - DNA, 410 bp, Triticum aestivum
gacgggaagagacagatttgcctagggtttgtggcagtggctaagacatctgaactctgtggcgccggatagaaagaatcggtggggccgagtttgactttaggtctaggtcatatgtgtggaagtagttgagggttttggagcatatcacgaagcactgtggagcaagaaactcattaagcaacacctcatccctccttgatagtactggcttttcctatagactcaatgtgatcttggatcactaaaatgtaaaatgaagagtcttgagcttgaagcttgagccaatcccttgtccttagcatcttgaaggagttcccacatcctttagtccatgccactccattgttggacttgtctaaaatgtactaggtaaaagtgttagtccaacaagagatatgttgacatta

SEQ ID NO: 447050 - DNA, 99 bp, Triticum aestivum
gggacgttcacaggagagaagcgacggagttagaagttgtaaatatgcattgttgtatcgcgacctgaatgaatgaaataaacgaaataacgctcttgt

SEQ ID NO: 447051 - DNA, 377 bp, Triticum aestivum
cgcgtaaaatttgaactgtagctgcctcatagtttgctctatatttttttcagaaatcatttctaggtacataagtatctatttaacagagaaacatcaaaagttttccaagatttaaccactagctaggaacggtcaagcccgcccttttgaccgcattttgaaaagggcataaaaaattcaaaaaaatcaaaaaattggaaaaccttcgcattgtgtcattatatgtgaccaagtttccacgaaaaataataaatttgttatacggaaattgtttttaaaaagtgttctcaaaaatgagttgtcatgcgtgaggattcatggctttcaagccaaatgatcaatcttatggccacattcatggcatagtttgttca

SEQ ID NO: 447052 - DNA, 441 bp, Triticum aestivum
  unsure (1)..(441): unsure at all n locations
gntgngaaattctagccgtgtngtacgnccagtnnttccanagnccacgggacgagtctaagaagaaanaanggaatnaaaaattaaaaaagcggccgctctagnggatccaagcttagtacgcgtgcatgcgacgtcatagctcttctatagtgtcacctaaattcaattcactggcgtcgttttacancgtcgtgactgggaaaaccctggngttacccaacttaatcgccttgagcacatccccctttcgccagctggngtaatancgaagaggcccgcancgatcgcccttccaanagttgcgcagcctgaatggcgaatgggacgcgccctgtagcggcgcattaagcgggcgggtgtggtggttacgcgcagcgtgaccgctacacttgccagcgccctagcgcccgtcctttcgctttcttcccttcctttctt

SEQ ID NO: 447053 - DNA, 378 bp, Triticum aestivum
cggaaggccgggcatcccgccggccttcaggaacgccgacggcggctacggcaccatcaaaaccggctacggctacaagtacaccagggtggcgacacccaaacggtccaagaagaagagctggttctcctgcaccagctgccgattctgatgccgtagctgcttgccgtcgttggtgagagagatccgatacttcgccgcgccacgaccagaagcacgcactccgggaggcgacggtggaacttttggcgatcttggcgtttttgtccctgctcggtcgccgcacttggcgtgcagagcatcatcgacaactgatggctcccgttcatatgtacgaataatttgtggcgaataaaaggggggaagtgactacaacaa

SEQ ID NO: 447054 - DNA, 401 bp, Triticum aestivum
gggtcgacggaaattgcaaacctaacgaagctcataatcaggtggttgaagtgaatgtcaaagtcgaaagtgcaggcacaaataatgtgcacaacaatgctttctatgctgaagaaaaaatactgaaatccgagttgcaagcaatgagagattgtgacccttcatctgcgcggcattggattgttaggaacacaagggctgtaaatcgtaccggacaaccaactggtttcagactcgtgcctggttcaaactgtttgccatttgctctgcccgaggcaaagtttcttcgaagagcagggttcctaaagcacaatctttgggtgacaccatacaagagcgatgagaagtttcctggaggggagttccccaaccagaatccacgtcttcacgagggtttggct

SEQ ID NO: 447055 - DNA, 350 bp, Triticum aestivum
gagcacatgatcgccagctgcatcaggttggcatgtttgacatgatcatcgacaacatcagtggggtcgtggcagccataagcacaggaatgaccatgttcacattaaggccgatgagcacagcatagaacgatggtgagcactatatggtcggcgagcacatggatggcatgttggagattatcttcgttaagatcagcggccattgccactgtgaccgcatgaacgactgtgaccacaaggatattaatgtctataacaccaataacgtcaacattcaggcgagggccatttggacgattacggccacggcatcatcagcatctacagcgacatcgactgagccatct

SEQ ID NO: 447056 - DNA, 441 bp, Triticum aestivum
  unsure (1)..(441): unsure at all n locations
ggtgngnaattctagccgtgctgtagtgtgtgnattcntgnngccacgaggccactagaggcggnaactctagaggatccaagcttacgtacgcgtgcatgcgacgtcatagctcttcatagtgtcacctaaattcaattcactggccgtcgttttacaacgtcntgactgggaaaacctggcgttacccaacttaatcgccttgcagcacatccccctttcgccagctggcgtaaagcgaagaggcccgcaccgatcgcccttcccaacagttgcgcagcctgaatggcgaatggacgcgccctgtagcggcgcattaagcgcggcgggtgtggtggttacgcgcagcgtgacgctacacttgccaagcgccctagcgcccgctcctttcgctttcttcccttcctttctcgcacgttcgccggctttccccgtcaagct

SEQ ID NO: 447057 - DNA, 201 bp, Triticum aestivum
attcccgggccgacgggacgcgcgagacggatctcgacggggaacgccggcctccccaagccgcgcctgcttgatccagagggagggagtgggggtgggggcggcggcgcctgctcgatccagaggctgtgaggaagaagtgggaaggagggattactgctggatctggccatgagatgagcggatctgcgcaaggggggg

SEQ ID NO: 447058 - DNA, 406 bp, Triticum aestivum
ccgggccgacggcaaggagaagtacgccctcaacggcgtgtcccacaccgaccccgagacgccgctcaagctcgccgagtacttcaacgccaccaagggagtgttcgagtacaacctcgtcaccgacacgccgcccaaggagggcacgcccatcaaggtcgcccccagcgtcatcaccaccgagcaccgcacctacattgagattgtcttcgagaaccccgagaagagcatcgacaccttccacctcgacggctacgccttcttcgccgccggcatgggaccggggctatggtcggtggagagcaggaagacatacaacctcctggacacggtgagccggcacaccatccaggtgtacccgaggtcgtggacggcggtgatgctgacgttcgacaacgccgggatg

SEQ ID NO: 447059 - DNA, 465 bp, Triticum aestivum
  unsure (1)..(465): unsure at all n locations
ggnnnnngnanntttaactctccgcagctcggtaaaggtctttgaattcccgggccccagttcttaanaatggactcttgttccaaactggaacaacactcaaccctatctcggtctatcttttgatttataagggattttgccgatttcggcctattggttaaaaaatgagctgattaacaaaaatttaacgcgaattttaacaaaatattaacgcttacaatttaggtggcactttcggggaaatgtgcgcggaacccctatttgtttatttttctaaatacattcaaatatgatccgctcatgagacaataaccctgataaatgcttcaataatattgaaaaaggaagagttgagtattcaacatttccgtgtcgcccttattcccttttttgcggcattttgccttccttttttgctcacccagaaacgctggtgaaagtaaaagatgctgaagatnantt

SEQ ID NO: 447060 - DNA, 372 bp, Triticum aestivum
cggaaatccacaacgtgtccacggagccggcggcgcaacaggaggtggagctgccggagggcacccacccggcggtggccatgctgacggtgagcacgctgccgatgctggcggagctgcataagatggagcatgagatcagctcgcccaccccgcgcaagggctacatcaaggctttctgatccgatcgagatgaccgatgcacgcacgggcgcatgcattcaggagatgaatcaatcgctaatgattggcaaaccgaccgccagcagagatacgtttatatagttcttaatttcagtcgttcgtttgtaatggtctgtactagtagcacagtcgtgtgtgttgttgtcatccatgggtctgatataccgg

SEQ ID NO: 447061 - DNA, 378 bp, Triticum aestivum
cggaattagaagttgtaaatatgcattgttgtatcgcgacctgaatgaatgaaataaacgaaataacgctcttgtacaaaaaaaaaaaaaaaaaaaaaaaaaaaaaaaaaaaaaaaaaaaaaaaaaaaaaaaaaaaaaaaaaaaaaaaaaaaaaaaaaaaaaaaaaaaaaaaaaaaaaaaaaaaaaaaaaaagggccccccaaaaagattaaaactaaattacccttaaatgcaaattaaaaacccttcaaaaggttaaccaaaattaaattaaagggccttcttttaaaaaattcgtaacgggaaaaaccctgggttaaccaaattaaacccccttgaaaaaaaaccccctttcccaaagtgggttaaaaccaaaaa

SEQ ID NO: 447062 - DNA, 397 bp, Triticum aestivum
cgggggctaataaaagaagtaggaggtgtggagacagacttaggaaccgaaaggttttaggcttagtagaattaaaactgagtttgtgaggtgtggtttcagtactactagccacaaggaggaggttagccttgatgggcaggtgatacctcagaaggacaattttcgatattaggggtcaatgctgcaggatgatggtgatatcgatgaagatgtgagccatcgaatcaaagctggatggaagaaatgccgccaagcttcctctgtgacaatagtaccacaaaagctaacattgcaggttctataggacagcgattcgacctgcgatgttgtatgaagcagaatgttgccaaataaaaggcaacatgtccaacagttaggtgtagcacagatgcgc

SEQ ID NO: 447063 - DNA, 375 bp, Triticum aestivum
  unsure (1)..(375): unsure at all n locations
agaggttacacggaaggatgacgacagtaattaacatgtgtacatatatcaaaaccatggaagcatcacattaactatttcagctacgggcttaatcaatatatatttacctgaccggactcggttcggtcaatggagcagtctgcacggtcaccatcttgtacctccattgtgtcacctgagcactcggcagggtctccttcttgtacctccactgtgtcaccgaacccatcatgaaaatagtcctcttcttgtaccagcattattggcccgaanccattattagcatagccctcttcttcagccagtccttccagctgactatcactgtcgatgacaaatgacgcaacttcatcacttccatttgcgattatg

SEQ ID NO: 447064 - DNA, 411 bp, Triticum aestivum
ccgggccgacgggactcaagatgtttcgagaatccaaatccgacgtacttattctgtatttgatgaaatgacaggataattatggggtagtttttgactgcgttgacatttacaagcagcccgcattcgatcaccctctcctgaagaaccacatactacaggtcaccattctatactttctatctttactgtcaaaaaattgtaggaatttttgttgctttttgaaacatggtacgaattcttgatgtaatcagtttttttagtcatcgatgtcagatttacagatctatccgcccttgtattagactctgacgtgtccttgtagtattcccgagcactgtggttgatacggcacataccatagcaaatggctctcgaaaaaacaacggcactatagttctatttcccact

SEQ ID NO: 447065 - DNA, 449 bp, Triticum aestivum
  unsure (1)..(449): unsure at all n locations
ggnnngnnnnnttgaaacgtntacgcggtccggaaacggtctgcgnantcccgggtccncggggaaatatnattaaaatgtgtagtagtttctattttcaaaaaaaaaaaaaaaaaaaaaagaaaaaaaaaaaaaaaaaaaaaaaaaaaaaagcggccgctctanaggatccaagctacgtacgcgtgcatgcnacgtcatanctcttctatagtgtcacctaaattcaattcactgccgtcgttttacaacgtcgtgactgggaaaaccctggcgttacccaacttaatcgcctgcagcanatccccctttcgccagctggcgtaatancnaanaggcccgcaccgatcgccctcccaanagttgcgcagccngaatggcnaatggnacncgccctgtancggcgcattaagncggcgggtgtggtggttacnccnancgtgaccgct

SEQ ID NO: 447066 - DNA, 395 bp, Triticum aestivum
cggggctttgagaggttttgagaggggttttgaggggttttgagaggttttgactgattagggttgagcataactaattcaaaaaaaatcaaaaaaatataaaacttgtgcacatagtcttattatgtcgtatagtaacgagaaaaaaaatataaatatggtttacatacatttttacgaaaaatccttcacaaaattgttattcctcaaacaatgtagtatggagttgaagggagagagtagtgggcacccgagagtaggtggagttttaaaaatgaaaagtgtgaaaacctcaccaaaacttcattttggattgactaagaaagatctgaacttacttttctcattttcatgttttaaacttgttttatatataattttctattaaaccttgt

SEQ ID NO: 447067 - DNA, 396 bp, Triticum aestivum
cgggtcgacggggatctaaacagtactattcttctgcttatgtaaacaccttggtgtacaaccatgtcagtaagaccctgttgctttttttgatagcattccagtaaccaccgatggacgagaactttgcctattggtccgtctcgttcaatgagcaggaaaatggttctcttcgtccctcgcccttggtaccaatggttgttgccaacataatcgatagtctatcctctggcatgccttgcttacatgatcatgcaagacgtcatcccccttccgacttttaacccacatggtgggcccataacccacaatttcacaggatcgaaacctgactctcctgtacaccctgttgtcaaagttattcccacgtttgactttgacgtaattcacgggcca

SEQ ID NO: 447068 - DNA, 307 bp, Triticum aestivum
tgacgggcagagaaaagtcaggggccggccgagaaagaaatagctcccggctgctcccatcaagtcggctggaaaagaagtggccgagtgcccatagtcgggtgctagaaaaaaaagtcaaaggttgactggccttgaaaaaaaagtgaccgggtgagatggccggctgcccgagagtcggctggaaaaaaagaagaagaaagaaatgtgcgtctgactgtcagatgtgcgtccgaccgctggctgcctggccggctgcaaagagcgcgactgttgtgtcggggtctgcctgcccagccggctgagg

SEQ ID NO: 447069 - DNA, 187 bp, Triticum aestivum
  unsure (1)..(187): unsure at all n locations
tntgttgttntgntttatnaatttattgnatattctgttgngttntttnttttttggntatttgtntttntttttatgnttgngttttntttttgtntnttgtttttttttattntttttgtgtgttttnttnctttggtttngttttgttttggnttntttttnnatnttttgtnctggtgntttt

SEQ ID NO: 447070 - DNA, 133 bp, Triticum aestivum
cccgggtcgacggggatggcaaattgggacatttgttgccgtcggtgttgtaaagtataagagagatttgtgccttaatatgaagagatatttgttattcaagaaagaaaatgcagacaaaatacaaaagaaa

SEQ ID NO: 447071 - DNA, 311 bp, Triticum aestivum
gcagagtaaagtcagggggcggcccgaaatagaaaaacccccgggttgccccaatcaattcggttggaaaagaattggcgagttgccaatagccggttgcaaaaaaaaaagttcaaaggtggctggcctttgaaaaaaaattaacgggtgagaagggcggtttgccgaaaattcggtgggaaaaaacaagacaaaacaaatgtgtgtccgagctggcaaaagtgtgtctcgtacgcgtgtggtgcgcttgaaggattgcaaagagcgagagtgttgtctcaggctgtgcgtgcacacgcgtgtggagaaca

SEQ ID NO: 447072 - DNA, 139 bp, Triticum aestivum
gagtcataataaaaaaaagccatacagtaactcaaacgtattttccgagagatattcattttcctgagagaggcggataatatattaggtggctgtttgataccgccagaacaaactaaaaaaaaaacttaaaaatcaa

SEQ ID NO: 447073 - DNA, 557 bp, Triticum aestivum
  unsure (1)..(557): unsure at all n locations
gggntntngtnttcttctntctgtgttgtttgtttctnntagtgtgtanggnccctgggnccttnggnaaatgggnaaatntttttnttttttttttgtntntttttgttgtgtnttcttgttctgtgtttgtgtttttttattgtnnctttntttctnttttttttttngtnttntgtttttttgttnttntgttttgttgtttttgtttttnggttttnttttnttttggttnttntttgtttnttntttctttgttttttgttttttttttttntttttttnttttttttttntgttntttttnttttttntttgttgtttntttnttttttttggtttgttcttnttttgttttntctttgttttttntctnttttntctgtntgtttttttttttgttttttttgntcttttcntttttttttnttttttgtntttgntttgtttgtntttttntttgttttttngttgttttttgtttttttttttgtttttttttttttttttnttntttttttttttttttgttttttttttttttttttttttttttg

SEQ ID NO: 447074 - DNA, 182 bp, Triticum aestivum
attcctaggtcgacgggcaaattttatgtggcatacctgtggtttgtttagctaggccagccagcaaagtacctcaacacctagtagaacgtgtgaaatacctgtatgtttcagcctcccgtgtagttatctcgggttttagctctctgtggatgtgagtgccgagtaaggttgtttgcttc

SEQ ID NO: 447075 - DNA, 280 bp, Triticum aestivum
ggggatggttctctcccagagacccaatgagagagtggtcagcgcggcttcgtgctgctcctcctgaagcatcgtatatttggtcacattcgtcgtctgagaaattttgggagaggaatctcgacaaactatcctgaaagcgcctcttgctcctgtgccttatctgacatactcttaagcgctaccgtgcccacctgtcttttctttttcgttcatgtgtttgtcatgtaaatgcccatactagaatgccgctgcagatatcttaagtgagagttacctc

SEQ ID NO: 447076 - DNA, 315 bp, Triticum aestivum
acgggaagtgtaagagaggagatggtcactatccgaggtcccaggaccagccatgacgtcaagctgctgcagcgtggagtcaggagtgtgttcgcaccccggcgtgtcccagtatgtgctttggaagactggcgtcaatctcaacagacccttatgcgtccacattatttgcttcacaaacagatagcatctctctgcttcgtctctggagtcacaaagctcgatgacagctagatacggatgatttacaggtttggagccaaaatataattggctagtctttttgaacacatgatgtaacacaaaagttattat

SEQ ID NO: 447077 - DNA, 409 bp, Triticum aestivum
ttccaggtcgacgggacgaggaggaggaggaagacgcctaggtctgcctgccgcctcgtagtttaggttgtttttatttttcttaaatgctaatgtggatgcgtggactctcgccggccttcgtggccggctgtaatgtttaattaatgatgttttttaagtatgcatgtgttctatttttttctagagccgtcaaaatggataggcctagcgttgagcgcacgtgccgacccaaacacggaagcggacatccgtgtccgcctattcgatccaaacggacgaaaagcggacaaaatcgctgtccatttgagtcgatccgttggagttgctctaagggcctattcggtttctctcggctcctgcgactcaactcccgaagcggagcaagctacttcagcttttttatgga

SEQ ID NO: 447078 - DNA, 317 bp, Triticum aestivum
actgtgcattactatggcaaggtagtgtggtgaagcctgcctttcccaggtggttcggtgtgcgtaagtgccagactgaggctgctgccaagaaggtgtttttagataccaaagttgcagactactgggacatggctgtcaacttcacggaagatttgtcctgagctaaaatttctgttgatgacagtgagagcgatcgctgcggatcactatactttgtaatgtcaccaacatgccatttttagacatgtggtgaattgaacgcataaaacggctgtcggatttttgcaatatgctttcaaaaaatagctacaaag

SEQ ID NO: 447079 - DNA, 195 bp, Triticum aestivum
gggggaaaatagtcgatgaaactggaaaatttctaagtcctgcttatatacacagagtattggtcccggttcgtggcaccaaccgggaccaatgcccccctttagtcccggtgtgtgccacgaaccgggaccaatactctgtgttcataagcaggacttagaaaatttccagtttcatcgaccattttcccccga

SEQ ID NO: 447080 - DNA, 318 bp, Triticum aestivum
gggaaagttaagaaattatgtggaaggaaacttttgtgactattcccaggggggcaaatttccagcagggagacgtgcgtccaacaatctgggaattccaatcaggggataaacctgatgtattagcggcagccatggttttacaccatggtggttatggaatgacaatcctatgagcagcatagtaattcatttgaactttctcggattgcttcgaaatggattgaatcttacatgaagtgcaggacgatccagccacaaatatgttgacgattcaacatggtcatctgcacagaatacacatgctttcacaaattc

SEQ ID NO: 447081 - DNA, 382 bp, Triticum aestivum
gtcgacgggccggccttggcggaggagcgggagcagcttgctgaggagcggaaggccttcctcctcgagaaagctgaggctgaagagcagcagcggctcaccggtgagaagctgtacgcgcgagaaggcgagctgactcagcggaaagtgaacctcgacagccacgaagaggagcttgccgcgcgcgaacgggcacttggcgggacgctccaagaggcaaaggatgcggctgcggctgccgaggccgccaagaaagaattggaggcaaaggtggcgcatctagaagctaatctgaaggttggtggcgaagagcttgccgcgctcaagctagagcgcgagaaggacgcccttgcccatggtgagctgcagggccgactcgccg

SEQ ID NO: 447082 - DNA, 296 bp, Triticum aestivum
gggaggtggcaaagacaacgatacgatccggcaaccctgcatgcagatccagaaatgcgctgccaacagggtttggctaaatttccaaatttttgcccgtgactatctatagcgcgatcctgtcggtgtgctggaatggcacaactcagtggcaccaatatgcacaacagtagacacttacaacacatctgtgtgaccgagtagttaacttcggttgcaccaatattgaacatctacatagacgtaatgatcactgaggcaccgacaatcgacgaatcggtcacacacgataatca

SEQ ID NO: 447083 - DNA, 331 bp, Triticum aestivum
ccgggccgacgggagtgggtatgccaggttttgcgacatgccaatgtctcactccatatgccgttctccggaagccattctttgggctctgagaagaagtattgggcttctgcatccctctgcgataggctgagatgtgagctgtttactttatccattgatcatgatatcgcagcatgtgacacgcagacgtcaaatgtggcacacggcaaagttcgttctagcgggagtcttcagttttcgcaaacatgtaccaatgcaaatatgttcattttacggttatgtagtccttgaagatgtacatattttgtaagctggcagttagattctt

SEQ ID NO: 447084 - DNA, 430 bp, Triticum aestivum
  unsure (1)..(430): unsure at all n locations
acgcctgtcggtacggctcctaaattcncaggtcgacgatgtaaggcacacgtaccggcgggggttccgagctgcttggcggcgtagtagtacggtggtttgtaaggctccggccacgacgccgtctgtactgtgtgcgcgcccgtctggtggtgtccgcgatggtcgtgccgaccgcctcaaccgccatgacctccaagcccaacgccaacaacctaaccaacgaagaacaaccccttcttggacttcccctcctttggcggcctcgctttgacgcgcgaatttttcgcgtcgtcgagctgatcttcccgggcaagcgtgatgctcagatcctccggcacctccgtcggctccatctccgacacgttctccgacggttccatgcgtcggcgacggaaggaaggcgagagtgaaagaaaagagcgggaat

SEQ ID NO: 447085 - DNA, 462 bp, Triticum aestivum
  unsure (1)..(462): unsure at all n locations
ggnnnngnaattctngctgtcggnngccnganaggtcacaanncccgggccgacgagntactaatcggcggccgctctagaggatccaagcttacgtacgcgtgcatgcgacgtcatactcttctatagtgtcacctaaattcaattcactggccgtcgttttacaacgtcgtgactggaaaaccctggcgttacccaacttaatcgccttgcagcacatccccctttcgccagctgcgtaatagcgaagaggcccgcaccgatcgcccttcccaacagttgcgcagcctgaatgcgaatgggacgcgccctgtagcggcgcattaagcgcggcgggtgtggtggttacgcgcacgtgaccgctacacttgccagcgccctagcgcccgctcctttcgctttcttcccttccttctcgccacgttcgccggctttccccgtcaagctctaaatcgggggctc

SEQ ID NO: 447086 - DNA, 361 bp, Triticum aestivum
ccgggtcgacggggaatctgaggcagagctgtgaggaaagatgatcttatcttgccacggcggatatcttgcctctttgacgtgcagttctagcgcagcagaaggtttggacagatacatggttctgtttctgctccggcagccaaagcaaaaccacagatacggtccttgtacatctctaataatttgacctgaaataattcacgatactgcatctgtagtttctccacatattgtgcgagtaatgacatttgtatacttaaataagtgatggcatttcatccgtcaaaaaaaaacaaaaagataaaaacataaataaacatacaaaaaaaatcaaaactcttccaaaatgaaagataaa

SEQ ID NO: 447087 - DNA, 385 bp, Triticum aestivum
ggggcaggacaggcaggggattgagtcacctgtccaatgggaaggcgccgcgtggagaagcgtccacgtggcccgccgtggtgggcgtggtgcgttggaggcgtgagaggcgaggtcgtgacatgcttcgtgcgcggacaacgcaacgcaacgcaaacagtctcgccgttgccacacacgtcactgtgtacggactgtcaacggtcaacgtttgtaagagtggagatggtgcgcttttggaaaatcgagtggtgcggtgtttgttactttctccattcacagatataagatgttctattattttactttttttcgattcagacttatttaaacacattttagagcccgcttgaaatggatgtaagtttatacacctgtatttatt

SEQ ID NO: 447088 - DNA, 441 bp, Triticum aestivum
  unsure (1)..(441): unsure at all n locations
ggnnnngnaacgttacccgctcgtacgncccaaaattccaaggtcgaccccgaaccaaattgattagggtgatggttcacgtagtgggccatcgccctgatagacggtttttcgcccttgacgttggagtccacgttcttaatagtggactcttgttccaaactggaacaacactcaccctatctcggtctattcttttgatttataagggattttgccgatttcggcctattggtaaaaaatgagctgatttaacaaaaatttaacgcgaattttaacaaaatattaacgcttaaatttaggtggcacttttcggggaaatgtgcgcggaacccctatttgtttatttttctaatacattcaaatatgtatccgctcatgagacaataaccctgataaatgcttcaataatatgaaaaaggaagagtatgagtattcaat

SEQ ID NO: 447089 - DNA, 385 bp, Triticum aestivum
gggggattcgaggtgagacggctaatggctggtgtgatttcgcatggaggactcgactcgaggggggattacggctggagacgaatgagggctgaggatttagggtttggaggggaggggaatataaagggacaaagctgagtggtaactgggccgggcctcgctgcgtaagaaggccggagtgatttctcccgttttctttctttcgttctcttgttctccttttcggcctgcaaagaaacaattcggtcttctcaaaagaaaaagaaaaaaacaattcggccccctcaaaaggaaacatacaaatgtctcaaagacaatacaaataatttggcaacgccttttcagtgcgtcgtctgagtaggacttgccggcgctgccaact

SEQ ID NO: 447090 - DNA, 384 bp, Triticum aestivum
ggggtcgcatctagatttgcacgctcacgcttaaagccttcgcggtcgcggaatctgtgacagacatggagtcgtcgttggcaacgggaccggctgctgtacgggatatgcagtgcgacctcgagtcccaagccaacgccctcagcaagatccagaccgacatctccaataatcactaggtccgcatgcagttcaccatccaggtcggcgagaatgaactcgtcctcacggagctggagctgctgaatgaatgggctaacgtgtacaagctgatcgggccagtgttggtcacacaggacaatgcggatgctaatgccaacatcaaaaagcgcatccagtacatcacatctgagctaatgaaaacggatcgggcgcttaaggact

SEQ ID NO: 447091 - DNA, 449 bp, Triticum aestivum
  unsure (1)..(449): unsure at all n locations
ggnnnnggaactgtttacncctgnccgtacgnctccaaaaattccaaggtcgacgaggccactaatcggcggccgctctagaggatccaagcttacgtacgcgtgcatgcgacgtcatgctcttctatagtgtcacctaaattcaattcactggccgtcgttttacaacgtcgtgacgggaaaaccctggcgttacccaacttaatcgccttgcagcacatccccctttcgccagcggcgtaatancgaagaggcccgcaccgatcgcccttcccaacagttgcgcagcctgaatgcgaatgggacgcgccctgtagcggcgcattaagcgcggcgggtgtggtggttacgcgcgcgtgaccgctacacttgccagcgccctancgcccgctcctttcgctttcttcccttccttctcgccacgttcgccggctttcccccgtcaagnt

SEQ ID NO: 447092 - DNA, 390 bp, Triticum aestivum
aaggatgccatagggaacgactactactcgtcctatggggatgattccgagtggagggtgaagctttggctcttcgtcgcctacgtcgtctctttcgtctgcctggctggatcggtgggtttgttggtgcaagacgccctgacagacaagggcccttctgtgtggactggtgttgccggcgttctgcaatgtgttttcgtgttgataagcgggttgacatactggacgtgccacaccgaggattaagggtcaaaaatctcgcgaagacagacgtctagtctatacccgtgtgtggtcctgtgtaaaaaaatatgttcattccagggcgggattacttggtgtccgtgtgtgcatagctgaccgcttcctgaaatggacccctagcatcag

SEQ ID NO: 447093 - DNA, 304 bp, Triticum aestivum
attccagaggtcgacggggtctcggcagaacactcctttgaacacggacagttacacttgagcaaatcatctgcaacataccatcgaccatatgatggctctgcattttctgactgaggtcttcgatacatgcaagcatagaaccattgatcagtaacttcatgcctagtcatcagtgggaaattcatgtctgcaatacctccacacaatcgctgagtatcattcatcacagcatactcaggtatcactacatcagagttgaaacataactctgtccaatatcatcggttctaccgaatcattg

SEQ ID NO: 447094 - DNA, 212 bp, Triticum aestivum
cgggagattggatgtgtatgtctatgcgtatgtgtacgttccacggtatttaatctagtagccaattcttttgcatttcaaaaaagaaaaaaacaaaaaagttaaaaaaaaaaaaaaaaaaacacaagaaccaaaaggggaaaaaaagcaaaagaaaaaaaaaattacacaaccaaaaaagaaaaaaaaaaaagaggggccgcccaaagggt

SEQ ID NO: 447095 - DNA, 449 bp, Triticum aestivum
  unsure (1)..(449): unsure at all n locations
ggnnnggaantgtntacgcctgntggtacggtcgnanaaattccanngtcnacgagctcctagacggcggnngctctagaggatccaagcttacgtacgcgtgcatgcgacgtcatagtcttctatagtgtcacctaaattcaattcactgggccgtcgttttacaacgtcgtgactggaaaaccctggcgttacccaacttaatcgccttgcagcacatccccctttcgccagctgcgtaatagcgaagaggcccgcaccgatcgcccttcccaacagttgcgcagcctgaatgcgaatgggacgcgccctgtancggcgcattaagcgcggcgggtgtggtggttacgcgcacgtgaccgctacacttgccaagcgccctagcgcccgctcctttcgctttcttcccttccttctcgccacgttcgccggctttccccgtcaaagct

SEQ ID NO: 447096 - DNA, 162 bp, Triticum aestivum
ttatgtttggtggttcctttatgcagactgtgatcctgttgtgggttaccgtgaggaccgactggaacatagacgtggccgtcgcgatgacaatattgatcaagtgggaatgcaccactatgcctctattagcaggccaagaatgaatcagtggatcctgtg

SEQ ID NO: 447097 - DNA, 289 bp, Triticum aestivum
gacaaagtgcacgtggactagtcggataaaaagctcttatatgatcagcagatctacaagatcaacacttaactacacattcatattagatatgaggtcgtctgcattatcccatagattccattaagctcacggtgctatagagaataatctgaggctgaacggatacataattcatcttgagtctgatgacaggggactgcactacacaccactagcatcataactatgatgtggaacagtatcctgattaaactattttctggattatgaatgaattctggaacat

SEQ ID NO: 447098 - DNA, 409 bp, Triticum aestivum
cccgggccgacgggggggtaaaagcatgtggcgtcttatttaaccttgggctcaactatgcgtccgcgacatcatcgtcggcgttgtacaatgttcaacccgtggttaccttcattctggcggtcataattgggatggagtctatgaagctgaagaagctccatggcaacctaaaagtggcaggcattctctgctgcgtcgccggcgtcacggtgctggccttctacgaggggccaatgttcagatctttcaaccatcaccggctcttccagcacggcagcagcagcagctcctccggagcaggcacctactccaagaaccagtgggtatttgggattttcctcatgacactctccaacattttagcaggcttgtggaccgtgcttcaggggccactgatagaggacac

SEQ ID NO: 447099 - DNA, 386 bp, Triticum aestivum
acgagatgtggaggaaacgagacgtatggcacctagtgttcactcgactttatgtgagaatgagttgagagacccgtaattgctacgtttccgaattgagaagcatccactcgtctagtaatacccttatggaccagtgcataccactgtggcatttcgtattcatcataagcagtccaaacctggttttcaataaacaaagcttaagtccgatccgtgtcgaagtcgtaaaaatcagcatatggaacactcataaccacctcattatattcatcctcattaaccatataactagtgttcttgttttcataaatctttactctttttactgcattacatatctttaagttttgaattgtttttgttaaccagcagcaccaactttc

SEQ ID NO: 447100 - DNA, 80 bp, Triticum aestivum
  unsure (1)..(80): unsure at all n locations
tnatnccnaaaaggcccccnccgtttncccttcccaaaatttncccancctnaatggcaatgggancccccctttnncgg

SEQ ID NO: 447101 - DNA, 146 bp, Triticum aestivum
  unsure (1)..(146): unsure at all n locations
tnctcctntgttttntnnnttcncttgtntttngtttgtttttnttcttctcttttctttctgnttnttttcatatttntctntgttcnctatctgtnncttttnttttccctcntnccttgtcttttttcgttttttnttttnnc

SEQ ID NO: 447102 - DNA, 269 bp, Triticum aestivum
cctccgggtcgacggactgtgtcatataacaatgggctaagtcatccggccctgcccgcccgtcttcttcctgtccgatcgatcccaagcctgcacggtgtcaactttcgttagctttctcgtgtctgttattaaataatacgatcgaatcgtggcctctttggcatgtacgtactatatgatctattttcagttatcgacttgctaatgccggatgaattgttctatctgcatctcgcacttgggattaacctggtcttatgtttctc

SEQ ID NO: 447103 - DNA, 403 bp, Triticum aestivum
ccgggtcgacataactaaaaatccaggtggttaaaccaaaatcacacagaaaaagggagtaccttgctctgataccaattgaaagtgcgttatatcgactagacggggtgaataggtgacttttatgaattcttcactgaggaatttcagggtgaggaaattcctaactgaagaactacttgcagcggaataagtactcagaatctatcataacagagcataagcatggtcatcatgatgaaatgaaaaacaagcacagagtacagaaagtgtaaacacaggatacacaggatgaagacaaacagactgaagaaaatgaactgaggaaattgagaaagtcttcagtcaaagtcttcaaacaaatatgaacaagcacacagtacagtaatgaggaaatggaaga

SEQ ID NO: 447104 - DNA, 375 bp, Triticum aestivum
ttagacattttaactatctaattatagtgtatataatctttaaataactaattaatttaacacaaaatataaaaataaaagatcaaaactcagaaactagcctattgaaagtgtcttgaccaaacttgagttcaaaggtgtcaattctatttaaagctaagaaaaacgtatgcatattcaatattcagtatccatcaaattttggtcttaatgatgcgtggttttgagtggaaagtttaagatggactactgttttgtttagtattattcttacattcatggattgtaagaaaactttaatatctttttgctcctcacagggataaaaaagataaagaaaatttatctagaagaaggtgaatgagaaggtgaata

SEQ ID NO: 447105 - DNA, 339 bp, Triticum aestivum
  unsure (1)..(339): unsure at all n locations
gnnttnatttgtnnntnnggtggtttnttggtnnttggntntttggttttnttggttnttggtnttgtgnnttnttctttgtngnnttatttgtgtntttgggtttggatttatttgggttngntttggttttngtttntttttgtttgnggttttggttggtttttnngttgtgtttttggtngtttttgtgggtttntgttgtttgtttntgtttnttttctgtttttgtgtgtttggntttgtggggtttgtgtgngttggntntangttgtttggntttngttntgttntaagtcnttttgttgcngtgtgttttnttgntnttttttntntgtt

SEQ ID NO: 447106 - DNA, 258 bp, Triticum aestivum
atttacatgttatttgcgtataaaaccttatatgtgtgtgtgatgaggtgtctatgtgcctataggttggtatcatatccgtcaagcatcaggtatgttaatgactgtcgggagtgttcccccccattgcatcagtctgtttgcgcttgtgaatctgttcagcaggttcaacgagcgatgttcatcaggttcaaattttggtcacgtaaggtttgacaatattcagccattttttaaaatcatcagccgatattttcg

SEQ ID NO: 447107 - DNA, 191 bp, Triticum aestivum
gacgggacgcaagaaagaaccaaattgatcgatgattctttcttgccttcacgctctagcttttcccctgcgcgcgagatgggcgtatcgtgatcgagtaattggaatcacgaatcccgcccgcgtttgaacctgtacagattactgattgtattgcttgattatgaattgaaaaccaactgttgatcatg

SEQ ID NO: 447108 - DNA, 398 bp, Triticum aestivum
ttcaacgtagagaagttgactcatcaatgaggaactgttgcgatgaatatccaattaggccaatcccattcactttcacacggtatgttgtgtgttgtagtctggtaatattttgttcacttcaatatcaggctgcaatgtatctacctagccaaatggtgtggaatacttaaattttacttggtatatttgtcagcagatgtaacatggaaggtactggcaaagtggcaatatgattggtgttttcttcacaaaggaaaatgatgtccatctggcttcaatgtcacagttactctggaagtctaattcttctgtgttcttgcagcacacacaaaaaggaaaaaagaaaaagacaaaggaaaaaataaaaaaggaagaaaaggaaaaagaaaaagaaa

SEQ ID NO: 447109 - DNA, 364 bp, Triticum aestivum
catccgacgcctgtggacccgcaccaagtagatcgacgtgatcgtgaccggcgccatgtcgcagtacatccagaccctcgagttctacggcggcggactgccgctcatctgcaccatgtacgcatcttcggagtgctatttcgggctgaacctcaatcccatgtgtaagcccggcgacgtcgcgttgaccctcatccccaccatgtgcgacttcgaattcctccccgtccattgcagcaacgccaatgccgggccgagccaccgcgacctcgtcgatctagttgatgtgaagctcggtcacgactacgagctcgtggtaaccaccttctcaggtttgtgccggtatcgtgtgggcgacgttctg

SEQ ID NO: 447110 - DNA, 499 bp, Triticum aestivum
  unsure (1)..(499): unsure at all n locations
ggntgntgtggtggganctctnnatgnnttcgcgttcggtacggtanaggcctcctnggctgggaaatttttantaagcagaactggcgatgcgggatgaaccggaanccgggttacgtgcccaactgcgcgctnacctagaacccacaaagggtgttggtcgantannacancaggcngtgntcatggcagtcgaantccgcttnggagtgtgtcacanctcanctgccgantcactaaccccgaanatggatggngcttaagcncgngacctttncccggccgtctggncaangccacgcctcgatnnntaaganggcgcngcggtcgctnntnatctagggcaccgagcccggnngtnncgnccttcnngtgccnattntcgtggttctcncggttttgttccnggttagnnctttggnnagggtccnnnngggganagngtttcttntngaacgggggcnttcntnnttggttttccccngtccctggggnggtt

SEQ ID NO: 447111 - DNA, 402 bp, Triticum aestivum
attaaatggggcgctgctaaaatatatgaccggctagggttttgcgggagtattcggcagcttgctggtgtcttatggtgggggtctgagaattttgacaatgataagcaacaaataactgtgttagtggtggttggattgaattttgattctgaagggtggaattgcttggctgtgttcagatgagagctcctttgcaagctccctttcggatagcagctagagcttgaatttcagagtgtggcactaagaatgcttataatgagttttgcagacatgcttgttggttaatttcaattatttctcatgggtatttgtcccagggttttgactgtcaaaacggtttctgttattttgcctgttttcatcagtgtatactgaataaattgtaatgggaaaacc

SEQ ID NO: 447112 - DNA, 572 bp, Triticum aestivum
  unsure (1)..(572): unsure at all n locations
gntgggntttcantaatgtggtntcgcgttttnggtnnntatcttgtgggccctntnggnnccttnnaaaattctcnanaattntttttttttnnttttttttttttntttgnnttttttgtatttgttttntttttattttgtnctttnttntttgnttatnngtttttttttttntgtttgtnnttctttttntngggnttttgttgtnttntgttttctgtttgtnttttnttgttnattttggtggttntttttttttgntttgtgttttttcgtttntgttctttttttttnntttttctntgnntttgttnttatttntnttttttctttgtgtttttgntttnttttctttttttttnttcntttttntttnttttttttttttntttnntnttntttttttttttttgtggtntttttttttttttnttttgtttttttttntttntttttntttttgtttngntttttttggtttgtttttttttnnttntntttttttttgtgttttntgtttnnttntntgtttttttntnttttntgttttgttcttctttttgtttctt

SEQ ID NO: 447113 - DNA, 349 bp, Triticum aestivum
gggaggttcaagggagagaagcgacggagttagaagttgtaaatatgcattgttgtatcgcgacctgaatgaaataaacgaaataatgctcttgttcaatcggcaaaaaaaaaaaaaaaaaaaaaaaaaaaaaaaaaaaaaaaaaaaaaaaaaaacaaaaaaagaaaaaaaaaaaaaaaaaacatacaggcgactccaaaggactaatacatagttacccaaaatataatacatcaaacctcgtcaatagaagccacctaaatgcaaataactggccgttattaaacaacatcgtcatggagaaaaacctgctttcaccaactgtagtagtattgaaaaagatcccact

SEQ ID NO: 447114 - DNA, 414 bp, Triticum aestivum
acgggcataataatgtacgaagcagatttgaatcgaccaggaatagctagatggcatggcatgatggatgccacagcacacagcagcaccagcagtacagtgttgtcgagcgaacgcgtccatgcatgtgcggaccatgctctgcctcctctgcttcagcgcccgcccaagtgtcggcagcgccgtccagtccgagaaacatggatggatgaatgattggccacctttaatcaatttgacactgttcactcattcattagccgtcgctttttggtacgtgccactgacacgtgcactgtgtacatgtatggcgcaggacgctcggcgcgtggccggtggcgacggtgtcggagcgcgagcggagggcgacggtggacgggccggtgtgcggcggctcgccgttggcggtcaccg

SEQ ID NO: 447115 - DNA, 73 bp, Triticum aestivum
gatgctaatgtttgatgtacatgccaatatgtagtcgtgtgatgataatctcatgagttgattatttttttcc

SEQ ID NO: 447116 - DNA, 108 bp, Triticum aestivum
  unsure (1)..(108): unsure at all n locations
tattttttantntttntcntggcttttnttttgtttnttcttgnattttggcgttttcnttatatttggttgctngtctggtttgatttttnttnnntntttttcntt

SEQ ID NO: 447117 - DNA, 466 bp, Triticum aestivum
  unsure (1)..(466): unsure at all n locations
ggnnaaattccaagcagcacngtagntcccacaccggtcatngnctcccgggccgacccaaaaaanatgattagggtgatggttcacgtagtgggccatcgccctgatagacggttttcgccctttgacgttggagtccacgttcttaatagtggactcttgttccaaactggaacacactcaaccctatctcggtctattcttttgatttataagggattttgccgatttcggccattggttaaaaaatgagctgatttaacaaaaatttaacgcgaattttaacaaaatattacgcttacaatttaggtggcacttttcggggaaatgtgcgcggaacccctatttgtttattttctaaatacattcaaatatgtatccgctcatgagacaataaccctgataaatgcttcataatattgaaaaaggaagagtatgagtattcaacatttccgtgtccccttaa

SEQ ID NO: 447118 - DNA, 219 bp, Triticum aestivum
tctggcagtgggcgggagatcggtgcggtgactctggtggtgtatacggcgaccgcgagtaagtacacggtcaggcacgtcgagctccggtgaacatgggttgctgtcggttatcctctttggtgtatatgcttcgtctacagagctactttgacatgtttcaagtccgcccagtttcctgaacttgtgtccatttgcataccgcgtccctttggaaca

SEQ ID NO: 447119 - DNA, 388 bp, Triticum aestivum
atcaaataactagggagaaaactagcaagaatgatccacacaagcatcaaattgtcaaaatgctacaaaaggcaaatcgtcaattcttcatgatgcaattgtgccaggttatttgttacttttctactcatgattaatcaagtggacctagtatccgagcagatgacacagttatgatccacaagaagctcaatagagaagcaagcataaagggaagattagtaagaccactgagctcacccgtttatgagaactttcgagccaatacttattaagcttggagtaacttaatttgccagctctcatggcagagatagcatcattatcctaaaataagccaaaagaaacaacacatgtcaatctacaattcctttttagttgaatttgt

SEQ ID NO: 447120 - DNA, 308 bp, Triticum aestivum
actcgctgtgccacgtcagcatgcctccgcaagaagctcggccacgcccaaatcatcaacgtggaggaagtgaataagcctgacgagatgaagaaggatgagccgaagccatacgccgtgcacccgccgccctacttcttctacccgcccagctcctactacccccaccagtacccgctgtacttctgaccatgtaactgccgagacatgtaactgccaacgagcgtgctttaattttgtcagcaactacaaatatttaccaccacaaattttcatcataacaatattaaaacattgcccaaacaaaa

SEQ ID NO: 447121 - DNA, 375 bp, Triticum aestivum
gcaatctaattaatctgagtaagtttacaagcgaaagatttctcatctctatgggattaaatcccgagatattccaaagaaaaaaaaaataataataataaacgattaaattatggaagtaaatattcttgcatttattgctactgcactcttcattctcgttcctactgcttttttgcttataatttacgtaaaaaccgttagtcaaaatgattaatttgaataaaattttactatcaaaaaaaaaaaaaagatttcaatttctcgtcttaaatgaaaggaacgcattagactcagtagtagtatcctaaggggtccgctagtatggtagaaagagatctctttcaaccatactagccattatggttattgtaa

SEQ ID NO: 447122 - DNA, 388 bp, Triticum aestivum
aaacccacgcatgacgaagaatgccgccatgagctcgtgatcggacggaggcgtggtgagtgtcagtgtttattgttactggaatgtgagcgtggcagaagtagaaagccggatcgtgaatggtacgcagagcacaacggggttccgtccagttttcgttggcgctcggagggatctggagagactaggggaggatccctgggccggggcttagtgctttgatcagtgaaagtacgcaacaagaaatcatggtttgaacaattatgtatcacaacaaattaatttggaggacaacaaatgcaaaagtcttcaactcacaggactgagcgaccagccgggaggctcttcaaggtgagggattactgcaagaccataactaatccccttg

SEQ ID NO: 447123 - DNA, 474 bp, Triticum aestivum
  unsure (1)..(474): unsure at all n locations
ggtnagcaattctacnccgtgnnggtagttctctgcaaattcanaggccgacggggncccgaagaagagtnatcttttctgcttaacggcctgccaaccctggaaacggttcagccggggtagggtccagtggccggaagagcaccgcacgtcgcgcggtgtccggtgcgcccccggggcccatgaaaatccggaggaccgagtaccgttcacgcccggtcgtactcataaccgcacangtctccaaggtgaacagcctctggccaatggaacaatgcggtgttggctttttctcaatttcatttcatttgtaatccgattatgtgaactggtgatgatacgagttatttgaattatataattttcatccaaaaaaaaaaaannnanannancanaaananaaataannanaaatannngntcannaaatcaatccntanttttntcanaatngntcttnttncnanaacnctg

SEQ ID NO: 447124 - DNA, 271 bp, Triticum aestivum
ggaagcaacatcgaggacgccgcctgatcgatgacggccgggaaaaagagagagctagaccgagcggcgagtgcaatgacagtatcatgtgtgcccgtgccatttgcctgtacttgatgcagtacatgttcgtgacctgtttccgttttctatcagagttgcgcgcgttcgtttcggtggagatgcatgttttgctgttaatccggccttaaggactatgatatatgtatggagttatctctactcttaatgtctgagttggttgaatagt

SEQ ID NO: 447125 - DNA, 374 bp, Triticum aestivum
ggataaggtgcattagtgctggtatgatcgtatttgttactacatgcaatgcaattgtatctattcttttttgaagactttatgatccatttgccgtgggtcccagcatctatgtaggaataccctatcttgtttataacagctttgatacatgttaaatattcgaaaacaatgtccgaacatataattgttgtcccctaatataacaaagatcacgaaaaggctcgaaaagtacattaaagtacaatttggagtagaaaaaaaacaatagaagaatttcattttccttcctcattcattggagagctctctttgggctttccgaaaaggtatcacatgtcaagtttggcctcactgtataaaagttataaagt

SEQ ID NO: 447126 - DNA, 402 bp, Triticum aestivum
acggggaacaagaggaggtcaccaaacaaatccggaatgaggtcacggatgttaaaactgatctgtctcaaattggctttgacgttgaagcaattcaacagatggtagctggactggaagagaagattgagttgcttgacaataaacaggatgcggctaatgctggtatatggtatctctgccgaatggcaggaggtataaaagagggaataaatgccaagtttttccaagaagcggatgaaaaactcaagctcttggacctggctcatactgaaaagaagccggtgaagggtctggagttgtttctggagagcaccaaggaagccaaggcactcgactccaagcctaagaccatcgtgcagaacgatgccaagaaaccgatgaaggcgttcgacgtgcctg

SEQ ID NO: 447127 - DNA, 473 bp, Triticum aestivum
  unsure (1)..(473): unsure at all n locations
gacgnaagctcttgccgcattgtcgccctnccaggatccanaggccccgaggtcgaattntnatcanngtcatagctgtttcctgtgtgaaattgttatccgctcacaattccacacacatacgagccggaagcatanagtgtaaagcctggggtgcctaatgagtgagctaactcaattaattgcgttgcgctcacggcccgctttccagtcgggaaacctgnngnnncacctgcttaatgaatcggacaacncgnggggagaggcggttttgtcatgggcgccaanggtgcgatttcgcttncaccagatnnnacngncaanaantnnntgnccctnaacgnntnnnggtaaagnnttgcagcnggcgntnaacnctggnnngcnnngtnagggnnacnnaccngnntnnggnnagttccgaangccnnaaanccccnttcnattccagngnacccncncctnttanggga

SEQ ID NO: 447128 - DNA, 395 bp, Triticum aestivum
gggatattcatcgagaccccagagacctggaggactgccattgaagcacttgagaaggatattcaggcagtgcgggaactaaaagagaagaatttggtgctgctgacataggcatcaacagccgaagcggtggtgctccattttgtcaggtttctaggacaagtggctggaatgtcatactgctggtttgctttgtcttcgaaatgtttgggatagtaccactttgttgtcgttgtagtgctgatatttcctgctgtagctgtttgtaggctggttacctgcatgtgttcctcgagttgtctgataaccggcgcacattgtggttgctgctacttgctgcgttgtgtctttgtgtggtatcttactggagttgagatgttatctgttgcgttgtg

SEQ ID NO: 447129 - DNA, 57 bp, Triticum aestivum
acacacatgccaagagggtgatatcaaagttttcaaattttgggtaaaaaattagcg

SEQ ID NO: 447130 - DNA, 306 bp, Triticum aestivum
ggagatgcgaatcgctacgtctccgtcggctacaaggaaatctctgttggacaggagtacaacaactccaaggacaatttcgccaagaaatgcacattagcgaaggtcaggagaatggcgaggttcatcatcgacaataagacgaccattaggatcgtcgatgtgacaacgatgatcatgacgacgattgccaagatcacaatgcagccgaccactatgataatgatgatctctctgccgtctaccatggagattgacttcactacgatgattatgactattaagaataagaggaaaattacgact

SEQ ID NO: 447131 - DNA, 365 bp, Triticum aestivum
cggaagtcttaacaatcaaggggtggtggcatccttgtgctgctccatgtaaactcatgtaaattattcggtagacgcagacgcagcagctgtcgatgccgttgtctgggttcttggagctacaaatttttgccttcccacgccgtgcatttgcatgaattggagggaaaatttgaacagagctactgcatagtgaaggttttgcatcgtgtatgtaagatatccgatatgtgaaaatgaatgcatgaaagctctgcaaattgtgttgtcatgatttccaatatggtcacaatatccctgaaaccgtatatctgatttcctgaattctcagtgttgagtataatgtttatttaggaaaatggaaa

SEQ ID NO: 447132 - DNA, 363 bp, Triticum aestivum
atacaatgaaaaatgtaactaaattaaagtagttggaacttcaacccaaagacaaaactctaaatgctctttatcattttttttcatttatatgaaaaaaaattgataaaaaaatgctttttcgaaaaataaaaacttcttcaaaatccttagcaattttaagataaaattagattttcctaattgctcaagagaaatcaaaaaaattatcaaaatattttttttgatgtatctttttatattgtacaaacataagattttttgctcacttaaagtaattaatttcaagatcttttatttcctcattaagaggaaatagaagatctttttttaatactgtctcaaggtagtgatgggaacaat

SEQ ID NO: 447133 - DNA, 386 bp, Triticum aestivum
atacggacttagcatagattaattaatgcctatccaccatatgaataattaaaaatagttatcgagccaaaatgtatactataatctttggctgtgttcaacgaaagcaattatggacgagcgcggttccctcatttattacttaaattgtagatattgctccatgtaagaatataagatactgactatatattgactaatgtattactccaatttaacggaaataaaggtgacacatgtactcaatcaacaagatgagttattcataatgtaatgaaatgggacatatcaaaacttgagtggtagagttgctgcctcttaattacaaacagtttgaaagcaacccctccttctaactaaatctgatattgctccttattatagaa

SEQ ID NO: 447134 - DNA, 366 bp, Triticum aestivum
cgggggcaacaatcaatacatcaacttcaacgcaacgcagcacgggcaacgttggttgaacaaggagctgaccgagtccagcaatggcggcgagggctgcatgtaccggccggctgctcagagcaaccaccgccaaggacagccgtctgccatcgtcgtccccggcggccagccggccggcgtgccgcatcccgtctctcaagttcccgttcctgtgggacaccaaggcgaggcaagggaagatcagccgcgccgccgagcagagggcggcgctgatcaccctgggagcatccagcgccagcaccacggaggagaaacaactcctgccgggggaagcgagcagtgtagatctcctgctgcctctgg

SEQ ID NO: 447135 - DNA, 471 bp, Triticum aestivum
  unsure (1)..(471): unsure at all n locations
ggnnngnaacgttaaccgnntgtccgnctcgaagaattcaanggncgacgggttcttaaaagcaaatagcatttcctattgatttgtcccctggactagacctatgtagattcggaatatccgtcgctacgctgttcccaaggactagcaaaatcgaaatagcgaaattcttgggtctctcaatgggttcagaaaccacacgtttctctggatcatcatagcgtacttccacatatcactcagaggaaagtcttttcgtaatggatgaccctcgaaaccataatctgttgatataggcgtaaatccggatgattgatggaagaaacaccagacatatcccatacttctcgctccaccggccggctgatggaaatagactgactaccggagatattcgtgttacttcgtctgcattgtttgtacacgaatgcgtgagttatancgagtactcaagttaaattaagggcaact

SEQ ID NO: 447136 - DNA, 431 bp, Triticum aestivum
cccgggccgacgagcactgcacttgccatgcataccacgcatgcaaacgtacacgcatggaacatttgttattctttcgatggaccggtctcctcaccgtatgtgtacattttacgtggggctttcttgcttttttgtggtggttaaaacctgtgtaattatgattatgttggtgtgttaatttgttggtcatggtataatcaggaacttgtgcaaaaaaaaaaaaaaaaaaaaaaaaaaaaaaaaaaaaaaaaaaaaaaaaaaaaaaaaaaaaaaaaaaaaaaaaaaaaaaaaattaaaaaaaaaaaaaaaaaaaaaaaaaaaaagcgggccccccaaaagtttcaaacttaatttacccttaaatgaaatttaaaacccctccaaaagtgcccccaaattcaaattcagggcccttcttttaaaaattt

SEQ ID NO: 447137 - DNA, 355 bp, Triticum aestivum
gggaatacaaatgcacctaaaaaataagtattgggaaggaaatttgtcctgcagagagtatatacttggaaaattgtcaacagactttcctgtttcgtaatatggcacaggactttattatctttttaatgtgacgaagaactaatgtagcgtagtttagccaggatgtatgactgttatccaaagagcatcaatgaagagctaaaaggtctattgtattccaaaaaaaaaaaaaaaaaaaaaaaaaaaaaaaaaaaaaaaaaaaaaaaaaaaaaaaaaaaaaaaaaaaaaaaaaaaaaaaaaaaaaaaaaaaaaaaaaaaaaaaaaaaaaaaaaaaaaaaaacacatattggat

SEQ ID NO: 447138 - DNA, 372 bp, Triticum aestivum
gggctgctaagtcgtgcatgtgtgtctgtgttttttgtttgttctttgcatgctccgggcgccaagcggccgtatcggctcggctgtacgcgtctgctgacgtcacgtaggggtgtgggtatatgctatgcatcatatgcccaaaatgcccttagacatggggggtaccgaagcaaacctcattgttcaaatatgtccaggttgttgtcgaacccttatgttgggagaatatgagaactctaggccaaattagccttcgactatctatacctaatattataagacggatcctttcatagttcttcatctatcgctcttttgtatccgttgattttatgttaacaaagatattaacggccgacatttaaaact

SEQ ID NO: 447139 - DNA, 223 bp, Triticum aestivum
tcccgggccgacaaagctataatcaacgtgtgactgatttggtttattaagggtgtccagttgtgtgaaagtatgctacattgccccgcttgataagcaagtaatactcatcctttcatctatgcatggccgtttaactcttgtcttaaaaaaaaaaaatgaaaaaaaaaaataaagggtaaaaaaaaaaaagaaaaagaaaaaaaaaaataaaagtagaaaa

SEQ ID NO: 447140 - DNA, 234 bp, Triticum aestivum
gtgtcacgaacatacacgtgatattgagcccttgtagacatggattgtcgtaaccccatattggtacaatcttcgaaagacaggtctcgatcaccctgcatctaacgtgtctgtcatcagggatttattccaatctgttccactgggctaatacagaactcatgtgaacctgcctgtaacgttctaacctttctttagtcttccttcgattttaaattcctctctctgcgtttt

SEQ ID NO: 447141 - DNA, 347 bp, Triticum aestivum
gacgggacttcccatgcaatcatgcttccgaaactggtgtccatatcgctctataccagcgacggttttcactacgccagtttggctagttccatcaactcgctgggcaggactaataccatcaagtccaaaaggcccttcagcctttggccgatctagcgaaactttatgaaaagtactctggctcaccatgaaaggaattgcaaaatgcttcaaagtaccccacgaccgtgtctacgtagatgtttctacggcaggaatctgatcgcattgaccccaaacagctgctaacctgccactaccacggcatctttgaagtaaacatccgccccttatacggacctcat

SEQ ID NO: 447142 - DNA, 312 bp, Triticum aestivum
gggtactgtcatcaggtttccagcgttctacaatgagaaaatgagatcgatgcagatgattatggtaaatggtcatacgtcgggaaatcaacctgtatatgacaatcaggcaacacgcccctatttcatatgaggcagcacgtcaggatccaagtctagttcaacgtgcatggtacgtcagaaatcatccagaggctgaagggatttcaagtcactcgatggtccttttaacacgtcattacagtgaacaccaatatctttctgtatcataatcaggaagcatatcatgactcctgcacaaactggattatt

SEQ ID NO: 447143 - DNA, 229 bp, Triticum aestivum
gaccggtctacggtatatctatcttcatcattgtttagggtatcgtgctttcttgcagtggttgagccgtgtgtcattacgattatatttctctgttcattggatctgtgatgtttatccacacgctcatgtgggttcagatacatggatggtctgagtacaacgctatgtcaggaacacaacaactgttacagttcattcataatgtacttcttgtgtttgctcaaaa

SEQ ID NO: 447144 - DNA, 377 bp, Triticum aestivum
gaatatgaatgcatttttcattcgctgaagagtatcaatgattgataatatacgagggaagtgtaatgattagaaagctgtatatgtttttaggcttatttttaaaaggagagtaacatagaaaactacttagaggcgactgactcacacaaaaaaaaaactaaattcatttttttttcaatcaaccatgttagtttgttagaaacttaagtttaggtcttagtttaacaaacgcacgaaatttcgataacattagatgttttacatattgttgtaccatttacaaaaactcctactattactttgtaaactaaaatccaaaagaatcatttacaattaccacattccgaaaaattaaaacttgcgatagtacaaga

SEQ ID NO: 447145 - DNA, 58 bp, Triticum aestivum
gtagcgtctagaattccaggtcgacgggctgtttcaagtttttgggtccgggcagtcg

SEQ ID NO: 447146 - DNA, 389 bp, Triticum aestivum
tcccgggccgacgggagctacaacaactccgatgatggtgagatcatggcttaggaagtgagtgttatctataagccatatgagtgtgcatggtgcgtagatgcacatgtgtgtgccacgtatgtgtgtctaggctcaagccagaggccggtgtgtgaccacgtctagctaagcgggagtagccgagagtcagtcaatctgtttgagttggtcatgtagtgctatagtgtggcgcgcggccggacgagccaatcatgcagatcgtgcatgcatgtaggagtcagcgggtagttagctggttagtggccggtgggcgtgcgtgtgtggtggccagggttagtgttgtgcgtgcgtctgtactagaccggatataaatcccctgctgctgt

SEQ ID NO: 447147 - DNA, 176 bp, Triticum aestivum
ttgacagggtaactgtacctgctcccttattggaaagtggtacatcatagaaaactgtttctgtgacacctacaccagttagtgaggaagctaaggatcatgatcatgacacttcagaacaggatactactggaagctcgtagatcaacgagatctaagatccgcaccagagtggt

SEQ ID NO: 447148 - DNA, 61 bp, Triticum aestivum
cgggcgctccagcttgtaactagatggttactctttccgtccaccattgtcaccggctaac

SEQ ID NO: 447149 - DNA, 473 bp, Triticum aestivum
  unsure (1)..(473): unsure at all n locations
gngnnngaattctacgccgttcggtagcntcntcnaattccagggncgacgggnaanaaaacnanngaaacaangtncaanancggccgctcnagaggatccaagcttacgtacgcntcatgcgacgtcatagctcttcnanantgtcacntaaattcaattcactggccgtcgnttacaangtcntnactgnggaaaaccctgncgttncccaacttaatcnccttgcannatatnccctttcgcnanctggcgtaanaacgaagagggccnnancgntagcccttcccaacagtgcgcancctgaatggcnaatgggacgcgccctgtatcggcgcattaancgcggcgggttggtggttacgcncatcgtgaccgctanacttgccagcgccctatcgcccgggcntttcctttcttcccttcctttcncgccaanttcgnccngttttccccnttaagctctaaatgng

SEQ ID NO: 447150 - DNA, 360 bp, Triticum aestivum
ccacggactcctgttcatccagcctccactgcgcgctactccaccggctactgttcaaccacccctccacgggcacccctccaccctccactattcatgcagccctccacggggtcgtactattcatccagtcctccacggggtcctgttcatccagccccaaccggctcgatcgatcggggtcctgttcatcccgaggcaacgccaccgctcattgttcatccaccctcccccccccgcaacgctcactgttcatcccagaggcagcattgatcagcttctgttagcagcagtagctaaggaatcgctcgatcgggttcagttaacagccattgatcgatcgcccgggttcagtaacac

SEQ ID NO: 447151 - DNA, 429 bp, Triticum aestivum
ccgggccgaccaagacacggattaaggaatccttgttggaagcacaccaaccgcaacagccgcagccgccgccacgcttcgtggccgtgctgcggacgatgctctctgtgctgcgccagagaggccaccttgccgggggaaccaatggctcgcaacactacacgcggcaacaggctccagccctcgtccaacccaatcccgttcacatccccgactttctctggggctattatctcggctacgagctgggctttgatgattgcgccaaactggacgaggtgatagacgacgccatggctgatatggcttgatgacgactctggtctgatgaggaaatggatgaggctgcatgattctatgcatatatagtatcgaaggccacgctctccgtgtttgtgattttatttgcccactgtttgtgtggagtta

SEQ ID NO: 447152 - DNA, 352 bp, Triticum aestivum
ggtacgtattattattgtgatatcaacattaggagggtcaatggtcacagcgaatcttgatatttgtatgagcaagtttgacttttgcatgtaatcgaggccagtgtggtgttcgaccgacgaaggcttaacgtgacgcgccccaaactaagtgcagatgctaggatgccgtgtgatgctgcaaacacggcgatatgccgatggtgatgcgtgagaagcggcacgacgtatcagaggctggagccgtgatggacagcatcaaattgggtccggtgaaccagacggtcttatcggtatgtctggccagctgttcaaacgtatgttccttcagtcctaaccgatagtatcgttg

SEQ ID NO: 447153 - DNA, 246 bp, Triticum aestivum
acggatactgtaatctggtatctattgttcttgactgagaaaactaactagattcagtctaatcatttataatgatcttatgtagggaatactatgtctatttcatgaaatgacgtcacgggcgtatttcatatgatgtgggctttaagaatccaaatatagttaagcgctcatggtgcctgtgatatcatcctgacgctcccgggatattcttttcctgctgggtctgataaaaggttacttctt

SEQ ID NO: 447154 - DNA, 461 bp, Triticum aestivum
  unsure (1)..(461): unsure at all n locations
ccnttnngcccaaaanccaagcctcccgggccgacgggaangantngactgaagacacaanancaantnaaaaaaaaaaaaaaaagcggccgctctanaggatccaagcttacgtacggtgcatgcgacgtcatagctcttctatagtgtcacctaaattcaattcactggccgtcgtttacaacgtcgtgactgggaaaaccctggcgttacccaacttaatcgccttgcagcactccccctttcgccagctggcgtaatagcgaagaggcccgcaccgatcgcccttcccaacgttgcgcagcctgaatggcnaatgggacgcgccctgtagcggcgcattaagcgcggcggtgtggtggttacgcgcancgtgaccgctacacttgccaagcgcccctancgcccgctccttcgcttcttccccttccctttctcgccnangttncgccgggctttnc

SEQ ID NO: 447155 - DNA, 383 bp, Triticum aestivum
gggatgatgaacgctcttgcctatcttgggcttcgtgacatcctagctacagagatggtgtgcaagtctttgcattcgtggatccgcagcgagttatcgtggaagtgtatccacattgaaccggtattgagcgggaagatctctgatcctgatcgtctatttctgacacagaagattccaggtgatttgcagtgtctaaatataaatgactgcataaatatcaccgacaatggtttgaatgctgttctccaaagcaatccgacgttaacaaagttgagtattgcacgctgcccgcggttaactttggatggccttattgccaatctaaagtcatttaatatgaaagcagtgtcgggtattaagagcctcagaattgacaaaaa

SEQ ID NO: 447156 - DNA, 270 bp, Triticum aestivum
ttgaatgaaattcagtccaatttcttgcatgggacgtaagcatgcacccaagaacaatgatttgacttttcaaccactttatgtgcactggtgcatgtgcatgtagttaaaatttgaattatgcacataagtgcattgacaactcacttaatgcataaaaatgtccaaacgaaccacgacgattctcaaaaaataacacagcactcatgttgttctaagttgataccggaaatttttttaaagcaatatgaggcaatggatatagtttcg

SEQ ID NO: 447157 - DNA, 486 bp, Triticum aestivum
  unsure (1)..(486): unsure at all n locations
gnnnnnnnanttctnttggtncgtnccntacnactaagtnaattcgccggccgacggggaaagaantagggtgaatngttcagnttttgggnantngccctgatntncggntttttccccnntagtccttggatttcaacnttcntaanaatggantcgtgttctntgnnggaacatacgnnaccctntctcggtcattcttttgatttagaagggattttgccgatttncngnctttggttnnnaaatgatctgatttaacaaacatttgacgcggtttttaacaatcatattacgcttacaattnaggtggcacttttcggggaaatgtgcantttngccctatttgtnaantttcnaaatacattcaaatagntatcngcncntganacnntaaccctnacaaatgcggtttgctcaattgtaaanggaatatctgngttttcaaaaatttcngtgtcgcnccttaattccattttttgccgg

SEQ ID NO: 447158 - DNA, 398 bp, Triticum aestivum
gacgggtgaagcatgccggcacgccgtcgatgagctccgacggctccgtgaccacgagcgccggcgccggcgagaaggagccggagctgctgaatctttttgtttaatgaagctagttattaatctgcgcgttcattcaccgtagtagtaccgcgcgatcgaccgatcgatcgatgcgctgctcgctcgctggcgctggaaccagctgaactttttggtagcctccctctcgtcccaccggcgacgcgccccttgattcttttttgggcgtgcatgaaccgccggctcggtgtgacacggagatgactagatgagaccgccccggccggctttgttccttgtctactccgataatagtaccgctgctttctaagcaccaccactactgctacaaagat

SEQ ID NO: 447159 - DNA, 451 bp, Triticum aestivum
ggtaccgtactacaattcgcgggtcgacaccacctatggataggctatttcctcgcgggtcccaaatgtcagaatccaaatctgtcacggccatgcagcctttcctatgaaaatttatagcccatttgatgtgctggctcgaaataagtttgtgggtgctggtgggggctagtcacttggcttctgtaatgcacagtgagatcaagcagccggcgagggtgatgttatttcccttggttgggatttgttacaatatttcactcaaaattaaacaaatggcaagccatttgccttgtttcaaagaaaatatgacagtcacagccgagttgaaaagggcaggaacatctaactccaacttacaaactgtacaaaagtacgagggttaattgttcatcaggtttacaaaaaaaccagattgaaaagggcaacaacatctaactccagcactgtt

SEQ ID NO: 447160 - DNA, 295 bp, Triticum aestivum
gtgcatcaatgagagcttcggtgggttccgcgacgggaccgggacattgttcgtcaacatggctgacagtgttgtttcgcttgacatcaggacgttggccatggagaggctatgtgttccgcccactacgaacggagacccctcggcgacctctacccctacgagatggtggcgtggccgccggagctcaaggacctggtgaatcctccggtgaatgcatatcgtggcactgcgtgctgattactgtatcgtgtgttttggtggtgtcagtgacaatggaactgctaagttcagt

SEQ ID NO: 447161 - DNA, 411 bp, Triticum aestivum
gggaaaaagaactcgaccagcagaaacagaggacgatgtgctctcggctgaggacggagctgttgcggccgctccgcgtggcgctggtgaaccggggccccgacgcggagctgctggtggcaaacccggtggaggtgtccgggaagggtaggccgctggtgttctatgacatcaccctcgcgctcaagaacctccatagacgagtcttcttggccgagatcgggaggcatgtggtggacgacagggagtgggaggtgtacagggtgcacctgggcgaggacgaccacgagctctcgtgctcggtgcggagcaagattgtcgatggcgtcaccaacatgctcatgggctgggactgactgaccgactggtcacaccatgcatcttccttgacatattcagtcttgttgcaaa

SEQ ID NO: 447162 - DNA, 105 bp, Triticum aestivum
acggggagtgaaaatcatcattattagaacattgccccagtgaggaaaggatgatggagactatgattcccccacaagtcgggatgagattccggacaatgagag

SEQ ID NO: 447163 - DNA, 417 bp, Triticum aestivum
gggacgcaaatttttgatgtagaacactctctctaattccttacggtttaagagcagtttcgattttaccgaaaagcggacactctgttctgcgcgagaccaaaatcgtcgtatgtactgcatcggacagaagaacgcattgcttcagacaaacgcattgcttcagacaaaataccgcactgcatcagatgggcaagtgcactgcatggtttctttttgtttaaacgtattttttgtcggacgaggaaagaagaacgcactgcttcagacgaaataccgcacttcatcacaagagacaagtgcactgcatgattttttttgtgagatgtaaattttcccatacgagtttttgtttttgttgtctttttttcaactttcttttatgaacgagaagtggacgcaaagacaaggggaaat

SEQ ID NO: 447164 - DNA, 421 bp, Triticum aestivum
gacacggcaccagtagtcggccgcagtacaacgggggatctaccggcagacacgggtccaaagctactcatgcgcttagtagccaacaagcggtcaaaccaaccaagcctccgcccgtgcagagcacgggaggatcacttgcacgaaggcgtcctgcaaggccaaatcacgcgtgtcacaccagcagcaataaagctacggatgcaacgattttccaaaggcaactttatcgggacatcggtgcaacgttgtcggacggtcttatcatgcacgaaacgggctactttcctgtttcccgagccgcattcggctgttgggtcagaatttcacttgagacgtacaggagaccgggacagcgatgacgttgccaccgaggggcaacgtttttccggaggcgacattggagggacatcgttgcgac

SEQ ID NO: 447165 - DNA, 413 bp, Triticum aestivum
gaaattcacgatttgatgacttggtgaccatagtacaaaagtactatgcgatggagagcgcctggaaaaccgaaagtaaattttgggataatccggccccgaatacatccctagtccaaaataaaagggtgcatcattaccaagcacctgtgttaaacaccaaaaaaccaaaaacccctaaagggtacggaaccgtactggagggttggctaaacggaccctgcaaaattcatagcacagagggcgccactccaactcacagccttcgagcatgttggatactacggcaggtggccaaaagtggcgaaaagcttctagcttcagaatcccaacccagcaacaccagtacagtgttaacagtcttcgaaactttggcatcaaattacatgcgaaaacaaacactccgcaacctt

SEQ ID NO: 447166 - DNA, 413 bp, Triticum aestivum
gggatatctgaacacaatctctttattgcattcagtgaagaaatctgttgcagaaaataaaatacgtacgtgtgcttgcactgtcttcctaataatctggtgtaagtttgcttaatctgtccttttttaatcgacaatggatgttggcaggagcaactgacccaccacgatgctcagttcagtagaaaaaaaggatgctcagttcagtacagatctgttgtgattttgcaaggcctactgggggcaaggcacaaatgtatcaagggggtgtatgtaaaaagataactgagttgatcccctcccttgcatgcagatccaacacaccatggggtcttggagcagcgtatcatgagatggaccgtagcactagatattttcccctagctgtacaccaagcaaaatcgaccttggac

SEQ ID NO: 447167 - DNA, 429 bp, Triticum aestivum
attcgccggtcgacgggctcaagaagtccgtcttcgggcatgacgacgcgctccggatataaggccagagcggaagttggggtcacgaatccttgggagatcaagtctccccagacatcagtgacgtagtctaggttttccaaaactaatctggtgacctgggaggtagctgtcgatctgctccagatggccaagcgagttggcccacagtgcgaagccgccgaacatgaagatctggccggggagaaaaacttccccccggacagcattgttgtagatgattgacggggccatcaaacctcttggtgacgacgcagcggaactctcagtgaaagcaccagtctcggtgtcaaaaccggcggatctcgggtacggggtcacgaactgtgcgtctaacgtcgatggtaacaggagacatgggacacgatg

SEQ ID NO: 447168 - DNA, 422 bp, Triticum aestivum
  unsure (1)..(422): unsure at all n locations
gggggggtcattcgtgctcttcactctggaggagttttggaaaaggccttctgcactgaaactcgtccatttaaccagggttccaggcttacagctttcgagttagttcatgacaaaatacctgcgacgctgatagcagactctgctgcagctgcacttatgaataatggacaagttcaagctgtaattgtgggtgctgatcgtatagctgcaaatggtgacactgccaacaagattggcacatacaacctctcaatttctgcaaagcatcacggcgtgcagttttacgtggccgcaccagtaacttcgattgatctctcccttccgtctgggaagcaaatcgtcatagaagaaagatcttcaaaggaattgttgaactctgaaggtggtctangaaagcaggttgccgcgtcaggtataca

SEQ ID NO: 447169 - DNA, 429 bp, Triticum aestivum
gggtgttgtaataggtaggacaccttatttcagaaaatcaataataaacaaatgcaacatggatagttcacatatctgcatggatagttcagaaacactagtcattttcattcatctctgcatcagcatgatagcactcaagttcacattgacagcacaacatgggcgatgctccagtatttcaaaataaaagagaggaaaaaagggacatgccccagcatgatacatgctccagcttgggctccacaaaagataaagtacatggttaacagcatcttgctgtttctagttacacaaaaatgatgtagcgcatacatttgtctacaaaaaagcagtctaaaactatctaggaaacactttgctccaattgacatcttctaagaactactcagcagtttctgaaactcttcggctgagttgagtgtgttt

SEQ ID NO: 447170 - DNA, 473 bp, Triticum aestivum
  unsure (1)..(473): unsure at all n locations
ggnngnaattcttctcgttgnncacggtcngtnaatcccgggccgncgagctcactaaaaagcggccgctctagaggatccaagcttacgtacgcgtgcatgcgacgtcatagctctttatagtgtcacctaaattcaattcactggccgtcgttttacaacgtcgtgactgggaaaccctggcgttacccaacttaatcgccttgcagcacatccccctttcgccagctggcgtatagcgaagaggcccgcaccgatcgcccttcccaacagttgcgcagcctgaatggcgaatggacgcgccctgtagcggcgcattaagcgcggcgggtgtggtggttacgcgcagcgtgacgctacacttgccagcgccctagcgcccgctcctttcgctttcttcccttcctttctcgcacgttcgccggctttccccgtcaagctctaaatcgggggctccctttanggttccgatt

SEQ ID NO: 447171 - DNA, 387 bp, Triticum aestivum
gggaaaacgaaataagaactgttctcgcaaatccacttcagtttggcgacatggcgcagaaggctgggagacgaatgagtgattcctcggacatccatgaattacatattagcacctgcataatcgagaaagcagattacaaataatggtagaatctgaacgaattaagaagatgtggggaggggggtggcagagaaggacgacggtggtcgtcgcacgacccgtgatggatgagctccaccggcgacgcccatgacctccgaagaaggggtggaagagggtcgagcggagctgctcgccggggaagggaaggcagctggccatggaagggagaggattgggcggtgggatctagatcaagatttatttctttttctaagaacatct

SEQ ID NO: 447172 - DNA, 435 bp, Triticum aestivum
attcgcgggccgacgaagtcatcaaaaacgcattcgtaatcgacgggaacgtcttcttccactgaacgcacaatattgaaagggctgaaataaattcagaaaaatatgagcaccaacgtcaaataaagtctgacacttaaactctattcggctgaggataccactgtcctcataaccatccaaccacaggttaatttgttttttctttcttttaaggatacataatttgtctgatgagattgattttacaacacttgctgcgttaattaacaagctcgagaaaaacacatcagatgaacgagtaataagtgggcaggcaacataaaacaagaaatgcaaattgaccatagctcagatggttatgtttcttgtggtggaaccaactcattagaatttaagtccttgacttagtatcggcggtcgcatttttctgaa

SEQ ID NO: 447173 - DNA, 218 bp, Triticum aestivum
ggggagagcaagtcggaggcggccaagactatggatcttggggcacaggcctaggtgtgcctctaatgataatgatgttgtactagctactatgcttttgtgtggtgcgcgtctctaatgttctccgtgcttttgtacaaaagttgcttgatgtcgccttcgtcgacttgatccaatgcaattgggttcgtccttctatggattcgcgagttcgtctg

SEQ ID NO: 447174 - DNA, 369 bp, Triticum aestivum
cggtaatacaagtaaattaaattacctcatcttggagcttagtttgtttctttaaagcaatgatcagctgcatatgttatatttacatgctttggtgttgctgaaatgcttatattcatttttgttaaacctcctatttattttattactaaaaaggctatgaagcttgagcatcatagtttgcttctcagggttgaatcatgttgttgctatgcagtaggtatggttgccaagaagcactacgggaaactgcgaagaacactattaaaattctttggttggttgttgatgtcttgagagcaagtacaatagagttgagttagttggctataagaaatacactagtatatttttgcttagttggaggaa

SEQ ID NO: 447175 - DNA, 459 bp, Triticum aestivum
  unsure (1)..(459): unsure at all n locations
taactttgncgcggtcaggtaccaggtcatgagaattcccgggccggcggccgctctanggatccaagcttacgtacgcgtgcatgcgacgtcatagctcttctatagtgtcacctaattcaattcactggccgtcgttttacaacgtcgtgactgggaaaaccctggcgttacccacttaatcgccttgcagcacatccccctttcgccagctggcgtaatagcgaagaggcccgaccgatcgcccttcccaacagttgcgcagcctgaatggcgaatgggacgcgccctgtagggcgcattaagcgcggcgggtgtggtggttacgcgcagcgtgaccgctacacttgccaggccctagcgcccgctcctttcgctttcttcccttcctttctcgccacgttcgccggcttccccgtcaagctctaaatcgggggctccctttaaggttccgattta

SEQ ID NO: 447176 - DNA, 370 bp, Triticum aestivum
gggcctcgaacgccgctggagaatcgccttcgatcgggatggccgccagccgtgaagcggcagcgacaatgttgtccattgggttagaatagtgacccggtggtgtggggacgtgcggtgccacaatgttgttctgacgaggcggatccaccaaacgtggttgaactggtgcccctgctccaggtgcctccgcccggtttaccaccggcggattactggtccctgctcctggggtgttaaagagatttctagcgtcataaaccggcggcaggtgagatcggtgcctcctcttcaggacttcgttcgacgcactctgatccagcataatccggtaagcttgtgcatccaaagcggcccgctccgcgactat

SEQ ID NO: 447177 - DNA, 376 bp, Triticum aestivum
ggggaagagtatccatcagcacgatggcgtggtgacgatcttgatgttcaactgtcgtagggcttcgcctaagcaccactacaatattatcgaggattatggtggaagggggcaccgcacacgactaagaaaacgatcatgtggatcaacttgtgtgtctaggggtgccccctgcctccgtatataaaggagccaagggggggtgcggccggccctggtaggaggcgcgcaggaggagtcctactcctaccgggagtaggactcctactcctaccgggagtaggactcccctccctttccttgtccaagtaggagagggggaaggaagggagagaggaggggaaggaaaggggggcgccccccacccccggctggc

SEQ ID NO: 447178 - DNA, 403 bp, Triticum aestivum
gggttcaaacgacaggtacgaggaggaggacgagtacaggaagaagcctactagtggtggtgggaggtacgaacaggatgatgagtacaagaagaagcccagtggtggtgggaggtatgaagaggatgacgagtacaggaagaagcctactagcggtggtggcggctacggaggtggaaggtatgagggagaagatgagtacaagaagaagcctaccagtggtggctatggtggggggaggtatgagcaagaagatgactacaagaggccccctagtggtggctatggtgggggaaggtacgaacaagacgatgagtacaataagaagcctagtgcatgtggatatggaggtggaggagggagatacgaagatgagtacaagaagccaaccggtggccatgct

SEQ ID NO: 447179 - DNA, 474 bp, Triticum aestivum
  unsure (1)..(474): unsure at all n locations
ggttngnanattttttgcncttccgtatganattcaaattcgccggcccgaccccaanancaatgattagggtgatggttcacgtagtgggccatcgccctgatagacggtttttcgcctttgacgttggagtccacgttcttaatagtggactcttgttccaaactggaacaacaccaaccctatctcggtctattcttttgatttataagggattttgccgatttcggcctattgttaaaaaatgagctgatttaacaaaaatttaacgcgaattttaacaaaatattaacgctacaatttaggtggcacttttcggggaaatgtgcgcggaacccctatttgtttattttttaaatacattcaaatatgtatccgctcatgagacaataaccctgatanatgcttcaatatatttgaaaaaggaagagtatgagtattcaacatttccgtgtcgcccttattccctttttt

SEQ ID NO: 447180 - DNA, 475 bp, Triticum aestivum
  unsure (1)..(475): unsure at all n locations
gggnngnaattctctaggtgttccgtaccgacangnaattcgcnggccgacgagctcanaatcggcggccgctctagaggatccaagcttacgtacgcgtgcatgcgacgtcatagctttctatagtgtcacctaaattcaattcactggccgtcgttttacaacgtcgtgactgggaaaccctggcgttacccaacttaatcgccttgcagcacatccccctttcgccagctggctaatagcgaagaggcccgcaccgatcgcccttcccaacagttgcgcagcctgaatggcgatgggacgcgccctgtagcggcgcattaagcgcggcgggtgtggtggttacgcgcagcggaccgctacacttgccagcgccctagcgcccgctcctttcgctttcttcccttcctttccgccaagttcgccggctttccccgtcaagctctaaaatcnggggctccctttaagggttcga

SEQ ID NO: 447181 - DNA, 426 bp, Triticum aestivum
  unsure (1)..(426): unsure at all n locations
gaggcgacgtgcggggagctggatgttgttgacagggtgctgctgctggagtggttcgccgagaactaccagcagtacggctgcaagctggagttcgtcaccaacaggtcccaggaagggtcgcagttctgccggggcttcggcggcatcggcgggatcctccgctacccggcggacgtcgccgcctatgacgacgacgacgacgacatgctggatgacgacgtctatgaagacctcgaatagcaatcaactgaagcttcagtgcacacggtccgggaggagcctgtgctggccacgaccgcgccgggacgagaccctgaaacatccaaacgatcggtgcangggaaacaaggaggtggagagaagaggatctaagcaattgcgcaatccagatgttgagccaggcatgatgatagcgtcgatgct

SEQ ID NO: 447182 - DNA, 392 bp, Triticum aestivum
gggagtagtactgcctgcttgatgtatggtgtgtaccgctcatcgtaaggcatggcaggaccagagaccccgctgataccgagatcttcagaggttcaagcttctgcaaaaaacaagtaatgacaaatcttagggcatgtacatttcaactaaaggcaaatttgcaaaatatttagattactcattattaccttatccttcacgcgcatcatgtatgcccggtgttgcacgtcgtaaacatcatccaaaagccaaaccatccttacaatttcatacaataaacatataaaagttcatcttcatctcaaatatcggtatacactaaacatataacatgtgttcaactacaagaatctcaacatctccttctcacataatgaatatgtcatatg

SEQ ID NO: 447183 - DNA, 390 bp, Triticum aestivum
cggtctactatccggccgacgggggcagaaacaaggggacgagcatcggcggctatacgaggagcatctgctgcgccgagagctgggatcaccttgacccgttcatggcgccgcgatgggcgaaacatttcaacgtgtacaggtcctgagagtgagtgattcacaaggtggaagatcgtgatgatcggctgaacacaaagtctggttaccagtttgaccacaatgtgattcttgttggttctttctttgcactcttacaagcatttcaaggaagtgtttgttaatctttacatggcttttgttgtgggttcagagtccatccatgttgtccaatatgtgtgcaaaagcttttctttctgcccttgtccggtgtgttttgcatttgtgtgt

SEQ ID NO: 447184 - DNA, 411 bp, Triticum aestivum
ggggacacgtacgggttagcacccggttactcctaacagccgatcctgaaagggtgcttaaggggatcagaagaccaccaccaccgccggccacctccaggtccgtgccggcggcatccttcgtgtctgctacatcgcctgctgatgcccttcctcccgacgatcttctcactgctggagatgctaaggtggagccaggggctatcctgttaatggatcaagataatcacgcaatgaacattaaaaatgatgccattttgtttgacatagacgaaccttatgcaaagaactttcccacatggagagtggagatcattgtctcatgtaaggaatctcccaatgtttttctgccactaaggttgaaggatgttaatcatgatgataaggcagacattgggagagatctcaaga

SEQ ID NO: 447185 - DNA, 326 bp, Triticum aestivum
ggggggtccgaggaagtactggatcatcaagaactcgtggggggcggggtggggcgaggccggctacatgcgtctgcagcgcgacgccggcatgcccaccggcctgtgcggcgtcgctctgctcgcgagctaccccgtcatgtgggtctgccattctggctggtggtgtgtgtagagtctgccattctggctggtgatgtgtgtaagtaggctaatgcagcattgtgaagtgtgacagaatacaactagtagtacaaaatatctacataagtgtgtaaatatgcgcgtggccatatttaatttacataatggcaaggttgagcagt

SEQ ID NO: 447186 - DNA, 97 bp, Triticum aestivum
gggaggttcacgggagagaagcgacggagttagaagttgtaaatatgcattgttgtatcgcgacctgaatgaaataaacgaaataatgctcttgtcc

SEQ ID NO: 447187 - DNA, 358 bp, Triticum aestivum
tcttgttgagtttggtgtggctgaagcttttgttaacaagagaagccgtgacatgagaggaattaacgagacacaaaggttcaagcttggggatgcccaaggcaccccataatcatatttcacaaagtttcagtcatctaagcttggggatgccccgttaggcatcccaccttacttcttcaacaacgatcggttactatcggttgagcctaagtttttgcttcatcacatgagttgtgctatccttgcattgttactctattttgccttgcatcatctttgcataagataccatcatgtcaaattctttaatgaaatagactctttgcataggttcaaaactatttaacctcccttt

SEQ ID NO: 447188 - DNA, 271 bp, Triticum aestivum
atatctagatatcctcctttccagctctaccatctcagcttcatccctcattccttcactcagcagctcctcccagaagtcgtcagtcagttcggcctcaccgcagccttgatcccgtcgacttctgtttcagtctttgaaggtcctggatattgttaagcttgtttacttatgggcacttgtgtattggtttattgctgggcattatgccttgatattaaagatttccgcccagtacaaaaaaaaaaaaagagacaatacgaatccgact

SEQ ID NO: 447189 - DNA, 477 bp, Triticum aestivum
  unsure (1)..(477): unsure at all n locations
ggggnngnaacatcttttaggcggcctagggtcanaaatccgggcctctagaggatccagcttacgtacgcgtgcatgcgacgtcatagctcttctatagtgtcacctaaattcaattactggccgtcgttttacaacgtcgtgactgggaaaaccctggcgttacccaacttaatcccttgcagcacatccccctttcgccagctggcgtaatagcgaagaggcccgcaccgatccccttcccaacagttgcgcagcctgaatggcgaatgggacgcgccctgtagcggcgcataagcgcggcgggtgtggtggttacgcgcagcgtgaccgctacacttgccagcgccctaggcccgctcctttcgctttcttcccttcctttctcgccacgttcgccggctttccccgtcaagctctaaatcgggggctccctttanggttccgatttagtgctttaagggacctcgaccaaaa

SEQ ID NO: 447190 - DNA, 482 bp, Triticum aestivum
  unsure (1)..(482): unsure at all n locations
ggggnnngnancatttgttagnncgccannngtcnnnnaatcccgggccgacgngntnatnatcggnggncgctctanaggatcnangcttacgtangcgtgcatgcgacgtcatagccttctatnntgncacctaaattcangtcactggcngtcgttttacaacgtcgatgagtggaaaaccctggcgttacccaacttaatcgccttgcancacatccccctttcgccagctgcgtaatagcgaagaggcccgcaccgatngcccttcccaanagttgcncagcctgagtggnaatgggactcgccntgtatacngcgcattaaacgcggtnggtgtggtggttacccncangtgacngcnacacttgccancgccctancgcccgctcctttcgctttcttcccntccttcncgccacgttcgccggatttncccgtcaagctctaaatcggggggctcctttaaggtccgantnatt

SEQ ID NO: 447191 - DNA, 446 bp, Triticum aestivum
attcgccggccgacgggcccaacaacgcggggagaagcggcgaccccacccccacaagagcccaggaacccgtagaatctcgagtggaccacatcagcgatctctcggactccgtccttggggagatcatctcgcttctccccaccaaggattgctgccgcacccaagtcctctcaattcggtggcgccctctatggcgcgctgtgcccgttaatctcgactgtcgtcatctagctctcttcaatgattttgaaatccccagagccatcatctcctcccaccagggctccgttcaaagcctctacatcccgccttctacctgagcaagcatagcatgccctgcatggtggacgcctggctggaatcccctgaattcacagaactacagctgcttgagttctactattcccctggaaatcacataccacataccgaatgccatgaac

SEQ ID NO: 447192 - DNA, 474 bp, Triticum aestivum
  unsure (1)..(474): unsure at all n locations
tgnnnnnnaatttctacgccgttcagtaccgaactcagaattcgcgggccgacgggtacgcagcgagaagacgacagaantcgacgggnaaaaaaaaaaaaaaaaaaaaaaaaaaaaacggncgcncnaaaggatccaagcttacgtncncgtgcatgcgacgtcatanctcttctaagtgtcacctaaattcaattcactggccgtcgttttacaacgtcgtgactgggaaaacctggcgttacccaacttaatcgccttgcagcanatccccctttcgccagctggngtaatacgaanaggcccgcaccgatcgcccttcccaacagttgcgcagcctgaatggcnaatgggcncgccctgtagcggcgcattaancgcggcgggtgtggtggttacncncancgtnaccgtacacttgccaacgccctaacgcccgctcctttcgctttcttcccttcctttctcgcnagt

SEQ ID NO: 447193 - DNA, 433 bp, Triticum aestivum
gacggggctagtaaacaaaccccttttcgaatccaaagacaaacagctctggaatatctctaagtctaaggagaagcacgctaagcaactagaacatcctaatgccggtgaaaaatccccttcccgaaaacaagtaaacggctctggaataactctaagtctaatgagaagcacgctaaccaactagaacatcctaatgccggtgaacaacccccttttcgaaaacacattatcacaactctggaatatcactaagtctaaggagaagcatgctaattagctagaatatcgtaatgccggtgaacaatcccattttcaaaatcaaagaacatcagctcttgaatatctctaagtctaaggagaagcacgctaaccaactagaacatcctaaacccggtgaacaatccccttttctaaaacactttcacaccag

SEQ ID NO: 447194 - DNA, 92 bp, Triticum aestivum
  unsure (1)..(92): unsure at all n locations
aantctcttttatntgggtaanaaacntttttntttttcttattttttntccccttttnatnaatttccnccttttcccaatttgnnttntt

SEQ ID NO: 447195 - DNA, 387 bp, Triticum aestivum
ccgacggggttcggaggctgataagctcaagccccctgtggagccatgatttttgcagttgagagatggatccttcctgtgtatgtatcgctttgctaaagcctgggtggtgctcacaaacacttggcacttgtgtgattcttttgtccatggatgtactgtgtacaacaagttgatgggaatgtgatttggtatatgctttcagttgaaaaaaaaaaaaaaaaaaaaaaaaaaaaaaaaaaaaaaaaacacaaaaaaaaaaaaaaaaaaaaaaaaaaaaaaaaaaaaaaaaaaaaaaaaaaaaaaaaaaaaaaaaaaaaaaaaaaaaaaaaaaataaaaaaaaaaaaaaaaaagggggccccccaaaaggtttaaccttttttttc

SEQ ID NO: 447196 - DNA, 410 bp, Triticum aestivum
gggcagtgtagtcaccttggttggactggggccttcgtcctcacttcattaaaccacgtcgaggaattcggcgtcactctgccggcctttattgctatgctatgtcaccactccggagtgccgagctcttcgatctgccacctcgggaccggcttgggggctgggacctcatcccgatgtaagctcggactgcgtcatcaatgccaaacacaagaaccagctaagtcgctcttatgctcaaagttttaaaaatttaaattttgttcggttcgaccaagcattatacttttttggcaaagagttgtttgtgaaaaacttccttgtcaaaactttgtttgtgacacacaaattcaaataccccgtttacttgggggcttcctttatgaagccttccatcttgcatatgatta

SEQ ID NO: 447197 - DNA, 353 bp, Triticum aestivum
ttcccgggccgacggggacgctggtgcccctgtcggagcagcagctggtggactgcgacaagtacgacggtggctgcaaccgaggctactaccacagggccttccagtggatcatggagaacggcggcctcaccacggcggcgctctacccatacaaggcggtgagaggcgtctgcttccgcgccaagcccgccgtcaccatcaccgggcacgcggcggtcgccaagaacgaattggccctccaaagcgccgtcgcgaggcagcccatcggcgtggccatcgaggtccccagcagcatgcagttctacaagagcggcgtcttctcggccccctgtgggtatcagatgacccac

SEQ ID NO: 447198 - DNA, 419 bp, Triticum aestivum
ctgtttttcaattagataatgtgaagtaactttcagtataggaaatctcattttccatatgccgataattctctcaacatgattccgaagttgagcatgtcgaagattaattagttccctgtgattttgtggcctttgacgaactcttccttgttcgtttaaatgatacctagtaccacggtatggagcaagaaactgtggtgtgtttgcataatcagcatccacgagataaaatttaccatcgggaacttcaaaaccatggttaagtgcatcatttagaactcttgcatatgaagctgatccctcccaaccaggatgtatatgcacaaacttcaagtcaaaatctcaggcaaccataacattctgcgagattgtttgcctcctatttctgtatggttcttgctcatccaatggaagct

SEQ ID NO: 447199 - DNA, 446 bp, Triticum aestivum
  unsure (1)..(446): unsure at all n locations
accggtcaaactatccgggccgacgggaggtttgataataacttgatatgaagtttcatgatcatcatcattagcttccccactaattggtgtangaatcactggaactgatttctgtgatgaactactttccaataagggagaaggtgcagttacctcatcaagttctactttcctcccactcacttctttcgagagaaactccttctctagaaaggatccattcttagcaacaaatattttgccttcggatctgtgatagaaggtgtacccaacaatttcctttgggtatcctatgaagacgcacttctccgatttgggttcgagcatatcaggttgaagctttttcacataagcatggaagccccaaactttaagaaacgagaactttggtttcttgccaaaccacagttcatatagggtttaatgcgttttctgagactaac

SEQ ID NO: 447200 - DNA, 467 bp, Triticum aestivum
  unsure (1)..(467): unsure at all n locations
tttgccgncccgtaccgancaagaattcgccggccagctcactaatcaagcggccgctcagaggatccaagcttacgtacgcgtgcatgcgacgtcatagctcttctatagtgtcaccaaattcaattcactggccgtcgttttacaacgtcgtgactgggaaaaccctggcgttaccaacttaatcgccttgcagcacatccccctttcgccagctggcgtaatagcgaagaggccgcaccgatcgcccttcccaacagttgcgcagcctgaatggcgaatgggacgcgccctgagcggcgcattaagcgcggcgggtgtggtggttacgcgcagcgtgaccgctacacttgcagcgccctancgcccgctcctttcgctttcttcccttcctttctcgccacgttcgccggtttccccgtcaaagctctaaatcgggggctccctttaagggttccaattaantg

SEQ ID NO: 447201 - DNA, 424 bp, Triticum aestivum
  unsure (1)..(424): unsure at all n locations
aagcggcagtaactaccagacagaggaggatgagactgacactgcgattgactttggcaacctcttgccccgagcgcctcggaagcaccggagcaggagcgctcatccccgtgaaggaggagggcacgacgacgaagagaggatgatggataagcttctgagacactacagcaagaaggggatggagagggaggaggagcacaagacgaggtcgaagtccaggacccctcggcctcgagcagatcgacctgctgatggcaacaacagagatggagcgcccagtcatccagagagaaccgcatctctgcctacagaatcaggttcaccggtggggaggacgaaggctcctgcccctgttcggtccacctcgctgcagcaggacacgttcagggggaacgtgcnaccgaagatgccggattttgac

SEQ ID NO: 447202 - DNA, 467 bp, Triticum aestivum
  unsure (1)..(467): unsure at all n locations
tnttagccgccacggtcacacnnanattcgcgggccgactcactcantaatcggcggccctctagaggatccaagcttacgtacgcgtgcatgcgacgtcatagctcttctatagtgtacctaaattcaattcactggccgtcgttttacaacgtcgtgactgggaaaaccctggcgtacccaacttaatcgccttgcagcacatccccctttcgccagctggcgtaatagcgaagggcccgcaccgatcgcccttcccaacagttgcgcagcctgaatggcgaatgggacgcgcctgtagcggcgcattaagcgcggcgggtgtggtggttacgcgcagcgtgaccgctacactgccagcgccctagcgcccgctcctttcgctttcttcccttcctttctcgccacgttcgcggctttccccgtcaagctctaaatcgggggctccctttaaggttccgatttaa

SEQ ID NO: 447203 - DNA, 106 bp, Triticum aestivum
cactatggctccagtctcatcgcttctttctttcttcataacacgtttgctccttttccatggctactgcggctcactgagggtacaccactggtctgcagttttc

SEQ ID NO: 447204 - DNA, 238 bp, Triticum aestivum
cacggcgcacctccagacaaattgttgttgtatacggtggcgctgactaaccgccattatcatctttgcatctattctgtccggatttgttgaataaaagcacgaaggaaattaacaatgagtgtaccaacacatcgaattcacccaaaatgtacacttgccatgtcaactccgttgggtctgggtaatcagttcaacctgacgtctaagaatccgttaaataaaatctctgacatat

SEQ ID NO: 447205 - DNA, 391 bp, Triticum aestivum
gttgggagccaagcgtcaggtactgtctatgatatcaattcaaaatttgaactcctaaatttctgcttgtgccttaccttctctcttgtatgaaaactaatttcagatgaatctccttgctcaaaggatcatatgatctcaaaacaataatgggctctgcattgctcttgtcaatacctctctcccttttgccttgtgacgctgtacttaattaattactatttaattatgtatcatcagtctgcacctgcgcttcattaacctttgtttcttccaatattatttgatctatatttactctttgcaaaatgtacaataatggcaacgcttataaagaattttctttggggaatttattgaattatccttccatcaacaatgagaagggctt

SEQ ID NO: 447206 - DNA, 178 bp, Triticum aestivum
gggtccacggctgattaatagcagtatgcagatcgaagagtaggtctggtttctgaaggagaattttcttttgtttcagggaaatttctgcggtgatcttgatttgcaacgcgtaacgatatgcaacttctgtgtatagacgcgtaatgctcagagacttgaacaccgtcttgacttg

SEQ ID NO: 447207 - DNA, 419 bp, Triticum aestivum
agggcacacaacggtggcagtggcacgctaatctgatccgacccacgtagacctaatcatgcacgagagaaaccagatacaccgctccaggagataagatcgtggtttcttatctggatgttcatgggcttttattatggcattttaaaatcctttttaatgtgtatacaagctgagattggagggggaggggggcaactatgcttgtacgtgtgatttatctctctttgtgcgcaccgattcgaagtatcagtcgatggttggggggcttggcccctgcttgtccccccttgctccgccactgggaagacccatgtgtcacgataattttgttagatgatgtacaactcaatcgtctattcaccagaggtgtatcaaataagttgtatttgtctttgttctccttgacgggtaacacc

SEQ ID NO: 447208 - DNA, 283 bp, Triticum aestivum
ccgggtcgacgggaaaagagaaattcgccccgtcgcgtcgcccccggctatgtgctagctccgtgtgtggcctctccgtgtgcgcgtaggaatttagatggatcctagcaggcagagggctcttgtgcccctcgcctttcgcatttgccttttggtttcgttttctgtacgcctcgtgccatcgctgtaccgtgtaaatatttttcagcagagagcgctcccaccgggtgtagcgctttgtgtgatgagaaatccgtgtacggcccttggctttttttacgag

SEQ ID NO: 447209 - DNA, 143 bp, Triticum aestivum
  unsure (1)..(143): unsure at all n locations
ttnncttgntntaatttttattcttttcngtntttttanttgttggtaccnttttntattttttttctttnnggganttttntttaatttttntttccttgatgtttggttnatnngttttctcctttcttnttttttnnnct

SEQ ID NO: 447210 - DNA, 436 bp, Triticum aestivum
ccgggtcgacggggtggaagtaggaaaatgtgtttgggctatcaaattttgtccctatccttttcggtagcaaacagttgtgttttgaactagagaggatacaagatgctctttgtggttcttccaagtacaagagtgcaaatggagagttccctggtattacttctgatccttgtgagcattggaagcttcaacaaactgcaatgtcaggattcctgatagagattgggtggttaataaagaagccttctccagatgaatttaaaaatttactgagtaaaacaaatgttaagagatggatatgtgtgttggagttcttgatacagaacaattttatcaatgttcttgaaatgattgtgaaatcatcggacaacatcataggctctgagattctttctaacctggaaagtgggcggttggaacatcatgtcacagc

SEQ ID NO: 447211 - DNA, 499 bp, Triticum aestivum
  unsure (1)..(499): unsure at all n locations
ggnnnnngnaattctacgctngtcgtgccggtccagnnattaacgggtcnacganctcatatncggcggccgctctagaggatccaagcttacgtacgcgtgcatgcgacgtcatagccttctatagtgtcacctaaattcanttcactggccgtcgttttacaacgtcgtgactggaaaaccctggcgttacccaacttaatcgccttgcagcacatccccctttcgccagctgggtaatancgaanaggcccgcaccgatcgcccttcccaacagttgcgcagcctgaatggcaatgggacgcgccctgtagcggcgcattaagcgcggcgggtgtggtggttacgcgcagctgaccgctacacttgccagcgccctaacgcccgctcctttcgctttcttcccttccttttcgccacgttcgccgggctttccccgtcaagctctaaatcggggggctcccctttaggttccnaatttantgntttaagggaaccc

SEQ ID NO: 447212 - DNA, 230 bp, Triticum aestivum
gtgttttcacccttcttttgtgtaccctggagtctgtaatatcatccttgctgtggtgcatcgggtttgtgcacatcttccggtagagttcagttcgcttcccgtgttaaaactagtgattgtcatggagattactgtttaactgagataccgatgttgccatggtggatagaacaataatttatgcggctgagaaataatggcgttactctgactgtttttcacccact

SEQ ID NO: 447213 - DNA, 489 bp, Triticum aestivum
  unsure (1)..(489): unsure at all n locations
gntnnnaaattctagtnttcggccggtcngnnataacgggtccacgacctcactanacgcggccgctctagaggatccaagcttacgtacgcgtgcatgcgacgtcatagctcttctaagtgtcacctaaattcaattcactggccgtcgttttacaacgtcgtgactgggaaaacctggcgttacccaacttaatcgccttgcagcacatccccctttcgccagctggcgtaatacgaagaggcccgcaccgatcgcccttcccaacagttgcgcagcctgaatggcgaatgggcgcgccctgtagcggcgcattaagcgcggcgggtgtggtggttacgcgcagcgtgaccgtacacttgccaagcgccctagcgcccgctcctttcgctttcttcccttcctttctcgcccgttcgccggctttccccgtcaagctctaaatcggggggtccctttaaggttccgaattatnctttaacggaaccc

SEQ ID NO: 447214 - DNA, 330 bp, Triticum aestivum
ggggacgtgtgagatcgttagttgatcgtaagtgtcgaggaaactgatccacgaacacctatggggatcggcggaccgagccccattcagttcagaggggggcggagatcgcacgaagagcggatcgaggcaatgcacacgagcagtttacccagcttcggagctcttcggagagataacactcctactgctgcttgcttgattgtattaagttctcgctcaggagcgatgaacgctaccagaccgagcgtgagagtattcttggtgtttcgaatgagccgaaccccttctacgttgcgcatgggcctccttttatacgctcaagggggc

SEQ ID NO: 447215 - DNA, 369 bp, Triticum aestivum
ggtcgacccccaactgcacttttctttctcgacgagtacctactggacaagcgtatttgtgttttcagccttgttttgggcaccgaggagcctggaatatcttacgtgctgtgctgctcggcgtttttgcacatcttccggaagagttcagttcgcttcccttgttaacactagtgattgtcgtggagatgactgtttaactgaaataccgatgctgcgatggtggatagaacaataatttatgcggatgagaaatattggcgctactgtgactgtgtatcacccacttatcttgtgatttgcgagcctatttggcaattggaaaaaaaaaagcaagcaaatcaccgaaccatccgaacgtcacgaacg

SEQ ID NO: 447216 - DNA, 400 bp, Triticum aestivum
atcactaaggttaatgtgcagaagtttgatgacaagtactttgctagggagaagaagactagggcaaagaagactgagggcgagctatttgagtcggagaaggaggcaaccaagaatttgcccgacttcaagaaggatgatcagaaggccattgatgccgagttgatgaaggctatcgatgctgtcccagaccttaaaaattatcttggtgcccggttctccctcagggatggtgacaagccgcatgagatgaccttctaagttacctggtacaagtttcaagatctgtggaagtcttttttgtctagtgtgtgtgctggttctgtacttctgatttcttttgcccggttggtgaatctttgatttccactgaagtctgcctgtcaaatattttgagaag

SEQ ID NO: 447217 - DNA, 302 bp, Triticum aestivum
  unsure (1)..(302): unsure at all n locations
ccgggccgacgggtatgcgacggagccggggtactcgggcctgatcatcgccggggtcgcgagtgttgtgagcctcgccatgaccgtctacaacatccggcagcgccctgtctttgcttagctgcggattattgagcatcttggaacctcaagagtggcgacctgaagaagggtcagacttgcccttgcctatggcagtttaatgttgctattatctgtcttctgttggatgtgttatgagtatgttgttggttaccaaggttctatatctaaaanaaaaaaaaaaataaaaataaataaaa

SEQ ID NO: 447218 - DNA, 386 bp, Triticum aestivum
gggggggaaagaatgatggactctatatgatggaagttgatagggttctaagacctggcggatactgggtgctgtcaggtcctccaattaactggaaggcgaactacaagggttggcaacgtacaaaggaggatcttgaagcagagcagaacaagatagaggaaatggctgagcttctatgttgggagaaagtctcggagaagggtgagacggcaatatggaggaaaagagtaaatactgagtcctgtccatctaggctagaagaatccactgtgcagatgtgtgaatcaacaaatgcagatgatgtctggtacaagaagatgaaggcatgtgttacacctcttcctgatgtacaaaatccaagtgaagttgccgggggagcaatc

SEQ ID NO: 447219 - DNA, 147 bp, Triticum aestivum
gggacacggcaccggaggtctccgtgatcatgtctaaatgttaggagatagtagaagataaaactagtcaggaatctcaggaaaggcatgtggatgttttctcatgttctagccgtggttgtaaacaaagatccgagtttatggatg

SEQ ID NO: 447220 - DNA, 390 bp, Triticum aestivum
gtacaaatcaaggtgaaatctgtccaatcaatttttgttgatatattttttattaaaaagccaaattactccggcttgtgatattgtttatgcagagcaattacttactgcaagagcggtggcgacttgcctgcgtccgtactgactctaatgacaacagtcgtctttaccgtccgcctccgcggtttggtgtatatcaacacattggagctgcactgtctgcatgagctgtttattgagtgcaagaaagtcactcctcgggtagcccggttttttcttccaacaatttgaaggctaattactatatattatcaaccaccgtctgcactagatggctcaatgagcaggtgcacaagtcgccgccactatagtttggttaacttcaaaata

SEQ ID NO: 447221 - DNA, 401 bp, Triticum aestivum
cggtcgacgggatatcgctagcaatatgaaagttatcttttcttcgacaaaaaaaaaaaaaaaaaaaaaaaaaaaaaaaaaaaaaaaaaaaaaaaaaaaaaaaaaaaaaaaaaaaaaaaaaaaaaaaaaaaaaaaaaaaaaaaaaaaaaaaaaaaaaaaaataaaaagaaaaaaaaaaataaaaagaataaaaaggaaaaaaaaaagaaaaaagcggggtttctaaaagtttaaaaacttcatcatatgatgacgggagtttaaaattttgaaagtttggaccaataatttttttgaagggtcgttttttaaaaaccggtaataggggaaaaacctgtgggttccccaataaacccgcttgttggaaaattaacttttatcaaaagggttataattgaaaa

SEQ ID NO: 447222 - DNA, 404 bp, Triticum aestivum
ggggctgctgcagggatacacggggtcctcaaaaagcttggacgggacatccccggcagcgacaagcacaggacggttattgccatggacggtgggctctacgagcactacacaatcttcagcgaaaccctggagaacaccctgcgcgagatgctaggggaggaagtatcctcctccgttgtcatcaagctcgcgaacgacgggtcaggtatcggggccgctctcctcgctgcagctcattctcagtacctcgaggccgaggtctgaggagccatagcctggatatagatatatgttgggttgttcctcaggagcagcgatgtctgagtcacgccagggtcctgtctgtgtgtgtagctggagcatccatggagagctgtgtctcttagtaattggtagctctg

SEQ ID NO: 447223 - DNA, 386 bp, Triticum aestivum
cggcacatttaaagacttatggtactagcatttcttcttacgatggtttgttttcttcagcaaaatgcactgctataatggccgtttctcaggcctgttgttgttggcgaaaaaaaaaaaaaaaaaaaaaaaaaaaaaaaaaaaaaaaaaaaagaacaaaaaaaaaaaaaaaaaaaaaaaacaaaaaaaaaagaaaagaaaaaaaaaaaaacaaaaaaaaaaaaaaaaggggccccccaaaaggatcaaacctaactaacccgtgaatgaaacttaaaacccctccaaaagggccaccaaaattaaattaaagggcgtccttttaaaaaattcgtaacgggaaaaacccggggtttaccaaattaaacccctttgaagaaaatccc

SEQ ID NO: 447224 - DNA, 68 bp, Triticum aestivum
ggggtcccaattgaggaaaggatgatggagactatgattcacccacaagtcgagatgagactccggat

SEQ ID NO: 447225 - DNA, 88 bp, Triticum aestivum
  unsure (1)..(88): unsure at all n locations
ttttgttnctttttngnnctttcnttttcttttntcctttgttttntttgtgttttgttcctttntttctttttctnttttntnnctt

SEQ ID NO: 447226 - DNA, 473 bp, Triticum aestivum
  unsure (1)..(473): unsure at all n locations
ggnnnnnnatntttcaactctcagcgttccgacanggtcnggnnganccccgggccgacaactcactaatcggcggccgctctagaggatccaagcttacgtacgcgtgcatgcgacgcatagctcttctatagtgtcacctaaattcaattcactggccgtcgttttacaacgtcggactgggaaaaccctggcgttacccaacttaatcgccttgcagcacatccccctttcgcagctggcgtaatagcgaagaggcccgcaccgatcgcccttcccaacagttgcgcagcctaatggcgaatgggacgcgccctgtagcggcgcattaagcgcggcgggtgtggtggttaccgcagcgtgaccgctacacttgccagcgccctagcgcccgctcctttcgctttcttccctcctttctcgccaagttcgccggctttccccgttnaactccnaattcggggggttccctt

SEQ ID NO: 447227 - DNA, 416 bp, Triticum aestivum
cggcggcgaacagcggcatcgcggcagcggcggcttggggctggggcggctaaggtttgcccgggccggtgtccaggtcgaacatggcccgtaggtcggtgcgtgtttttttaaaataattacgcgtagaagaaaaataaaaagaaatactaaacggactccaaaaattccgaaataaattttcacgggcttctaaaatcaagccgcacaaggtgaacatttatttggcacctaaatgcaattttgaaaaacacacatttttcctaaattcaaataaaacaccaaaaaaactccgaaacaaaatcttatttgattttattattaaatcctcaatatttctttattttgggaaagtcattttattcccactctcatatttttgcaatagaaataattgatgataaaataaataaaat

SEQ ID NO: 447228 - DNA, 280 bp, Triticum aestivum
atgtagtagacaacgtatttgtggtaaagccaccgttcataagtccttcagacatgtcactcatgcatcaatgtacatcgcggtacaccgcctgatgcattcatatagagtcatacttcgttcaagtgtcgagttgtgatcattgaggtgtcaatacatagaagtgtgatgatcatcattcaatatagcattgtcccaaataaaattagaaaggccaaatcatgtaaggaaaggccaaataaaaaaagagaaaggcccagctgtaatcatgtattatgat

SEQ ID NO: 447229 - DNA, 395 bp, Triticum aestivum
gggtcatttcatgcatgatgaattatcttcataagttgaagaggatctccacaagtacaacctgccatgtgcatttgcattccaaaagcaaattacttatatgcacatcttcagggggagcccttgccacttatgaagacaataccctatcctttacaatttcacatacttcattcccgttgaaaacttcaaccagtttgtcatcaatcaccaaaaagggggagattgtaagtgcatctagtgccacccctagttggttttggagtattgacgacaaagttggttgagggactaatgcgtttgtgagaattgcaggataactcaggtagtgtccctcattgattcggtttacctaccggagatgacccctaaaaatgtatgaagacattgacgac

SEQ ID NO: 447230 - DNA, 437 bp, Triticum aestivum
ggtcgacggcctgaataaaaaaggaacagttcgagtagtatctacaaatattaccgaaaacattgtgaaaatacttctacgagagggttttattgaaagtgttcggaaacatcaggaacgtaacagatatttcttggtttcaactttgcgacatcaaaagagaaagactagaaaaggaatatatagaacaagaacctttttaaagcgtatcagccgacccggcttacgaatttataccaactatcaaggaattcctaaagttttgggtggaatgggaattgctattctttctacttctcgaggaataatgacagatcgagaagctcgactaaacagaattgggggagaagtcttatgttatatatggtaatcgccccgcctatagtgctcgaattctatctcgcccttcctatttttaaaataaaaatagaaaaata

SEQ ID NO: 447231 - DNA, 533 bp, Triticum aestivum
  unsure (1)..(533): unsure at all n locations
ggttgngcaatnttncgccncctcngtgctctctctatattcacaggcccacgggcccaggaaaaaggcaaacacatcaanctcaagggcaagggggnaagatngcnatnanggtttctccncatcannagatnnacacanngaagaagcngatgaaacgcccactgcgaccgtcattgtnggatntcaaacnccatttcttttccttttccaatngtccctanggctcccgttgggangcaaaccccctgattnagctggnanattgggagggaagggngaccaagattnaccgcaatgctttnaccaaaaccnggangggtgncttttcctcgccccnttaaaagggaacttgtttgcaaccctggcntgnttctaatgtccntatgccanccttttagaccctanaantaaaatnttaannaatttgaaannaacnttnttnaaggctaatggntttnttttccaantacccttnaggggggntnttggaaggtgnaaanaaaananncggggtttnntttttntttttg

SEQ ID NO: 447232 - DNA, 224 bp, Triticum aestivum
cgggccgacggacggacggatggattagccttttcttttttacctttggctaaccttagcgctaccctttttttaacctttggggaatgtaaagtttctagatgcaagaaggaagaaaaaactgtggggaggaaacctggaaaatgtgttgcttcgaatgaatgatgtagagagaacaaaaagtcacacgaagaaaaagaatctctcgaagaaattgcttcaac

SEQ ID NO: 447233 - DNA, 423 bp, Triticum aestivum
ggtctaggacccccgggtcgacgggcatccccttccccaagtacaagacccggggcttctggacctaaaaggtataattctcaaccaaaaactgcacagacattagatgctctgtttctagtagcaagtttcagttgagcgtaagcataccaattactgctgtatttgtctacttgctgggaccatcttgttaccatagatgttttaactcaaggcagatcatgcaggggtatttatgtatttttattttctttagaggtttaccaccatgcatacatgatgactggcatcatgaactctatgagccaaactgcttaattgcaaccaatccttgggcacttagccaaaggattgtggtccaatctatcggtggtttaatcctagctacactatcagaaaaatttccctacttctataacaaaa

SEQ ID NO: 447234 - DNA, 445 bp, Triticum aestivum
ccggtcgagattcacgggtcgacggcgaagtacaacgacccaacatatatggtccgggcgtgtcgtgcaaatgcatctgatgccatcttgtgcactgtgcttggacaaaatgctgtccatggagcatttgccgggttcagcggcatcacatcaggtatttgcaacacacattatgccttcctcccgatcacagaagtcatcacaacaccgaagcatgtgaacccaaatagcaggatgtggcaccgatgtctcacgtccactggccaaccggacttccactgactcgcgttgagcgtttacttctctgcacaggctaaactcgtaatgaattaacatatttttgcttacccacagactagtcacagctgaaagattagtcacggtgcaagctaccaacatgttaacaataatgtaatactgagaatgaactcgatcgacttgtttc

SEQ ID NO: 447235 - DNA, 399 bp, Triticum aestivum
ttcccgggccgacgggggggggaaaaataatgatgacccctgagtccgcgaaacccaagggaaaaaaaggctaggtggcgaatggtaaaaccaatgttgggcattgctggaagagctttacttaaggcgaactgtcaaggggttcccattatagcccaaccgcgtaagcaacgcaaaatccgggaacataacaccgatatgacggaaactagggcggcaagagtggaacaaaacaccaggcataaggccgagccttccaccctttaccaattatatagatgcattaattaaataagatatatagtgatatcccaacaagtaaacatgttccaacaaggaacaacatctccatgttccaacaaggaacaaacttcaatcttcacctacaactaacaacgc

SEQ ID NO: 447236 - DNA, 400 bp, Triticum aestivum
ccgggccgacgggagctgctactcattcgtcccttcctctccgctccgtccctttctctccgctgcgtcccttttcgccagatccgacgcccttccggcttgtcgttgcctcgccgccgtgacaaagttgggagaagggggttggccgtcgtcttgcggttgggccggagcagcggtgggctggacgccgcttcctgctgtcttcgagcgatgggagagggttagggtctgtcgtttgccgttcgattggtgactgttgcgggttggcagcgcgccgtgtagctgcgagacaacttccttgttgatctgccgtcctgctgcagtgttatatactgtcgaattccaaaaacgaggtctgccacacgcgcatatcctcatctggcgtaaaggagacaaagat

SEQ ID NO: 447237 - DNA, 418 bp, Triticum aestivum
cccgggccgacggaatcctaaagtagttgacaacataaactgaattgatttgttcacacccatcactgtagagtaacttgtgttgggtgatatacacacatgttgtcaaaaccaattttacccccaaaccgctgcttgttcagtactgaaaaaaaaattcaaaggtgggaaaatggcatagtgttttatttttaacaattttcttcctttaaaatccaacacttggagttcgaacacaatctaagtaccgagaaccttttcatatctcctcataagtacaacaaaacatcgatgacttaatttccaaatattacaaagtaaatacccgtaacttgaaatgaacatgaaacactgtcatagatcgctcgacgggcccagaccatcagcatccctaatcaactggataagaataaccaaa

SEQ ID NO: 447238 - DNA, 425 bp, Triticum aestivum
cggcgtccaatcatgtgcattatttggggaattggaccgagatacatcatagttgcttcacaactccatatttggtccagaatcaagatcaagatgatgcactcacatagagtaaccacttgagctcaaattcggcaaggcagcatgttttggacatataaagatgctgtaaaaatttcgtaccaaatggacttggcaaaatggaacttgcttcacaaacatcctctttgtccagaaacttgcaataatttttggggagaaaatggcttgattaaatgttcccaaatttggtggagagatgggatattggtaggagcatgatctagtaatttttcaaaaataatgaagcaatataaataacacttgcttcacaacctgaaaatattaacagaatataagatatgaaactgtgctcacatagatga

SEQ ID NO: 447239 - DNA, 447 bp, Triticum aestivum
ccggtcctagattcacgggtccacggcgacggaagagaagcagccgacgtctccgtcgccgtcgtctcgttcgtccccaaatcttcaccgagcttccgctccccgcagcaacgcggaggaaggaatggacaagtatcacagcaacacccgctttgcacccctgagagacgctccatttgctctccgtggtgcctttggtacctccaactcgtctttcaacaacatggatggccttagacactcctcaagcattgggcaagcaaggagctacacatcttctcccttaggagctctgcgacagaagattcctccatctggaaaccgatccctacatacaagtcgtcccctgcctgctcctgttgcgaaccgcccactgtctccccatcttcctctgaagaagccacagctgagcgctacgttctccatctcacaccgtatatttggcgt

SEQ ID NO: 447240 - DNA, 431 bp, Triticum aestivum
  unsure (1)..(431): unsure at all n locations
ggggtctcattaatggaatgccaatgaattacaaacttgtcgtcatcctgaaacattgagaatctcggtttttaaatcccagtaaatcaaaaactcaaccaaaaaacatgaaacctggcatggtttcatgacatggcacatatatgccgtggtaaaaaaaatcgtccagtttgagaagaggcgcacacattagtagccaacaaagtcctttttgaaacaaaaatctgacatgttaatatcgcaaatggttgtattatattaaccatgtcgaaatttaaccatacttggtggtgtgcgtgcagctgtttgattagacgggacgagcccgagaagtccaccgtgcaggctcgacgggacgcgtgcgaagagtctgccgtgcaggctcgacangacgcgtgcatcctgtccgcctcgcaggctcgacgggacac

SEQ ID NO: 447241 - DNA, 493 bp, Triticum aestivum
  unsure (1)..(493): unsure at all n locations
ggnnnnnnnnttattcnccccggcggtacaagtcacnaattcccgggtcgacgagctcatagancggcggccgctctagaggatccaagcttacgtacgcgtgcatgcgacgtcatagtcttctatagtgtcacctaaattcaattcactggccgtcgttttacaacgtcgtgactggaaaaccctggcgttacccaacttaatcgccttgcagcacatccccctttcgccagctgcgtaatagcgaagaggcccgcaccgatcgcccttcccaacagttgcgcagcctgaatgggaatgggacgcgccctgtagcggcgcattaagcgcggcgggtgtggtggttacgcgcaggtgaccgctacacttgccaagcgccctagcgcccgctcctttcgctttcttcccttccttctcgccacgttcgccggctttccccgtcaagctctaaatcgggggctccctttaaggttccgaattaatnccttaacgg

SEQ ID NO: 447242 - DNA, 421 bp, Triticum aestivum
  unsure (1)..(421): unsure at all n locations
acaaagagaagaagcccgatcaacacccaaagccacaactgcagaaggtcgatttaagtgaactcatgcgctttgctgctacccctgaagaagagttgcggcggcgaggtggtaatggttatcatgagtactctactgatgaagaggatgatgctgttctggctcatgtgcgtgatgaagacgatgatgatgactttctgagtgattcttctgtgagcgatgaggagaatgctcaaaccgagggagcggatgttcacaaggttgctgctattgtggccagctgaaggcatttggtccatctctatctgtcttcatctaactagtagtatatgtttacttactggcagatgtctctttgctggatccgtctgtgttaaatgtacccctgttgtgtcntgtttcgaacaccgactatataatt

SEQ ID NO: 447243 - DNA, 62 bp, Triticum aestivum
  unsure (1)..(62): unsure at all n locations
tnttgattttntngnttgctgntggtnttttttgttttntttcttttgtcgttnctnttttt

SEQ ID NO: 447244 - DNA, 434 bp, Triticum aestivum
  unsure (1)..(434): unsure at all n locations
gggtccacggcgagacttatcgcctaggcggcgtaggtgggctcgagtgggccgaaggccaaggggtaaggggctgctcttttcttttcctttgattttttactttttatttaattttcttttctattttcgtttagtttcctgttttatttaggttctgctatcanatgaattttgttgaccatgtaaatttgcaaataacccacgcactatattttggggctgcacaaaatgcttccgggcaattggagttaatataaattatgattgtatttgaaagggcaaaaaaaggtgtcgttggtccattgtttaaaatccatgggtgtttttaaacatctccaaaaatatttcttaatgaatgagaattatgtagtgaatatttccaacctaaggaacatttttaatttacagtttttataaattctaatttgact

SEQ ID NO: 447245 - DNA, 468 bp, Triticum aestivum
  unsure (1)..(468): unsure at all n locations
ggnnnnnnnacttctccaangctcnnnngcccnaaanggtcncagcctcccgggccgaccnaaaaaacatgattagggtgatggttcacgtagtgggccatcgccctgatagacggttttcgccctttgacgttggagtccacgttcttaatagtggactcttgttccaaactggaaaacactcaaccctatctcggtctattcttttgatttataagggattttgccgatttcggctattggttaaaaaatgagctgatttaacaaaaatttaacgcgaattttaacaaaatataacgcttacaatttaggtggcacttttcggggaaatgtgcgcggaacccctatttgttttttttctaaatacattcaaatatgtatccgctcatgagacaataaccctgataaatgctcaataatattgaaaaaggaagaatatgagtaatcaacaattcccgtttnccccct

SEQ ID NO: 447246 - DNA, 437 bp, Triticum aestivum
cggctggccgggacatgtatggatactgtacttggaattcttgcgagctgtgactgatgtgctgcaaatagaatgaccggccatgaattataaggtcgagcgatgtgcggttgtctcctccgtttcttagtttcgaatcagcaacgcgcgtttgctgatccgtaagctgcaccggagtttgtatccacgcgttttttatttcttcatagaaacgtttgtatccacgcgcaggcggtgacccacacggattttctcccaatgctccagactacacggaatgggtcaccaactttcagaaatgcatattgggccaggcctaatgaagcgaaccaacaggctttatttgggccggttcagcgtcttgaaagttttcaagtcctcaaagaaagttcttcatcgattaaaaaaaagatcttcaagggccaacctatattaat

SEQ ID NO: 447247 - DNA, 465 bp, Triticum aestivum
gtgacggtcctacattcacgggtccacgggcccagtagaagaattgttaaaattcactagagcatgataaaattctgatttttttacacaagattgatatacaaatttcccagtttgtactaatttttcacaatttttggagttatagaagtatatgaaatttccagattactacaaactgttctgtttttgaaaaattctgttttccttgtgttgtttgcttattttgatgaatctatgggtagtatcggggggtatgaaccatgaagaagttggaatatagcatatataacatcaatataaatttataatgagttcacaacagtacctaaagtggtgatttgttttattatactaatggagcttatgagttttctattgagttttgtgttgtgaagttttgaagttttgggtaaagttttgatggagcacgaaataaggagtggcaagagcctaagcttgggg

SEQ ID NO: 447248 - DNA, 429 bp, Triticum aestivum
gacaaacttgtattttaggttgcaaaatgatatattcacttaagtgagctgatcaatcccttctgtacgtgtgacgcctctcttctgaaaaaagagccttccgtaggttggtaatgaaacagtgatgagggatccactggatcaagcgcattgagccattgactcattgtggagtcatgagtctccacgaggagtccaccctttctgtcccttttccaatattttccgtatatcttccgttcaacatcaatcttacgttgctgaacattgctcttgtatgtaacaaaccaaaagtaaataataacaatatgacccaagaattccagaaagcgccacttacgcacgagacaatgccagctgtactagttgttgtacacacatgttacatttggggatggggattgggattgagcatcgcaagatcgaacc

SEQ ID NO: 447249 - DNA, 430 bp, Triticum aestivum
atgcccgggtcgacgggtaatgaggatcgcattgtgaacttgtcatcagttgcccacctccatacatatccaaaggggattctgtttgatcagctcaatgacaagaaaatatacaatgataaaatggcctatggacaatctaagcttgcaaacatactgcacgcgaaagagctctccaggcggctcaaggaggaaggagctaacatcacagttaattgcgttcatcctggattgatcatgaccaatttgatgaggcattcctttgctctcatgaaggcaattcaagttgtcacctacttgttctggaagaatgtaccccagggagcggcaactacttgctacgtagggctcaaccctcagctgaagggtgtgacaggcaaatactttgccgactgcaacgaggagaagacgagcaagcatgcgaagagcg

SEQ ID NO: 447250 - DNA, 172 bp, Triticum aestivum
gggtgatgctaggagctgaagacttggcatcctttacagcatttgactaattccttggcgtcttccaaagtagtcggccagaagaaaccatggcggaaggcttcggcgacaagtgatcttgaggccgcgtggtggccgcattcgccttggtggatatccttgaggattgctc

SEQ ID NO: 447251 - DNA, 281 bp, Triticum aestivum
gggcaggcaaccgtgtagcaacgaccatggtgaccaaatccttcgattttgtgatggcaggtgtgcatgcctctggctttgtcgcgtattgtgccatatttcgatagtgtatctagtgtcctgtgttcagtaaaccaacgctcgtctcgtctttgttgagtctagcatctgtgttgcttctgttcataatcgtaagcgaggctccagtgtcgtgtgcaactgcaaatagttttgtcctattttctactgctgctgctattggtccagatgaactttgtctc

SEQ ID NO: 447252 - DNA, 411 bp, Triticum aestivum
cacggcacttcaatataaaaaaaaaaaaaaaaaaaaaaaaaacataaaaaaaaaaatattaaaagcaaacaagtatgaaaaaaatacaaaaagtcccaaccactaaaaagataaaaaagtcaaaaaaaaaaccggccgcccaaaaggttcaacactaatttacccttaaatgcaacgtaaaacccctccaaaagtgccaccaaatttcatttaacgggccttcttttaaaaaatccttaatgggaaaaaccctggcttaaccaacttaaatccccttgaagaaaatccccttttcacaaacgggggtaatatcaaaaaggcccgcacctatcccccttccaaaaatttgcccaccctgaatggcaaatggaacccccccttaagcggcccataaaccccggggggtttggt

SEQ ID NO: 447253 - DNA, 386 bp, Triticum aestivum
gggccgacgggccggcatcccctaacaaggagataaaccaacaaactgtggtgcctcagcgaaagcaagcgaggtttgtgctaccaaagagcgcccaggtggacgccgaggcgcggagcgagctgcaggacctgatggacgcaagggaggctggcatgtccttcattctgggtcactcccacatgaaggccaagagcgggtctagcttcgtgaagcggatcgtgataaacttcttctacgagttcttgaggaggaacagccgtggcccgtcctatgccgctaacataccccatgcttccaccttggaggtaggaatggtctaccaagtctgatagtagcagctgtgtgaaagttttaagttagagagatcagatgaagtgttgttt

SEQ ID NO: 447254 - DNA, 407 bp, Triticum aestivum
ccgggtctacgatcaggactacaagacatacgtctcggttattgttcggggagataaggcaaaatatatttaccaaaagtacttttgttcacttacagcttagtggagggctgacccccttgcgggcactgggcggcaaggacgccctccgaggcagggcctcctggcgagggtttcttctctcgtttggaaacctttgtttccaagtcttcaggggtggtccttttccttccttcggaagagggaatttcggattcttctcctcgattatcctccttcgtggagatactaattctcctggtttggatgagtaatacgtgaggctcgcttttggcttcttcatctctccttttatcttcccccgagggcacttgataaggtatgtactccagcatcctggctagtat

SEQ ID NO: 447255 - DNA, 406 bp, Triticum aestivum
atgaacatcttcaccaaaggaggctctcctgctaggcccgttctctgatggagtcgcttgcctcgcaagcgaagccggctgccgtgctctggctcgccggcttcctccaggccgcgcgtctccaccgcgtcgtctccttctgcgtcagctccagggctctgtcgatcagaatcgctcagtgcttcctgctcaacgggttcatcttcctggggagcttgctaaccttgaaatcggtggtcattccaactcttctatggatactgcccgagcaatgcgatcaatcatggggacaacatctatgtgatcacacaacagctgttgccttgtattcgttcttacgttcggggcttgtcgagattttctatgtattttggttttatcccctctacatcttcagctttataat

SEQ ID NO: 447256 - DNA, 494 bp, Triticum aestivum
  unsure (1)..(494): unsure at all n locations
gnnnnnnnngtttattcgcccggccggtacaagtcacnaattcccgggtcgacgggtanaaataaatgtaaagaccagcatctttttcagaaaaaaaaaaaaaaaaaaaaaaaaaaaagcggccgctctagaggatccaagcttacgtacgcgtgcatgcgacgtcatagctcttcttagtgtcacctaaattcaattcactggccgtcgttttacaacgtcgtgactgggaaaacctggcgttacccaacttaatcgccttgcagcacatccccctttcgccagctggcgtaatgcgaagaggcccgcaccgatcgcccttcccaacagttgcgcagcctgaatggcgaatggacgcgccctgtagcggcgcattaagcgcggcgggtgtggtggttacgcgcagcgtgaccctacacttgccagcgccctaacgcccgctcctttcgctttcttcccttcccttctcggcaagttcgncgggtttccccgtt

SEQ ID NO: 447257 - DNA, 405 bp, Triticum aestivum
cgttgagctgcatctgctgtattgagctgccgaggtctgctatgttgagccgccgaggccgcgttgagccgccggggctatattgagtcaccggtctgcctgagccatttctgttgcgttgaacggatcatcgatcatccgaacaaatcaggtgatatccatctaagtttgttttattagcacatattgctttttgtcaaaaaacagtttatctttgccttggtctgcaatattgttgatgcaggacaattgttcactacatcaacacgacgtggctaacttacccatccgcctggcttaccgtgtctgtgattgacttgcctgtctgcactggcttacaacaccgtggctgactcatctgtctatatcgtctctgatgttgccgtcgtccttaacgttcgtcct

SEQ ID NO: 447258 - DNA, 244 bp, Triticum aestivum
gggcatcctaggcttatgtgtgtggtgaatgaccgtcaattcggtccaatgatattgtaaaactgaatttagagtctgcaattgttacttgggggtttggtagacggtcgttgtgtttggggacgatgcagctgcagccggttctcttgttgtggtagatttgtggcatggcaggtgctgctaagctggagcctgcttgaactgttttcctgtcactttgttggggtaataatgaccatcctgt

SEQ ID NO: 447259 - DNA, 248 bp, Triticum aestivum
ttccctgggttttgttgagttaacagttaaccagtgcaacttcctgtacttcgggtgtgtcgaacgaccacaccaagaccgcttagggatccccaacattataaatacttcaataatattcgcaataagcagattgcgttatcatattcttgctcgttcttcgattgcttgcaggaaaaaaccttcgtggtcaggttgatcatgccccaccctggtcaataccctctcggacttggtttagcgacttt

SEQ ID NO: 447260 - DNA, 470 bp, Triticum aestivum
  unsure (1)..(470): unsure at all n locations
tcnnngccgttctgtaggtcngnnnnggtcngnnggccnacggggctcactaatcngcgacgctctagaggatccaagcttacgtacgcgtgcatgcgacgtcatagctcttctataggtcacctaaattcaattcactggccgtcgttttacaacgtcgtgactgggaaaaccctgcgttacccaacttaatcgccttgcagcacatccccctttcgccagctggcgtaatagcgagaggcccgcaccgatcgcccttcccaacagttgcgcagcctgaatggcgaatgggacggccctgtagcggcgcattaagcgcggcgggtgtggtggttacgcgcagcgtgaccgctaacttgccagcgccctagcgcccgctcctttcgctttcttcccttcctttctcgccacgtcgccggctttccccgttaaagctctaaaatcgggggctccctttaagggttccaatt

SEQ ID NO: 447261 - DNA, 347 bp, Triticum aestivum
ggaggacctatgcgagtctaactttgtattctgacttgaatgagtagtgttgtgctcagcttggggatgacctatgagattcttagctagaattccgatgtgcatgtccgaataacgaagggaaatctgtcttgagggcaaatacttcgggtcagggaaacttgacattatcagacgcataagtcacaggccagaaaatcagtaacgggatatgataatcatcgctctaactgaaatcactatcttctgtgggaatggccaatccgaatgttctgaagcattccttgaagcagtcgctaagtccgtcgagttccagcagtccagatgcggacatcctcttggcttaa

SEQ ID NO: 447262 - DNA, 368 bp, Triticum aestivum
  unsure (1)..(368): unsure at all n locations
cacgggtaaggaaagcagcggcaagtgcaccacaggtggcaaatgtcattgctcaaaaagaaggaaattacgaattaagaggtcgattaaagtgcccgccattagcaacanaatatctgatatacctccggatgaatactcatggcggaagtacgggcagaagccgattaagggttcccctcatccgaggggctactataaatgcagcaccgtcaggggctgcccggcgaggaagcacgtcgagcggtgcgtggacgagccggtgatgctcatcgtgacgtacgaaggcgagcacagccataaccggctgccaacacaatctgcccagacctagacgacaaccggccgatcgcttcgccgcccctttt

SEQ ID NO: 447263 - DNA, 487 bp, Triticum aestivum
  unsure (1)..(487): unsure at all n locations
gnnnnnnnnaacttctacgccggtcggtaccggtcacanaanaaaaggccccgggcccagggaangcgaaggtggctgggctttggtccggctcggctcaggccgtcccaaaaaaaaaaaaaaaaaaaaaaaaaaaaagcggccgctctanaggatccaagcttacgtacgcgtgcagcgacgtcatagctcttctatagtgtcacctaaattcaattcactggccgtcgttttacacgtcgtgactgggaaaaccctggcgttacccaacttaatcgccttgcagcacatcccctttcgccagctggcgtaatagcgaagaggcccgcaccgatcgcccttcccaacagttgccagcctgaatggcnaatgggacgcgccctgtagcggcgcattaagcgcggcgggtgtggggttacncgcagcgtgaccgctaaaacttgcaagcgccctaancgccggctcctttcgcttcttcccttntttt

SEQ ID NO: 447264 - DNA, 409 bp, Triticum aestivum
  unsure (1)..(409): unsure at all n locations
cccgggccgacgggaaggaaaatccctataaattagggatttgtctgatttgggtaggggttggactatatatacatgggaaaaaagggagttgaatcatccgatgaaaatccgacggtcaagaatagataggctatgaaagtctaaataagaaacggagacgttttgtacatgtttggggatgatccggacacaacggtgacgactgcccgggtcgggtccgggaaaactttcggacgcgcgcgcgaggatggccgcgggctgacgagagagcttaagttggatctggcggtangtagtgggctgtgtaaacggtctcgagctaagagaagagaagagatggaggcccggcgactgtttccggagaccgaaaacgttcgacgtgtgacccactatattgtcactatag

SEQ ID NO: 447265 - DNA, 420 bp, Triticum aestivum
cggaaatggcacttgctcgatcgtcttgttgccgtattgttgtaggaggtccatatgatgtggtacctcatagcttgtctccatgactgaagggaaattcccattctcggccatctttcttgaggggcttccgacgatggaagtgtcaccctcgctcataggtggtcgccttgttcttgaagatgtcaatgtatgcgaactcatgggaagtaggcgaagatgtcgtacgtccgaaggcgaagatgccttgataacacttggcaaagatgtcgaagtggttggtgtagccgtaactacgtcttggtggtgctcgtctcgcggtcttctctttttctcatgaagcttcgccttggcgtgtagtaaggctttttgggacttgtgcatttgcgtttgtggagcatcttcaagatgataatgtca

SEQ ID NO: 447266 - DNA, 409 bp, Triticum aestivum
gggcaccatacaagacgtgttcatgccgacccagtacataccgttaaggtagttgagggtgacggggatcggatcacaatcaagggggttgatgctcgccaccctatgattgttatgctgcgtgacacgctgtttctgaagatcaggcggcatcagcaaccaaggaggtggcttaaaaagctctggcctgaaggccttcttgcactggtacacgggcgagggcatggacgagatggagttcaccgaggccgagagcaacatgaacgacctggtggctgagtaccagcagtaccaggatgcgacggtcgaggaggaagaggactatgaggatgagcaggaggatgaggaggccgcctaagcgggcttccccctttcttcccagggatatgccttatatcgctcgttatgt

SEQ ID NO: 447267 - DNA, 414 bp, Triticum aestivum
acgggcgcccaaatgatagctgcaacgatgttttcgttgttgttcagaggagaaaagttaagacttggtcaaaacattgctgaagaaaaactgtgtattgctcacacctcacaaacaggaatactagtcgagctgcttggtcccaactgtcggccgcttcttgtgcaattctcgcgtttattgacgacataggttgacaatggtgtgggaccgtgatgtcaggaaaccaggaggaagcaaaaaaattattgttttatatactaataaggaggcacttgcgtacgtgcggctatggccctggtgggtccccactgtcatcctctccaagtaaagtcatctcctcatcctcatgttcgttgaccatgttgataacgcgagacggctatgccacgacgaacgcaacaactccaaaga

SEQ ID NO: 447268 - DNA, 382 bp, Triticum aestivum
gaaacggggttcatcagcatgagcatcataattttccatgtaaatactactgtccatatcgacaatagtttccccaatttcagacataacggcagaaagtgcgaggagcaggaagaaagaaggatgcgaacggaaaagagagggcgaataaaacggcaagggtgaactggacgagaggaaaacgagaggctaatggcaaataatgtcatgcatgagataagagtttgtgatgggtacctggtatgttgacttttgtgtagactccccggcaacagcgccagaaatccttcttgctacctcttgagcattgcgttggtttcccttaaaaaggaaagggtgatgcagtaaaatagtgtaagtatttcccccagtttttgataac

SEQ ID NO: 447269 - DNA, 402 bp, Triticum aestivum
gacggctgagcaaaatacagcttcacattgcaacgctcgtaggctaggtattcaatatagagtccaacctatggctagcatgtctacattacaagtaaggtcacttaatgccatgtgtaatgttgagatgttgccatcactttcatgctttgaagttttgcgtgtcctagctttggaaggcccctatgattcacaccatcctagtcatcttgagcatgttggaaagttagttcacttgaggcacctcaaactatcgagcatggatatcggtgagctcccaaaggaaataggatatctaaagttcttgttggtattggacttaggtagaaatagcataagtgaacttccagagagtattggttgactaagtcaactcaagtgcttgaacatatgcgaaacaga

SEQ ID NO: 447270 - DNA, 405 bp, Triticum aestivum
cgggtagcgaggcgctaacgctcgctacagacttacatgtccagtccatatgtgtggccacagattgcctagaagtggtgacaaggatcaaggatgacttcccatgcatgtttttcccaattctgcaagatatcaagcatcagagaagagctttcagggcagtagagtttatccatgagagtagaagacataatggagaggcgcatgctttagctaaggctgccgcatcactccctcccgggcgccatgtgtggctttcttctatgcccgatattatctgtattccaatgacagtttatgcttaagaaaggatacagattatgctaaaaaaattgtcttctttaacgcgttacaaatataatctttaaacaagatgtcgcttaacaaaatatcgcattttttgtc

SEQ ID NO: 447271 - DNA, 363 bp, Triticum aestivum
  unsure (1)..(363): unsure at all n locations
acatccacatcatcatcctccaccccgagcccgacaccaaatccgtcgagccccgtgcagtgtcngcccccaccggggcttcctcttctcgggccacaacgttgtctggatcaccctcccatgcaccatgggcgtctagaggtctgcgaacgtctcttcaccgcacatgactgctagtacctcgtcatagttgctggaggagtaggagcctcgcttgaattgctaaatgggtagagctttcaatgaagtggtggagcggttatgtaggttggcaggtggagatgaggacaatcacctatgtacatggtgttcgcatgacggtcgcccccctaggcaagggggcatgtggtanggcccatgcat

SEQ ID NO: 447272 - DNA, 370 bp, Triticum aestivum
  unsure (1)..(370): unsure at all n locations
ttnttnnttttttttcngtgtttcttnttttcntntttttnnnttngttgtttttttttntgnttgtttttnttntcttttttttttttttctngnngttgnncnttcctttcngggttttgnncttttttttgctttntttgtntgttcgttttctcttctnttttttttnctcttttttttttttgtnntcntttttttttcttgtttttttttggggtttctcnttgntgnttnnnaggtttttttcntttgtttnttttctntcttttttccttttgtgttttttnctttttggtcnttttttttttnngncttcnttgttgtttttnttcgtntttgttttnttnattgntnntcttcttnttct

SEQ ID NO: 447273 - DNA, 98 bp, Triticum aestivum
gtcccgggccgacgggcagtttatcttcggcattgcaaggcgggttcctcctccaagtacttcatagaagattttgaacacaaagatagtgtccagcc

SEQ ID NO: 447274 - DNA, 406 bp, Triticum aestivum
ccgggccgacgatataaccaacatgcttgacttcagctctgaagacatcgatggcatggatgacgatgtaggagacgaacaggaaccagcacctatagggcgctggaaggccacctcgtcatatgacatatatatggtggatactccaaaagatggagatggcgatggaacagtgggggatgacgcccccaagaaacagccgaagcgccggcgtcagcggcgccgctctaaatcccgccaaagaaaaaaacggtgattctggcacgggagataatactaccccggatagcgccgaagaacacccacctcagcaagattcagcacaggaagatggagaagccagccctcatgagagagcggcagaccgagaggtcgaggatgataactatacgcctccctccgaaga

SEQ ID NO: 447275 - DNA, 375 bp, Triticum aestivum
gggcagagcaaaatcgaatgaaccagacgccattcctaaacgaacgacggcgaggacgagcagaatcgaatcgaatgaaccagacgcgatttctgaacgaacgacagcgaggacgagcagaatcgaaagaaccagacgcgatttctgaacgaacgatggcgaggacgagcagaaccaaataaaccaagaaccccacggacgagcgaaaccaaatctgattcttctaatccgacggacgaatcgagcggggatgagcgagatagaaccaggcgcaggaggaggcgaggcaggaaccgaggacgagccgaggcgagagggcatggcccgggcgaatacaggaggagtggcccggagccccggatgaagagaggggga

SEQ ID NO: 447276 - DNA, 182 bp, Triticum aestivum
ccccgtaatggcaaacgcgcctaagttcctccgcatcgtcgtcgtacccctagattaagcttgatgtcatttacatctgttacttgtggcaagtaatgttttgaactcatagctgaagttcgacgtgttctgatctgcgtatggtggacatgacaaatcaaactgctaccataaactaaaca

SEQ ID NO: 447277 - DNA, 54 bp, Triticum aestivum
  unsure (1)..(54): unsure at all n locations
tgttntttgttgttnttttgtttgtttttcttntcttttttnnttnngggtttt

SEQ ID NO: 447278 - DNA, 387 bp, Triticum aestivum
gggcggattgatccccaagtcgttgcatccttcatgtggatattcttctagtattacaaagccccccatgtagatagcttcgtcggcttgtcgaacactcgaacaccacctaaattcctactattagaggaaaaatggtactgcagatactgattaatgaaccgatctcttggttggaaagggaaataaagatgttggcctgaccggtctcttggtcgaaaaaggacagaaagtggggggtgttgggtcaacaatccaaccaagaatgagcacgtctagatttcttatggttacataggaaatttcgctgacgagaacaaaaaatgcataaatccaaacatgctttgcatgtctgccgcactcggcaacacctctgcctcaccattt

SEQ ID NO: 447279 - DNA, 474 bp, Triticum aestivum
  unsure (1)..(474): unsure at all n locations
ggtgnngcaantctactctncgggnccggtcagnaatnancgggccgacgggggagccnatataacttgtagtaggagggagaaaaanaaaaaaaaaaaaaaaaaaaaaaaagcggccctctagaggatccaagcttacgtacgcgtgcatgcgacgtcatagctcttctatagtgtacctaaattcaattcactggccgtcgttttacaacgtcgtgactgggaaaaccctggcgtacccaacttaatcgccttgcagcacatccccctttcgccagctggcgtaatagcgaagggcccgcaccgatcgcccttcccaacagttgcgcagcctgaatggcgaatgggacgcgcctgtancggcgcattaagcgcggcgggtgtggtggttacgcgcagcgtgaccgctacactgccaacgccctancgcccgctccctttcgctttcttccttccttnctcgccaacgtnccc

SEQ ID NO: 447280 - DNA, 426 bp, Triticum aestivum
gtggcaactggcacctgggatccaccatctggttgcaacaactggaaagaaaacagaagggggggaaagaggtagcaaagcaaccgtgagtactcatcctaagtactcgcaagcatcagatctatactaagtatgcattggtatcaaatggaaaggttgtatctgtgcactgaactgcagaatgccagaagagaggcgaaagcctagcctatagaagactaggatcttgaagcagctccaagcatcttgcaatatgtagaagagtgtgacaccccaaaagtttggccttgtttttagttattaaaatgttgccaggaaataaaacttttccaattgtcaagttttacccttttgtgattttggatttatgcctcttgtgggaaaaaacttcaaagtgtatctttgacttgtgtgccctcttaaaaa

SEQ ID NO: 447281 - DNA, 181 bp, Triticum aestivum
cccacgtcgttgcttccttcatgtggatattcttctagtattacagtgcctcccttgtatatatcttcgtctgcttgtcaatctcttgaccaccacgtgggtttttattgttagttgatatgtggtactggagatactgattactgaaccgatctcttggttggaaagggaaagcgcgatg

SEQ ID NO: 447282 - DNA, 96 bp, Triticum aestivum
gtaagtaactatcagaggttgagtgtcgtgaaaacgttctgagaaatgtgggatttgctttgtaatggtaagccacatacaagaagtggctgaagg

SEQ ID NO: 447283 - DNA, 471 bp, Triticum aestivum
  unsure (1)..(471): unsure at all n locations
tgnnnnaattctactctgcgggncnggtcnnngaaanancgggccgangncgctcactatcggaggccgctctagaggatccaagcttacgtacgcgtgcatgcgacgtcatagctctctatagtgtcacctaaattcaattcactggccgtcgttttacaacgtcgtgactgggaaaccctggcgttacccaacttaatcgccttgcagcacatccccctttcgccagctggcgtatagcgaagaggcccgcaccgatcgcccttcccaacagttgcgcagcctgaatggcgaagggacgcgccctgtagcggcgcattaagcgcggcgggtgtggtggttacgcgcagcgtgccgctacacttgccagcgccctagcgcccgctcctttcgctttcttcccttcctttctcccacgttcgccggctttcccgtcaagctctaaaatcgggggctccctttaagggttcc

SEQ ID NO: 447284 - DNA, 417 bp, Triticum aestivum
tcccgggccgacggggagagcaactggcggagctgtacccacgtgaccaccgtgtgctgagggacctggcgctccggtcggagtacctggtcggccagaacgtcacgctcgatgtcgctcggttcagtggcgccttgtcccgtgctctggagcttcttcaccattagaagacactccacagggcgtagattgtttacaagataattagtcaagtgttttactactgcagtaaaataaagggtctggctaaatcatgtgtgagctgttggatcgctgtcacacggtcagaaggcaaattcgaaggctaatctagggactaaactctctcactcaactaaggattagcaattccataagatatagtgaaacataacacaaattggaacaaccaaggttgaatcaggtatctcttcagat

SEQ ID NO: 447285 - DNA, 418 bp, Triticum aestivum
gggtggcctactttcagaattttataaacagccgcacataaggtaatattttaaatcaacaaagtgccatatagcgcaaacaaattcgttttcatactacaaatacgacatgagtacatttactcaaagattgtgtccttggtacattcgtcagccatgagacgagcgcctttcataatgccatcataatatttctcggggtagcggtgcaccttgccctctgggggtccatccttcaccagcttctctgcatctagcttggcccaatgcatttatgcacgggcaaaggctcggcgggcaccctcaatacaaatggatcgcttgataacttcaagccacgaataggcatttaccatccgctttataaggccggagtagctatcgggcaagggctcaccaggccacatctggactatga

SEQ ID NO: 447286 - DNA, 338 bp, Triticum aestivum
tagcgtccaaattcacggtcgacgggttcgaccacccaaccgaccccaacgatggatccgggtacggaggaagcacgaatcggtcactgcagatcctgcatgggctgaaactttgggaataaagtcaaccaccaaggcaaggttccccgaatttaaaaccttctttcccccccccgtaattccactttgaaattgtccatcccccaaatttcccccaaaggttcccccaaacttttttccccgtaaactcacacacccaatgtgtgttaaatatcccctttttccccgtgttgccccggaaatttctctcccccaaatttctctcacaggtttctcgt

SEQ ID NO: 447287 - DNA, 473 bp, Triticum aestivum
  unsure (1)..(473): unsure at all n locations
ggnnnngnaacttntacgccggncangtagccgtcacagaattcaagggncgacgagctactaatcggcggccgctctagaggatccaagcttacgtacgcgtgcatgcgacgtcatactcttctatagtgtcacctaaattcaattcactggccgtcgttttacaacgtcgtgactggaaaaccctggcgttacccaacttaatcgccttgcagcacatccccctttcgccagctgcgtaatagcgaagaggcccgcaccgatcgcccttcccaacagttgcgcagcctgaatgcgaatgggacgcgccctgtagcggcgcattaagcgcggcgggtgtggtggttacgcgcacgtgaccgctacacttgccaagcgccctaacgcccgctcctttcgctttcttcccttccttctcgccacgttcgccggcttttcccgtnaaactccnaaaannggggggnnccctttag

SEQ ID NO: 447288 - DNA, 343 bp, Triticum aestivum
ctggagatggctgacactgtgtgctcgtcgtcgaatcgttctgtgctatatctggtgggcgttgccggcgcatgccaactcgttttaagtggccgatggcggacgctgcttcagctctacattcttgtttgcttggacggttgagccccgataatcgccttccactttctacccgccatctccgggctgcccgggtgaccagtgtcgtggagatggtggctgccatgcagtaagtcatgcatcatgtcatacactagtgatgcacattgcatgtcttgaataagacggaagagtgtcttgggcctccgtatacaatgagattccctttcacacatgatttcca

SEQ ID NO: 447289 - DNA, 473 bp, Triticum aestivum
  unsure (1)..(473): unsure at all n locations
gnnnngnaaantctacgttnttcgggccnggtcnnnnaataaacgggccgaggggccacanaacttcnggtaccccgaaanaaaanaanaaaaaaaanaanaaaaaagcggccgctctnaggatccaagcttacgtacgcgtgcatgcgacgtcatanctcttctatagtgtcacctaattcaattcactggccgtcgttttacaacgtcgtgactgggaaaaccctggcgttaccaacttaatcgccttgcagcacatccccctttcgccagctggcgtaatancgaagaggccgcaccgatcgcccttcccaacagttgcgcagcctgaatggcgaatgggacgcgccctgtgcggcgcattaagcgcggcgggtgtggtggttacgcgcagcgtgaccgctacacttgccncgccctagcgcccgctcctttcgctttcntcccttcctttctcgccacgttcgccggtt

SEQ ID NO: 447290 - DNA, 392 bp, Triticum aestivum
ggggacacaacgtgggaaaatcctcattcctctgaagtatctgatgtaagggaggtgaccacagaagctgaagaaaacagcttggatattcctgttgatagccagccagttgctgacgatactttccaaggctagactggacttttgccattcttgtacaccatgactttttgtactaaagtttttcatctcggttcacagcgaacattcttataatcttattcagttttcgcattgacccagagttccgtcacagcttttgttgctcatctgtaaacctgagtgaaacaaaaagaagaattggatcatcaaaaaaaaaaaaaaataaaaaaaaaaaaaaactagaaaaaaaataaccggttcaaagaaaacctcaaaaagagtttgatgtc

SEQ ID NO: 447291 - DNA, 379 bp, Triticum aestivum
acgggcctaagttgcatcgggtaattccgcaacgggaaagggaggtaacgggagaaagcatgggatccagtacgtatggccagatcagtgagtccgaacgagggtgcaatctgtaccatcgattgatcgtgagtcagcggtgagttaatgctggtaacgtgatgcttcacgctatagggctcctgtggtcgcatgtgtcggcgtgtctatacgatgcatccttacataccccttgatcacacttgatagcgcatctatagtgtgtatcaattgatatcatgagtgcttgttctacaatgtccagagtgaaaaaaggctgacataacacaagatggtcaccttgaaggacatcaccctttagacaactcgcgggttacct

SEQ ID NO: 447292 - DNA, 319 bp, Triticum aestivum
gtagccgtctacaattctagggtcgacggggacctcaatccgccacgtcctccccggggagctcgccaagcacgccgtctccgagggcaccaaagccgtcaccaagttcacctcctcctaggttcgcccgccccccctcatggtgaccgctgttgatcccctgctggatctgcctgcctatctagatatatatagtagtattagtagtgcttgatggaaatcgttggacggatgatggttcgtgtgtagtcgtcggtggttgtaagatgatgttcccgtggtgctacttttgcgtagtcgatctgaatattaatggaac

SEQ ID NO: 447293 - DNA, 478 bp, Triticum aestivum
  unsure (1)..(478): unsure at all n locations
ggtgnngnaantctantgtacgggccggtcncnaataaacgggccgacgggggtgctnacagcgtcggccaaaaaaaaaaaaaaaaaaaaaaaaaaaaaaaaagcggccgctctanagatccaagcttacgtacgcgtgcatgcgacgtcatagctcttctatagtgtcacctaaatcaattcactggccgtcgttttacaacgtcgtgactgggaaaaccctggcgttacccaactaatcgccttgcagcacatccccctttcgccagctggcgtaatagcgaanaggcccgcacgatcgcccttcccaacagttgcgcagcctgaatggcgaatgggacgcnccctgtancgcgcattaagcgcggcgggtgtggtgggttacgcgcagcgtgaccgctacacttgccagcgccctaacgcccgctcctttcgctttcttcccttcctttctcgccangttcgccgggtttcccgt

SEQ ID NO: 447294 - DNA, 192 bp, Triticum aestivum
tgaagtaaacctagctagagacggctcacgcgttccggcttgcgttgtggaccaactgctgccccgtcgcagacaccgggcagtcaggtccgccctgcacactctgacatcgtcctaatcgatgcgaagttttgtagtagctaattcatgttgtaaatcacaatatctagttatgcaatcgtaacattgagc

SEQ ID NO: 447295 - DNA, 296 bp, Triticum aestivum
gggccgaggcggaagaaaactttaaacagcaaacggccgggtcgggggatatatcctcttgccgtggacgaggcagtcgtaggagcggcaacggcaagatggacgacggcgccgatgaagcgagaggaggcgatgaaaggatcctggtccagcgccgtggatgagagacgtccatctcttgcagtggacgacggggtatgggtagcggctctggcaaggtggaggatggggtggcggacggaggaggttggccgcagtgcggaggttgtcgtgccgccgacggtgtatgaatggcc

SEQ ID NO: 447296 - DNA, 414 bp, Triticum aestivum
  unsure (1)..(414): unsure at all n locations
aaccggatcatcaacactgactccggcatagaaaacttgcaagagaatggtacaccatgacgatgtacactgaattgaagatccccagaaagtggaaatccgcccgcttccaactgatgataaaattcttgcaattgagtatcaaattggtggtagtaagctccaagaagaagaggtgcattgtgctcatcagcctgagaaaagtgtaacatccaaccacaatctataaaataggcatacaaattcgaaggagcgaaagatgaagatgcaacaatacttgagagctcaaggtatcctctctgtgattatatttttttcatcatttcacacatcgatgttttgcgtcttgagatgtttattggattgtgcaagaacaagggtttcaatatatgcaaaanaaaacgacaacagtac

SEQ ID NO: 447297 - DNA, 385 bp, Triticum aestivum
gggggcgataaagatcatcttcaggcacaaggcgccggtggctgttgctgcggcaatcggctgctgttgatttcattcacgcacgctaatcgcggacatcgatctatgatctatctttatctttgtggaggatggatgataactgtttgttgtttgacaaggtgacatctaagcagctcgtttgtgtcattttcttttgcttgtgttgctgtatatgatatgtatcactgggtcagttgatgctcctcatgttgaatcatcacagaatacctgactgcggacgaacggacacacggtcgctctaaaggatcgacgtttaactagccgttcatgctacttcagaactcttcaaaagtgtcacccaacttcacttcattgaacgtca

SEQ ID NO: 447298 - DNA, 278 bp, Triticum aestivum
ggggatcgcaatgacgacggctcttgctagcagttccacatcaaaccatcaaatgtgcctgagctttagcgctcacttcagtgacatgtttatggaggaccgctttcctacattgtcatcctggtaaagggatggcaaacatcgtcttcatagccgtgaagctcaatatgaagcactgctactctaactcgaagtacaaggattactgcactgatgacaacgtcggccaatatgatgatgtcgctcacgcgcctgagtttgacatctatcgtgagatg

SEQ ID NO: 447299 - DNA, 416 bp, Triticum aestivum
ggggctgaagtgatgggctgggccgattctgctgggccaccaggtgggtgggcctcaggtaagcgtcaggtaaggtttctctgctctgtcttttacttattgttttctatttttttctgcagctttgtggctttattaaaaatactaaatcaatcccaaaaatcatgcaactgctcatgaccactgttagaaatatattctacagtaaacatttcagtttgggattatttgagcatttagaatattttatagtatttaaatgcccaaatgcaaataagtaatgatttaaattcaaagtcccaaaaataaatccttttaaaatgttcattattttttgtttggatgaaaacccttgccaaaaatattaaacatctaaggagagcattttggagcaatgaatgagaattaaggttttt

SEQ ID NO: 447300 - DNA, 232 bp, Triticum aestivum
cttcggtgatggttcgcttcattatccggagcccattacgacagtcatgactttcatgcaggggtacgctacctgcatgcgtgcgcaagttggttaggctatgcatggcgtcagttacctggctaagttgttacgctacgtgcatgcatcgcatggacatgggtgcatgtggttgagatattctaggcggtgactgtccgtgtgtgtgcatggatatagtttgctagactcc

SEQ ID NO: 447301 - DNA, 422 bp, Triticum aestivum
tgcggtcatgttagtctcctcttcagagccagttagcagttgtggaacaggtggagctttactgagcatttgctcatggatctgtgtttgcaacagttctttgtgtcaaagaaacagaatggggcgtatttaagaagttcttcaaagtgtgttgggaattttacctcatcaattacactttggcgttctggggagccgaattttggtggtgtttcacgtgatttgatagcgagtgctcgtctatcttccttcttgtagtccagtgaacccaatgcgccaccaggatttgttggcatgaaagcaatcaatgctactagtgctgtgcgtactgcaacacgaatagtttggctcagatgtgtatacatcatatgaacaagaaaaaggaaaaggaaaagaagacacatataattaatataacacac

SEQ ID NO: 447302 - DNA, 476 bp, Triticum aestivum
  unsure (1)..(476): unsure at all n locations
gnnnnnnnnnttaactctgccgcggtcaggtaaaggtcnnngaattcccgggccgctctgaggatnaaagcttacgtacgcgtgcatgcgacgtcatagctcttctatagtgtcacctaattcaattcactggccgtcgttttacaacgtcgtgactgggaaaaccctggcgttaccaacttaatcgccttgcagcacatccccctttcgccagctggcgtaatagcgaagaggccgcaccgatcgcccttcccaacagttgcgcagcctgaatggcgaatgggacgcgccctgtgcggcgcattaagcgcggcgggtgtggtggttacgcgcagcgtgaccgctacacttgccgcgccctagcgcccgctcctttcgctttcttcccttcctttctcgccacgttcgccggcttccccgtcaagctctaaatcgggggctccctttaagggttccgaattaagtgctttacgcac

SEQ ID NO: 447303 - DNA, 304 bp, Triticum aestivum
gacgggtcacgttgtcgagcttaggtttcacagggttcaaaaggaagtccgaggagatcgaatcgagtggaaaaggccgttgtaagttcttccaggctcgtaaacttgagcttatcagaaagttccagtgacttgcactaggtcagtggcactttcagattagaggttctatttcgtcgggctcagtttgtatgtttattctgcatggaacacttgcaagtccagtgaaaccgatgttggactgtactgagccggtggccaagactgggtcagataattccttaatcaatcctaatcctaaggc

SEQ ID NO: 447304 - DNA, 474 bp, Triticum aestivum
  unsure (1)..(474): unsure at all n locations
ggnnnnngnaacttttacgccggcaggtagcngtcacagaattcacgggncgacgagctactaatcggcggccgctctagaggatccaagcttacgtacgcgtgcatgcgacgtcatactcttctatagtgtcacctaaattcaattcactggccgtcgttttacaacgtcgtgactggaaaaccctggcgttacccaacttaatcgccttgcagcacatccccctttcgccagctgcgtaatagcgaagaggcccgcaccgatcgcccttcccaacagttgcgcagcctgaatgcgaatgggacgcgccctgtagcggcgcattaagcgcggcgggtgtggtggttacgcgcacgtgaccgctacacttgccaagcgccctagcgcccgctcctttcgctttcttcccttccttctcgccacgttcgccggctttccccgtcaagctccaaatcgggggtnccctttagggtc

SEQ ID NO: 447305 - DNA, 381 bp, Triticum aestivum
cgggcagcataattaatgaggttttaacaccacaaaaaccagtaaataggatggagaacaatcgtcgtccgttttgggacatttttggtatgacttctggaaggaaaattgtgccagcacaacaagctgtggatcaggatgcttctgctgccaaggtggatcaaatagacatggagtcaaatgacatccgccgcttcgaacagttgagacgtgagttgattgagttagaaaggagagtgcagaagagtacagatggtgctaaaaaagaggagttccaggaaacggaggttccagatgaaacaatgagcccttctgagtcagcaccccctctgtcagggcctcctggttcagtaatcaagaaagaaaatgttattacaaaat

SEQ ID NO: 447306 - DNA, 410 bp, Triticum aestivum
aatataagactattattggagccagtgccatttctggattctgtgcggctgcttgcagtctgccctttgattacgtgaaaacacaaattcagaagatgcaacctgatgccactggcaagtacccatacactgggtctttggactgcgccatgcaaaccttgaagaccggtggcccatttaagttctactccggcttccctgtatattgtgtcaggatcgccccgcatgtcatgatgacgtggctcttcttgaatcaaatccagaagtaccagaagaagatcggcatataagatctccagttggagacaagagtaccaatccttgttcgacacatttaataactttccagcagctttgcactcccgtggttgtttttggtacacagagttttaagcaatttttaccgtagc

SEQ ID NO: 447307 - DNA, 474 bp, Triticum aestivum
  unsure (1)..(474): unsure at all n locations
gnnnnnnatntntactctncgcgttcaggtaaangtctnnaattcccgggccgacgagccactaatcggcggccgctctagaggatccaagcttacgtacgcgtgcatgcgacgtcatgctcttctatagtgtcacctaaattcaattcactggccgtcgttttacaacgtcgtgacgggaaaaccctggcgttacccaacttaatcgccttgcagcacatccccctttcgccagcggcgtaatagcgaagaggcccgcaccgatcgcccttcccaacagttgcgcagcctgaatgcgaatgggacgcgccctgtagcggcgcattaagcgcggcgggtgtggtggttacgcgcacgtgaccgctacacttgccagcgccctagcgcccgctcctttcgctttcttcccttccttctcgccaagttcgccggctttccccgttaaagctctaaatcggggggctccctttaagt

SEQ ID NO: 447308 - DNA, 399 bp, Triticum aestivum
tgtaatcggctgggggccgaattggatatggcccccatcgccagtctccatgggggtttgctcccccatgtgtccagcagctgaggtttcaccctctggcgccgccctgacggcctcctgcatctctccctggcctgggatccttcgggacaacacctcggtgtcatccatggccctgggagaggaggccgccggaagggacccgctgtccatcaccttcgggtccagcgaattccccgaagatgaggatcgctcaaagtcggaacgagccggactacaagtgcatgattcaacatgttaaaactatgaagtaaaaaggctggatatatgaatgcgtcagggtctttgagtactcatgattcggccaggggcttatctcgggggcgccgctctgggctg

SEQ ID NO: 447309 - DNA, 473 bp, Triticum aestivum
  unsure (1)..(473): unsure at all n locations
tgnnnnnnnnttactcccgcgttcaggtaaaggtcncgaattcccgggccgacgggaacacggttgaaacttccagcaaaaaaaaaaaaaaaaaaaaaaaaaaaaaaagcggccgctcagaggatccaagcttacgtacgcgtgcatgcgacgtcatagctcttctatagtgtcaccaaattcaattcactggccgtcgttttacaacgtcgtgactgggaaaaccctggcgttaccaacttaatcgccttgcagcacatccccctttcgccagctggcgtaatagcgaagaggccgcaccgatcgcccttcccaacanttgcgcagcctgaatggcgaatgggacgcgccctgagcggcgcattaagcgcggcgggtgtggtggttacgcgcagcgtgaccgctacacttgcagcgccctaacgccggctcctttcgctttcttcccttcctttctcgccaagttcgccggg

SEQ ID NO: 447310 - DNA, 144 bp, Triticum aestivum
ggaggatacctcagatggtacggtgatgacgacgatgattatggtgatatctatgatgacaaaaaggtcaaagagatggtgaaggaggaggaggaggagggggaagatggcatcatgttgggggcaaccagatgcccgaatcgg

SEQ ID NO: 447311 - DNA, 390 bp, Triticum aestivum
ccaatataaataaagaatgagttcattacagtaccttgaagtggggtttggtttccttccgcaaacggaccttacaattttccggtaaattttggggtggtgaattttccaagtttggggtaaaaatccaatggacaatggaacaaggattggcaaaagccaaaccttggggatgcccatggcgccccaaaatgatcaaaggacaccaaaaacacaattcttggggagcccccggaaggcatcccctctttcgtcctcatcaaccggtaactttacttggagctaaattttaatttaccacaagatatgtgttttgcttggagcgtcacttcattttcttttgctttgcttgaggtttgaataaaatatcaagatctgaaattatcaaat

SEQ ID NO: 447312 - DNA, 408 bp, Triticum aestivum
tccggatatcaaaggtcgaccggacctcatgtcatgacatatcatctcatctcacgtgcacaacaaactttggattgttctggacatgtcttggttcattatttgaaaatttgattgctatggtgttgtttgaggctggtttgagcagaggaaaagttgttccttttttgatgatcatggtgatactgctgtcatgttgcttcttgtagtgagtagtatacacatggacctgataaaatggtccttgatatgatggaattagtagcatttgtgtgggtttacactgttgtgcctaaactactatggttgccaagccagcatccattgcatcaatcctcatgaattagtggacaatgtatagataaactctatggaacaataatgatagtgaatcagcacaatagttta

SEQ ID NO: 447313 - DNA, 191 bp, Triticum aestivum
ggatgagatggaataaccagatcgtggaccaacaagaacggccgcccctccgggaaaaaccccccccttgtggtaaaaacatacgggaaatccgggaacaaaaaacattaggaaccccccgaaataaacatgaaaaattgaaaaaattgacagatactgggcaagatgtcaaacacatctggcttcctctc

SEQ ID NO: 447314 - DNA, 414 bp, Triticum aestivum
  unsure (1)..(414): unsure at all n locations
gatctatccacctaggggcatgacatcatctcctcaaattcaaaggttccggaaggcggaaaaaatggtaaattcaacaaagggcctggaattttggaattttgggttcaacttgcaagtaaccaaggtactatcagtacggattgcagactgcggggaggctatatataaattttcattcgctctgcttttgaaattactcctcgatgttatgtgccaactgccaaccgtacgcctgaacgatgtttgaggcctctattagaaaactggaagttgtaactttgtgactggacaagtttgtcgtaattaggatacaaagttctttgttatgcaattctaccgttttttgttgcaaaaaaaaaaaaanaactaaaataaaaaataaaaaaaaaccaaaatatccaacacaaaaat

SEQ ID NO: 447315 - DNA, 103 bp, Triticum aestivum
  unsure (1)..(103): unsure at all n locations
gnaatcccgtttgncaacacngggattttcncgtnaacacaaaaaaaaannntcacatcctgcnatggccacaangacaactttggcactggancanngtnnt

SEQ ID NO: 447316 - DNA, 481 bp, Triticum aestivum
  unsure (1)..(481): unsure at all n locations
cgggtcgaccggttagctggaaaaaccctctgaagtttattgcagtaaacttgggtgaacactgatgatcaacacggattttactggcgccaaagagtttgtcttgggtgattaactaaggaaggactatgatcctggaggttttgtggcataatggagcacaaactaacatagttgctttgtagctcacattatgtgtccagaatcaagatttggatgatgcactcacatggagtaaccacttgaggtaaaacttggcaaggcttagtgacttggccagataaaggtgctataaaaatttcataccaattggttttaccaaaatggtacttccttcacaactatcttcactggccagaatcttgcaagaattctagaggagtattggctaggttaaattgtgccaaatttggtggagagaagttattttgtaggagaatactctagtaaattgtcaggcaaaatgaancaatataaaata

SEQ ID NO: 447317 - DNA, 481 bp, Triticum aestivum
ccggtcaggaaatctcggccggtccggtgccgggactggagttcaggaactggtcgcggcacgccggccgtggctgctgcatccatctcgatctccggtgccgcctttgggccaggccgccggtggcctcgccatcgtatccccctccgacgttggtcatgggatgcagtcagcggtccagctgcaggaggaacaggatggccacatggtacacaaatgcatttatgtatgtgacacctacccaaaaaccaggttggcccaccttcggcccccagacggccccagggaattgacgtctagttgtcgctcaggctggtcacaatggacaagaacataagctagtaacttacacactttcctagactatattactacctccatagtgggtaggaacatctatgtagtgtcatgcaaagatgtatttattaggttatagactcattgtttcttggagtgtgtgatgttccggtaacttagctag

SEQ ID NO: 447318 - DNA, 260 bp, Triticum aestivum
gtaagtgtagaaatgactatttgcagcgtgcatatttttcacgctatacaatgtcgagaatagacattgttgcgtgtattattatacttaatacatggttcactagttatattagggtggttctgctaatgttattcttctcgaactcgtgatcagttttgactgataaaaatgtccagtggcttcgaggattcatcatattattttatcatatgatatgttttttttcctatttttacattcgacagactttgataatg

SEQ ID NO: 447319 - DNA, 448 bp, Triticum aestivum
gagccccctcctcagcccacgccgtcgtccaactccaactccaacgcggtctccttcgccaaccgcatgacgaactaccccttcgcggaaaacttgcaacctccggcgccgatattcgccgacaaggccgccgcgctcgcgtccctcttcgcgccgcctcctccaccgcctctcccggtgttcagcttctcggcggagcccaagatggaggaggcgatcgggtcactgctgctcccggggcaggaggcgtcgcaggagccagaggagcccacctgcacctccaccgtcgcggacatggcgccgttcatgtcgctggacgcggggatctccgagctcggcgacgcgtcgccggccgattactggaacggcgggagctgctggacggacgtccaggacccgtccgtctacctaccctagtttggcttagttcctcatcacgattgcctta

SEQ ID NO: 447320 - DNA, 55 bp, Triticum aestivum
  unsure (1)..(55): unsure at all n locations
gttnntnttggtgttttttttngttgttgnggatttgtttantgtgttntgtcnt

SEQ ID NO: 447321 - DNA, 64 bp, Triticum aestivum
gggccagtggctgaattgttcaaggattcaagagtcagtccagcgtgaatacctcggacgtcga

SEQ ID NO: 447322 - DNA, 436 bp, Triticum aestivum
  unsure (1)..(436): unsure at all n locations
cctgactaatatggacatcccgaccttcgatattgcatacctgcaacccacgattttctcgagctttcaagtactcccttcatcctaaattacttatcgcagaatggatataatttttttccgaaaatataagaaatgaatgtatataaaactaaaagtacataaaaaacgccacaaccctgaggagcaacgaatctacttttatcaaggattactactgactaactgcttcgttttgtataatatcgtcatgtttaccaggaaagaagggacgaaatttgcctgctcccctcgcgtgtgcccatccgtgctcccgcgtacgtggtttaatttgattgaaacaaaataaggcccggccccacctcattaaaatcagggggggagataattagattagaaaaaaaaaanaaaaactaaaaaaaaaaaaagcggccgc

SEQ ID NO: 447323 - DNA, 435 bp, Triticum aestivum
  unsure (1)..(435): unsure at all n locations
cggtcaggccattccgggtcgaccggaatggagcaaagattggagctgtacaatcgagttcctcccaatggattggtgctttatactggagttttactatccatagaacgcatggagttggccggcagcggcagagtatgggagcagtggtggcggcgtggcatatcagctctcctagagtgagctagttgcagtagaggctaaggaaatgcagtagtgaacaccaaagaaatagatacgaaacgtccgcccgcccgcgccaccgccgaatctggcagcaagcgcacccgtgcggccgagttgcacaacctctccgagaaggcggtgtcncgcttcnccgtcgttaaccacttttccctgagtttcgccccgcttttctactgttctcttctcgccctattttcccggctgctcattgcttgcttgcttgattgg

SEQ ID NO: 447324 - DNA, 237 bp, Triticum aestivum
acggtcaggctagtccgggtcgacgcggcaccgccggaggcattcatatagagtcataccttggtctaactatcaattggaaatcctggattggtaatctatataaattgtaagattcaccataataaaacaatggcccaatgtggagaagagattatggacaataagacttccacacatctcgagatggcatccgactttataaaaataaaagaggccaaagatgctcagcagctc

SEQ ID NO: 447325 - DNA, 62 bp, Triticum aestivum
  unsure (1)..(62): unsure at all n locations
ttcnnttttttttnttttttntttttttttttgntcctttntctggttcnttcttttttntt

SEQ ID NO: 447326 - DNA, 482 bp, Triticum aestivum
tcggaaatcaagggtcgaccggatcgcgtttgctgtgagcaaactgagccggtttgtttccaaaccgggtgatgtacattggcatgctgttgagagaaaggtactatgaactatggacttcactataccggatacccgtcggtacttgaagggtatagtgatgcgaattggatctctgatgctgatgagatgaaggccacaactgggtatatgtttactcttggaggtggcgctgtttcctggaagtcttgcaagcaagcgatcttaacgagatcgacaatggaagcagaattaacggcattagacacatctggtgttgaagcgagatggcttcgagatcttttgatggacttgccattggttgataaaccggttccggctatccttatgaactgtgacaatcagactgtcatcaccaaggtgaagagttcaaaggacaacatgaaatccaccaaacacataagaatgagattaaaagctgt

SEQ ID NO: 447327 - DNA, 82 bp, Triticum aestivum
ggacttggagaagaacccaccttgcaatgccgaagaaaatctgcgccccggactcatcgtcattgaagcctggttcaggggc

SEQ ID NO: 447328 - DNA, 515 bp, Triticum aestivum
  unsure (1)..(515): unsure at all n locations
gggnnnnacggttgcttcgccggcctaccggtcaggaatcccgggctcnacaggatccagcttacgtacgcgtgcatgcgacgtcatagctcttctatagtgtcacctaaattcaattactggccgtcgttttacaacgtcgtgactgggaaaaccctggcgttacccaacttaatcccttgcagcacatccccctttcgccagctggcgtaatagcgaagaggcccgcaccgatccccttcccaacagttgcgcagcctgaatggcgaatgggacgcgccctgtagcggcgcataagcgcggcgggtgtggtggttacgcgcagcgtgaccgctacacttgccagcgccctaggcccgctcctttcgctttcttcccttcctttctcgccacgttcgccggctttccccgtcagctctaaatcgggggctccctttagggttccgatttagtgctttacggcacctcgaaccaaaaaacttgattanggtgaaggttcaagtantggggccaac

SEQ ID NO: 447329 - DNA, 369 bp, Triticum aestivum
  unsure (1)..(369): unsure at all n locations
cggtcaggtatnccgggtcgaccgggatgacattgtaatccagcaggacttaagtccactttggtcggtacatctcaaaggcagggttaatggtgccgtcaaaacctgtggtgagattttcaatatgtttgatacgtatctcaacttctcaaaccctcttatcgccaagaaatttgaccgacgtgcatgtgggtgggcatatggcatgaacatgtttgatttgtctgagtggagaacgcagaatattactgctgtgtatcactactggcaagaacagaatgaacatagactgttatggaagttangaacactccctgctggcctggcgacattctggaacancacttccctctcgatcgctcatggcat

SEQ ID NO: 447330 - DNA, 466 bp, Triticum aestivum
ggatccagacaacagaatgtaaaaaaaagttacctcattttgcaatctattatgaattgattcaaccagcaggtttttgtcaaatcccagactgataactttaacaagagattcttcatcaatctacaaaatcatgagagaaaccaacaccttatttgaggacttaaatgaagaaatacatgactaaaaaatcctgtcagctcccatctggacagtcacacagaaaactgcaagattgactccaatacacataaaattttaagaaaccagtgagcactcccatgcatagcctcactaaatggcacaaggcagaagggtaatgtacagaccccagaaaaaaactttaaaatatatcattataaatcatgaagagaaatgatgggcacatttttaaccacatataaacttaaccaccaagtttatatgccttaataggagatatcaacaatataaaatatttttatgg

SEQ ID NO: 447331 - DNA, 465 bp, Triticum aestivum
gggactcactaccactagggagcatcatggaattggtgatgaaggagggctgatgatgacgatgatcgaagattcccctctccggacccccaaaccggctccacatctggcctcccgatgaagaacaggaggtggcggtggcttcgtatcgtgaaacatgatcaaacttcctctttaatttttctctccaaaagacaggtttttatagagttggaattagggttagtgaagccttgtgggacccactacccaccagggcctgctagagggggatggcgcgccctcatgcctggcgggcagccctccggtaggtcttggttccataaatcatcatttattccaacataattccccaaaaatttccttccaattccgagaacttttatttctgcacaaaacaacaccatgatagttctgctgaaaacatcgtcagtccgggttaggttcattcaagtcatgcaaact

SEQ ID NO: 447332 - DNA, 449 bp, Triticum aestivum
tcggaaatccaaggtcgaccggcctggtatttgcagatatttgaactatttagtcgccataatattctcttgggctcgcctggaacctgcgtagaccaagtacaattttggtcttaagttgtagaagtgaagatgttaaatattttctaatgttcttaccaaaggaatgtgtaaataaatcatatatatatatatagcttgttcgcacgatagagcggacgacttaggtgcatagttgaaaatgtgcgtaaaattctatacaagcatacacatcttttacggtttgttatcgtgttaaatcatagcattcctttttatgatgattgtgcatgtaccttgggtatgtattctgcaaccttgacaaccggcctccactcttctgggggaggagctcgaacaagaatcaagaaggagccaaaggagtttacacaagagttaaagcatacaaa

SEQ ID NO: 447333 - DNA, 328 bp, Triticum aestivum
gtcggccggggatcggcggcaaacaacagcttcgaggccgaggtgaggacgcttggcaagattcggcacaagaacatcgtcaagctcctgtgctgctgcacgcacaatgactccaagatgctggtgtacgagtacatgcccaacggcagcctcggggacgtgctgcatagcaggaaggccggtctgctggattggccgacgcggtacaagattgcactggacgcagccgaggggctgtcctacctgcaccaggactgcgtcccggcgatcgtccacagggatgtcaagtccaacaacatcctcttggatgcagagttcagcgcttgcg

SEQ ID NO: 447334 - DNA, 413 bp, Triticum aestivum
tcggatatccagggtcggccggtcctccacggcgtagtccatttgccgcgacctcgccgccgtcagatccgacccctctagtactagtttagcgtagtatgtagtataactatgcttgtagttttttgatcatgtgatgaactatgtagtatgtgatgaactatatttgtgcaatttctcccgcgaaagtgttttttcaaattatgcaggtttagatacgggttctgttcggccgcgctagttttcgacccgcaaacgcgatcttcgtggaaccgcaaatgcgttttgcgggtcaaatttttgcagggtctgctagagttgctctaagcacacacatttttgcttccttgatagatattctggtttttcgcaaatacctatttcccaacctaatcaagaaaagaccactttta

SEQ ID NO: 447335 - DNA, 184 bp, Triticum aestivum
acatggcaagtacaacttcgactgcttcaaccacagaaaggcaatgctgatccgccggttccgttgccaagccaacgcaaggtaaccaacctaaaagggaaacaaacaaaggatcctgaagggcctcaaccaaggcaacttccttgccctgatccttgcgcccctggggttcccaacggaaaaa

SEQ ID NO: 447336 - DNA, 341 bp, Triticum aestivum
ccctgtcctgctaaacccaagctctaatgtggttgacttggaagtatgccattctttcactgtgaggatcttcttttagtctgtatgcaccccttgcccactaatgacatgacccaggtattctatctgtggttgagcaaatgaacatttattcaacttcacatatagttgattctgcttcagaaggtcaaatacttgctgcaaatgggtgacatgatcttgcaaggatttgctgtagattaagatgtcatcaacataccctcgttgtaacttccttcttcatttaagccacaattttgtccacagcattctggacggttggtggtgcacttgtgagccca

SEQ ID NO: 447337 - DNA, 251 bp, Triticum aestivum
  unsure (1)..(251): unsure at all n locations
gggtacataagggacactttccagaacgtttcagactccgaaaaaggaataggtacttggaacggtaagtaaaccgactcaaaaacatttctaagggcaattttcctccgttttgaaatatttacaaaaataggaaaataagaagcagtccgggaaagacacgaagcntccacgaaggtgggaagtgccgcctaccccctgggcgcgccccctgcctcgtgggcaactcgtgtgctcccgggactccgttt

SEQ ID NO: 447338 - DNA, 482 bp, Triticum aestivum
acggtcaggcacgtccgggtcgaccggaatcccatgagcatgaggaaaggaaagctttgtgctgcattggtgttttaagtctttgagcagtcaaatgagctaagctcctgtgaatgaaacgcctgtcctgctaagcccaaactctaatgtgcttgacttggaagtaggccactctttcactgtgaggatcttcttttagtctgtagccaccccttgcccactaatgacatgacccaggtattctatctgtggttgagcaaatgaacatttattcaacttcacatatagttgattctgcttcagaaggtcaaatacttgctgcaaatgggtgacatgatcttgcaaggatttgctgtagattaagatgtcatcaacaaaaacaagtacacaaaccctagtcagctcagccagaattgtgttcatagcactctggagggtgggtggtgcatttgtgagcccaaatatcctaaaattcatagtga

SEQ ID NO: 447339 - DNA, 521 bp, Triticum aestivum
  unsure (1)..(521): unsure at all n locations
gggnnnnantaattgtctcgnnnatctaccggtcaggacncccggggntgncngttaacgcggganataacatgagctgtcttcgggtatcgtcntatctcactacnnagatatccgcccgctctagaggatccangcttacntacgcgtgcatgcnacgtcatagctcttctanaggtcacctaaattcaattcactggccgtcgttttacatcgtcgtgactgggaaaaccctgcgttacccaacttaatcnccttgcagcacatccccctttcgccagctggcgtantnnctanaggcccgcaccgatcncccttcncaacagttcgcancctgaatngcgaatgggacncccctgtancggcncattaagctcgngcagggtgtggtggttacgcgcagcgtgaccgctaacntgcaagcgcctagcgcacnctcctttcgcnttctttccntccttctcgccaacttnncgggcttcccccntnnangntccanaancnggngggccccccttaag

SEQ ID NO: 447340 - DNA, 418 bp, Triticum aestivum
ggtcgaccgggcccgagcacaaatgacattctggacgcgcacattgcatgcaaaagcggtggttaccgcgtgcaggggtgcacacagtggcacacggccggccaaacaatgtctgggggcttgtccttcctggggaggttgcatctgatgtggtagattggttaaaagtgacacggttaaatggcagttaacacctgaagtttattgcagtaaactttgaggagcactggcgatccacaggagagggattggaaacaatggagttgtctggtagatttagggttagaaggactttcatcctggtaattttgagaagaattggaccactaattaatatagttgctttacaactaagtaatccggtccagaatgaagatcatgatgatgctctcaaatggagaagccacttgagctaaac

SEQ ID NO: 447341 - DNA, 259 bp, Triticum aestivum
cttacccccggtatgtagttcgggcaagccctgaaccggaacgggcgttggctgcaaaattttttgggcgcaaaattaacaaaaggtggttttaattcctaagttccttaagttttccaaccttgaccgatgtttgggcccaaaatgtccggaattttaagcctttttgtgttaccttttcctgccgtggttaaaatttttttccctctaggtaatgacatgagcaatttttaagaaaaatttatacccataccaattt

SEQ ID NO: 447342 - DNA, 512 bp, Triticum aestivum
  unsure (1)..(512): unsure at all n locations
ggnnngaantggtctctttaggccngccgtccggnagncnaanggtcggccagctcactgtcggnngccgctctagaggatccaagcttacgtacgcgtgcatgcgacgtcatagctctctatagtgtcacctaaattcaattcactggccgtcgttttacaacgtcgtgactgggaaaccctggcgttacccaacttaatcgccttgcagcacatccccctttcgccagctggcgaatagcgaagaggcccgcaccgatcgcccttcccaacagttgcgcagcctgaatggcgatgggacgcgccctgtagcggcgcattaagcgcggcgggtgtggtggttacgcgcagcgtaccgctacacttgccaagcgccctagcgcccgctcctttcgctttcttcccttcctttccgccaagttcgccgggttttcccgtcaagctctaaatcngggggnncctttangggttcgaattaatgcnttacgggaactcnaacccaaaaaactttt

SEQ ID NO: 447343 - DNA, 353 bp, Triticum aestivum
cccaattatcccccaaaccttgattaaggttccccaaaataaggcccaaaaaatggtgccaaaatcccaatcccgccagaatggctaaggggttaatcctggggccggaatgcaaaaagggaaaagccaagaccaatggttcttggaacaatccaatgaccaaaggaacaaagcctcaaggtgtctaaaaaataattccaaaattggttaaatttgaagcctaaaccaaggaatttaacgggcccaaccttggggaaaattttgaagaaaatgtaaaaggcaattccccaaccttcgaatctcaatccacaaaaccttgacaatgaaaacccaacccagtttccaaaaaacaa

SEQ ID NO: 447344 - DNA, 434 bp, Triticum aestivum
gtcggccggagcatcttctgggatggaagcggttgcggagggcaaggcccagtaaccctgaaagaagaaagacggccctgcccctgatgtttggaaggaaaggggcgtgtgttagctgatgtaatgttacaccgtagaatcatcgttcgtgacgataataatgatccgaccagaactcctctagtatcattgttctgttgtcattgtgtagtttactctgtatctgaactttgttttactcagcgaaaccgtactgctatgatgaatgtgtcgatgtaaatcgtggctgtcgtgcctgtctgactgatacattgttcatgtagtcgatgaatgatagcacctgtgtcgtctcagtttcaaaacaaaaactcaaatcaaacaaaaaaactattatcaatagccgaaaccaaccacaattaaattatccaagacac

SEQ ID NO: 447345 - DNA, 321 bp, Triticum aestivum
gggtcgaccgggtatgtcgtgaaaactacatatttctgctgaagaaactacataatagttttactgatcgaggaggaaattacttggcttcaatattggtaatggtagggagagaaagaatatgccattctctctagctggaaaggacactataccatactggatgttataaaaaaatttggtcatgcccccggaaacattgaccacctcaacgttgactctatttccgttacaatcaatcaataactggtataataccatgacccgtggcctgcttcttggcatatttgtggttgttcaaacctcaacaataaaggtttg

SEQ ID NO: 447346 - DNA, 249 bp, Triticum aestivum
tccatgggtgataagataaactcagatgcagatgaccacaggttcagtgcgtttaaagtatgtatatgcgcagctgccgtaggtacagcttgacaactccttaggccgctcttgggagaccggtttatattttccaccagtattaatctacaaagggtattttcctgtgcacacctgagatacaagtgtaacgaaaacacgattgtaaaattctggatttctgctaaaaaaaaaaacatcatcaacaac

SEQ ID NO: 447347 - DNA, 464 bp, Triticum aestivum
gccgtgagtaatagtgcagagaattcaccagaaaaataattcaattaaattcttaccagaattagaatgcccccaagaattttaagttaacaaaatggggaaaaaaaaacattacaaccgtccggtgtacggtcacaaagcacaacagccaaagtctgctcacttgcgtactgacatgacatgttggatccatccaaccaagtgatatggcgttatctaccgtgctggctagctagtgacccactgaccgctgaagtactgaacccatatacaccacgatagtattctggtcccatatgctcctgcagtccctacgtcgcgtggcttctagtatttcacgatgcatgataaatacttcctccatcctaaaattattgtcttagatttatctagatacagatgtacctaatactaaaatgtaatttgatacatccgtatttaaacaaatctaagacagaaatttt

SEQ ID NO: 447348 - DNA, 179 bp, Triticum aestivum
gtcggccgggacgcgctcactaagtacaaggcgaggaggcggttgcaaacccggctccttaacaaggtccccaacttcattggcaattgcccggaatggcaacaccatggtaattgaacccttctggcaaaacaaccggttacccaatccaatggccggaccctccggcttttcataaa

SEQ ID NO: 447349 - DNA, 515 bp, Triticum aestivum
  unsure (1)..(515): unsure at all n locations
ggnngagtaatttgtccaggncgnncatcggtacacacanntcgggtccgtcngaggggagaaagagattggtaactttgtgcatgaganagagacagagggtgggggaggagtcagtaagccgtcgtcacatcaccctgcttccaaatgaccccgcattctctagcgcagtgtggtgccgtcttcgatctgctcgatgccctctttgacgattgaggtgttgtgcatgttggggtcaaagaagcacaagcgagagtggtcaccgtataaccttggatggggatgaattgtgtgccgggtgtgtgtgtgtgtgtgtgtgttgtgctccatgtgtgtgtgtgtgtgtgtgtgcattgtgtgtgtgtgtgtcagatattganaagaaaaaactaaggagaaaaatgggtattcacaanaaattgtgcgggccttgaagtgggcanggcccgngtganggtgtcaaaatgtgcgcttgaatgcatgtgttgcatgccatnatccnagggatggatgaa

SEQ ID NO: 447350 - DNA, 512 bp, Triticum aestivum
  unsure (1)..(512): unsure at all n locations
gggnnngaanggtnctcaggncgccgtccggaanatcaagggtcgnccagctcactagtggnggccgctctagagggatcnaagcttacgtacgcgtgcatgcgacgtcatagctcttnatagtgtcacctaaattcaattcactggccgtcgttttacaacgtcgtgactgggaaaccctggcgttacccaacttaatcgccttgcagcacatccccctttcgccagctggcgtatagcgaagaggcccgcaccgatcgcccttcccaacagttgcgcagcctgaatggcgaatggacgcgccctgtagcggcgcattaagcgcggcgggtgtggtggttacgcgcagcgtgacgctacacttgccagcgccctaacgcccgctcctttcgctttcntcccttcctttctcgcangttcgccggntttccccgtcaaactctaaatccggggntccccttaagggtcccaataatgcttacggaactcgaacccaaaaaactttttttggg

SEQ ID NO: 447351 - DNA, 482 bp, Triticum aestivum
  unsure (1)..(482): unsure at all n locations
ggtcaggtatnccgggtcgacgcggagcttaatcttccttctgctaatgaattgattagttctcagtcaaacaatgaggcaaatgttagtgcgcgcacacatcaatttcctaactaaaatcagaaggctgtgagccatttgatttattttaattgcatgctttttccagggaaatctggaaagcacacaggaagtgcaggtgaacccaacgagcttatctcaatacagggacatccagagaaagattgttgagtttatcagaaagagataccatattctggaaaaatgcttggacattgaatatgccgtgataaaaacaaatactcctgttcctgatgatcttactgaacaaaatgttcctatgggacatagcccagctgttccagatatcagtgaagtgttgagagaacttccccctcttgtaccaatttctgccaaagaagtggcttctgatggctcaactgaccangcacacctttccc

SEQ ID NO: 447352 - DNA, 366 bp, Triticum aestivum
cgggtcgaccggggatgaaagataatggccattgatgtctccattaccatcatatggatatggaagagagcgcaagggacctcgatatgggagcctcatacatggtcaagacctgaaggatgtgattataaccggtcataatggcactataaatgggcaaggccaaagttggtggatcaaatttcgcaagaaactcctcaatcacaccaggggtcctcttgttcagctcatgcggtcaagtaacattactatttctaacatcacattacgtgattctcccttctggacacttcatctatatgactgcaaggatgtcaaagtctcgggaactactattctggctccaattgctggggctccaaacac

SEQ ID NO: 447353 - DNA, 429 bp, Triticum aestivum
cggtcaggtataccgggtcgaccggggcggtacgaagggtcagaattttcagaagatacatttattgctaaagttaaaatggaaatagtcgtgtgcaaggagcaggttgagccagtaattgacaaaataattgagaaggccagaactggagaaattggtgatgggaagatattcttgatacccgtcgcggatgttgtaagggtacgcaccggcgaacgcggagtgcatgcggagaggatgatcggcggtctgtcagacaaactgcctccggtgatcacaatctcatgagtagagcttgactgctcttgctgcctgtaactgtaagcgcatccctcaggctggttgcttgtggccgtgtgtgtcttgacctttggggaataatgtgtatgtaactttgcgtgttggcacgaataaattggcaccagcatc

SEQ ID NO: 447354 - DNA, 425 bp, Triticum aestivum
gtcgaccgggagagtgaggacaaccggatgatgaccacgggcctgcacaccgtccgcgacatcttctgcgtcgcctgcggagccatcctcggctggaaatacgtgtctgcatttgacaaggatcagaggtataaggagggcaagttcatcctggagaggtgcaagatccattcgggcggaggcggccctcccgaccgcatccagctgtgggctgagcatgacgctcgcataagttccagcgaggatgacgaccagggcgccgtgtgaccttgcaagacaatgcaagatcagttcattaggcaggcagacatgacatgactgtaaatattagtgttaatcagcgtcgttccgttccctggcactgcaaatcatgtagctgctcgctagatgaagaaccatgaatgcttaactatctatgcatatgc

SEQ ID NO: 447355 - DNA, 396 bp, Triticum aestivum
gtcgaggcggccttaccgcaaggggctccgtcacaacctatacttaccgcgtggacacggacggtcgcacacacttaaactcgattgggtggaagagattcctcgatggcaagaatcttcgtgttggacaggtcatcctaattactatcaggaacacccaccgcccaggcttgaggatgatgatcgtatttgatatcatctagaactatatatgtgtgtgtggctatatcatctagaactacatatgatgatcgtcgtcgatatcatctagaactacatatgatgatcgccgtcgatatgaccttgtactgcttgaggatgcatgttgactatacatgaaattgttatctagtactcccttcgttccaaattaatcgtcgtgggttggactaaaac

SEQ ID NO: 447356 - DNA, 156 bp, Triticum aestivum
ccgtgttgagtacaggcgtgtcgtgctgcttctgatgggttgtcggggcagcgaccggtcggcattgttgtatacataaactatatcacatcacatatattttttccttgtgtctatgggcgcataattgttttaatctatggcccatttgtgcag

SEQ ID NO: 447357 - DNA, 285 bp, Triticum aestivum
  unsure (1)..(285): unsure at all n locations
ctgcaagatggaccatggttgtatccggacaattcaatttgtgttaaaacacacaaggtggcggcctaaataacctgacatattgccaggaatattggttaaattaggaaatggaagtgatttcagcgacaacaacatggaattttggtaatgatggtggacaattcctgggcaatggaaaacgcgacgcagggtcangggcttgtgcccttcggtgggaaaacgagtaacatgttgttcgggctggagttcgtgatggccaatggttctctacaatggggactg

SEQ ID NO: 447358 - DNA, 289 bp, Triticum aestivum
gtcggccgggcaaaaaaatagtatcaatgtgcttcatggccaagtgacggttggcatactcgtaatgcaagaatgtgccggtggtcctccggttggaactcctccaaatttgaaccgggcctccgggtcctcctcaagggagttgcgtccaatgacaaaaatcccctggtgctattaaatatccgttcctggggaaatctctctatccctctcccggtacattgtgtgcccttgggtttcttaaagctgatgataaagtctttcctcctcagacaaaatgaactgtacc

SEQ ID NO: 447359 - DNA, 249 bp, Triticum aestivum
gggtaaataagaaattagagttatggctagatacgtcggcctgtgaattccgattgcccaaaccggaggcataggtaggtcgataatcatgccttacgatcgcacttgtccaaaacttacggtttgtcacaaaagtacccccaccaatttgaactaccgggcctttcggctcaggtttataccggggatttcccctgttgggattttgacacctgccggacttttcgcgcgcgttgtaatttctggata

SEQ ID NO: 447360 - DNA, 370 bp, Triticum aestivum
  unsure (1)..(370): unsure at all n locations
acagtggttttgaactgctcattgatgccaaattttgtgatgatatatgggtgtgtgcctggggcatgctaaaaagtgcgcagattgtgcttggagttaccaaagctggcgccgctgctatatctggatagcaatgaagtgggtgcaacagangagaaggagattcttgagctttggagggtgctgaaggatgagctgtgtcttccgctgatgatatctttgtgccaactcaacgggttgcgcttgccgccgtgcttgatggcattgccaggtgatctgaaggctaaagtcttggagtttgttcctggtgttgatcttgcaaaggttcagtgcgcatgcaaggaattgcacgatcttgcaacagatgata

SEQ ID NO: 447361 - DNA, 394 bp, Triticum aestivum
  unsure (1)..(394): unsure at all n locations
cggaggaaaagcaaanaccgaaaacggcaagggaccccggggcttcccgcaacccccaatggcgggaaggaaaatccgcctcccctaagaagcaaccccatgcccaccgaaaggaccggggatggggttactaacaaccttcagctatgcttacaaaacaaactttgggggctcccaaggccagttcaccaagctaacaaccggcggcaacttgaaccaaaatgccccattacccaatgggaaactaaacatggcaaaggaaacacctccattaaaattataaaaaccaaagatgacaccacctaaataaatttgggtttttatgccaccctaagggatttaaaaaaacgcttgttggaagccaaccccattttatttttgtcctttgcttttt

SEQ ID NO: 447362 - DNA, 77 bp, Triticum aestivum
gacccacgacttctttgtcctttcccaattctacacaagtttatttgactaggttgctctcgaggaagtccttaaaa

SEQ ID NO: 447363 - DNA, 406 bp, Triticum aestivum
cgccccataggaaggagtggcgacgccggggctgctaaagcactggaccacggcgtggagatggagacagaggttgtcgtcaccgccggcgagttatcgttgcaccctgacgtcgtcgacggtgtcgagcttccacagccggaggcagagttccacaccgactccgacgaccactccggcgatgactccgacgaccactccggcgacgactccgacgaccactccggcgacgactctgatgaccactccggcgacgactccgacgacgacggacagctggttagtcatctatacccatttatgtgtcaaatagatcatagggtttctctggttaatcctgcctccccctttttggaatagaaatcctatggttatgttctcccaatccatgaaatctgagtaagtt

SEQ ID NO: 447364 - DNA, 511 bp, Triticum aestivum
  unsure (1)..(511): unsure at all n locations
gnnnnnnnaantgtctcgncgnncaccggtcaggagncccgggtcgnccagctcactagcggaggccgctctagaggatccaagcttacgtacgcgtgcatgcgacgtcatagctctttatagtgtcacctaaattcaattcactggccgtcgttttacaacgtcgtgactgggaaaccctggcgttacccaacttaatcgccttgcagcacatccccctttcgccagctggcgtatagcgaagaggcccgcaccgatcgcccttcccaacagttgcgcagcctgaatggcgaatggacgcgccctgtagcggcgcattaagcgcggcgggtgtggtggttacgcgcagcgtgacgctacacttgccaagcgccctaacgcccgctcctttcgctttcttcccttcctttctcccacgttcgccggctttccccgtcaaagctctaaatcggggggtccctttagggttccgtttaatgctttacgggncctcgaacccaaaaaacttgnt

SEQ ID NO: 447365 - DNA, 394 bp, Triticum aestivum
atccatacagaactgaaggacgggaaataggatgggacagagagagaggagagagagggagggagaggggtagagtgctggatgggtgatggagttgcttctcgaagagtggggatgtgtttctgtgtgtgcctgtgcgtgatagagctgtcgggacgcatccatggatgatgaaggggaaccatgtgtttggtaagcaaacctaactagatcggtagatcaattgttgtttgtcggaggaagggagagacataactaatgaggtagatcgatcgacgcgtggggaaaaacgagttataaggacctagctagctatatgtatagcgggagatcggtcggtgtacgtccatttgttagaggcaaataaggcccggcgagacggatagacagagag

SEQ ID NO: 447366 - DNA, 462 bp, Triticum aestivum
ggtcaggaaggccgggtcgaccgggacccgcactgaaaaacggtctaccaatagacatgggtggaacatacgactgagctggggaaggcaccacataggatggcctcggtgtatatccggaaggaagagcggagtttggaacccaaatccggcgcttctgggaactagagccagaggaagatcccaatatacgggtgtgcttacgagactcctcgtaagtgagctgagctgtctctgcattgatggccttgttcacaagggcttggaatgtatcacaatgatgcaggtggaggtcacggcgcaacttgggggttagaaccctttggaatctagcctgcttcttggcgtccatggacacttcttctgtggcataacgggcgaggttctcgaactctctgctgtaagcatcaacagccatcttattctgggtgagactacagaactcttctctcttgcgatcga

SEQ ID NO: 447367 - DNA, 465 bp, Triticum aestivum
gggtcggcccctcgaccaatgacactccatcccaaccccaccaatcttcaccgctgcttgacgacatggagctgaacaccgctgcaaccatggtggcgccccctctgaccaagggattgcgacgccagcaaagcaaaggaagatccgcaacaaaactctgcaaggttaattcactgatctgtacttcaaacttgattgttgaattgtactaaattccatacccggtcttccggtggcctccctgcaaaaaaattgagatatctcatatattggcaaagctaatgcctgagagggagctaccaaacaagcatgctttatatttgggacgtgcaggctggaaggatcattggtaattgatcctatcaaaggaaggtgcgatctccagcctgaaggaatggctggttgattcagctataggaagcaatcctgttctgcaattgattgctggaatcgtatttatgcaag

SEQ ID NO: 447368 - DNA, 280 bp, Triticum aestivum
cgggccgactggagagccagtggaaagcaagcacgggaagacgaggactatcgcgagcggccggcgagcacacagatctggcatgcgcgctcgctgtccttttttttgtgtttcctgtgcgtgtttttttttctgcatgtttgacttttaaaacaaagcaatcagacggtggggaacggatgtatcgggcggctggggcttgaccggacgaacagttcggccggtgcgccggcgcctataagcgcccttatctttaagcaaccaatttggagttttggac

SEQ ID NO: 447369 - DNA, 395 bp, Triticum aestivum
cgggtcgaccggcggccgtagatagttcatggtcgctactcactccgatggaggccagggagcatttggttactggatctatccgctgggagatggtagctcgggatatcttcaaccggtttggatggcagtcatgtaatagggtaggcaattagtttacctatttatctttagccagccggttgtggcgtcttatcttggctagtctgtgtgtccagcctctttaactctgtgtgagctgtctttttactacttttcggtcggagactttggaaccttgttggaactttttatttcgttaataagatggccgtatgcatcactctgatgcagtggccggggagatccccttttcgaaaaaaaaaaaaaaaaaaaaaaaaaaaagcggccgctct

SEQ ID NO: 447370 - DNA, 405 bp, Triticum aestivum
cgggccgacgggagagcgcgcggcggccgacgggcgatggcggcggcgacagcgggaggagtttgatttgggggacgtggtcgtggggaagaacgaaccgtgcggttaagtcagaagtagcagtagcgcgttccaagaagtgcgctactgctaagctagctacagcgcattcctctatacgcgctactcctattcctttttcttttttcccctttttcatttatttttctttacattttattttttttcctttcacctttttctatttctttcattttcatttactttccatttaattttatttcctttagcagtagcgcctttcatcgtaaacgcgctgctacaaagcaggtagtggtagcgcggttctacgtacatcgctactactatgcgtagcctatcggc

SEQ ID NO: 447371 - DNA, 96 bp, Triticum aestivum
gacggggtagtaagacacgcttgacttgctttaaaaaaatacaacaaacgatgtatacatgtattatctgaaaattaataatatgagttccaccgc

SEQ ID NO: 447372 - DNA, 405 bp, Triticum aestivum
ggatcttaatgtaggagaattcccagatcttaaacttcttgttgactgggcagtcaattcgggttttcatcttgttcagctccttcctatcaatgatacttctgttaacaagatgtggtgggattcatatccatatagctcactctccgtatttgcgttgcaccccttgtacctgagagtgcaggcgctttcagatgctattccagcagatgttaaggaagagatttcgaaggcaaagaaggagttggacaaaaaggacgtcgactatgaggcagcgttggccacgaaactcagaattgcccaaaaaatatttaatttagaaaaggacaaagtgctaaattcagctccgttcaagcagttcttatctgaaaatgaggaatggttgaagccatatgctgcattttg

SEQ ID NO: 447373 - DNA, 458 bp, Triticum aestivum
cgggtcgaccgcacctgaatacagaaacctccaatctgcagtgtacatggaatagcgcagtctatggtcacatcatccccttccccttcaaaagaaaccgtcctcggtttcgaggcagtctttgcaaccttcttcttcaatgtgacatgtccatccccttgattgcgttctcaaacatcggccgcagcacgcgtcgcttcctagaatcccagaatgaatatgtattcgtccgaccttcatgtgtagcattgtgatcatattgccatggtctccccaataacaagtgacatgcatccataggtatgacatcacatatcaccatatcagtataatcaccaacataaaatttgacgcgcaccttatgagtaacctttaacttccctgtatgatacatccactcgacatggtgggggttgcgggtgcttccatacaggcaaccccaaagcttcaacaaaccc

SEQ ID NO: 447374 - DNA, 311 bp, Triticum aestivum
aattcccgggccgacggggggcctcaaggaggccttccagaagcccaatggctggtccaacaccatcggcatcctcctcctcttcatctacccggtctgggccgtcgtgatgtggttcctgtagaccgttcgccgctgttttgcggttcatcgtgtgatgtttgctccggcgatttggtgtcgatgaaccatgcgctcttgtacctgttgaattttgatgaactgtctcggccatgtttcgatttggtgtcacttatttgtttccttcatctgtgggtacatagccatcaataaaaacatttgctctgttg

SEQ ID NO: 447375 - DNA, 465 bp, Triticum aestivum
  unsure (1)..(465): unsure at all n locations
tatttagccnggncaggtaccngtcngngaattcccgggccgacgagctcactaatcggggccgctctagaggatccaagcttacgtacgcgtgcatgcgacgtcatagctcttctatgtgtcacctaaattcaattcactggccgtcgttttacaacgtcgtgactgggaaaacccggcgttacccaacttaatcgccttgcagcacatccccctttcgccagctggcgtaataggaagaggcccgcaccgatcgcccttcccaacagttgcgcagcctgaatggcgaatgggagcgccctgtagcggcgcattaagcgcggcgggtgtggtggttacgcgcagcgtgaccgcacacttgccaagcgccctagcgcccgctcctttcgctttcttcccttcctttctcgccagttcgccggctttccccgtcaagctctaaatccggggctccctttagggttc

SEQ ID NO: 447376 - DNA, 372 bp, Triticum aestivum
cgggtcggccgggacgaaggcgataagtactgagttgatcaagcatgggtacgtgcttaattgggtggcagtgttgtgcacttcatgccgtatgttgttcttctctgtccctgtttgcttgccgttgcatctgtgatgttcggtggttagcagagtacaaaaattgtcagattggttcgggtgcactgacggctcggtgccacatagtctgtgaggaggtggtatcgatacatcataataatgaacgaagattttttgtactgcaagttgcaggggtatgtcttcctttgttttgttatgaaagcaaagcatgttagaccatacgatgtctgttaaaagaaaagaccatgcgatgcaaattttattagtcct

SEQ ID NO: 447377 - DNA, 264 bp, Triticum aestivum
gggaactcagtcaacacaggcgaccaaacgcaaaacattgctttcctaattcagcctggctatatatgaggcttaccaaactacatgaagaacatgatttttaccggtacgtactcagcgaggttctgtcacagatggaatgaggcaaaaaaatgatgcggtctacgaaacacgtccttaatgatttttagcattcgtgggccgacacagttacgcagggctcataatgtgggctctacaatccctaaaaaaagtgggctctac

SEQ ID NO: 447378 - DNA, 118 bp, Triticum aestivum
tgaagttcataacaaactcactttggaaaattttggtcatgccagttcacatgttccaattattttaacgattcgtgttcaaaactcatcgcacaccacaatttagctttaaacacac

SEQ ID NO: 447379 - DNA, 464 bp, Triticum aestivum
gggggccaagcaagcacaaaggccaaagcaaagcggtggataagtaccactctctcctgagccctaatgcaatttcatcagggcgggcatataaaatctaggggcctgtttgttcttggcctccccatacctctcgttccatggggatctgtggttggattggataaaagatgtcgtgtgtgtgtgtgtcttcaggtcccttgggttcccaccccaccctctttttactggggcgaggccacgcccggtgctgttgaaaactcacgcggcggcacatacccacagataaagatgcaagaatttaatcgtggagttgccattggacaagatggccagcctcctcctaccgtccagtgcctctccatctcactctctttcaacctgtcatgcactagtagcactgctgcctagacgtagtagctggatgctgcccagagtggctgaaagaaggctgctttcggcac

SEQ ID NO: 447380 - DNA, 453 bp, Triticum aestivum
acggtcaggaataccgggtcggccggacctaagttagcaaaaaacgatccatttcacctaaattagctcttaaatgatccatttcacctaagttaggtcataaacgacccatttcaactaagttagctcataaaagctcataaatgatccatttcacctaagttagctaaaaaacaatccatttcacctaagttagctcacaaacaatccatttcacataagttagctcataaacgacccgtttcaactaagttagctcataaatgatccatttcaactaagttagctcacaaacaacccatttcaactttgttagctcatatatgatccatttcacctaagttagctcataaatgacatatacttcttgttctagtcttcttcttgttctagtcacctatttctaactttcttatttaccattttgcagatttcaattcacttcatggaagc

SEQ ID NO: 447381 - DNA, 481 bp, Triticum aestivum
  unsure (1)..(481): unsure at all n locations
gggnnnnngnaacttntattnggcgncaccggtcanaaaatcccggggcgcnagaggatcaagctnacgtacgcgtgcatgcgacgtcatagctcttctatagtgtcacctaaattcattcactggccgtcgttttacaacgtcgtgactgggaaaaccctggcgttacccaacttatcgccttgcagcacatccccctttcgccagctggcgtaatagcgaagaggcccgcaccgtcgcccttcccaacagttgcgcagcctgaatggcgaatgggacgcgccctgtagcggcgattaagcgcggcgggtgtggtggttacgcgcagcgtgaccgctacacttgccagcgcccagcgcccgctcctttcgctttcttcccttcctttctcgccacgttcgccggctttcccctcaagctctaaatcgggggctcccttttagggttccgaattantgctttancggaactcaacccaaaa

SEQ ID NO: 447382 - DNA, 356 bp, Triticum aestivum
cgacggggaggccgggtggcccacccaggcggagcccgggcagattggcgtcggggtgcaggaggccagggacttcaacgagggcatgattcgggtgtgcagcagcggcaagggcacgccgctgatgcccaacaggacgttcgagacctacctcttctccctcttcgacgagaaccagaaaccagggccgatcgccgaaaggcactttggcctcttcaacccagacttcacgcccgtctacgacctcggactcctccgggacggcgcgtccgtggctccaaccccttcgccgaacccatcgcccaatccgagccctaagcccgcgccgtcgggaggccggaagtggtgcgtcgcca

SEQ ID NO: 447383 - DNA, 483 bp, Triticum aestivum
  unsure (1)..(483): unsure at all n locations
tgnnnnnnnnnnattntntagcctggncaggtaccgntcanagaattcccgggncgacggctcactaatcggcggccgctctagaggatccaagcttacgtacgcgtgcatgcgacgtatagctcttctatagtgtcacctaaattcaattcactggccgtcgttttacaacgtcgtactgggaaaaccctggcgttacccaacttaatcgccttgcagcacatccccctttcgccgctggcgtaatagcgaagaggcccgcaccgatcgcccttcccaacagttgcgcagcctgatggcgaatgggacgcgccctgtagcggcgcattaagcgcggcgggtgtggtggttacggcagcgtgaccgctacacttgccagcgccctagcgcccgctcctttcgctttcttccctcctttctcgccacgttcgccggctttccccgtcaagctctaaatcgggggctcccnttagggttcgaatt

SEQ ID NO: 447384 - DNA, 384 bp, Triticum aestivum
gcggatcttgataagccatcagagaaagaagttgacactgttgtcaagccatcagaggacagcatggctgttgaggagcctgtcaccgacaaaccatcagtggaagatgaagccagtgctgagccatcaaacgacagaatagatgccgagaaaccatcagaggagaaagaagacgacactgtgaagtcatcagaggatagcatggctcttgagaagccagccactgacaaaccatcaaaggaagaggaagaaggcgcagccaccgagaagccgtcgcatgacgatgctgccatcgaggcaccatcgcaccacgacacggactcggccaccgacataccctcgcctgccacagagacgaacatatcagcctgagctcaacaagac

SEQ ID NO: 447385 - DNA, 90 bp, Triticum aestivum
cgggccgaccgggaataaaagataagtgaagaaagcaggggcttttctgaaatttttgtaaatctcgtttttatctagtcctttcctgtc

SEQ ID NO: 447386 - DNA, 504 bp, Triticum aestivum
  unsure (1)..(504): unsure at all n locations
gnnnaataatnngtcttgccgntctacggtnnagacatcccgggtcgaccccaaaaaactnatnagggtgatggttcacgtagtgggccatcgccctgatagacggtttttcgcccttgacgttggagtccacgttcttaatagtggactcttgttccaaactggaacaacactcaacctatctcggtctattcttttgatttataagggattttgccgatttcggcctattggttaaaaatgagctgatttaacaaaaatttaacgcgaattttaacaaaatattaacgcttacatttaggtggcacttttcggggaaatgtgcgcggaacccctatttgtttatttttctaatacattcaaatatgtatccgctcatgagacaataaccctgataaatgcttcaataatatgaaaaaggaagagtatgagtattcaacatttccgtgtcgcccttattcccttttttgcgcattttgccttcctgtttttgctcaaccaana

SEQ ID NO: 447387 - DNA, 400 bp, Triticum aestivum
gggtcgagtagcagctttgagccggttcataagccggttgggtgagaaggctatgccgttgtatcaaatgatgaaaaagacggatgactttgtctggagtgacgctgccaactcctcctttgaagatttgaaaagacagcttgctgagccacagtttcttgctgcccccgttgagaaggagccgctattgttatatgtggctgctaactcacgggccatcagtgtggccattgttgtggagtgcaaggaggctggcaaggaacatccggttcaacgaccggtttactacgtcaatgaggtgctcattgaatccaagcaaagatatccacattggcagaagcttgtttatggggtgttcatggcaagccggaagcttaagcattacttccagggtcatcct

SEQ ID NO: 447388 - DNA, 406 bp, Triticum aestivum
gggatgtataacattccaaattgaaaatttgggatgttacagtacatggaatatgctggcaagatcacactatagagcaatgatgaataatagctatcactacatgcatatttggccggtggaggctctaagtttaatgtttgcataaagccgattttccctacaacaaaggaataacttttatttgctaccaagttgaattacccatattgagaaggtttctccaactcaatcccaaattaccaagtataaaatactaacccaacaatttcattagacagaatgatgagattaacatataatccaaataccagatactcaagatgtccataactggggacacggctaaccatgattagtttgtacactctacagaggttgcgcactttttccccacaagactcga

SEQ ID NO: 447389 - DNA, 391 bp, Triticum aestivum
gggaagcagcaaccaacttaccaaaagttgattataaagcatgctaatctgaaaaaacttagtctatggggctgttctgcaatagatgccctatatgtaaattgtccagagctgagtgatctgaacctcaactcttgcataaatctgaatccagaacggttgcttcttcagtgtccaagcttgaaagatgttcatgtcactggatgccgtgacatgttgatcggagcaatcagaaaccaggttctgaatgagtttgcagcaggagagcctcgcatgccttgcaagcgccttgctgatggctcgaagcgggtgcaagtccctcagttcatgccagaacagcagtttgaggacgagaaatggtgcggcgagtcgcggcgaagccagtgcgccg

SEQ ID NO: 447390 - DNA, 439 bp, Triticum aestivum
aggtacgatctagaattcccgggccgacgggcacctctacaaactggggatgcatccgaggcgaaaacagtgtccagcaaattcccgtgtgggtaatatttggattcataactctagcaaagaggctatctgggtgttgtagcagtctccacccttgtttcgcaaggagggcgaggttaaacaggtgcatatccctgaaaccaatcccatccgcccgtttaggacgagtcatgtgttcccacgacatctagtggaccttcctgtgaccttcttcatcaccccaccaaaaatcccttaccattttctcatacttgtcacagaaccctttggacaggaggaagacgcccatcgtgaagcaaggaagcgcctgaaccacagatttgacgtgtacttccttggccgcataagacatgaatttttccgaatagtcacaacaact

SEQ ID NO: 447391 - DNA, 483 bp, Triticum aestivum
  unsure (1)..(483): unsure at all n locations
cggtcaggccagtccgggtcgaccggaagaggcggctgatggaggccgagccctccgcaccggagttcaagcccaacgtcaccgtcgccgctgacggcagcggcgacttcaagaccatcaaggaggcgctcgcaaaggtgccgcccaagagcgcctccatgtacgtcatgtacatcaaggccggcacctacaaggagtacgtctccgtgggccgccctatcaccaacctcgtcgtcatcggcgacggcgacgacaagaccatcatcaccggcaacaagaacttcaagatgaacatcaccaccaaggacaccgcaaccatggaggcaatcgggaacggcttcttcatgaagggcgtgagggtggagaacacggcgggggccgagaaccaccaggccgtggcactgcgggtgcagagcgaccaggccgtcttctnacagtgctacttcgacgggttacaagacacgctctacnaccacgcgcaac

SEQ ID NO: 447392 - DNA, 353 bp, Triticum aestivum
cgacgggaacaaatgtagaaattgaagtacctgtaccctatgatgccacaaacccaaatataaggacttcaatgggttctgcggcatatgcacccgagagagacgcaatggtctggaaaattaaatcatttcctggtggcaaggaatatatgtgtagagcagaatttagtcttcccagcataacctcggaagaagcaacccctgaaaagaaggccccaatacgtgtgaaatttgagataccatattttactgtttcaggcattcaggttcgttatctgaaagtgatcgagaaaagtggataccaggccctcccttgggttcggtacatcacgatggctggtgaatatgagctg

SEQ ID NO: 447393 - DNA, 333 bp, Triticum aestivum
ccgggtcgaccgtagcccgtggaggatggcggatgtcgatggtggagatgaacagtatcccgtggagtcgcgttttgcggtacgccacacccctcccaatgagatatgacccccattccttctccccgcgctagaacagagatgcgcctcagtagggcagcagcagcagtagcgtctccatggacgcggtggcatgacagctcccaggcacggatcccctcctctgcctccatcctccacctctccggtcggcctgttgcaatgtccgaagcagcagcaagcgacctgcagcagctcgttcctacgttccatggacgagctcgatggagacat

SEQ ID NO: 447394 - DNA, 59 bp, Triticum aestivum
  unsure (1)..(59): unsure at all n locations
ccggtcttnaaatcccgggccgacggggtatgacagataatatcgatataggttattct

SEQ ID NO: 447395 - DNA, 394 bp, Triticum aestivum
actcttccaaacccactttcaataatattgcaaacactattatcaatctcatatttatcatgggccttaaataaatttcaagttcataagaaaaatcaccccaatcacgatcatcacaacaaatagtagtcatagcaaaactagcatccccaagcttgaggttttgcatatcattagcacaattgtcattaagagaatttatgatagcatcatttcaatcatgcttttcatcgaaggaactatcaagtacgggtgcaatagcaacaatctcatgtttaacataaggaactatagcaaattcatattcataaatattggcatcatggccacaagaatagcaagaatcatgatcatcaagggatatttcaatcatatcttcggaatcacaattatc

SEQ ID NO: 447396 - DNA, 411 bp, Triticum aestivum
gggcaaggatacgccagactgacagaaacgtaccttacaacacgctgatatgcaaattgcggctgcgcgggcacataccggtgcaccaaatcgagtctaaggaatctgtgcaacagggtgtgcaacacgtgatgccggcaatgcagctgcttgccccccggcaccgccggcaacgaggacatctgcccctgctacgctcacatgaccacgcacgaaggccgctatagttgcccacgatacaatcgccatctccacggtcaatcacgactactacataatcgatcgtcatggcctctcaattaatatcacatccacgatgagcgacagctagactagcatgaagcacgatcgatatgatacatgtactactcaagctagtgctgcaaactatgtaccttgtgcccacccata

SEQ ID NO: 447397 - DNA, 476 bp, Triticum aestivum
  unsure (1)..(476): unsure at all n locations
ttcnctggccgngcggtacaaacnnnaattngcgggccgacgagctcactaatcggcggcgctctagaggatccaagcttacgtacgcgtgcatgcgacgtcatagctcttctanagttcacctaaattcaattcactggccgtcgttttacaacgtcgtgactgggaaaaccctgggttacccaacttaatcgccttgcagcacatccccctttcgccagctggcgtaatagcnagaggcccgcaccgatcgcccttcccancagttgcgcagcctgaatggcgaatgggacgcccctgtagcggcgcattaagcgcggcgggtgtggtggttacgcgcagcgtgaccgctaccttgccagcgccctagcgcccgctcntttcgctttcntcccttccctttctcggccacgttcgcccggntttccnnttcnangctctanantccgnggggcccccggggnagggngncggtg

SEQ ID NO: 447398 - DNA, 110 bp, Triticum aestivum
cgggtcgaccgggaaagagaggaaaaaatgtactgtagacaacagtggggtggttaattccttgtaagttgttaaaaatgaaagaaacaacaatggggtggttgatttct

SEQ ID NO: 447399 - DNA, 505 bp, Triticum aestivum
  unsure (1)..(505): unsure at all n locations
tgnnnnnnnaattgtctagccggtcaccggtcangagncccgggtcgnccgggaccacaggagaagaaggaaaaaaaaaaaaaaaaaaaaaaaaaaaaaagcggccgctctagaggatcaagcttacgtacgcgtgcatgcgacgtcatagctcttctatagtgtcacctaaattcattcactggccgtcgttttacaacgtcgtgactgggaaaaccctggcgttacccaacttatcgccttgcagcacatccccctttcgccagctggcgtaatagcgaanaggcccgcaccgtcgcccttcccaacagttgcgcagcctgaatggcgaatgggacgcgccctgtacggcgcttaagcccgcnggttttggtggttacgcncancgtgaccgctaanacttgcaagggcccaccgccggcnccttncgcttcctnccnttcntttctcgcaactttcgccggttttcccctcangctcnaaatcgggggcnccctttagggtt

SEQ ID NO: 447400 - DNA, 513 bp, Triticum aestivum
  unsure (1)..(513): unsure at all n locations
gnnnnnaannttctctctgggtcagccctannccaccaccacatcccgggccgaccggtcggctgcgagaagatgacagaagtcgacgggggtgtttgtgcgccgggaaaaaaaaaaaaaaaaaaaaaaaaaaaaagcggccgctctagaggatccaagcttacgtacgcgtgcatggacgtcatagctcttctatagtgtcacctaaattcaattcactggccgtcgttttacaagtcntgactgggaaaaccctggcgttacccaacttaatcgccttgcagcacatcccccttcgccanctggcgtaatagcnaanaggcccgcaccgatcgcccttccnaacagttgcgcncctgaatggcgaatgggacgcgccctgtancggcgcattaagcncggcggntgtggtgttacgcncagcgtgaccgctacactttccagcgccctaacccccgctcctttcgctttctcccttcctttctcgccaagttcgccggctttccccgtnaa

SEQ ID NO: 447401 - DNA, 378 bp, Triticum aestivum
cgggacgcgagtaaactcgacgagcacagaacgccgcccgccgcccgccgccgtcgttcgctgggtttcctcggagtttgtctgacttctccaatcacagcattgcagagggaaaatagtaatggggttgataaatgctaaccctgtgattcatgagaaaagggagaggcgcatccggcaggcaccagaaaacatagatgaaaatgcaccagaggccatataccagcttgaaatatttgatcatattagagacataaaggacccagaacatccatactcattggaagaccttaatgtggtaaatgaagactcagtcgaaatcaatgatgaacttagtcatgtcacggttactttcatcccaacagtggagcattgcag

SEQ ID NO: 447402 - DNA, 392 bp, Triticum aestivum
ggggcggataactccgcatgggatatcgatagcagcccagaaaggcgcccccgagataagcccctggccaaatcatgagtattcaaagactcgacgcattcatatatcagcctctttacttcataattttaacatgttgaatcatgtacttgcacttcggctcgttccgccctcgagcgatcctcatcttcggggaactcgctggacccaaaggtgatggacaatgggtcccttccgacggcctcctctcccagggccatggatgacaccaaggtgttgtcccaaaggatcccaggctagggagagacgcatgaggccttcagggcggtgacagaaggcgagacctcgaccgcctgacacatgggggagaagatcccatggagaccggcgat

SEQ ID NO: 447403 - DNA, 84 bp, Triticum aestivum
accggtcatgtattccgggtcgacgcggggagctttaaagatctagaggggggaaaaaaaaaaagcggccgctcaaaaggaatc

SEQ ID NO: 447404 - DNA, 243 bp, Triticum aestivum
acggttctggtgttcgccctagtattccagacgctttaaccttattatagctgtcccagcgtatatgctctgcggtttcagatgaagcgagaatgtcttatcatgtttgcggcaaccaattcgcgactcggatcgaatacatggggcgtcattctatttcagctgtcgctcgacaggatcgattcttacttacccctgcatgctactttctagttcttctatattgtcacctaacttcacttc

SEQ ID NO: 447405 - DNA, 404 bp, Triticum aestivum
caagaacagtggtcaaagatctgaattatggacgcttaaacaagatggaacaagactttggttatctaaggctcaggctcaatgaagcatttgacacaatagacagggttgccaaaggatatttgtatgctataagatacatgccagctttcttacatcagcttcataatgtgatagcacatacttttcctcctactcgtgttgtggacaagtcaacaaatgaggctctcaagaatattgaggtggtagctcataatctcaggacagaagcaatagtcttgaaaacaagctatatgtgttgagaaggcagagtcaagcgcgcctgaacatgtgtatcttgctttcggaccaaatcctttgtacttgtgtggaccaactttttaatactaacggccttgttccgt

SEQ ID NO: 447406 - DNA, 403 bp, Triticum aestivum
ggggcgttgcaagctgcaggtgaagttcaagatttctccatggtggacaggattttgttgggatatcacaatatctcttatattattaatgcatctatatacttggtaaagggtggatggctcggccttatgcctggtgttttgttccactcttgcctccctagtttccgtcataccggtgttatgttcccggattttgcgttccttacgcgatcgggtgatttatgggacccccctgacagttcgctttgaataaaactcctccagcaaggcccaaccttggttttaccatttgcctcaccaccacctacttttcccttgggagtcgctctctcgagggtcatctttattttagcccccccgggccaatgcttgtctaagtgctggtccaaaccgagcgatg

SEQ ID NO: 447407 - DNA, 427 bp, Triticum aestivum
  unsure (1)..(427): unsure at all n locations
ccgggtcgggcgagccgcaaaggtgcactgtcctccttcgccgtctttgggctggccattgtgtggttccttcagatgaactctgaggacgaggagtacatctccctctgatgtggttcctcgctagagatagggatcatcaaattgtgaatatctacagtacgatttggagcattggtgtttgagcttgtttgtaccagtgaagtgaggcattttcagttgcatgtagagttatcctcttcatgcagtcgtgctagtacatgatgtttgatgtttttgtgcaggctcttgacctcacttgcatcactcagttgtttgctatggcatcactgcatactctgcctaggtttggccattttaatttttctgtttcctctgcctgtgcctcgagtagtctctagtantagttgccacgagatgggagcaa

SEQ ID NO: 447408 - DNA, 481 bp, Triticum aestivum
  unsure (1)..(481): unsure at all n locations
ttctngcaggacgtagccgtcngcnaattcangggncgacgggcagtacaangtcaaacttgacccaaaatacgaaaaaaaaaaanaaaaaaaaaaaaaaaagcggccgctctagaggatccaagcttacgttacgcgtgcatgcgacgtcatagctcttctatagtgtcacctaaatcaattcactgggccgtcgttttacaacgtcgtgactgggaaaaccctggcgttacccacttaatcgccttgcagcacatccccctttcgccagctggcgtaatagcgaagaggcccgaccgatcgcccttcccaacagttgcgcagcctgaatggcgaatgggacgcgccctgtagggcgcattaagcgcggcgggtgtggtggttacgcgcagcgtgaccgctacacttgccaggccctaacgcccgctcctttcgcttcctcccctncctttcngccaantttcgccggcttccccgtnaa

SEQ ID NO: 447409 - DNA, 440 bp, Triticum aestivum
cgggtcgacgggtgctagtatttatgcatgctatgataatttgttttcctataagatttctatgcataggaagtatgttagactcatatgtgtttgtcacatgttttatgatgctctctttgtgattcatttgctatcattcatgtgagcatcattaaaattaccaatgcctagctaaaaggccttaatgaaaagcacttgttgggaggcaacccaatatttttcttttctgtttttgaataagtaattcatctagcctatgtttagatgtgttttgtgttttaattagtgtttgtgccaagtaagacctttgggatggcttatggtgatagttgttttgatcttgctgaaaaacaggaacttttgcgcccaggaaaataattttcatttttttaaataagcgtgcttttgatctgattatttttgcacagattgcacac

SEQ ID NO: 447410 - DNA, 399 bp, Triticum aestivum
gacgggtaacatcacggtagtgtattttgctggagagaataattttggacaacattaaggtggcaaatttaatacacatctgggtgggttgtttggggcacctagagaaaccggtgcttgcccatgggaatcccggagtactcgtgtgattaccctaggcccgccacccaggctcaaaggaatcatatgatatttcatgcctagaaacttccgtgtgcagccacaagccattatgggctctggcatagttgagtgagttgtgtaacctctttcagtggtggactagcagatgtaggggaaagtaggtgtatcggtctacccagagtaaagagttaatgcttcagaaagactatgtctcaatcttccgatcatggatgtggtcgagtcttgtggggaaaa

SEQ ID NO: 447411 - DNA, 103 bp, Triticum aestivum
ccgggtcgaccgggagtcatatctagttctagttttgggttgtaattcaagagttgtaaataaatagaagtgtgatgatcataattattagagcattgtctcc

SEQ ID NO: 447412 - DNA, 484 bp, Triticum aestivum
  unsure (1)..(484): unsure at all n locations
tttnnnngncctgnnnnngnccatgnaattcccggggccgacgagctcactaaancggcgccgctctanaggatccaagcttacgtacgcgtgcatgcgacgtcatagctcttctatatgtcacctaaattcaattcactggccgtcgttttacaacgtcgtgactgggaaaaccctgcgttacccaacttaatcgccttgcagcacatccccctttcgccagctggcgtaatagcaagaggcccgcaccgatcgcccttcccaacagttgcgcagcctgaatggcgaatgggaccgccctgtagcggcgcattaagcgcggcgggtgtggtggttacgcgcagcgtgaccgctcacttgccagcgccctagcgcccgctcctttcgctttcttcccttcctttctcgccacgtcgccggctttccccgtcaaagctctaaatccgggggccccctttangggttccgatttatggcttaacgg

SEQ ID NO: 447413 - DNA, 488 bp, Triticum aestivum
  unsure (1)..(488): unsure at all n locations
tgnnnnnagntctattcgttcgttnggtacagactgacnggcccggcccgctgagctaataaancatcggccgntcggttttgctttgttgaatttgcgnttgcatcgtcgtgtctaattgctggtcagtntcanctaaattcaattcgttncgagttcttgtcaaangttgtnactggaaaaccctggngtatcatcgcnnctgcgatntacaacaaatgcttatttcgccagctgcgtaatagtaanaggcncgcaccgatcgcccttcccaacagttgcgcagcctgaatgggaatgggacgcgccctgtagcggcgcattaagcgcggcgggtgtggtggttacgcgcaggtgaccgctacacttgccagcgccctagcgcccgctcctttcgctttcttcccttcnttctcgccaagtttnccgggtttccccgtnaagctcctaaatcnggggnctcccctttaggttccaatttantgcct

SEQ ID NO: 447414 - DNA, 420 bp, Triticum aestivum
cgggctcctagattggcaaggacaaatatccttccatggaccaaaccaaacggatacaaatgaacatgccacccgtgcttggaaaaatatcctggagcggcatgcatggacccgtaccgcctataccacgtgggcccggttacctgtccaggggcccactggcccgcgcgccaccaccccactgacactataaaaagaaccatgcgttcacagtccacggtcacaactcagaccaacacatctgctccagtcaaaactagctcttagccacaagcaggttaaaaatttcaacgaaatttcagtgaaatttccgaaatttcagtggggtgcgaaatatctttaaccctgaaagttcaatgcagtttaaaagtaaattcaaaataaatttaaaattttgtttaaattcagtaaaattaaatt

SEQ ID NO: 447415 - DNA, 318 bp, Triticum aestivum
cgggtcgacgtggtcgttgattatgccgcctgatccattgtcactggatgtaaagtggtaacagtttcttcttgtttaattacttccgaaaatgataagggctggtaagaaattgcacatatacatcaatttcctgtaaaattgtccgggccagaagtgtacctgcaaatgtggtttgtctgtaacgcaatgttgaaattttgtactgttcttgactacgttgctcccttttctccggaccagtggggtggttgatttcagcttattacctgaagttgtagatatatctatttgtcagtatggaaacatctactgtat

SEQ ID NO: 447416 - DNA, 481 bp, Triticum aestivum
  unsure (1)..(481): unsure at all n locations
gnnnnnaattcatcggccggcgggcanacatacatgncnggccgacgagctcactaatcgcggccgctctagaggatccaagcttacgtacgcgtgcatgcgacgtcatagctcttcttagtgtcacctaaattcaattcactggccgtcgttttacaacgtcgtgactgggaaaacctggcgttacccaacttaatcgccttgcagcacatccccctttcgccagctggcgtaatgcgaagaggcccgcaccgatcgcccttcccaacagttgcgcagcctgaatggcgaatggacgcgccctgtagcggcgcattaagcgcggcgggtgtggtggttacgcgcagcgtgaccctacacttgccagcgccctagcgcccgctcctttcgctttcttcccttcctttctcgccagttcgccgggctttccccgtcaagctctaaaatcgggggctccccttaagggttccgattaagtgct

SEQ ID NO: 447417 - DNA, 458 bp, Triticum aestivum
  unsure (1)..(458): unsure at all n locations
ttcgcgggccgacgggtggatgcaagcacttagaatcatccaatgggtccactctcctgaacttaagggtttggcaaggtacactacaagcaggagaaagaatcaagggccaaagagcaagcaagaatatggttgccatacaaaccatcaagttggaccagaatgaagatgaggttgatacactcaaatttttcaaacaacatcattgggtttttgcataaagttgaatcataagctactacccgcatcccataattttggtggaggctagaaggaagtatttaaatgagttgtagtgcaaaattgcccaatggaccagagaagaaaattgggtgtagagctcaaaatatttcatgaataaaagacatttttgcataaaagtgatttaaaaacatcacctgacatctccanattttggttggaactttaaatgaatttatcagatggttgtagttcaa

SEQ ID NO: 447418 - DNA, 404 bp, Triticum aestivum
attcgcgggccgacgggagcatcaacctagagctctgcatcatcctctacaagcaagtaccgaaccaccatggccatgccactcgccattgtgcaccaatttgacgacgatgatttccacagctttgttcatggatggctggcttacgaaaagctcacgccgacgcctccggtgtggcttcccctacgcctccagcatagggttcttgtacatgcgaaagtgcatgatttttcgatggttgtctagctgcagttgtctccccatgtaatggcatcaagttcagagcgccccaactgcctctccttcgaccgtggttcaggtagtggctcggtctccactgtactctatcccttgctctgtggtgcctggccattgtgcttagtccatgctgtgatccttgttgt

SEQ ID NO: 447419 - DNA, 245 bp, Triticum aestivum
  unsure (1)..(245): unsure at all n locations
acgggcccaangacatgaggttccccccgaattcccataaggaaaaggaaacccccaaaaacccccaaaaaaggcccaaccaggaggaaaacctggcaaagcacatggccaaggaggatgacgatgaatttttaagttggtctgttttttgaatttgttgaaatcactgaattctcccctctagggagatttgaatcatgtaaactttttacatcttctgtaattctatgttgatcagcacttcg

SEQ ID NO: 447420 - DNA, 286 bp, Triticum aestivum
ccggggcgaagaggaagaggaggagggtgaagacgccgagccggctggtgaagtagccggccagcctgaccgcgcctccagcactacgtcgcgtgcgagtgcgtctcctgtcgcgggaagcggtcaagccgggaccagctagacggccactccctcagccggcgagctgccttctccgaccaactcggccttcacgcctttgtcttctttcttttgtttcctgtcttgttacttttgaacaatgtttttggttaagtctgcacaattccacccactgggtgtatac

SEQ ID NO: 447421 - DNA, 411 bp, Triticum aestivum
attcaagggtcgacgggggagcatacgcgtaatactttgtttcgataactaatagatttttgcaataagtatgtgagttctttatgactaatgttgagtccatggattatacacaccctcatccttccaccattgctagcctctctagtacagcgcaactttcgccggaaccataaacctaccatacctacctattatggcatttccatagccattccgagatatattgccatgcaactttccactgttccattgttatgacacgcttcatcattgtcatagtgctttgcatgatcacgtagttgacatcgtatttgtggcaaagccatcgttcataattctttcatacatgtcactcttgattcattgcatatcctggtacaccgccggaggcattcacatagagtcata

SEQ ID NO: 447422 - DNA, 401 bp, Triticum aestivum
cgggccacaccatgatgcaggaaacataagcccctggtgtattttacccgtaccaaactgtacagatgcaacatgcagtacatgatcatatgtacataagtgaagtgcagttatcagcaaattggtgctgcattgtttattcaacaaagactgctgtacaggcatcacgatacaaatggtgcaataagcaagggatgggactgttacacatgtccccctccaagggtaagctgccgatggtgcttacaacagatttaatgctcgtaatgcataccacctggatattcattgtagcctttatccttccctgtctgtatgcatcgtcagttcggcaggtctgctgccggccagggcctctggcgaactgtgtcctacaggtaggcggcaagaatggaacaaaa

SEQ ID NO: 447423 - DNA, 480 bp, Triticum aestivum
  unsure (1)..(480): unsure at all n locations
gnaattctttcggcgccacggtcacacaatcccgggncgaccgggtcaatgaaaaagaaacaagtctgacatcgacattgtctccaacgctagctgcaccactaaactgccttgctcccttgctaaggttatcaatgacaggtttggcattgttganggtttgatgaccacagttcagccatgactgcaacccaaaagactgttgatggtccttccaacaaggactggagangtggagggctgccagcttcaacatcattccaagcaacactggtgccccaaaggctgttngcaagtgctcccaaagcttaacggnaagttnactggaatggccttccgtgttcccactgttgagtttcngttgttgatctgactgtttagacttncgaaaccancaacctatgatnanattangctgctatcaaaggaggaatctganggaaanctcaanggcaatttgggttacnttnataagacctt

SEQ ID NO: 447424 - DNA, 167 bp, Triticum aestivum
atccgtaatggatgtgtgaataatgggaacttggatttgaatacacccactaacactaagttccttccgttgtgccaagctggtgtgaacttgtcctgctttccgcctgacctaactgatgcccctaattggggccctcgaaggaaacttcaacactggaatccttc

SEQ ID NO: 447425 - DNA, 487 bp, Triticum aestivum
  unsure (1)..(487): unsure at all n locations
gcaattcttctcgtcggccacggtcagacnnacncgggncgaccgggatattgagaaagaaaaaaaaaaaaaaaaaaaaaaaaaaagcggccgctctagaggatccaagcttacgtaccgtgcatgcgacgtcatagctcttctatagtgtcacctaaattcaattcactggccgtcttttacaacgtcgtgactgggaaaaccctggcgttacccaacttaatcgccttgcagcaatccccctttcgccagctggcgtaatancgaagaggcccgcaccgatcgcccttcccaaagttgcgcagcctgaatggcgaatgggacgcgccctgtagcggcgcattaagcgcggcggtgtggtggttacncgcaacgtgaccgctacacttgccagcgccctaacgcccgctccttcgctttcttcccttcctttctcgccaagnttcgccggctttcccccgttaaagctctaaatcggggggctccc

SEQ ID NO: 447426 - DNA, 403 bp, Triticum aestivum
gggccgacgggctcgacgacgtccttgtccagaacaataacagtgttatctccgaccatccagcggaagagaaggcataggccctggcgttgcggtcccgatggcgaaagaccatgcacgtcaccctgaagtttgagaggctgatgcccgcgtccgcgtccgcatcctcgccgccgaggagacagcgcccaacatgttgccgctgtggaaccacgctgagcgagggatttccttgtagtgccgcacaaggggatcgcagatgaggagccgtggcgcccgcgacctgtggaagaggagcaggaggtcgccccagatatcggcgagctcccagcggcaatcggcaaattcccccagcgggaggaagttgagcgccagatttcgatcggcgatggtgcccgcccac

SEQ ID NO: 447427 - DNA, 424 bp, Triticum aestivum
acgggataaacgagagagaaggaagtgcataatagatgtgttaatctgaacatacaaggtccatccagtagtcctacaataaaagaagagttagtatgtagttctagcacatcaaatacaacaggtttctcaagctctacatttagtgctttaggaaagattgacaaggacaagatggccatggagttggggtccctgcagacaagtaatccaactatttcaagtttccagtgcacacagtccttgagtcattcatctgaattatcatgctcttctcgaatatcaacaggatctaccctaccttccaaaactactaaggaactgtttggtattgagactgaatactgtgtggccaaggcttcacgtgcccaggttagtcaactggggaaaccttcttcaaagcaatccaatgaagtctcctggc

SEQ ID NO: 447428 - DNA, 433 bp, Triticum aestivum
gacgggaagtacaactggaagctgtactctgagaggttgatgaccctttctggtgtctatggtttctggaagtacgtctccaacctcgacaggcgcgagactcgtcggtaccttgaaatgctctacgccctcaagtaccgcaaaatggctgaaactgtcccattggctgttgagggcgagacctcgggcaaatgatttgtccttaccagagaaataaatggcgggcgagcgctccgctttaccgttcttgattcagtgatggagcacagatcggagcgtcttatgcctttgcttgtcctttgttaccgttcttgattcagtgatgaactttagttcctgttgagtccccgtgttgtcgcggtaggggaactggatggatgctgtgttgttggcactttctcatggatacagtatttgaatgaatgaataaaat

SEQ ID NO: 447429 - DNA, 442 bp, Triticum aestivum
  unsure (1)..(442): unsure at all n locations
acgggcaactatacagagttcctagagctccttgtacggcctgttggaaaacccgctgtcggacctgattcattgccctttgtttttcaaaataaagggtttcgtttttagacttttccaattgttccaaactaatagaagtagcattaatcaaatttgctttttctcgttctatctcagagtatccattcattcgatactcatccgcttctagttcgactttctgtaatcgaatccgagctttttcgagttgctcaatggtcnctctacgcaattcttctgaatttcgaatagtactcaagatcctctgttttcgattatctaataaatcttttaatgaaagtagattattttgtaagtttacaacttttatgatctcttcccgaaccaaacatgaatctttcgattcatttggctctcaagctccttatttttttttttt

SEQ ID NO: 447430 - DNA, 481 bp, Triticum aestivum
  unsure (1)..(481): unsure at all n locations
gngngaattctancnncacgtgttcnanggncattcngnggccgacgggctcagctanaaggatccaagcttacgtacgcgtgcatgcgacgtcatagctcttctatagtgtcacctaattcaattcactggccgtcgttttacaacgtcgtgactgggaaaaccctggcgttacccacttaatcgccttgcagcacatccccctttcgccagctggcgtaatagcgaagaggccccaccgatcgcccttcccaacagttgcgcagcctgaatggcgaatgggacgcgccctgtacggcgcattaagcgcggcgggtgtggtggttacgcgcagcgtgaccgctacacttgccacgccctagcgcccgctcctttcgctttcttcccttcctttctcgccacgttcgccggcttccccgtcaagctctaaatcgggggctccctttaagggtccgatttantgctttacggacctccaacc

SEQ ID NO: 447431 - DNA, 410 bp, Triticum aestivum
  unsure (1)..(410): unsure at all n locations
ctggaacgagcaaggttgatgcatcagtacagttctgaagatggagcggtggcagttggcggcggcggcctctgagagcacgccggaccagtgtgtgtcncatacccggcaagtggctaggttggggtctcgggtcttagatgttaggcttggctgcgatgtctatttggtattaggcccaggctatctgcgccccttcatcaactgaataggtgtagcgacagtttgttgcttggacggcggctttagccttactgttgtatggctttgtaaggtcttgtgagaataattaataaaatggccgtatgcatcgcccagatgcagaggccggggtcatcctccttttctaaaaaaaaacctaggcgttacgattttagcatggccatgaatcaaccagaaccatcgacaga

SEQ ID NO: 447432 - DNA, 226 bp, Triticum aestivum
aaaactggcaagtcctgtatatatagccagagcatccgtcccggttggtggctccaaccgtgactaatgccccctttaattccggttggtgccaccaatccggactaaagggcatgttctgcccgcgtcgcgacacgaaagtttaatcccaactcgctaactgaaggaactccaaaatggtttaaaagccctaatcccgctgccctctcgaactcctttcaaatgc

SEQ ID NO: 447433 - DNA, 365 bp, Triticum aestivum
cggcatgtttatcaagaaagataactcagatggcactgacatcttcgttaataaagtaattacccacagataggtaggtcaccgttaattactggtagtttgataattaccccttcgacagcaaaaactatatttaaatcaaaccttgagcagattttggacacaataaattccttgcagtaatttaacctactaatggtcacacaaactaacgaaccattctaatgaatcataaactatacaaacacatgctatgatttaatggttataacataattataataatataaaattaagtaatagaacatggaaagtgtacaaatcaagtacaccagtttccccataataaacgtactactatgttt

SEQ ID NO: 447434 - DNA, 350 bp, Triticum aestivum
gggaggaagcactccgtagaggatgctctatggaaaatcatgtcacttacctcccaaaataaaaaagacagcttagtcggctacttaccaactcaactacgaatttaaacctaccggtgagaaaaggttactttacactacctcaccatatgaatgatcatcccaagcctacaaatatgccacgttgtttaaagaacaagttaaaacgtggcatgagatcaaatacacaagcgtgactttaacatcggtgattacgtctagctatacaactctcatttaaaattttttgcataccaccatcgatccaaattgtaacgtccctacataagcgacgatgtctaccgtaccgg

SEQ ID NO: 447435 - DNA, 446 bp, Triticum aestivum
  unsure (1)..(446): unsure at all n locations
acgggtcccataaacgctgatgatccacaaaccgcttccgccatcaaccactagaaaccatttgttgtactcacagaccataatggtcttgtactacatatgttgtattttgcatggaatttctgtatcaagttggtgcctcatcagctaacagttatcctggggctgatgagcacaagggccattttctgggaattaacacccggagattcggtcgccacagacttggtatcagagccaggctgaccattggctaattctatcttagccaggtcggataacttaggtaaaccaacctacgagaccctaaccaaaaccccagccaagcttctcgtgcaagatagccacactgtggtcncgacactttttgcagtcggtgcccaacctatcanattagcctgtcgatcacataccagttgacgatggcaaaaatgtctcattcgcaa

SEQ ID NO: 447436 - DNA, 65 bp, Triticum aestivum
acgggagtgatgatgaacaatctccgcaggacttcgccaagcacaacggaacctagatggagggg

SEQ ID NO: 447437 - DNA, 364 bp, Triticum aestivum
  unsure (1)..(364): unsure at all n locations
attcgcgggccgacgggggaggcgaaacgcaagaccgcaagttattccagtaccgcgatcccgccgtcgtcgccgccgtctggaatcgcctcgccaccgcctggattcgccctcgaccccgactgcaaacgccgtctgcgtgccgccgcccgccgcgtggggcagatcaaggtgcctcagactcatctttcaacaacatggatggccttagactcccctcaaccattgggaaagcaaagagctacgcatcttcttccttaggagctctgcgaaagaagatgcctcaatctggaagccgatctctacacacaagtcgcccccggtcagctcctgttgcanaccgcccaatggtccccccatcttc

SEQ ID NO: 447438 - DNA, 52 bp, Triticum aestivum
  unsure (1)..(52): unsure at all n locations
ggnnttggtnntgtgtgtttgttttcttcttggtttnntcgtgtnttggtct

SEQ ID NO: 447439 - DNA, 489 bp, Triticum aestivum
  unsure (1)..(489): unsure at all n locations
tgnngaattctaaacnctcgtgggccgtcngnaattcaagggncgacggggtatgacagtaatatcgatataggttattctagaaaaaaaaaaaaaaaaaaaaaaaaaaaaagcggccctctagaggatccaagcttacgtacgcgtgcatgcgacgtcatagctcttctatagtgtacctaaattcaattcactggccgtcgttttacaacgtcgtgactgggaaaaccctggcgtacccaacttaatcgccttgcagcacatccccctttcgccagctggcgtaatagcgaagggcccgcaccgatcgcccttcccaacagttgcgcagcctgaatggcgaatgggacgcgcctgtagcggcgcattaagcgcggcgggtgtggtggttacgcgcagcgtgaccgctacactgccagcgccctaacgcccgctcctttcgcttcttcccttccnttctccgcaanttccgcnggctttccccgntca

SEQ ID NO: 447440 - DNA, 135 bp, Triticum aestivum
tcaccatcggttgtactttaccttctctcgagtaccaacctcatgttgcaatgattgactggtgctttttggttccagtgaatgctttgaccttgatgtggcaactggcaaccatgtttcttttgatgtgtgtca

SEQ ID NO: 447441 - DNA, 486 bp, Triticum aestivum
  unsure (1)..(486): unsure at all n locations
ggnnanttnaaatngtccgcaggccngcacaaattcaagggncgacggggaaaaaaaaaaaaaaaaaaaaaaaaaaaaaaaaaaaagcggccgctctagaggatccaagcttacgtaccgtgcatgcgacgtcatagctcttctatagtgtcacctaaattcaattcactggccgtcttttacaacgtcgtgactgggaaaaccctggcgttacccaacttaatcgccttgcagcaatccccctttcgccagctggcgtaatagcgaanaggcccgcaccgatcgcccttcccaaagttgcgcagcctgaatggcgaatgggacgcgccctgtagcggcgcattaagcgcggcggtgtggtggttacgcgcagcgtgaccgctacacttgccagcgccctagcgcccgctccttcgctttcttcccttcctttctcgcaagttncnccggttttcccgttnaagcccnaaatgggggcncccttta

SEQ ID NO: 447442 - DNA, 445 bp, Triticum aestivum
gggtcgacgggagcaaagaacttctcctatggaggggaccatagacctcagtgtcatatcatcatcagataaaataggtgtaggtagtgatctgaatgtatcgtcaaccagcaccaactcagagctaaccactgattcatagaaacgccttgctggatcgaagtcgtctttgaatatttcatcagatgtattcagctcagctgcatctgactgaacaagcattttgaagacatcctctgaagggaaatcaatgatctgtgcttcttctaaaagaactgagcaaggcaaatctgaaaaggtgccatcaggcttgagagggtacaatgctgagtttctctcaagtagaagattatcattgattctcacaagatccatctctactgcagccttaactgttattggtttatctgcttgatagtctgcacatggggcatctttggaaaca

SEQ ID NO: 447443 - DNA, 119 bp, Triticum aestivum
aggggttttcctccaagccgggcaagtccaatgtccatggcaattggaatttttcctccagaaaaatgaatccggggaagaaaaaaaacagattcttccgtttttaacggcgtttaacc

SEQ ID NO: 447444 - DNA, 401 bp, Triticum aestivum
attcgccggtcgacgggccccaccacccaacaatgctcaatgttcatccagaggcagcatcaaccggcttcagttagcagcagtagcgaaggaatcactcaggctcagttaacagcaagggatcgatcgatcgatcgggttcagtaacgcgtagcctgcagtgcaatcgctcgggttcagtaggcaaacgcctcgctcgggttgtcatatggatgatacgtctccaacgtatctataattttttatgtattcatgccatgtttataatatttctacatgattttggtatgatttgattagaactaacgttgatttcagtagaactatcgtggtgttgtttttgtgcagaaataaaagttctcggaatgcactgaaaatcgacggagattttttctggaaag

SEQ ID NO: 447445 - DNA, 416 bp, Triticum aestivum
acgggcacataaatcctatttgcgacaataagaacatcattaatccttcccataggttttttaatagtggaatccgcaagatgcaaatttaaaagaacaatcatcaaattcacggaaacctaacacatcacataaagtttttcgaatcatggaaacgctagcacccaaatcacacaaagcatggcactcataatctttaatcttaatcttaatagtaggttcccactcatcataaagttttctagggatagaaacttccaattcaagcttttgttcaaaagattgcatcatagcatcaacgatatgtttagtaaaagctttgttttgattataagaatgaggagaattcaacctggattgcaacaatgaaatacaatatattaaagaacaattatcataattaaattccttgaaat

SEQ ID NO: 447446 - DNA, 386 bp, Triticum aestivum
ggcaaaatgcagtacaggatacagttccagaggccaaaccccgtcggcaccaacaatgcgcctccaccgccaaccaccgcggcgacagcagcgccgacatcgacccccgcgagctccttcctcgccatggttcaataggcgctcagcaccatggatcatcagtatacttccagttccagacagacaataacctcgaagcatcatcaccatcaccatcaccgagtcaccgttccatgcgtcacctcctcgagtcgatcatcgccatcacatcacaccatcaccgacgacgactgttccttttcaccttgtaattcctctcgtgccattccattatttattgattcgttctgtgtaataagagcctctcttctgttccctaaaccggc

SEQ ID NO: 447447 - DNA, 403 bp, Triticum aestivum
aggggatggacaacttgctccgtccctgatgggccgttcgaacgtgcgaacctggaggaacaccggttctccatgacacgggcaatccgcaactccggatgaagcctgttggctggcattggcatggcacgccgcgcctaataaaacgtgatgccattaaatgccctctgcgttcctccttgggctgcctcatcgacgtaacggcatggctttgtaactttgcattgccctccatgaaataacctgtagatatccgcttgtgtggtccggttgtttgagagatgtggcgcgagagaaacgcggtcttaaatcacaaatttctcgcctatgcagcgagtcatcaatcaggttaaagcccgatgagggtttctagttgaagatggatagcaaaatctggatgttc

SEQ ID NO: 447448 - DNA, 491 bp, Triticum aestivum
  unsure (1)..(491): unsure at all n locations
gggngaattnaaatngcagcagncangacanggtcaagggncgacgggctcactaancgcggacgntccnagaggatcaaagtgcatgcgaagtcaganctcntctatagtgtcacctaattcaattcactggccgtcgttttaaaacgtcntgactgggaaaaccctggcgttaccaacttaatcgccttgcagnacatccccctttcgccaagctggcgtaatagcnaacaggccgcaccgatcgcccttcccaacagttgcgcagcctgaatggcgaatgggacgcgccctgagcggcgcattaagcgcggcgggtgtggtggttacgcgcagcgtgaccgctacacttgcagcgccctagcgcccgctcctttcgctttcttcccttcctttctcgccacgttcgccggtttccccgtcaagctctaaaatccggggntcccntttagggttcccaattaagtggcttacggnacctcnaccccaaa

SEQ ID NO: 447449 - DNA, 459 bp, Triticum aestivum
ccgggtcgacatgattatgtaattatgaacgggctcatgtactccctagccggattgaaaatcatttatcatgacggaccctttcgcttcagcccccggatctgacagtccggggtgtatccgaatacccacacagttatgaaaacccggggtatgcgtggaaaccatgtgtaggggtcataagtgcttgaacagacaagtacccaactagttaagttatattacatggatagtaagaaacatcttccagatagaatagttccgttaggggttcctttctttgggtacgcatgcatcgatgtgcatgtccgaactgcgaacagaagcgcagaaaacaaaacatctgggtatttttgttgttctgaacgagaacatcttttgttcaccgaccgaatattcccttaagaacgctagctttcggcttcacccagtctgaggtacacatccggctcaaccggc

SEQ ID NO: 447450 - DNA, 398 bp, Triticum aestivum
gggtcgaccgggataaataaacagtgtactacaatgttatagccatataatccgggaataacaatgtactgggaatcaaaaaaaaaaaaaaaaaaaaaaaaaaaaaaacgggcgccccaaattgggacttggcccaactggagagatgaaggacccatcgtatcctcaaagccaaggatgggtcttcccaagcatcggagaattcatctgttatgataagtacctggaagcaaacttcaaagcagcagcggcgaaggctggccaccctgagtgggaattgcctgacgatgctggagagtacaacgacactcccgagaaaacccaattcttcaaggacaacggaacatacctcacagagaaagggaagtttttcctgtcatggtactccaacaaactga

SEQ ID NO: 447451 - DNA, 491 bp, Triticum aestivum
  unsure (1)..(491): unsure at all n locations
cgnngcactttttctagccgntgtcngtaccggactgtaaattcgcngggccgctctagggatnaaagcttacgtacgcgtgcatgcgacgtcatagctcttctatagtgtcacctaattcaattcactggccgtcgttttacaacgtcgtgactgggaaaaccctggcgttacccacttaatcgccttgcagcacatccccctttcgccagctggcgtaatagcgaagaggcccgaccgatcgcccttcccaacagttgcgcagcctgaatggcgaatgggacgcgccctgtagggcgcattaagcgcggcgggtgtggtggttacgcgcagcgtgaccgctacacttgccaggccctaccgccngctccttncgctttcttcccttctttctcgccacgttcgccgggcttccccgtcnagctctaaaatcnggggccccctttangggtnccgattttgtgccttacggactngaancctnaaanatt

SEQ ID NO: 447452 - DNA, 426 bp, Triticum aestivum
gactgctttctttgacctgtctgagtttaccaattaaagcttacccttcgtgtttcttgccggtcagtgttgtcgtttacaagggttgttatgtctatcctctgctacccgcctccattataaaccctccactagactaactgaaataaaaattattaagcatgatccgtttatcagttgaactgttagaactaataaccaaaccatgctaacatcaattataaaagaaaataatagtggtgatttttgtaccaggaaaaaaattaccttggaggataattttggttgtcaaaaagttgtcttgtcgttcaaccaaccatgaagttatgccaatttaagaggatagaatggaactaacgcaaaatgtactcattagattttgaaaagaacatgatccctttactgtattatttagttaattatata

SEQ ID NO: 447453 - DNA, 485 bp, Triticum aestivum
  unsure (1)..(485): unsure at all n locations
gnnnnngnatttttagccgttcggtaccgatcngcaaattcccgggccggcggccgctcaaaggatccaagcttacgtacgcgtgcatgcgacgtcatagctcttctatagtgtcaccaaattcaattcactggccgtcgttttacaacgtcgtgactgggaaaaccctggcgttaccaacttaatcgccttgcagcacatccccctttcgccagctggcgtaatagcgaagaggccgcaccgatcgcccttcccaacagttgcgcagcctgaatggcgaatgggacgcgccctgagcggcgcattaagcncggcgggtgtggtggttacgcncancgtgaccgctacacttgcagcgccctaacgcccgctcctttcgctttctcccttcctttctcgccacgttcgccggcttccccgtcaagctctaaatccgggggctccctttaaggttccgatttaatgcnttaangaacctcnaccca

SEQ ID NO: 447454 - DNA, 436 bp, Triticum aestivum
  unsure (1)..(436): unsure at all n locations
acggacacctccagcccgacgagacatgggaccgacaagtggagcgcgttttgacaggcacctgtactatatagaggtgatgatgtgtgtgtttgtgcaccttactgcatatatatatacacgtacaaggaagggcaagacatttttgcttgggaggggagggagcttgcttgtgtgtttgctttgcgtttgttgctgtttatacctagggtcgggtcgggtcggatgttggttcaattgcacatgtttggctggatgaatcgtgcttataaacattctttataccttgtattgtacaagttagtgtcagtcggtcgatcactttcagcggatattggacaatttctgagctttttctccatgtattggcatttcttttctgttttccttctttttctttctttctttctttcctcctgntgtacacgtgctcctc

SEQ ID NO: 447455 - DNA, 148 bp, Triticum aestivum
cgggtcgaccggaagaggaagcgagcggacatggcaagaaggcgacggcgtgagctggacgcggggtagagcagagggaggcgacgagcgtggggatggcaggggcgcggggctgcgcgggttccgcaggttctaggcggaggaggag

SEQ ID NO: 447456 - DNA, 408 bp, Triticum aestivum
cgggttctcttacttatacaaatcattcatgaatttcttgtaggatcaaaatggccatggcaaaccttcaaagaatttaatttccaaaaccaaaggtgaaccaatacaaggatgaaggacaaataattcaaatcaagatattcaattcattcaaacaattttctcataggatataagtgaagcacaagagtaaatgacaaactactccaaaaagatataagtgaagatcaagcgagtagttaagtaaaggggtagctaattgaggactctctcttatttaaaaactttcaaatctaagtattttattaaaacagcaagcaaaatgaaaacaaaatgacattccaaggatagcacacatcatgtgaagaagcagaacttaggctcaaccgaggctaaccgataattttt

SEQ ID NO: 447457 - DNA, 495 bp, Triticum aestivum
  unsure (1)..(495): unsure at all n locations
gnnnnngnngggnnngacttctagccggncggtagccgtcnnnaattcaagggncgacggctcactaaancggcggccgctctagaggatccaagcttacgtacgcgtgcatgcgacgcatagctcttctatagtgtcacctaaattcaattcactggccgtcgttttacaacgtcggactgggaaaaccctggcgttacccaacttaatcgccttgcagcacatccccctttcgcagctggcgtaatagcgaagaggcccgcaccgatcgcccttcccaacagttgcgcagcctaatggcgaatgggacgcgccctgtagcggcgcattaagcgcggcgggtgtggtggttaccgcagcgtgaccgctacacttgccagcgccctagcgcccgctcctttcgctttcttccctcctttctcgccacgttcgccggctttccccgtcaagctctaaatcgggggctccctttaggttccgattaatggctttacg

SEQ ID NO: 447458 - DNA, 386 bp, Triticum aestivum
acgggcaggtgcaccccggagacgcgcccaaccccaactacttcgacccgcgatacctgctgtcaatgtacggcaaccccctgggggacctgctcaagggggcctccctctggacaagggccggcaaggacaaccgcaagggccccgtctccctgctctaccgcgcctccggcctgctcgtccccggcctcgcctcccacagcccgcgcgactacgtcaacgccgtccgcctcggccgtatcgcgcccaagtcactcctctaaaagtctaactcagacccactgtgtgtgtacgaccacaagagagagaattggtgatgaataagttgttgtttcggttgtgtcgtgtcgtgtcgtgtcgtatcgtgtgtgtgctatattaagcct

SEQ ID NO: 447459 - DNA, 147 bp, Triticum aestivum
cggtcgacgggcttgttaaggatcgagactgtaaactctgagctgttcagaaaaaaccaaacctcaatccaataattaacggttaaacaagttaaggcgttaaatgtccctgttttcacacaacaataaaatcttgtacgttctctc

SEQ ID NO: 447460 - DNA, 430 bp, Triticum aestivum
aattcgcgggtcgacggggacgaccacccccttggcggccgccttctcagtcttctttgccgggcggggtcttccttccttggtttcctttaatccaccttctgcaggctcgacggcgagcttggcttcgacttcctgtgctaagcctcgcccctcatccgtatcaaccgcgatcgtgacctcctcgtccatggagtcgccgttgtcacgcacctttgcatcaggtgcttgttcctccgcctcggtgaagggcatgtcttgggtgatgtcacggttcttctcctcctttgagcaattgttattgtcatgaacgggtgctgccatgacctgctgaacattcgatcgaaaagtgagacatcaaagtgactaacatccgacatcaaaccaacaatctaccacgtactaagtccaacagcccatgttcatatgc

SEQ ID NO: 447461 - DNA, 123 bp, Triticum aestivum
cggggtaaaacagataatatcgatataggttattctacaagattactctatagatccatcagctctaagtaaactgcgtataaatcatgtatgtataaggtatgtgttactgatgttagaagc

SEQ ID NO: 447462 - DNA, 423 bp, Triticum aestivum
gggagaacgaaccggaaacccaagaagaggaagactgcatctgacatgttccagctggatgatgtttctgagtcagaggtagcccctgactcccttggccaatttccaactatcttattgacactgactattgccaggacgacacgggggccagccaggccgtggaagaagaggtaactatttcctccgactcagcccctttgccgagacaaaaacttcgaatggtaacccggaaagtaaggttttcacaccatttggcttatttggaccctcattttcttttgaaaagcagcaacatgagagtcaccgtcaggcccggactaatgatgatgatgatgaaccaccttccgaattacaaaaaactcatcaaaaatgccagaatgaggtttctttcacctttgtccttttgttttatccatgaat

SEQ ID NO: 447463 - DNA, 287 bp, Triticum aestivum
catggcgaaagccgggataagatggccaagatggccatagaattaaaagccgccgtttgaccgttgccgggttcttggaaaaggaaaacctaaccaaagcatcggacttgagaaagctgttgcgacgaggaaagacatccgctctgctatgagggcgaagaaggaggagctgcgggaagccggggatatggtagctgggaaatcgtttatgttgcggaggaagttcggagattcacggtatgccactctggatcggctgtggagttcggagaatgtgtatatggatt

SEQ ID NO: 447464 - DNA, 383 bp, Triticum aestivum
  unsure (1)..(383): unsure at all n locations
tatcaaatctanaaaaaattttaattcggatagtccaaaccaaaattacccccggaaggccggaaaccaatacaaccaaaattggtgggtttttaaacaatcccggaaaatcaaaccccgacaaaaaggggcccaatccccaagccaaggaaatgacgaaccccaccaacagaacaccggaagtcaaaagactttcccacaagaagtcaaaacagtaaactcacttcatgtgatagtacggaaaaccaacacggcactcgctaagacaagtgtcgcacggtccaccccagcggaacaccgatattggatgtcaaaaccaatcactttcgaccatctggatacaacanacagaccgtcaagtaaaaaaaaaaagcggccgctct

SEQ ID NO: 447465 - DNA, 397 bp, Triticum aestivum
tttagctcggatatgtcaaatccacagtacctccggaaggcctgcaaaccataccaaccaaaattgttgggtttttaaacagtccggcagactcaaggccggacataaggggctcgatgcgccaagcgaggacaatgacgaaccccaccagcagagcaccggcagtcaaaagactttcccacaacaagtcaaaacagtaaactcccttcatgtgaggctatgggaaactaatatggaactcgcatatgagcaagtgtctcattgtctacaccatgggatcatcgatattgcatctaaacatgaacaattttccaacaacgggcatgactgcaatgattttactataaattctcttgaggtccactgtgcgatcaatacgcaaaacctcaaccttggg

SEQ ID NO: 447466 - DNA, 172 bp, Triticum aestivum
gaaccacaagaaagacggcgagcacaataaggacggggagcacaaggagggcatgatggaaaaaatcaaggacaatatcagcggcgacggccacggcgacggcaaaaaggacggcgaccaaaaaaaaaaaaaaccatcaaaaccaaaatttaaaaaaaaaaaccgccccccc

SEQ ID NO: 447467 - DNA, 400 bp, Triticum aestivum
cgggtcgacggcggatcgagaaaaagacgtacgactacttcctctacgttgtgtcaacgcttccgttgcaaccaacaagggtacttaaattatgcccttccccccgttgcaaggcaccacaatgatcttgcttgtgcataggaaattttttgaaattacaactttcccaaacattgtcctgatccagtcaggcagccggaccatcgggttttggccatgagctgggaccactgggaagcggcccgccacgcggaccatgagacccatgccaaggccgtgatcactactttctgggtgagctctcttcagaagcacaagtccattctagtttcatgaatgatttaactcatggcttcttccattcttgtttcatgcatgattgtagaaattctatcgggtt

SEQ ID NO: 447468 - DNA, 171 bp, Triticum aestivum
gggggaaacgaaatcagaaaaatcgtggattaaatccgagaaaaagaaaaacaatgaacagattaacaaacgaacgttcgttatctggacctaaacgatgaacgcgttctttaaaacgaatgaacgagcaaacgctcgctaattaaataaactggaaaactgatctacaac

SEQ ID NO: 447469 - DNA, 351 bp, Triticum aestivum
ggggttgcacattcagctggctagacgcggtcggcgggaaaccgagacaaaaaagcctatcacttcgtttggttgttgatattcaagcctaggtataaatattggcacgggataccccgaattcccctgtttagatggacaaggaatcagtccaccgaattggcctcaaatattgggtggcccgcttcgaaagcccgcgtctctattcccaaattcggagggggcgagctcgattttcggtgatattcgggaaccagcccgcgacttaccgcttcgaccgctccagaaaaggaagaggtgcactcgagcgggagagaaggtgagcacaacggcggcgcatgtcagacaact

SEQ ID NO: 447470 - DNA, 248 bp, Triticum aestivum
acgggccaaaaaaaacaaaaaaaaaaaaaaaaaacaaaaaaaaaaaaaaaaaaaaaaaaaaaaaaacatcaataggatgataaaaatataaagcctaagtaaaaataatatggaacagaataccccgaaattcccctgaaaaaatggggccccccaaaagtttccagccttggtttcccttattggaaggccaaatcccttaaaaagggtccccaaacttaatttcaggggcggttatttaaaaattc

SEQ ID NO: 447471 - DNA, 130 bp, Triticum aestivum
gtagcgtctacaattctaggtcgacgggcagttgaatatgttagtggtcggccaaactagtatgacaactgatgaatgcaatcgattgttaaattcgggtgaaaaaaacctccaactccttaatcaaaaa

SEQ ID NO: 447472 - DNA, 356 bp, Triticum aestivum
  unsure (1)..(356): unsure at all n locations
cgggaggaaggaagaaaaaaaatcggtggtggtgggacgaaatttaactggtttaaatgaagagggagaatgccggcagctggaattttggacttgaaaatgagcaaatattagagacctattctgcacaactccaaaagtcctgaaacttcacggagattagttttggaatatattaaaaatactgggcgaagaaagcaccagatggggaccaccagtcagccacgagggtgaagagcacgccctagcccctgggcgcgccccctacctcgtgggccccctggcagtccccgactcccatcttctgctatatggtgtctttttccctgnaaaaaatcatagagaagcttttggga

SEQ ID NO: 447473 - DNA, 447 bp, Triticum aestivum
ccgggccgacgggatgcacaaaattttgcattcagtgcatcccacagaatttttccgtcgtttatgtgcatgtacacatcacacagacggtcagcaagaacactcagaatgcatcccacaaacatagtattggcttcctggaattttctccgatcttcgtcggtcattccctctggagcatcaacactagcgtggaaaactttcagagcagtaagccagagtgttgtcttcacctgccacctcttaaagtgcacaccgataaacttatccggcatcagtgcatcagcgaatccagccatagttaactcaggaaattgcctagaattaggtttttggattgttggaatatcaggcaagttcatgattaattccagtaaataattcatgactagaagagatactagcatgcaataatctagcaaactagaagaccagcaggacatgcat

SEQ ID NO: 447474 - DNA, 427 bp, Triticum aestivum
ccgggtcgacgggagcatcgagccgctctggggcggcgtcgtcatcaccgccttcgactgcttcatctttctattcctggagaactatggtgtgagaaaattggaagcgtttttcggcgtcttgattgcaaccatggctatatcatttgcgatcatgtttggtgaaacgaagcctagtggaaaggagcttctgatcggtaattctctgtctgatatgttggcagatgcttttgtttctgatgcactcttgagacgtagaagaatttattcagtatttttcataattaggtttggtggttccaaagctaagctcaaagaccatcaaacaggcggttggaattgtgggctgcatcatcatgccccataatgttttcttgcactcagcgctagtgcagtccaggaagattgacacaaaaaagaaatcccg

SEQ ID NO: 447475 - DNA, 216 bp, Triticum aestivum
acggggaagtggaagacctaaggtttattaatctgtgagaggtgtaggatgaagatggtctctctcaaacgaacctgcaatcaaatacaagaaatctcttgtgtccccaacacacctaatacaatggcaaattgtacaggtgcactagttcggcgaagagatggtgataaaagtgtaatatggatggtagaaatacatttttataatctgaataaa

SEQ ID NO: 447476 - DNA, 322 bp, Triticum aestivum
gggtccacgggccatgataaaataagctcgagcacacatcaaatcctaatcacatccacataagatgcatgacaccaagctaacagggtatttccagagacatgtctgtgatatactcgcacgcaacgtccaggatcgatcattctgtgatatgaacatgcattgccacatagctttgcatgatggtagcatatctatgatgatgtttccagagcttgtccgtttgtgacgtcgctgtgatgcaagttcaatgtccaacgcggtacactgccggaggcattcatataaactcaggtcgttgttcaagtttcgagctgcaata

SEQ ID NO: 447477 - DNA, 315 bp, Triticum aestivum
gggtcgacgggggatttaatcttactggtgtatgactatgtaaggtcttgtgtgaataattaataaagtggttgtatgcatagtccagatgcagaggccgggttcctcctttttcaaaaaaaagaaagaataatagacaggcaccagcaaggtcaagtgaaagcatgcatctgcagcaggtgatcagctaagacaactatttgcgtaccaatcaatgtaaaaaatacaacctttaatttgttcattgtagcaatgatacggtgctagtttaaagtaattgtaccagaaaattagacaaaagacatcccaagtttt

SEQ ID NO: 447478 - DNA, 184 bp, Triticum aestivum
acagcttttgatgcgtacattttcaggatgattctctgagtttggacaacccagccaataatatacaagaccctcgtgatcccttgtttgattttccatccagatgtaggtttcctcttgcgttgcatgtaaccctcaccatgggaggggaatgatcatgtaaatttattttccgtcacagagg

SEQ ID NO: 447479 - DNA, 273 bp, Triticum aestivum
gacgggctaacccaacttctggcaacaggagtgctacgtaccattagttagttgagagatgtactatccgaccgaggcattgtatttgtaacctaaagagtacagggggaagtggaacaacgcgcatgatttggcattcgtcggtaagtcattggaaatgctcttatgtgagatactatggaggcctgcttgatgaccaacacaaaagtgatcgcctccaaccttcttctggttgtttgattaacacacaagaaaaattctcattgaaacaaa

SEQ ID NO: 447480 - DNA, 405 bp, Triticum aestivum
ccgggtcgacagtaggcttcatataaatgcaataaatccattagctgatgcgtcctatcattagctcttatcaataattctattaaattttgaagctgacctgtccgcccgttggctttggttgccacaacaacggattgcttgggatactaataggatggcttgggatttgggagtacgattcccaaacgtgttactatcatatttggcttgcagtggttgtgcaggaggaagatgttgcttgattggagtccctcggagcctagcagtgctgctcagccctatgcattccattggtcgcctcggtaggtaattgggatcctcacgctaccaatttggtcatccctaggaaacatcaaggagatgatgagactgcatcttgagaagaagcattatttacaactc

SEQ ID NO: 447481 - DNA, 480 bp, Triticum aestivum
  unsure (1)..(480): unsure at all n locations
gggnnnnnnttcttcnncnggccggtccanantaacggggccctacaggatccaaacttngtacgcgtgcatgcgacgtcatagctcttctatagtgtcacctaaattcaattcactgccgtcgttttacaacgtcgtgactgggaaaaccctggcgttacccaacttaatcgccttcagcacatccccctttcgccagctggcgtaatagcgaagaggcccgcaccgatcgccctcccaacagttgcgcagcctgaatggcgaatgggacgcgccctgtagcggcgcattaagccggcgggtgtggtggttacgcgcagcgtgaccgctacacttgccagcgccctagcgcccctcctttcgctttcttcccttcctttctcgccacgttcgccggctttccccgtcaagcttaaatcgggggctccctttaagggttccgatttantgctttacggaactcgancccaaaaaacttgt

SEQ ID NO: 447482 - DNA, 354 bp, Triticum aestivum
cggcgaggtcaaaccacgtcgagcactgcagggcggcgcactggaagcccgccctgcagagcatcccggaggcggtggagtcgtgacgctacgcccagtgacgcgtcccggccatggctttcgccgggcttgggtttctcctctctttcttggttgcctctccgccgtgtcttttgttagaacacagcttttacgcggcctttctgtgtcattctttggtttggatccaacgaacaatgtatattggtagggaaagtggtgatacacaccacggtgatgtaaattgtaaagtagatcgatgttcttctgtccatacggctttttgtgtgtggagcacaaaaaaaaaccaacaac

SEQ ID NO: 447483 - DNA, 450 bp, Triticum aestivum
gggtcgacgggtatattgtacggtgggccaggtctgtggtggaggaacacctcctttaacgattcaaaacagggccgtggctcatgccgtcattcccgtcctgatccgtggctcgtttagacctcagtagccgagtaaatggagggatgggttgctgggcagagttctctcctacctccggctcctggttttttctattatcgagtgaggctagatgggcggcggagcttctattcgaaggaaacaaaggctagcgcagaagatggaatttctgatgcaatcgattaaaagaaccaccgtgctggaggacgttaacgatggcaacgtactcatggagccactacactgccagtggtcgcaaccgttgcagacccgctgccgcccatggcggcagtgagtgcggaaggccagatctgtgcggctgatggcatggtcgatactgaaatcgat

SEQ ID NO: 447484 - DNA, 435 bp, Triticum aestivum
cgggccgacggggggatcaatcagtcgcgggcgatgcggatgaatcgggggcctgccgatccactcgacgcggtcgaaccgcctgcgtggaaagggtgagacgcgggcggtaatggccggcgcatcattacgacttctgattttccatatttttacatgggaacaggggagctttggaccttgtgtctagactacaatctaaccatcaatagccagcagcttcatccgcgtaacactgaaggtactcctggaccatgatccatcccttgggaaaacgtttgccgaatcaaaatgtggctcctctgatttgcggcaattagaggccacctcaaggtagtgaaccttctgctgggttggttgaactaccaaaggcgaacggaacaacaattgcacataccctttattttcctggtacaggcaatctccagacatgac

SEQ ID NO: 447485 - DNA, 267 bp, Triticum aestivum
catatatcaatctttacctccgaaccattccggagatcctcgttatgtccgtgatcacatccgggactccgaacaacatttggtgaccaacatacataactcatataatattatatcgtcaacgaacgttaagcgtgcggaccctacgggttccagaactatgtatacatgaccgagacacctcccaatagcggaacctggatgcccacattggctcccacatattctatgaagatctttattggtcgaaccttatgacaacatatg

SEQ ID NO: 447486 - DNA, 277 bp, Triticum aestivum
agtcgtgatagagttagaagttgtaaatatgcattgttgtatcgcgacgtgaatgaaataaatgaaataatgctcttgttcaaaaatatcataaattagaatgtgaggtagtattaatgtaaagtataaaactgaaaaaataactgtagttcagccgatttaaaggatgtaaggttatttacctttgcatgccacgtaataactcttctaaagtgtcatctaatttcagttcatgggcgttctttttacaggttattaactgggaaacccctggctt

SEQ ID NO: 447487 - DNA, 161 bp, Triticum aestivum
  unsure (1)..(161): unsure at all n locations
ggttcntnttgttgctttacttntttngcntttccngcttnctttcnttgtgttcnttcttnacgncttnttttatnttccgttncttttctttttttttttttgtntcatggtttttttattcntnntctgttttttcttngttttnctgtgttntnttt

SEQ ID NO: 447488 - DNA, 486 bp, Triticum aestivum
  unsure (1)..(486): unsure at all n locations
tggngcagcttnttccgcccggcctatacnngnacncatntgnccntgcgannccctaagtgagtcgtattaaggaanaggaaaaaaangcggccgctctagaggatccaagcttangacgcgtgcatgcgactcatagctcttcatagtgtcacctaaattcaattcactgggccgcgttttacaacgtcgtgactgggaaaaccctggcgttacccaacttaatcgccttgcagacatccccctttcgccagctggcgtaatagcgaagaggcccgcaccgatcgcccttcccacagttgcgcagcctgaatggcgaatgggacgcgccctgtagcggcgcattaagcgcgggggtgtggtggttacgcgcagcgtgaccgctacacttgccagcgccctancgcccgctctttcgctttcttcccttcctttctcgccacgtttcgccggctttccccgtcaagcnctaatccgggggctcct

SEQ ID NO: 447489 - DNA, 256 bp, Triticum aestivum
gggttgaactaacgtgagtcgtaatatagttttgcttgctgtttgaatataatagcaagatcttaaagtattagatgttagagagtcttcacatagttgcataattattcgaaactcattgatgctcacttatatctgttcggagtatttagttatctgctccactgcgtgacttacaactttctagctcacggtggcggttttattttgaatgatctacatatctcgcgtgattaacttatgatattgtgagagt

SEQ ID NO: 447490 - DNA, 78 bp, Triticum aestivum
taggcttatgagtcgcgaggtcttgtgtgcaatggcagaagccgccgtggaccgctccaatgggcagctccaagtgtt

SEQ ID NO: 447491 - DNA, 493 bp, Triticum aestivum
  unsure (1)..(493): unsure at all n locations
tgaggngnaacttctancagtctccgtaggccnncanatanccagcggncncgtaggccttncaantccctaatagtgaagtcgtattantgccanaaaaanaaaaagaaaaaaaanaaaaaagcggccgctcnnnaggatncaagcttacgtacgcgtgcatgcgacgtcatagcnttcagagagtgtcacctanattcaattcacgggcngtcgttttacaacgtcntgacgggaaaaccctggngtnacccaanttantcgccttgcagnacatccccctttcgccagctgggtnatatcgannaggcccgcaccgatagcccttcncaacagttgcgcagcctgaanggcaatgggacgcgcccngtagcggcgcattaagcncggcgggtgtggtggttacncgcanctgaccgcaanattgcancgtnnanngnccgntccnttggnttcnnnncntccnnntctcccncgttngccggggctnctt

SEQ ID NO: 447492 - DNA, 434 bp, Triticum aestivum
  unsure (1)..(434): unsure at all n locations
agcaccaagatgacttgcgagggaagangaaaaagatcccaatgtcttgtttgcaagggaaaaacccgccttggacggcccaatggggcaccccaaggggttgcaaggaaccgattttgtactgatcagcttctcaagtaaatagcagaaagatcaccctcccttaagagcctcagccttgactattgcaatgtcaccaacgaagcattcactgagctgataatcaagcttcctctgctcgaagaacttctcatttccctatgtccatttgttgatggtgacgcatatgaggtcaccagcagagcatgtgcgcagctgaagcgtctcatgttgccgcaagggtcgtatgggggtataagagatggggcacttggnatcgagatgatgcacgagctgcgataccttactctcgtcaatagtaatatcacgacaga

SEQ ID NO: 447493 - DNA, 425 bp, Triticum aestivum
gggacacacgaaattcactctcattagttgcagctcgttgtaactatagtccttcaataccttggcacgcatcgtctccatatatttgattactcgagccgctgcaatgtccactgcatcttctgtagaattgtatgaatagccagacaatgacattgcttcataatcacgtcgctgatgttgtgtgctcggacgaacctttaatgtgactgctaatctttccccaactttgtagcagaagaacatcagtggtgggagctgcaacttaatgaacattacatcaagcatgaacttgtctgtaatgtcaacgacccccatgccagtttctgtcgatatagagaacgtgccaatgtctgaaaatggttgtagttgcactcatgcactgcaaagcatatgtaagtggcagaaatgatgaattagtaact

SEQ ID NO: 447494 - DNA, 433 bp, Triticum aestivum
  unsure (1)..(433): unsure at all n locations
ccgggccgacgggtaggtttattagcacaatatatcagatgaatgtcttttctagggctagaggaggtaatgttaattggtttgcttgggaagtgcctatattaattggtagtcaaagttaaccggcatttagtaaagcaatgttgtaggactgggaaattttctttgatctaatgtgctaaagccagttcgggtttgtgctaaacttttgattattctttcagtgaaatgctgaacttttgatggtaaatgttttgtaattggtcaagcacataagaaggcaaactcaagtaatgctatttgattattttgtgaaactttgcagctaggccaactggccaagccatagacaaagaagtgcaagtatatcaggagatctangangacatacctctcgactttcttcagcacaattacccacgagagagaaaaa

SEQ ID NO: 447495 - DNA, 405 bp, Triticum aestivum
  unsure (1)..(405): unsure at all n locations
gggtccagncgggcattttagtcagttgcaaagcttgctctagagcatgagcttgttaaggcaccaacttcaaacaatttcaaattccggtccccaaaacgaacaaaaaaggcggttttcaagccaaccaataactgtccttggccctccaaaatttgcccaacgggtgtggtaataatctttttaagttgatcctggcattccttttgagtttacaatgtacactagggtggctatgcagccactcaattcactttttgtaaccctgtaagatagttagcaactatggtttcggttcatggagtaccgatgagcagcccgccctgtttcttgagtcggcaataagagtgcacaatggtactactgatacaatttgggatatatatggcctaagcctcgattata

SEQ ID NO: 447496 - DNA, 428 bp, Triticum aestivum
  unsure (1)..(428): unsure at all n locations
gtcgacggggatatgcaacgcggctactttgggccctgcggcaccatcgtctccgtcaaggtgataaatgatcagagaatcaggggcaagtgttatgggtttgttacttacactcaacatagggctgctcagcgtgctatcttggagatggatggcaagcaaataggtaatcgtgctgtgagagtaaatgaagtgcgtacaagaggcaacacccgtgattttgggcgtgatggcttccgacgagatcctgtaagagatggaagggatgtatactgggaccgaagggatanggagaggagttatgatcgccaccgggatagagattcctaccatgacagggatagtgatagacctcgtgaccatgatagagacagatatgatgaacgtgggggatttgaccatgacatggactattccatggatcgaga

SEQ ID NO: 447497 - DNA, 109 bp, Triticum aestivum
aggacagctgcacggacggagcggtcagggtgtcaaggcatcggcgagtcgaagtcatacagaattgcagcaccacagttgaacagcgaccgcgggaacgacgtgcgag

SEQ ID NO: 447498 - DNA, 432 bp, Triticum aestivum
tgttgtgcaaggactctggatcgaagcctgcctttgtcggtagttttttttgtcgcccaacaggaaacaacaagcaacatgtaggtgggccggcccaggcggaggactgcctttgcgaagccccgccattctgccacataggagatgcccacgagtgctcctagtcggcgccttatctggcgcccactagcctgcaggaatgggttggcccatttgcattgggtttgtgagtcaacagatgaccagtcaaccattgacttttgaaaaatatgttttttaattctaaaacaacaaagaaactatgattttaaaaatgttcacaagcttcaaaaaagtttacgaatttgaaaaaaaagtccatcaggtttgggaaaattttatcgaattttcaaaaacgtacttcaattttgaaacaaaagttcacaaactaaa

SEQ ID NO: 447499 - DNA, 492 bp, Triticum aestivum
  unsure (1)..(492): unsure at all n locations
gnnnaaattctacgcnngtcgtagccgtcagnagtcacanggnccncgggccgacganccactaatcggcggccgctctagaggatccaagcttacgtacgcgtgcatgcgacgtcatgctcttctatagtgtcacctaaattcaattcactggccgtcgttttacaacgtcgtgacgggaaaaccctggcgttacccaacttaatcgccttgcagcacatccccctttcgccagcggcgtaatagcgaagaggcccgcaccgatcgcccttcccaacagttgcgcagcctgaatgcgaatgggacgcgccctgtagcggcgcattaagcgcggcgggtgtggtggttacgcgcgcgtgaccgctacacttgccagcgccctagcgcccgctcctttcgctttcttcccttccttctcgccacgttcgccggctttccccgtcaagctccaaatccgggggctcccctttaggttccgatttaatggcttta

SEQ ID NO: 447500 - DNA, 181 bp, Triticum aestivum
gaagagcactctagtccaccccagtgtagtcttgcaacgtgcgtttttgttaaaattcgggaatccggaaaatgaactggtcccttgaattttggttggcctggcgggaccaaaaaattgggtaaccccgataagttgccgtgctgggcattggatcctaatcttaatccgttcgtccggc

SEQ ID NO: 447501 - DNA, 493 bp, Triticum aestivum
  unsure (1)..(493): unsure at all n locations
gggggcatttacttncgattcgacncgtntcctgtacacangngggccnggccaagtcttaaaactgantnttantaanggattaaatacagtagacnangagttgantttgaaaantnaggngncanccgtannnnaaaaagngggcgctctagangnttcaancttacgttacgcttgnatgcgaagtcatagctcttctaagaggtggnaccgtaanatttaattcatttggcggtcgttttacaantcgttggtgactgggaaaacccntggcgttacccnacttaatcgcttgcagcacatcccccctttcgtcatntggcgtaantagngantaggcccgtacctgntggccnnttccnnnnanttncncatcctgaatggnnaatnggatctcnccttgtancgggcnattanccnctgcgggtntcntggttancnngcantttnancgcctccnntcttctnnctcccttnnngnccnncccca

SEQ ID NO: 447502 - DNA, 254 bp, Triticum aestivum
tgagtcgtattattgcagaatgaaatccactcaacctcttgcaatctccatcaaactgaactgaacaggctgtaaaatttaagggagaaaataagctgacagcctgcccctttctactttgcagcagccagatcaatgtgcatataacttgcgctcattccttccaatatgtagtactcttccaagtttataaaatacgaaagtggcccggcacgcaccgttccacacccccaaaaggatcaaacctaacaaac

SEQ ID NO: 447503 - DNA, 133 bp, Triticum aestivum
gtgagtcgtattaagtgatgcaacgtgccgtttcgcccaagtcctgtactcggtgcgacgatccgtccctttacgttctgtctgtcttgctggacccatagattgtgtgaccgcgatcacgtggcgtgctggc

SEQ ID NO: 447504 - DNA, 358 bp, Triticum aestivum
aactccctccgttcctagatgtagggtgtacaatttttgacagggatattacagaacgcacatgaaaggataatttcacaagttttgggcgaggttacacctgactaattaacatgagaaaatagaggagattgcctaatacatggaaatgtaattatatccctaaaaaaattatccacacgagtggtgcaacgcaatacaccttatatttcaggttctttctcaaaatcctatacaccttatatcaaggaacggagggaatacttacttactcggtcaatcaattaacacgacatccgctagccccattacatgtgcacacggatcggcaatggatcgatcaacggctggagaccgc

SEQ ID NO: 447505 - DNA, 437 bp, Triticum aestivum
  unsure (1)..(437): unsure at all n locations
atcaattgactagaagctagacccatggaggcaataagcgcaaccatcacccggttttggaaattggtaaacaaaaccggcttgcggccaacaaccaaggaacttctcaagttcttccttaaggcctcaaaggcaaaaggcctcttggacaacaactttgtctcccttatttgacgaaggtcctcgtcggcttcctcgacaagttcaacgtcatcaagaagctcccgaacgaccttgacgtacgcctctagcccatgcgcccatgctctgtgatgcctgccaccctcaacggcctctatggtgacaacctcttcgacgcactggtggccctgcgattgcccgtcgtcgcgccggagaatgtcaacctcgangtcgcgctcaacgcgcagcgcctggcgcagcaagacacaatcgacataatcacccacatctacgcg

SEQ ID NO: 447506 - DNA, 425 bp, Triticum aestivum
cgggtcgacgggaaattaacaacagcaccagtattggttgtgccagacatacacaaaagttttgaagtgtattgtgacgcatcccggaaggtcctcggatgcgtattaatgcaagaaggcaaagtagtcgcatacgcttccagccaactacgaaagcatgaagaaaattatcctactgatgacttggagttggcagcagtcattcatgcactcaaagagtggaggaactttttgctcggaaattggtgtgaaatatatacggaccataaaagcctcaaatatattttcacataaccagaactcaatttacgacaatggcgctagttggaattagtgaaagattatgatgttgacattcactaccatccaggaaaggcgaatgtagtggcagatgctcttagtcgaaaccccagctcgggcaacga

SEQ ID NO: 447507 - DNA, 272 bp, Triticum aestivum
tgggagaaagcaaacccaaagacgtcgtcctgatgacgatcctccattgtagaataccttcctggtttcttttttcctgtatgtatgatgttgatgatgtaaaggctgattggtttgcagccaatttttggcatgccaattgttggcaagcctatttttggcaaagctggaagttgccaacatttggcatgtttggctatcaattggttggttgccagtttttcgccaatatttagcaaaaaaaacatgtgtctatcaattggtttgttacc

SEQ ID NO: 447508 - DNA, 487 bp, Triticum aestivum
  unsure (1)..(487): unsure at all n locations
aattctttcgtcgcccggtcngacaaccgggnccacgagctcactaganggnggccgcttagaggatccaagcttacgtacgcttgcatgcgacgtcaataagtcctcctataatggcacctaaattnaattnaatgggccgtcgttttnaaaacgtctgactgggaaaaccctggggttacccaaacttaatcgccttgcaagcacatccccctttcgccagctggcgtaatagcaagaaggcccgcancgatngcccttcccaacaagttgcgcaacctgaatggcgaatgggcgcgccctgtagcggcgcattaagcgcggcgggtgtggtggttacgcgcagcgtgaccgtacacttgccaagcgccctagcgcccgctcctttcgctttcttcccttcctttctcgcccgttcgccggctttcccccgtcaagctctaaatcgggggctccctttaagggttccgattantgctttacggca

SEQ ID NO: 447509 - DNA, 458 bp, Triticum aestivum
gggtccaggcgcataaatgagctcatttcatgcgatcgaacacgacgccccggccggccggccatcgatcgtgtcgtcactcccggccgtaacacggcgaggaacgactccggcgaccggtcatttgcaagtttccgctcgctcgtaccgccgacgtgcagcggacagggaggactcatgaagctgaagggtttggattagtgttcatgctactactccacaatgagcttccccatgagaagccaatgatccctattgaagcatctaaacgatttttgtctagctatgcgaaatcattactcatgatcagtcagtgcccgtatggagatatcatcaaggggaagctacaaaaatatattggaagaggtagtattgcatactccctccttccatctatatagggcctaatacatttttcgaagctaattttgaccaaatgttagagcaataatatatga

SEQ ID NO: 447510 - DNA, 291 bp, Triticum aestivum
gggaagaagaacgcgcagcctatggccatcgacagcaccgcgtgacgggtctgccgcgtcctggtacagccgggtctggagtttgtatcagcgttgtaccgtggttttggttgtcttgtcctctgttctgcagcttgtgcctcgtctgtgatcggctgcgtgccttgataatgtactcataatttgctgacgtacgattctagtaaaaagagtgtctatttcgttttaaacgaaatttctagagcttttatttgaaaataaagtgaaatgtgtcaatagttcatcaactcg

SEQ ID NO: 447511 - DNA, 308 bp, Triticum aestivum
ttcgccggtcgacggggagtaccgaaggctggcggcgaacaagtgcgccattctgtaaacagtagtctcttgggaaagagttgtcggatgtcttgttaataggagggggtgaacttaagtctgtctagtagcaacagatatactgtacttggttgcatcgtctcgtatattggtagaacttgaatgcttggggagtcggataactatatgttagtgacagttatacttgtcgtctcgtatattagtagcacttgcgacttgcgagtatcatctggcaaaaaaaaaaccaaagaaaatgtaatagttac

SEQ ID NO: 447512 - DNA, 136 bp, Triticum aestivum
acaactacgacaatgactacgacgtcgactacgacgaataccttgacgaccatcttgttccaagaacggggctcaactacagtctgtctactagcaccagctccatcgtacttggttccatcatcgcgtcgattgg

SEQ ID NO: 447513 - DNA, 445 bp, Triticum aestivum
  unsure (1)..(445): unsure at all n locations
ggtagaaagacanatttaaccctgacggagggagagaaatcatgaaatggccgtgtgggaatccgaaggccaaacgggaatgagaaaaggaagtgtgttggaaaaaattcccaattcaatcacagtatcactaatccaacggatcgtgggacgtgcatcgcttgaacataagtcaatatctacttcgtatcagggtcaaaggtacaatatcgattcaacgctgtaaagatccgacactcacatatcacattttcctatttaaataaaccttttcagttgtgcatgccaaagttacagtgatgtttcttcaaacaaccaatgtagctatcatgcacatgcaccactgttactcttgcattcaaattcattagtcttggatgatttaagtttctattttgaagtaatatatgtaatattcatatatgaattcaacgggtatgcaatt

SEQ ID NO: 447514 - DNA, 158 bp, Triticum aestivum
ggttgggcttaattattcacttttatattatttttggaacaaacctaattaaccggaggccaacccaaaaattgcggtttttggccaattcaattgttccggataattaaaaggtcaaagggattcaaaatggaataaaatcttcggtaacttaattt

SEQ ID NO: 447515 - DNA, 55 bp, Triticum aestivum
gggtccacggcgaagggagattggatggatccagcgctcggtgacacaggacagt

SEQ ID NO: 447516 - DNA, 154 bp, Triticum aestivum
attcgcccgtcgacgggcgtcacgtaaccgtttagtttcaccggagttcgttttggcgccatcctttttatttcccatgcgtcggtccactgttttcttcttggatggaataaataacaaaaggaaactagctgtactatgtttctttcgatag

SEQ ID NO: 447517 - DNA, 149 bp, Triticum aestivum
catcatcatcatcatcatcatctcctttcttgtgctaagctgctaacaagatcgatgggtacatagcatggcttgcgcatgaatccatccacggtcacccttcgtgcccattccccctcaaatgatacgggatcgcactggagatgtgt

SEQ ID NO: 447518 - DNA, 59 bp, Triticum aestivum
ggggggcttgagcgagccgtctccgggcaggaataagcaagcatgacgaagcagcacac

SEQ ID NO: 447519 - DNA, 331 bp, Triticum aestivum
tcgacgggtcaatctacaatacttacctctatttaattgattcggcatgtgatttgtttcagacccactactgcagcctcctaattgaacttcagccagtgtgtatcacatattaatcgtacatgggaacttctgccactgtgtcacaaatccatcgcccattcgaacttcggcttacctcacaacgacgatgacgagctcatgtacatttttcacagaagaggtcgagtaacaaatgttcatatatataccgtgggattgggagtcgaaaatgttggtacgctgtcgggcacgtatcttcttctctggttctgctggttcccttgactgc

SEQ ID NO: 447520 - DNA, 97 bp, Triticum aestivum
  unsure (1)..(97): unsure at all n locations
tanacagttnttgggcnctttgggtgtnatnattcttttgaacangtntgggaccctgttgtgcnttatntagctttnngctntggctcatnggtat

SEQ ID NO: 447521 - DNA, 87 bp, Triticum aestivum
  unsure (1)..(87): unsure at all n locations
agnaaaaantttcaaacnaagggggtcnccccccctttctgggaanaaaattttggnggtnttcaanttgtncccccannatttncc

SEQ ID NO: 447522 - DNA, 410 bp, Triticum aestivum
ttcgccggtcgacgggaggatcgactacagcgagttcgtggcgatgatgaggaaaggggcccccgagggggccaaccccaagaagcggcgcgacgtcgtgctataggggacggcggcttggtcgaggaagccggcggtcgatccgcaacagaacagcaagcgatcgagcgtgcgtgcgaggcagctcgcgacgacgacgatgacgagctcatgtacatttttcacagaagaggtcgagtagcaaatgttcatatatataccgtgggattgggagtcgaaaatgttggtacgctgtcgggcacgtatcttcttctctggttctgctggttcccttgactgccaggggaattagtttagtatgtactgtatacatcagttgagtaagttggacaaaaaaaaacagaccaaaa

SEQ ID NO: 447523 - DNA, 87 bp, Triticum aestivum; identical to SEQ ID NO: 447521
  unsure (1)..(87): unsure at all n locations

SEQ ID NO: 447524 - DNA, 205 bp, Triticum aestivum
ggtctatttacatacttctttctatttatttatttcgaccggtgacctgtttcagatcaactagtgcagcctcctaaatttacttctgccattgatgtatcatatattaatcgtaattgggaacttttgccactgtgtatcagatccatggcccattcctacttctccttgcctcaccatctctatgcccgcttatttccatttt

SEQ ID NO: 447525 - DNA, 479 bp, Triticum aestivum
  unsure (1)..(479): unsure at all n locations
ttangcntntcgcgnncaggtaccnggtcaannggggncgacggnaagaagaagcgtcnggctgcaggtttgcagctccagatttcaaaaaaaaaaaaaaaaaaaaaaaaaaaaaaaaaaaaaaaaaaaaaaaaataaaaaaaaaaaaaaaaaaaaaaaaaaaaaagcggccgcncnnaggatccaancttacntacncgtgcatgcnacntcanancncttcaaaantgtcnccnaattcaattcacgggccgtcgttttanaacntcgtnacgggnaaaaccctggnnttaccaacttaancnccttgcagnaaatccccctttcgcnagcnggcntaanaccaaaaaggccgcaccgntcgcccttccnaaaatttgcncaccctnaatggcaaatggnacccnccctgtccggcncattaancncggcgggtntggtggttacccncancgtgaacgctaaacttgccnccccct

SEQ ID NO: 447526 - DNA, 77 bp, Triticum aestivum
gtatgacagataaaatcgatataggttattctacaagattactctaataagacatgaaatatacatgaagcttaaaa

SEQ ID NO: 447527 - DNA, 402 bp, Triticum aestivum
ggggattttacagatgagtacactccggtttcgcggggaaagaagggatatgagaaggagaaaagcacttccaatagcaaggtgaaggcttctaaagtacagaacgaagaaaccggttctgatgatgaatgcaagccaaaatctcagaagagaagtccagctgcgggcaaacccaagatttccaagattaagaaaccaaaaggtgaatatgatgatacaaaggaggaaaagaaaataaacaaggaagttggtatcaagaaagatgaaacgaaggctgctggggtgaagaatgagggggcgacttctacatggctgaaacctatgatgtccatgtcctcggcatcgatctttctatcaacatggtttcgttcgcaattgatcgtgccatcgggcgctcatgct

SEQ ID NO: 447528 - DNA, 360 bp, Triticum aestivum
agctcgacggggaacgtaatccccacggtacgccggttccaagttcagtatccgcccccgcatggccgatatcgccatccgcaatgccgcgctaagtgagcacatgcttgccgtacatacatgccgaagaactccacgccggcggtcgtggtcgcgtctgccgccatggtagcgctggctgtcgctaaccgcgtgctcgaaaagctcgcgctggtgcccctcaagtcctacgccttcttcctcgctcatctcagcatgttcgggtacctcggcctgtacgtttcaatacgctaagtgatgtaccgcgcgggggtggtgaccctggacatgctggaactgccacagatccggttcgctgtc

SEQ ID NO: 447529 - DNA, 120 bp, Triticum aestivum
gggaagttataagacgaccatctagaaggagggtgtgacgtcaagcacaagcactattatcacgggaacatgctataatgatggcgccatgatcccattgagaagtcgagggcacattta

SEQ ID NO: 447530 - DNA, 198 bp, Triticum aestivum
gggaacacgatcatccgcttctaaaactccgttgcagaagaatgtccttaagcaggatagcagaggtccaagacgatcgaataagcacggcctcccgtctgggagttcctaacgacacctggatctccggggtcttcaagtccttccatccatacacggtggcatctggcaccaccgatacaccatcgggctgcatca

SEQ ID NO: 447531 - DNA, 138 bp, Triticum aestivum
gctaagttcatactcttcaaaaatgtctgcgaaatgcaagtaagaggccgtcgccttatatcctaccaacggggaacaatttacgctcacctatatcaatagccatgcagcagatctcactttcgcaatctaggataa

SEQ ID NO: 447532 - DNA, 66 bp, Triticum aestivum
gggccgacgggcccacaaatcgggatgagactccggacgaaaaaaaatagaaagagaagaggccat

SEQ ID NO: 447533 - DNA, 393 bp, Triticum aestivum
gggtatcgtaatcgagaggagggtcgttgggcagccgctgcgatggcgccatcggacccgagccgtcgtatgaggacgccgttccagatcaggttctacacctcttctcgtcggccatcaagcacgcacgtcgccggtcgcctccatgtcgccgcctctcgagagctttgtgcgtggaagagagccgcggggtgtgagaatgagatgaaacacgttccaagggctttgctgcaaatgtatgctgtgccggttactgggtgggtcccatgggtccaggtggcaacggtctgccagtcaacgcaactgcagcgagtttgggacctgggttgtacgccttgaaaacatttgggacccaattctatacttttgaagttttaggactagattgacaca

SEQ ID NO: 447534 - DNA, 170 bp, Triticum aestivum
cgggccgaccggatcgaaagtccaaatgattgcatgaagggatagacgacatcccgattcaagtgaaaaagattttgcaacaagcctgacatgcgagctctacatgatcgaagcttattgtgacatcaaagcgacttcagagctcttagaggaagacatcgcagtcaaag

SEQ ID NO: 447535 - DNA, 396 bp, Triticum aestivum
gggaggcatcgattcgcctaggggactgcggctgctagaagagatgcagcaattgaaagatgcacaggtacttgatgagatgccactaagtcaatctgctatctcaggttatattggatggtaatttattttacaatacaactacacctttcttgaatcagattcggactgtttgcgtgaaattttgttctatagctatttttgggtggctttctttgttttgctttatgttgtatagtcagtagaaaactcaagccccatcatctaacaattctgtagtaatgactgaaactattcgaggacaaatcttggattgttgttgtcgttggaatttagagttgcatggttgacacggtcaacatggcaaagaaagtatagaagatttgccaaaccagg

SEQ ID NO: 447536 - DNA, 411 bp, Triticum aestivum
ggggcacatacacatgttccttggaatattgatggatcccaatgtcgtacttcaaaatgcagcacgcaagatcctagggtcagtgaatctgcctacacttcacatgtgtaaatctgcacttgatggtctcattgcaggtctggacaaatttccagaggatcaagatatatatggtgttctgttttccattggcaacaatcatgggagcttttcagccaatatagccaaacatttagccaacgatatcaatatggcatctgatggagagctgatcttggataaacctagaatcaaagcattgttaatggcttctgtcgtggctgcttatgatgataaagacataaaactggatatacccgcagttatattatcacatgcaattcccctatttgggatgatctcgtgtgcact

SEQ ID NO: 447537 - DNA, 205 bp, Triticum aestivum
gggaaaccttatcgtcaccaatggtgggagattcaccaccgactaccagcagacttgttctgagaagctccggtttgtcacagacaaatactcaaccttgcaccgaatgcgatagattttgaattacaccatgttgaaggcgctccatcatagcataccatgtatggctacatcccttcgagtattggcttaactaacttttagc

SEQ ID NO: 447538 - DNA, 419 bp, Triticum aestivum
gagaaggcaacgacagcggcagagccaacagatggcaagctgaaaccctctccggtagggctcgatcctggtgagattgagtccccggcaggggctgacgccagcacgacaggacccgcgcgaccgggtgaggaggcgtaggagaagaaaatggtgcagcacccactgtatttcgtcagcaacctcttgcagggggctaggtcgaggtactcaggtgtgcaaaagctgctctttgggctccttatggcttcgaggaagctgcgccattacttccaagcgcacgaaatcacggtggtcacccgcctcccattgcaacggatactacacaacccagatgcgatggggaggatcgtagaatgggtcctggagctgtcaagtttcggtttgaaagttttaaagtacctccatgattcagagca

SEQ ID NO: 447539 - DNA, 473 bp, Triticum aestivum
  unsure (1)..(473): unsure at all n locations
aactttttacgcngccaggtnccggtcanagaattnccgggtcgacgagctcactantcgcggccgctctagaggatccaagcttacgtacgcgtgcatgcgacgtcatagctcttcttagtgtcacctaaattcaattcactggccgtcgttttacaacgtcgtgactgggaaaacctggcgttacccaacttaatcgccttgcagcacatccccctttcgccagctggcgtaatgcgaagaggcccgcaccgatcgcccttcccaacagttgcgcagcctgaatggcgaatggacgcgccctgtagcggcgcattaagcgcggcgggtgtggtggttacgcgcagcgtgaccctacacttgccagcgccctagcgcccgctcctttcgctttcttcccttcctttctcgcccgttcgccggctttccccgtcaagctctaaatcgggggctccctttanggttccgaattt

SEQ ID NO: 447540 - DNA, 385 bp, Triticum aestivum
ggggcagcatatgtttgtgtaaacattactatatggaacagggttttgttcttgcgtgagtagtagaagcaatgaccctagtcaagcacaccatcctgaaaccttaatcatgctgacatcagcacagtcatcctaccatttggcgatgatgtaggctccaacgggacacgacatccgtaatgccctcgttgatcatgaccttatgtcgctactttcgcctaaggattatgtgattgctttcaagcaccatatcagagagcgcaccgagatgcattagcgaaccctccccgaaagcgaacttcacaatacatgctaccagaagtcgattaagacacgatgggatatctgccacgaatgaggcaagtacatgcacgccaattcattg

SEQ ID NO: 447541 - DNA, 319 bp, Triticum aestivum
ggggaaagcaagcaggagtgtggtctccactcacatatgagagcaccataagaagaggggaggcttcgcatcacacatgatcttgccagttctggccgtggctcttcacgtcattgtcaacattaggatctacggctgggcataataggtcgcataaggacacatttaatgtgtcacattttctccacatcagctgtgaacactgtgcatatcgtgtcatgctgcctgcgtttaagacggttgtaagacagcgaagtgcttgataatgtaaactgaagaagtcatgtatcagatgtacaaccgcatcaagcatggagcc

SEQ ID NO: 447542 - DNA, 331 bp, Triticum aestivum
ggggacagcttgaggtacaactgatcaaagtgcatccaatgctgaagacgactatcatgaggctgacaaggacgataaaggatcaggagaactgtgatcaaggcaacagtcatagactgctacacctgatagcacaggaagatgcactatcaggatcagttgcctcctcaagggtaaaatcaagcactgtccgagcttagatcagtcatcttatgcatatacattgaacgtgcagtcctcatttgaagacactaacgacacatacgccattcacgacctggatgcatgtggattccgcatcgtgaacctgattagtcaccatgtatccgca

SEQ ID NO: 447543 - DNA, 391 bp, Triticum aestivum
gggatcataatgggctgctggaacatttggatgcagcgtaatggagtgattttcaaggctattccaacttccgttctctcttggagatcttcgtttcgggcagatatgcttttgcttaagcataggatcaaggacaagtttgctgatagactttctagttggattgatcagttcttaacataattatcatgttgcctcaaggtttcactaggactggagttgggtacggtgatctcttgtttatttgggacatctgtaaatatttttattgctttaatatatttaccgtagaacgattgttctacggttttcggttcaaaaaaaaggtgcaaggctggtcatgcgtggatgcctacattccagggccaatttcatcctgtttttctggtcc

SEQ ID NO: 447544 - DNA, 154 bp, Triticum aestivum
ggggtaagacagataatatcgatataggtcattcaacaatattactcaatagatccatcagctctaactaaactgcgtataaatcatgtatgtataacgtactgtgttactgacgttagaagtctaatataaagacacaaatcaacagactaca

SEQ ID NO: 447545 - DNA, 136 bp, Triticum aestivum
gggaagctcatgatgctgcacaacatcaggaccaacctttgtatgaatacgacacagtgatgggataatgctcccccttttatgaacttctactactttgtcaacaacaagttgaagtagaaaaagtaagtaaaac

SEQ ID NO: 447546 - DNA, 395 bp, Triticum aestivum
ggggggcatggaatattcatttggccagatgaagatgctcaaaaactgtcatatcatttggcaaagccaaactggtacttgcctcacaaacatctcctctcgacataaacttggaataattatggtgatcaaatggctcaatgaaatgatgccaaattgtgtggagagatgttttatgggtataagaatgatctgggaatttatcatgatttttgaagcaatataaaatatacttgcttcataacctaacaatattgccagaatcaatgatttgcccctgtgctcacatagataattgtatgaggctgacaatgcgtggaatatgttaatatgatcacattaacgagtgtgcaaaagttcagctaatttgggtactcctagctagtacttccttc

SEQ ID NO: 447547 - DNA, 384 bp, Triticum aestivum
gggcccaagacggcaccccccaagcctgcacccggcccgccgccatacgcccgtcaaaacaccgagacctccccctagacgtacgccgacaattgccatgcatgcatgatgccagtaatatggtatgcgaattaactaaagaagaagccacatatatcatggaggtacccggatatatagatagtgctcgatccataacttatagctggatttcaacacttatatatctagatttacgcccctcaaaaaatatatttagatttatgttattacagtagaaacaatgtcatgtatgacccacggtgattgtacttatactattcatgcaatatatatgtatataggaaaaaaaaacaatagacatcaaaaaaaaaaagcggccgc

SEQ ID NO: 447548 - DNA, 318 bp, Triticum aestivum
ggggtgcaccaattaaagcagatttaggcagggagagatgacacacaacagatccatctatcgtcgctcgccactgctgcaatcttcctgcacctgacggattccgccgggggaccagtgctccgccctgtttacgctgctaactccccaagacttccttcgattacccccgctcgcttcactccttcgaccgatagtgtctggtcaccttcctccagataaacattaaatctcaatattcagatgtgtgtcatttgaaaatatatcaaagatgtgcttagcctaacatggttgcgctctagtagatacatgcataca

SEQ ID NO: 447549 - DNA, 426 bp, Triticum aestivum
  unsure (1)..(426): unsure at all n locations
gggtgaccttaaatgttgcatatgcattgctataagactgtatctgaatgcccgtacattgaacaacactgacagtttttgtcttctggcctatgaaagctccgtctaaggaaggctgactcaaggatccatgcccttgattcttgctccgaaagtggacctgaaaaaactacaagttcgacgattgcgcgaggaacacaatgggttttctctgaatcatctggtaattttcccagtcttgtacatgttgttctttgaatcatgtggtatttctaagtgcactgcatgttgtgtggtggatacaaaaagaggacgcgacgactgatggctgttctctttacacttggcgtggttgacaggctatggagcangcaattttgctatttggtcaatgatggagatgaattcgggagagatgtggacggg

SEQ ID NO: 447550 - DNA, 369 bp, Triticum aestivum
ggggaggtctacgaggcatctcaatctattttgtgaacccatcagtcggataaagcacccactgggcaacggtgatctgacgcaccgccgcagttaagttttcatggcagccacttaaaggttctcatcatctcccatcccgatcgacttacaggcgccgctgtaaagccattatcatgatctaggaaaccacttttcaagggtgtcgcgatatccctatgtttcaccgacaacgtcttgaattatcagcttctaccggcaatcagtcccataggcgatttcggcatattaggattacagcagctcctgggagtctgcatcgcctattataacctccagatacctatgcccagattataaaagctccac

SEQ ID NO: 447551 - DNA, 273 bp, Triticum aestivum
cgggtcgacgggcaatggaggatgtacgtgtgatatgtcaagtagtggacagataagccaaccactggatgtggttttgagggatttttgcagtggggtttgtaaggtgctatgccgcgctgggtttgggatttgaaataaaacgaagggagatgtgccacgctcttaaatgccaaaaaaaaaataaaaaaaagccaaatcaaaaatcaatacaaggaatttaacaacttatctatgcaaatttacaccccgcaattcaatcaatctaaatct

SEQ ID NO: 447552 - DNA, 470 bp, Triticum aestivum
  unsure (1)..(470): unsure at all n locations
ggnnnnnnnnaacttacttgccaggcaccggtcaagaaatcccgggtcgacgagctcacagtcggcggccgctctagaggatccaagcttacgtacgcgtgcatgcgacgtcatagctttctatagtgtcacctaaattcaattcactggccgtcgttttacaacgtcgtgactgggaaaccctggcgttacccaacttaatcgccttgcagcacatccccctttcgccagctggctaatagcgaagaggcccgcaccgatcgcccttcccaacagttgcgcagcctgaatggcgatgggacgcgccctgtagcggcgcattaagcgcggcgggtgtggtggttacgcgcagcggaccgctacacttgccagcgccctagcgcccgctcctttcgctttcttcccttcctttccgccangttcgcccggctttcccgttnaagctctaaatcgggggctccctttagggg

SEQ ID NO: 447553 - DNA, 394 bp, Triticum aestivum
gggcagaagaaacgaatatgaaatcgcccctcgccttggtgaggtctgggccgtttacaaggactggaaggctggatggactgcacgcgattttagcagctgtgactatgagttggtggagatattctgccatactaattcgtccatacgagttcggctgctgaggaaggttgatggttacagggcagtatttacaagggagacaactgtggagaccataggcaaggatgagtacctgaagttctcccaccagatcccttgcttccatctgacaaacgaaggaggaggcaagcttcggggctgtttggagctcgatccttattccgtgccggaggagtttctcctgactgactgaccttgttcatgcatggtgaacctcctggaaggctctttt

SEQ ID NO: 447554 - DNA, 317 bp, Triticum aestivum
gggcatgcaataccaacagagattcgtcatgattttcaagtttgacattgcgccagaatatggctcaagggctgaattctcaggacactattatactacaagtcatcactgtcttcagccatcattctcagtcactgaaccaatcaaatcaatactatttttcatcaatgttttcttggaggtggtagttgttcattagtaaagaactaagctaaaattttgtaaacatagtctcaacataatgtgtcaatgatttcccatactaccattggacaaaatacactcaatgtggtccaatgcacagattgtctcaccat

SEQ ID NO: 447555 - DNA, 419 bp, Triticum aestivum
gggatagagtgggactaatgcccttaagattatcaagagtatatccaatagcaacacggtgcttcttcagagttctcaataatctccttcatgatctgaaaggttagcactaataataacaggatatatcttcttttcatcaagataagcatatttcaaagtatcaggtaattgtttaagctcaaacactggatcacccttgggtggaggagtatccccaaggatttcaacaggcaaattgtgtttcaaaacaggcatttgattaaagaatatttcatctaattccttcctctcattcataaacatatcattttcatggtctagcaaatattgttctaaatgatcaatgggaggcacgacaatagaagcaagatcaataatttcatccttactaggcaaattttttgtcatggggttgt

SEQ ID NO: 447556 - DNA, 479 bp, Triticum aestivum
  unsure (1)..(479): unsure at all n locations
ggnnnnnnnnaactttacttgncaggcncggtaaagaaatcccgggtcgacnngnncacatccggnngccnctctagangatcnaanctnangtnnccgtacatgccacntcatatcnttctataggtgtcnggtaaattcaattcactggctagtcgttttacaacgtcatgactggaaaaccctgncgttacccaacttaatcgccttgcaatacatccccctttcgccatctgggtaatncanaacangtccnnaccgntagcccttctcaananttgcgcagnctgantggaaatgggaccgccnnntanctggcgcattaaaacgctgagggtntttgcngtaaancncncttttnccgctatgacttnccaacnccctaagcccccncccnttcgcctttctncncatctgttcacccnnanatttcgcaaanngntnccccctcaatcctctaaatcctgnnggcccccttt

SEQ ID NO: 447557 - DNA, 473 bp, Triticum aestivum
  unsure (1)..(473): unsure at all n locations
aacntttacgctgccaggtaccggtcaagaattcccgggtcgacggggggcgcaagtgaataccactacttttaacgttattttacttattccgtgggtcggaagcaagagctagaaagctgctgcaagaccaggaagttatgaggacctctctattgcaatggtgctatgcaagctcagtgaggtatttagctcctggatgcatttctctgctgttcgtgtcttcgtagagagtatctgagatatggtctgcctgcacggttcctgtctgttgtcctagcaccatctacaaagatgagaagaaagtaaggaacatcttggaagggctatgcggcaatgccaacagcagctactgagatccgaagatgacgtgggcatggctgctggcctgggaggcgagacagagtcccaccttatgtctccttcaccataaactttgtctgagcgtgtttgatgtatattattttgtgaca

SEQ ID NO: 447558 - DNA, 54 bp, Triticum aestivum
gggggtgaggaccagcagacacaatctgttgttgagaaagaaaaacaagcggga

SEQ ID NO: 447559 - DNA, 419 bp, Triticum aestivum
gggaggcaagctggatctgcccacggaagcttccgatctgcccggcgggcgtcccaattcggtgccggtccgaagcctcaacgggggttcgggttttcccggggggcccaaatccgggcaaccggtggccggcaattttccggcaagcaacttggattccgtctgcgcctccaactcctgccacaacaggcgaagggctctgtgtgtgaaaatttacgatgatatgtcggtaaatattaaattcaagagatctgaggtgatgaaaggtgagaagatgttacaagccaggtgcttgtggagagggcggagaagagcggaaaaaaaaagagatgtgaacatctagaggcctttgccatgttgggtgcgctcgcaaggcaagccgccaccaataataaaaagtttttttttgccccgggggg

SEQ ID NO: 447560 - DNA, 397 bp, Triticum aestivum
ggggatgacaaccttgctatggtggtggctgacgacgaccttgctatggtggtggctgacgacgaccctgctatggtggtggctgacgacgacctcgcgattgtggtgcctgacgctgacctcgcgttttggtgcctaatgatgacctcgcgatggtagtggcgccggcgattccacagctgggcgacaggaccatgccaattgtggtagaggagtacatccgcgttgggatttgccactctgagcgcatcaggttgatgaaggagaagaaggaggagtgaagatgttaagaaaatgaagtggtaatgttaagcatgttgggttaaagcttgtcaatgttaagtatgtcagctttaattttatgcatgctcatggatgctgtatgacagtgtcatct

SEQ ID NO: 447561 - DNA, 417 bp, Triticum aestivum
gggcttctaaaccggtgtgagcgcccttcggttcgcgaggtgggactaaactctgaccgctactaggaccaactctttagtctcggtttgtggtatgaaccgggactaaagggtgagcctctggtcccgattcaagccaccaactgggaccaatggtggtgggccgggagcgaggcccattggtcccggtttgtcccaccaaccgggaccaaaggggccggacgaaccgggaccaatgcccccacgaggcccggcatgcgcctggccgcacgaaccgggaacaatgctcacattagtcccggttcgtgactgaaccgggactaatgtgaatattgccctgtgaccaaagcccagttttctactagtgaattctcatggagaacgaaacatttgaccatctagggcgtgcctccttcc

SEQ ID NO: 447562 - DNA, 433 bp, Triticum aestivum
gggaaactcagattttcctcattattaaaaaatggaaacaaaaagttcaaaaaataaaaaagtagaagttcaactttgaaaaatagaacgcttcaaaatttcataaaaaagattaagaaatgaaaataggaagtccatattataaaggtggagaagttcgatgattatagaaaattcagattttccttgttattaaaaaatggaaacaagaagttcaaaaatgaaataataagaatttcaacttttaaaaatagagcgcttcaaaattcataaaagaggattaagaaattcagattaaaattcataaaaaactcagatatcttcatgtaaccaagaaacgttcagattgataactaacagaagttcacgtactacgcggtgtgcattttgtattaaaaaagaaagaaaaaataaaaggttgaaatatttgttg

SEQ ID NO: 447563 - DNA, 185 bp, Triticum aestivum
gggatcctcaggcatgacaaattcgtcgtcgttgaggcttgcctcgtcttcggagggaggcatataattgtcatcctcgacctctctgtctgccgctctcttatgagggctggcttctccatcctcctgcgttgaatcctgctggagggggttgtcttcggaactgtccggggtgttattgtctc

SEQ ID NO: 447564 - DNA, 439 bp, Triticum aestivum
cccgggccgacggggaatacaatgaggagggctcagtaacttctgacgtggttgtccagttgtgcaaagatgtgcagagaaggtctcaggcgggtggtttcattgactttggccgctttaccaatcatcgctcttttgagaccggttcaaagccgattgactacatccagagatttcacaatggtgatttagcgaaatgtgaaactacgtttgaagagatgggccgtactgcacaggtcaacattatgtgtggacgatgctcaaataaagtatgcaaagatgaacatggatgcatttgcggcgtatcctatgatgaaaggatgtgcaggacggttgttgagctagccattccttgtcctaaaagaggtccaagagtttttacgggtttcactcgtgggcttcacccccggtcagcacaagtggtttacaatggattgac

SEQ ID NO: 447565 - DNA, 188 bp, Triticum aestivum
ggggagcagatcaactctgaaactaccgaaaagttccaagttttcagttccaaattttagcattggaagtctcaaggctcacatcgtactaaaaataatgccgaaaagacggattgaaacataaccaatccaaccgggataaggccaagggaatccgggcccaaaatccccaagaaccaattaggcaa

SEQ ID NO: 447566 - DNA, 425 bp, Triticum aestivum
gggttaccttctatgggtagttctatccttcacggaacttgtagtcttgcagacgctattgccaggcttgtagttgaacttgaaagacaattcatgcacaagcatccttgcatacaaaggattttcctagaattttctaatattgagcattcttctgttaagcgtgccgctactatctttttggctcatgagtttagattcataataaaagaggccaaagaaatatttgcgcattatagggtggacgcttgccgtcctcccatagagtctatccttttttatcaagaagaaataatgcgttttcaatctctagactatgtttctttcaatgaaaatcttagaaaaagggttccttccaatgttttagttgatagaatttctgagcttaatgatgatttgggcaattcgaaataatgaactaggat

SEQ ID NO: 447567 - DNA, 282 bp, Triticum aestivum
ggtctagaattaccgggccgacgggcattttcattgcatatattttacgcacgtttttcctttattttgcacatatttaggtaattttagatctactacggtctactgcatagctgcgttcactctaatgagtccctgatctattttaggcgcaggctatcagcccgcgaagatctggggtgaccgacgctgaattagtggacattgttgaacttgtcaccaaatcaccgataattactgctgagtattttatgtagactaaaaaaaatactaacagcggga

SEQ ID NO: 447568 - DNA, 208 bp, Triticum aestivum
cggtcaggacatcccgggccgacggggcgtttcacgagttcttgatggacttggagaaatgcgtttcaaaaaaattctggaaaaaaagtcgaatgttaaactgttaattgaaaagcgagacaggagagcagtgtggtttcgcttgcattcctcgtctcatacctccttttgctagtccaaagtatcacggaacttcgttggaacctca

SEQ ID NO: 447569 - DNA, 370 bp, Triticum aestivum
ggggccaagaaggagctggaggccaagtgccccaacacggtgtcctgcgccgacatcatctccctcgccacccgcgactccgtgaaactcgccggcggcccggactacgcggttcccacgggccgccgcgactcgctcgtctccaaccgcgaggagtccgacgacaacctgcccggcccggacatccccgtgccccaggtcacggccgacttcgtgaaggccggcttcaccgccgaggagatggtgctgctgctcgccggcggccacagcatcggcaaggtcaggtgcatcttcatcgagcccgacgcctcgcccatggaggcgggctatcacgccagcatcagcaagctctgcgacgggcccaaccggg

SEQ ID NO: 447570 - DNA, 356 bp, Triticum aestivum
cgggccgaccggcaggataaacacatgtatacacgatgattgtccgtgacatcactgaaaacacgacttttaaaggccacacacaggacatcctatggcaacaacttcacagttaggttcatgacgtaagacaattgcagcattttgaacgacaaccttggttaaacattcgcaagtgttacaaacaggcagttagcgcacgaatgtctaaggaattacgcaaccctaatcgcaacttcaatgtgatctgcaaccgcacaatcattccaattggtcagctaggtaagctcagtatcaggttcatgcttgtagcctcgaatacttcgcaacccagctcattctgtccaaccattcac

SEQ ID NO: 447571 - DNA, 373 bp, Triticum aestivum
gggacgtgggatgaaatgtgcatcttcctttctttatttttgtgtcatacctatgtaccgtgggactgaaaaatgttgtatcttcagcagaatggagacatcataaatattgatgtaaatgtgttccgaagtgtaagttcactctcctaggattgtggatatgcttatgtggtatgtttggcatacagtcggattttgctgacaaattgcttgcaaggctgataggtttattgagatgcctcatatgcaagctcataacccactgttaaagttgtctgttgtggagatgactgggttccatggctaatataacacattttacctgttatgtacttcatctgagctggatagcaaattgcattttaatgctgat

SEQ ID NO: 447572 - DNA, 528 bp, Triticum aestivum
  unsure (1)..(528): unsure at all n locations
tgntntatnaaanntctaccgcncantaccggtaataaattcccggggnngacggngacncaattgatattttnnctctttatnntttttattcctnaatatctttactctnatttttcatttttctattntntnttntntttnttttatnttttnttnattccnantttttntttatattcttttttctttttctttaatttttttctttttncatnttnttntttctttntnttttttctntttattanttttttttctcttttttttttttatttatttctttttttttntattcttnttttattctanttnnttntnatctcttcttcttctttcttacctttacatntatctttntattcctttcttttcttntnatnctcttttatntntttnntncatttctntnttttacttttctctttttttttcttncccttccntttctttnttttnttcttttatctcatcttttgtttnntttctttttttcttatttttttctaantattcttttcttctntg

SEQ ID NO: 447573 - DNA, 445 bp, Triticum aestivum
cgggtcgacgggggcagatcaactatgaggagctcaaggctgggctggagagggtgggcgccaacatgaaggagtcggagatatctcagctcatgcaggctgccgatattgacaacagtggtaccatagactatggagagttcatagctgccactctacacttgaacaaagttgatagggaagaccatctatatgccgccttccaatactttgacaaggatggtagtggatacatcacggctgacgagctccaacaggcatgcgacgagtttgggattgaggatgttcgacttgaggacatgataggcgaagtagatcaggataatgatggacgcatagattacaatgagtttgtggccatgatgcaaaaatcgaccgcaggctttgggaagaaaggccatcagtataacgttagtgtcggtcttagggatgccttgaacataaa

SEQ ID NO: 447574 - DNA, 436 bp, Triticum aestivum
gggtacacccactgcaaagctgttggtccgggcaggtgcgcgctgaaccacggcgggtgctgggcggagaccaagggggagcgcaccttctccgcctgctcggacacggcgctgagcgggtgccggtgcccgccggggttccaaggcgacggccacaaatgcgaagacctggacgagtgcaaggataagctggcgtgcacctgcccggactgccactgcaacaacacctggggcagctacgagtgcggctgcaggggcaaccaggtgtacatccgcggggaggacgtctgcgtggccaacagcatgtccaggttcggctggctcgtcgccctcctcgccgtctcctgcgccgccggcctaggggtcgccggcttcatcttctacaagtacaggctcaggtcgtacatggactcggagatcatggccatcatgtccc

SEQ ID NO: 447575 - DNA, 116 bp, Triticum aestivum
ataaataaactgagtactacaatgttatagccatatagtctggcaatactattgtactggtaatcatgaggttgtatgcttttccgatgagctgcagttcatcggaactccgtccc

SEQ ID NO: 447576 - DNA, 441 bp, Triticum aestivum
tcccgggccgacgccgtcatgaccatccccaagggctccctcttccccatgtgcggcatgaacctcgccttcgaccgcgagctcatcggcccggccatgtacttcggcctcatgggcgacggccagcccatcggacgctacgacgacatgtgggccggctggtgcgtcaaggtgatctgcgaccaccttgggctgggcgtcaagacggggctgccctacatctggcacagcaaggccagcaacccgttcgtgaacctgaagaaggagtacaagggcatcttctggcaggaggacatcatccccttcttccaggccgcgaagctgaccaaggaatgcgacaccgtgcagaagtgctacatctcgctctcgcagcaggtcaaggagaagctcggcaagatcgacccctacttcgtcaagctcgccgacgccatggtcacctgg

SEQ ID NO: 447577 - DNA, 374 bp, Triticum aestivum
agcagctaactagaccccagcgttgctggcagcgtcaaccccgacgatgaggtcaccgtcacccccaaccttgacgcccaggtcagtagaaggtacatttgattgctggtgtggatggaagagtgacaataactacaggttggtcaaaggttgaaagaaattctcctttaaattaggccaatgctactcaacttttctttgagtgacgaggaatttcaaccgtccttggcgaaggactgctatctgattgtcactagcctcgtgtgtaaatgcttcgctttcaatattttgtactatcttgctgccctatgtgctacttaagcctgatctattaaacattacttggcctattcctttgtgccgagcttgatgtg

SEQ ID NO: 447578 - DNA, 420 bp, Triticum aestivum
  unsure (1)..(420): unsure at all n locations
gggctagttctcatattcctgtgtggcagaccaaattggtgtggaagccagaaatgcagtacacgtaggagatgatgaaactgcagacaaggcgggtgctaacgctattggactcaagtgctggtatgcaattttctttcatacattgtggtttcttccccgtgcagacatcgtgtttcaatagtatcgggtattattaatttatcgggacaaaaagcgaaggaaaaaaaacattattgaatatctggttcggtggctgaccggctggctaactgattgttactgatgttgtccatttttaggctgtggggagaagatgtgaagaaattttctgagatacagcaccagatcgtagcaaaaggctcacgatgagtgcagggcaatgtctctgtntgcctgatttgttcatttgattgcaaa

SEQ ID NO: 447579 - DNA, 420 bp, Triticum aestivum
gggatatgaatcaatctgggtagtagctgattcgcttgaccaaagtggctcactttatcccagtgaaagccacctatacaagtgcgaagttggccatgatatatatgaccaggatcgtatgtctgcatggagttccgaggaccatcgtatcagacagaggaacacagtttacctcaaagttttggaatcagctgcaccagactttgggtactaggctagagttcagtacagcctttcatccgcagacagatggatagaccgagggagtcaatcagatcctgaaggacatgttgagagcgtgtgcgctagattatggatctagtagggatgataatctactttacgcagagttctcatacaagaacagttaccaagccagtttgaagatgaccccttttgagcctttgtatgggagaagga

SEQ ID NO: 447580 - DNA, 422 bp, Triticum aestivum
gggtatatgatatacatgttattgatgtgtaccttactaatgctcgcagtagcacctgggtatttgatactggttctgttgctaatatttgcaactcaaaacatgggctacggattaagcgaggattggctaaggacgaggtgacgatgcacgtgggaaatggttccaaagtcgatgtgatggtggtcggcacgctacctctacatctaccttcgggattagttttagacctaaataattgttatttggtgccagcgttgagcatgaacattatatctagatcttgtttgatgcaagacagttattcatttaaatcagagaataatggttgttctacttatatgagtaatatattttatggtcatgcacccttgaagagtggtctatttttgttgaatctcgatagtagtgatacacatatt

SEQ ID NO: 447581 - DNA, 473 bp, Triticum aestivum
  unsure (1)..(473): unsure at all n locations
ggnnnnnnnnttnnnttgccnggcccggtcaanncaancngtcccgggccgacgngcncctantcggcggccgctcnagaggatccaagcttacgtacgcgtgcatgcgacgtcatagtcttctatagtgtcacctaaattcaattcactggccgtcgttttacaacgtcgtgacnggaaaacccnggcgttacccaacttaatcgccttgcagcacatccccctttcgccagctgcgtaatagcgaagaggcccgcaccgatcgcccttcccaacagttgcncagcctgaatggnaatgggacgcnccctgtagcggnncattaagcgctgcgggtgtggtggttacncncaagtgaccgctacacttgccaagcgcnctaacgcccgctcctttcgctttcttccttcctttctngccacgttcgccggcttcccccgtnaagctctaaaatcggggggccccccttaagg

SEQ ID NO: 447582 - DNA, 421 bp, Triticum aestivum
gggagcgattatgtgtggacatacacagatgactgaggaaattactagagctcctgttgctgatggtatgtccaaagatacaatcctaacaaacttctgagtttcactagaacacgtatcttgcccttttggctgttgtacacctaccagcacactctagtggctcttgtttacagcaaatgtgatgcgacttagggtcgtgaaagagatactgccacgtactaacagattacggcaatccattttccctcatgctgcatgttgcgcatcaaccattgcatgttgatatcctgatatattaatctcaatgacagaacaaaatgcttggtggtgccctgatacatcattcgcctgcaaggtgatgatgcactcgaaaagcccctttctagaaaagtataacggggctcaatatgggacattg

SEQ ID NO: 447583 - DNA, 402 bp, Triticum aestivum
gaaatcccggctcgacgggctacaaataaggtctttgaaaaagatccaaactctagaagatagtaaaccaccttcagtgttcatagatactgctccagcacagagaatttgtaggatcgaaagtatgtctagaggggggtgattagactactcgaccaaataaaaatctagccttttcccaattttaagtcttggcagattttaacaacttagcacaagtcaagtaatcaacctacacatgcaattctaagagtatagcagtggaatgtaaaacaattgcatatgaaggtaaagggaggagtttggagggagaaaacgcaatgtagacacggagatttttggcgtggttctgataggtggtgctatcgtacatccacattgatggagacttcaacccacgaa

SEQ ID NO: 447584 - DNA, 434 bp, Triticum aestivum
  unsure (1)..(434): unsure at all n locations
aactttagtnncnaggccngangggaacggggtcgacgagctcacaagtcggcggccgcctagaggatccaagcttacgtacgcgtgcatgcgacgtcatagctcttctatagtgtcactaaattcaattcactggccgtcgttttacaacgtcgtgactgggaaaaccctggcgttcccaacttaatcgccttgcagcacatccccctttcgccagctggcgtaatagcgaagagcccgcaccgatcgcccttcccaacagttgcgcagcctgaatggcgaatgggacgcgcccgtagcggcgcattaagcgcggcgggtgtggtggttacgcgcagcgtgaccgctacacttccaagcgccctagcgcccgctcctttcgctttcttcccttcctttctcgccaagttcgcgggtttcccccgtcaaactca

SEQ ID NO: 447585 - DNA, 450 bp, Triticum aestivum
  unsure (1)..(450): unsure at all n locations
gngggtggtgnaaattttacttgttcaggctcggaccagganaccnggccncgccctagggaacacncttacgtacgcgtgcatncgacgtcatagctcttctatagtgtcacctaaatcaattcactggccgtcgttttacaacgtcntgactgggaaaancctggcgttanccaattaatcgccttgcancacatccccctttcgccagctggcgtaatagcgaagaggcccgcccgntcgcccttcccaacagttgcgcatcctgaatggcnaatgggacgcnccctgtancgcncattaancgcggcgggtgtggtggttacncncagcgtgancgctacacttgccagcccctaagcgcccgctcctttcgctttcttcccttcctttctcgcnacnttcnccggcttccccgtcnaagctctaaatngggggcnccctttaang

SEQ ID NO: 447586 - DNA, 424 bp, Triticum aestivum
gtgacgaatgacattggttggaggtgctatctcttggaagagcaagaaacaaacttctgtggcgcagtcttctatggaagcagagtacattgctgcgaatgaagctgtaaaagatggcgtttggttgaggaacttcctggtttctctcgagatagttgaaaatgcgtctgatccggtcacttttattgtgataattaagctgcgattaatctttccaaggattccaagtttcatagcagggctagacatattgagggaaagtaccattatattagagatgtaataaataggctgaaaactgttcggcttgcatttttgcctggtaatgatatgttggcagatccactgactaaacctcttagtcaggaattgttttgcaaacatgtcaggaacatgggccttaagatttttgattgaatgtttt

SEQ ID NO: 447587 - DNA, 386 bp, Triticum aestivum
gtgaggcaacgctatctgagggaggcgttcgggatgtacgcatcatcatccacggaagccacgatgacgacgatgattacgccggcgagcctgaggcggacgctgagcaggctgggctctcacgaactgggcgtggacgagtgcacggcaatgatctgcagatttgacctcgacggcgacggtgccctctcgttcgatgagttccaggtcatgatgatggcctgatcatcgaccctcttcgtggcatttttctagactgatatgattttccacttaatgcatcgatcgatcacatgtatttgtacgtgttcattctttcgttgatttgctcgcacgatcatcctcgatttttgtgaacacgtgtacagattcatttggagtcacac

SEQ ID NO: 447588 - DNA, 285 bp, Triticum aestivum
gggcggtaatagctctccggcatgacgatgtgcatcctcaactgcgacaagaacctgaccccgatgtgcaacaagatcttccacctggggacctgcatctgagacgtacccttgcatgcaggcgatcgctcatgggaatgccagcgctggcacatgcaacagcaccgatatgcacagaattgagtttgccattctgttctaaccaggatcattgcccacaaatctagaatgccatcatgaccggatccttttacgactttttcccgggcctgccctttgttgagt

SEQ ID NO: 447589 - DNA, 397 bp, Triticum aestivum
gtcgacgggcatgcaaaaggaggaaagacaaagagattcagcggtctggtgttggtgtgacgactgaggagaggccacaccctgtgctgttagagagctccgttatccagcttgacgaggagctggacgcaggggtctccaagtgaagtggttgtaatcatggtagctactagttgtttttttgtcttgatctatctgggtctaagattctaaaatacattcgcccatacatcagtactagataggggtgtggcttgccacgcattgcccagccaacggtaagccatcggatatgataatcggttcaatatatagctgaattagatattttattgttgtgttgggagctgtcttgagcacatagttagaaatcatgtttgtagttgctgaaagaaaa

SEQ ID NO: 447590 - DNA, 295 bp, Triticum aestivum
cgacgggggggacagcgcggtgccgttcgtggtggcgctcttcagttgcatgcattggatcttctactcgctggtcaagaccaattccatcccgctgctcaggagcaatgcctgcagctgcgtcatccagggcttcaagatcctgccctacgtggggtactcgcccagagccggcaggcaccacgcccacgccttcttcctcatcgtcgacggctccgccttcgcactgaatgtcaccgtgagtgttctcctcgtacgacagcctagtcgcgtcaaagtccttgggagagtctgc

SEQ ID NO: 447591 - DNA, 405 bp, Triticum aestivum
tcccggctcgacgggtcagtaaatttgatgatgttttacttttggaaagctgtatttgggtcagaactgcttggaaactagctatattaatgtaatgtaatgtaatgtattgtgtgtctgaactgcatctgttgtgaactgcctgctacctgtggtggtaacctagaatgctatctatatatgtgtggccttaactttattggtggtgaatgcttccttcatgtttagttgttgtttcatggtgcaatgaacacaaatggcgcttcggtgttgcttcagacatgctgcaacacttgtctatgatgtgggcaagtggaacatgctgtgcccatgtgccaattacaccaaatattgaatgtggcaatgttccaaaatggctgtcatgaattatagtacatggggttt

SEQ ID NO: 447592 - DNA, 422 bp, Triticum aestivum
  unsure (1)..(422): unsure at all n locations
ctgaataacggatggtgggaggggatcgtgctgcagcaggagactgctggccacgtccaagtttatctccaaggtgaactgcctgcctactctctctggctctcatcacctagctagcagttaatagtactccctctgtcccaaaataagtgtcttaactttatactagctctagtacaaatttgtccaaagctcaagacacttatttatggacggatggagtagtatatattcggttggtacttataacactggactggagcttttcctgatgcattgcatgcttgccaaaatttccaggggaggggagacttgtagagctccaagtggagtgtctgcggaagtcatttgagtggcgtgaggagcaatggctgcctctagatgcangaaaagatgttgcggccaagataacccttgacctg

SEQ ID NO: 447593 - DNA, 403 bp, Triticum aestivum
  unsure (1)..(403): unsure at all n locations
ggtgacgggcggggggggaaggaaagacccctggtcctatttataaaaggcaaagggataagtgacaggcgcgagaatcgaggagcccaaaagttagatatatggcagagctgtcgcctcgattgtcggaggctcattaaggaaggtgagctatatgcaatttttaataacaggtgacgtcatggcggtttatcatgattctggaagatgacattatggcggtttacaagaattctgtgaagatgatgatgcgtttaagattgacatgaaccagttcagatcaatctggggcctaatgttggggatattactactgggcataaaccggccaggagaggccgggttatccccacaatggtttactgtnactgaagcccatgaagacagacggtggtgctttatg

SEQ ID NO: 447594 - DNA, 377 bp, Triticum aestivum
atccaacatatcaagagatttagaaggccgaaatggttcaggcaacttattgggcaaggctcctcctatgtggaccgcgagagatttagaaggccgaaatgattcaggcaattgccgaacatccaacttaataagaccatcatggattccaaccgagttatttgtgatatccagaatataacccgacacaaagagttatttgtgatagaagtacatgcatttgcaaaaaatagataatgcattactcttatattctactccctttgtaaactaatataagactttttagatcactaaagtagtgatctaaaaagtctctattagtttacagagggagtagtatgctatctccatatttttgagattcttaaattatc

SEQ ID NO: 447595 - DNA, 273 bp, Triticum aestivum
ggtggccgggcgccagcgacaagcaaagtagggtaggggatgaggagtctggaattcagaaccaggtgcgaagttcctttgctggcggcaatgataaccaggcctcctacaaggagctgccatcaaatggcagcccctccaagaactaggcaataggcgcatagactgatactcgtacggcaataggcagttacaacaattctcagtgaggaaatccttgtacaagtaaaggggaacctgtccagtttgagatatcaactttcttctcgttgt

SEQ ID NO: 447596 - DNA, 405 bp, Triticum aestivum
gctcgacgggaagcaaaggcttgccgagttgctgaaggaggctggacgagggagaagcaggaaggcaaaatccctggaaaatcttctagagaccaacccatacaccatcgggaagaggactacagttgcaacgtgagtgaactacagcttttgaaagagaaaaaggaacactatgacgctaagaatttgtgtatcaattggtttattcaaatttggtgagaggggtaaatgggaatagcagtagcgttttgagtatcgagatacaaaaatggtctgattgattgttgtaaagttgcaaaggctattttcacttgttattacttgctcggtgtctagagcaattaactgtgctcgttgaacaggtgtgttttgcctagtcctactagttacatacactacaacaaa

SEQ ID NO: 447597 - DNA, 211 bp, Triticum aestivum
gttgctgaaggaggctggccgacggataagcaggacggcaagttccctgtaaaatcttctatagaccatcccatacaccatcgggaagacgactacatttgcaccgtcagtgaactaccgcttttgagagaacgaaggcacactatgacgctaagaatttgtgtggcaattggtttattcaaatttggtgagaggggtaactgggaatagg

SEQ ID NO: 447598 - DNA, 400 bp, Triticum aestivum
ctcgacctcagtggaagctgggaaaaaatagcgaagatcagtagaagggcgcccgttcaggggggcaacagacaccctttcgaggttggtggcggtagctggtccctccaatcggcccaaagttactaggccctggcagatcttcttctttgtttgggttcaagtccgagtcctcccactggcattccggataagaatgaatgtcaaataaggattagagttagaaacaaaccatgaagttgacatcaacggggaaacataaatttagacgagtaaagtacatagactagtactccctccataaagaattataagagcatttggatcactaaaatagtgatctaaacgctcttatattagtttatacagaggtagtaaatgtataccggatgcaagcatg

SEQ ID NO: 447599 - DNA, 425 bp, Triticum aestivum
ggtggacgggctttgaggatatcatagcctggcaacctaatcgcaccagaattttttcagtgaaaactgcgtaccatttgcaatggatgcacactaatagggcacatgcaaatatgatggagagtgcaagtcccacgtatggtggttcagcgcctttggcagtgtggaatacactttggaaagtgcaagtcccacgtagaattcagatttttgggtggagggttctgcgaggaatcgttccgctaaaagcaatcctgacaaacagacacattggttctaatggggcgtgcccgatatgccatcaaggtgctgaggatattaggcatcttttatttctatgtgtgcatgcaaaggaagtgtggaggcgtcttgggatgttgcaactggtggaagatgttgttctagtggattcgggctcgattata

SEQ ID NO: 447600 - DNA, 532 bp, Triticum aestivum
  unsure (1)..(532): unsure at all n locations
ggnngtttgcaatgtctnnctgttgngtnggtccgnncattatagggcncaatgccaccgatgcnncacanccagtcgcgtaccgtcttcatgggagaaaataatactgttgatgggttctggtcagagacatcaagaaataacgccggaacattagtgcaggcagcttccacagcatggcatcctggtcatccagcggatagttaatgatcagcccactgacccgttgcgcgagagattgtgcaccgccgctttacaggcttcgacgccgcttcgttctaccatcgacaccacccgctggcacccagttgatcggcgcgagatttaatcgccgcgacaatttgcgacggcgcggcagggccaaactgggaggtggcaacgccaatcaacaacgactgtttgcccgccanttgtgtgccacgcggttgggaatgtaattcanctccgccatcgccgcttccaatttttcccggttttcccaanaaacnttgcttggcttggttaacnacccgggaaacngtctgataaaaaa

SEQ ID NO: 447601 - DNA, 535 bp, Triticum aestivum
  unsure (1)..(535): unsure at all n locations
cgnttnngcaatgtnttnnngtgtcggcccggtcntgtatntngggtggccgggnctgtgttntngttgttgttgttgtcgttgttgttgttgttgttgttgttgttgttgttgttgtgttgttgttgttgttgttgttgttgttgttgttgttgttgttgttgttgttgttgttgtgttgttgttgttgttgttgttgttgttgttgttgttgttgttgttgttnctgttgctgtgctgttgctgtcgctgttgctntcgntgttgntgttnntgttgctgttgttgttgttgtgttgttgttgttgttgttgttnttgttgttgttgttgttgtngttgttgttgttgttgtgttgttgttgttnttgtngttgttgttcttgttgttgttgtcnntnttggttggttgctgttgttnnttnctgttgcttggccgtngtnntccgnngtntngnnnntcgcntngctcgtgtctnnttngttngtcnncgttgncnctncctctncgcngtncctccttnntgcngctnntc

SEQ ID NO: 447602 - DNA, 222 bp, Triticum aestivum
ggtatcacaataattatgctttttcactcttattttataaggtttacatgaagagggagaatgccggcagctggaattctggactggaaaaggagaaaatattagagacctattctgcacaactccaaaagtactaaaacttcagggagaattattttggaatatataaaaaatattgggcgaagaaagcaccagagggggggcactagccatccacaaggg

SEQ ID NO: 447603 - DNA, 529 bp, Triticum aestivum
  unsure (1)..(529): unsure at all n locations
ggnggnttgnaatgtctntctggccgggtcggtccgacgatngagggtggncgagctcatagtcggcggaacgctctagaggatccaagcttacgtacgcgtgcatgcgacgtcatagtcttctatagtgtcacctaaattcaattcactggccgtcgttttacaacgtcgtgactggaaaaccctggcgttacccaacttaatcgccttgcagcacatccccctttcgccagctgcgtaatagcgaagaggcccgcaccgatcgcccttcccaacagttgcgcagcctgaatgggaatgggacgcgccctgtagcggcgcattaagcgcggcgggtgtggtggttacgcgcaggtgaccgctacacttgccaagcgccctagcgcccgctcctttcgctttcttcccttccttctcgccacgttcgccggctttcccccgtcaagctctaaatccgggggtccctttanggtccgatttaatgctttaaggnacctcgacccccaaaaaattnantagggtgatggtt

SEQ ID NO: 447604 - DNA, 540 bp, Triticum aestivum
  unsure (1)..(540): unsure at all n locations
gggnnnnngnaatgtctagtntgggtcgggcccggtccgagattacacgggtngncgagtcactagtcngcggncgctctagaggatccaagcttacgtacgcgtgcatgcgacgtcaagctcttctatagtgtcacctaaattcaattcactggccgtcgttttacaacgtcgtgatgggaaaaccctggcgttacccaacttaatcgccttgcagcacatccccctttcgccagtggcgtaatagcgaagaggcccgcaccgatcgcccttcccaacagttgcgcagcctgaaggcgaatgggacgcgccctgtagcggcgcattaagcgcggcgggtgtggtggttacgcgagcgtgaccgctacacttgccaagcgccctagcgcccgctcctttcgctttcttcccttctttctcgccacgttcgccggctttccccgtcaagctctaaatcggggggctcccnttagggtttccganttantgctttacggaacctcgaccccaaaaaaacttgattagggtgatgttcaactt

SEQ ID NO: 447605 - DNA, 544 bp, Triticum aestivum
  unsure (1)..(544): unsure at all n locations
gnnnnnngnaatgtctctctggtanggccggtccgngcattacacgggtggccgggnaaaagaagaagaaaaaaanaaaaaaaaaaaaaaaaaaaaaaaaagcggccgctctagaggaccaagcttacgtacgcgtgcatgcgacgtcatagctcttctatagtgtcacctaaattcattcactggccgtcgttttacaacgtcgtgactgggaaaaccctggcgttacccaacttatcgccttgcagcacatccccctttcgccagctggcgtaatagcgaagaggcccgcaccatngcccttcccaacagttgcgcagcctgaatggcgaatgggacgcgccctgtagcggccattaagcgcggcgggtgtggtggttacgcccancgtgaccgctanaattnccaacgcctaacgcccggtccctttcgctttcttcccttccctttctcgccaagtttcnccgggtttccccgtnaaagctcctaaatccgggggggnccccctttanggttccgaatttaatggcnttacggnaacccc

SEQ ID NO: 447606 - DNA, 60 bp, Triticum aestivum
aagtactaacatgttgcgacatcaagtttggttgctatataggttccagtcatatatata

SEQ ID NO: 447607 - DNA, 517 bp, Triticum aestivum
  unsure (1)..(517): unsure at all n locations
ttttctgccggttcgtaccggaaccngtnttccnggggcgccgagctcactagtcaagcgccgctctagaggatccaagcttacgtacgcgtgcatgcgacgtcatagctcttctatatgtcacctaaattcaattcactggccgtcgttttacaacgtcgtgactgggaaaaccctgcgttacccaacttaatcgccttgcagcacatccccctttcgccagctggcgtaatagcaagaggcccgcaccgatcgcccttcccaacagttgcgcagcctgaatggcgaatgggaccgccctgtagcggcgcattaagcgcggcgggtgtggtggttacgcgcagcgtgaccgctcacttgccagcgccctagcgcccgctcctttcgctttcttcccttcctttctcgccacgtcgccggctttccccgtcaagctctaaatcgggggctccctttaagggttccgattaatcnttacnggcactcnacccaaaaaaacttgataaggtgatggttc

SEQ ID NO: 447608 - DNA, 437 bp, Triticum aestivum
  unsure (1)..(437): unsure at all n locations
gggtggacgggcgagtgctggacagcatctttctttctctccgtgtgcatgttgcctgcctgagtttgcgagtggccgaagcgaagcaacctcttctctgctgcctgcaacttgccggacaagtctgaatctgcaatccagtgcgaaccaatcgcatcgatccgatccgatccgatcggaacggccggaccaaccaatcaatcaatgccgctgatgctgcgtgcaaggaacatccaggttagtctagcaccactgctgacagaaagatagtactccaatgggtgtgcgtgcactccaccgcgtgcgccagatagatagatagatagatagatcaatcaattatcgtggattcaatcatcacccatgcgtgtcgctcacnagacataacgtctgcattatcagttgttgttgatagcactaataactcccctgccaag

SEQ ID NO: 447609 - DNA, 389 bp, Triticum aestivum
tcccggctcgacggggtttcatgagtggagctggtgaaacggaacttcaactacaacgcaggagaatccaagaacgtcgtctaagcttgttagctcaaattgaagacgtacgccgaactagggcgatacagcgttcgagtcgaaagaagcatggtggcccatttggtcaagaccttgtaactgtggcagtcgtcggatatacaaatgctggaaaatctactctagtgaatgcactttctggagctggtctatacagtgatgatagattatttgcaacagtagatcctcgattacgcagtgtgattcttccatcagggagaaaaatacttctcagcgataccgttggcttcatatcagatttgcctgtacagctagtggaagcatttcat

SEQ ID NO: 447610 - DNA, 410 bp, Triticum aestivum
atatcccggctcgacgggcaatgagtcgtttaccgagcggtagaggtgaacatttgaaccatgcactctgcatgaaggtggtgatgaatataaaggtgtcgattaccagtccgtaaatgtgggtgacattgtagataacttccgtcttcaggagcagactgcttttgtttggaagcattttagctctcacataaatcactacaacagtaaccactctgcgaaacattctagggataacatagaatgttttcaagaccaatgttcaggtctgcgatacacgtaaacatctatacacagcctcacgagacacttcaatacattgttggttaaattaagcattaagatgacagggatttctccgactactgtcaggaaggatcagctgattgaacattcctgtactttgcaca

SEQ ID NO: 447611 - DNA, 470 bp, Triticum aestivum
ggtccgtacttatcgggtggccggcaggtccaacacaacttttttagaccgtactctctattttgcgagcttgtaaagtgcattttacctcagccatcgacccttggcatgtcaaatatccagggtcgtggcgttattatatacaaaacaatgattggcatgtcactcaagttctagtgaatataatttatatcatgtattcacttttctctaaaaaaactgtattttgctcctttagttatttcacacgccgtgccaggggctcgatatgggaacaaactaaattgccaataagtctgaacagctttatagcatacttcggcgtcgcgactttggccttatatgcatcagctccgaatcatgtcttggctcaatagtttggtttcccggctcctgtgcttgctaccttacgttccgctctatccgctaaggtagtaaagggagaactactgcgattgtgccctggttta

SEQ ID NO: 447612 - DNA, 427 bp, Triticum aestivum
ggggggtgagaggacgacctgtcctctgcgttggctgtcgaagaagagtgctacgagcaagttctgcacactcaggatcgccttgaaggtctagctgcatttgcagagaaaagaagacctttgtacacaggaaagtgaggccgtactgaagtcagccctgttagcctcttatgtcttatctgctgataccctgaagaatgtgtccttgttccaaagaaaaaaaaaacctgaagaatgtgtctgggttgctagattatttgcagatgtatgtgctacatcttctgattgtcatgatcgcctaaaactgaatgaaccgcacccatgtaactgtaaggtatgaaagctgcatctggagatgctgcggtttggtttcgtcaaaaaaaaaacaacttggtgttgaatacaactaataacccccctgccaaca

SEQ ID NO: 447613 - DNA, 422 bp, Triticum aestivum
ggcccagtatctaaataaactgggatgtttagttcgtggaggggacggtcacaattggaaccatctagctctagggttagaacgcaacttatgatctcgaggtagatcaagcttgtactcgatacacaatcatcaatacaatcaaagcaagacgtagggtattacctcttcgagagggcccggacctgggtaaatactgtctcctttgtcccctgttacccataaatctgagatacacagttcgggaccccctaccccgaggtctgccggtttttactaccgacacctacaatgtcgctggcgccgacgtagaagcactgagctttcgctcggtacctcctccctcatacattgttgtggaaacttgaccatcgagcccactccaaggaggcccaccgccgccatgatgaatttgggccttc

SEQ ID NO: 447614 - DNA, 463 bp, Triticum aestivum
gggcatgtaagagagacatgatttacagaaccaggtgttggtacacctgctagtgtataagaacaacgaatgtgaagttttcctctgcggcatttggttagaggcaccgaggtaaacttatttttgattgaatcatgatgagaaatatattcacgcgagtcaccccaattttgtttaaaatcgtatcaataaggagatatttaacacaacacaatcataacttgcacgcgatgtacgccttgtgaattaatcatgttcttaccaatgcctcatgtctaaattttttgttccatgagggcattcatgtagacccatccttgtttttctcgtgacaatatcttcaaagctagacccatttttcggtgtctcctttgtacctatatgttggatctttttcacgtgctaaagccaagtggactcgcccccgctcggtagcggcacacacctagaacgaacaacgcgc

SEQ ID NO: 447615 - DNA, 396 bp, Triticum aestivum
cccggctcgacggggtagcaactggggatgctgttcctgaaaccagatctgttgcaaaaggtgtactggatgttatatcaggtgacttgccaaaaagcatcaaattgcagaataaacatcttgctgcactaatcgaattgcacaacatgactggcacttttgctcggaacattcagcacttattttcagaatcagatcttggagttgtgctgagtacattgaaagctatttattccccatatgaaacctttaagatgaggtatgggcagatggagcgcgctgtgctttctgctgcaatggccggtatagatatccgtggagccatctcccgtggtttaggtgcacaaggtatagagctaagtgaaactgtccgtaggatggaggaatccatcccac

SEQ ID NO: 447616 - DNA, 335 bp, Triticum aestivum
caccgaggaaccagtggcgagtacaccgtggaagaacaaatcctgttgtcggagaggtatcctcgatgatgatctgttttggcctgaagaacaactctactgcatggttccttgtaatacatgtcaagtcaaaggacgtcttcggatgattttgctgaggatgaaacctagtttttgttcaactgtaaatctttctggaagcaatttggtagcgacatttccttgattcagatgattttgtacattttttcatgtgaacgttaagaaggtgtttgtttccagggacttattggtttagggacttaaaaaagtccctataagtcccacctaaacca

SEQ ID NO: 447617 - DNA, 386 bp, Triticum aestivum
cgaccgggtctgataccaagcttcaaagacactggctgagaaggcagcatggaagtttgcagaggagaatggactggatgtagttgttgtcaatccagggactgttttgggcccgatgattccgccaaggatcaatgctagcatgggcatgtttcttcgcttacttgaaggctgcactgaggagtataaggatttcttcattgggccagtccacgtggaagacgtcgcattagcccatatcacgctgttcgaaaacccgtcggcgtccgggaggcacctctgcgtggagcccatctgtcactggagcgatttcgcgtcgaaagtcgccgagctctaccctgactacaaggtcccaaaattccccgaggacacgcagccggggctgg

SEQ ID NO: 447618 - DNA, 389 bp, Triticum aestivum
tcgaccggggcatagcaaaaaagttggagggaccatcttgtgaagaaagaagagaagtagaagggccaaagagcaaagcagcagatctgatcgaggggaacaaaatccctagaatgcctctattccccaaggggcctggcacatctctccatctcatctcttccccgcctccttctccacctccggccgctgccgcagccaggccatcgtggtggtgcgccacccagacaacctccttcctccaacaccatcatcgcctccagctaccacgccatcagcacctgccgctgcaccattaaccgtgccaccagctccaccgcgccaccgcatcaccggtgggccaccaaccagcgcacctccctcaccctgctgctcatcttcttctcccc

SEQ ID NO: 447619 - DNA, 319 bp, Triticum aestivum
ggcagtgcagcgagacaacctgtgtgaaagagccctggagccaacgtctacacatgcgtgatccgagtgaacaggttgagtcagtttgcatgcatgtgagtttgttagctgcatgtactgtgcatttgaggccaagtcatggctcctggagagattccaggattaagataaggtcagttagtacatggttagtgcatggagagtttagtggagtagtgggtctaggtattggcgtgagttttgcacggcaagagtgccagcccctgctgtataaatgtgttgctttgagtaatcaaaagaagaggccgtgagggctggg

SEQ ID NO: 447620 - DNA, 339 bp, Triticum aestivum
tgtcagttaaaaaaaatgtaaaaaaaaaaccagaaaaaaaaaatctaaacatacataatacaaggaaaacaagttgagtcagtatgcaaaaaaaatcgggccgcccaaaagattcaaacctaacttagccgttaagtcaaggccaaagccctccaaacaggcccccaaaatcgactccaaggccattcttttaaaaagttcataacgggaaaaacctgggtttaaccaaattaaacccccttgcacaaaatccccttttcccaaccgggcttaaaaccaaaaaggccccaaccaatgccccttccaaaaatttccccaccctaaatgccaaatggaacc

SEQ ID NO: 447621 - DNA, 310 bp, Triticum aestivum
tccgagaaggtcaatgaccaaatcgtcctcaaatgcgtacgtcatcgagctcctctcccggttccgccgacgctcatcaagggccgctgccatgtttccaacctggatatccggaacttcctggtcggcatctattttaccgtgaagggcactatcaatgaagggtccatattctgaaaccttcccgcccagaaaaacccttgtttctcccagccgtgtttgtttcaccctgtttccatcttgcccatcctcggcgtcttcctgaattttgccactttcccataccctgaattttttattcggctttcaa

SEQ ID NO: 447622 - DNA, 438 bp, Triticum aestivum
  unsure (1)..(438): unsure at all n locations
ggctccttatgacaatcataatcttaaaaaattctatggaaaatttaagagttccctaacatcaaacaccaccttttgttgttagcgtcatcgcagtcactccaaggtaacaccactttgatatgtattgcatcaataatctgctagttactggtgtgttgatgttggctcctcggagccatttggtggacgacattgacacccaaaaatttgaggagttttatgattttcttgacaaatgggtggcagatcagcctcaatctagcaggacaagtggttgcccctcaaaggagaagccaggcagggagaaagcaaagaggaacaaaagtaagaagagtggcgccattcgaaaggcgtacatggtttcatgatggagggtgctcaggttttgccgttgtcggtgtgtttggcangagtgtcattgtgttgtgcaagtgt

SEQ ID NO: 447623 - DNA, 474 bp, Triticum aestivum
ggaccacaaacaaacagtcgatcgatgatctcgacaaccatcaacagcaggatggctaacaccaccagctccaccgccctcctcatcgccctcgtcgtcctggccggcctcgccgacttgcacgctgccacagccgacccgaggcccgttcacgcctcggaactctcggtgccggcatgggtgaccgggcagccaatgacggccccggagctggaatggatgatggagtgcatgatggggtgctggacgacggtgatgggttgcgtattcgggtgcgtggccaagccccccgccgacatgccgctctgctggttcgcctacgaccagacctacgttatgggcatggtcaaatgcgccttcacgccctcaccgccagcaccggcgccacccaagccgcatgccccgcccgcccggccatgacaccgtaacgatcgagacctctacctagtcgccgacaatcaccatgcatgcatc

SEQ ID NO: 447624 - DNA, 311 bp, Triticum aestivum
cgacgggccacgagcgacaagtttgtgggtgtcatgagagcgatcggcgtcatgcaggaccttttcataaccaagacttggtaacaacgtacggagtacctcgcctaatttttattttgtttcttcttcattggtggatttccatcgtgtctatgagcacaggcttctggattttgatatattctgcattaccatgatgtacttatttgtactttgacactttttctctgtttaatgagtggttgtgtgcatcgcttgatgcagaggcagggtccgttcataaaaataaagatgttctaattctttgaatc

SEQ ID NO: 447625 - DNA, 105 bp, Triticum aestivum
  unsure (1)..(105): unsure at all n locations
ggtggacgggggaaacaggttaatcaagaccgctgcttacggtcactttggccgcgattatgccgacatcacctgngaagtggtgaatcccctcacgttcgacaa

SEQ ID NO: 447626 - DNA, 371 bp, Triticum aestivum
gggcagagtggaagcctacttcgacgacggtgctgggtcgctggagatcaaggtccccaagaggagcagcgacgcgcaccaacaagcctgagagaatcggaacctctcgacgcccgcaactggattggatcagattaactggaggaccgcctcatttgccggtgaaaggcaattattctccttctgatgtgatgatgagcagttgatggcgactcaaaagaccgcgtaatctctgtagaaattcggaaagatatggctgagacgaaaagcagcgaggattacctacctatctatccattgcatgatgttgcaaatccaatgtagtagtaaaatatgttcttcagttccactgttaccaaatgactaattaa

SEQ ID NO: 447627 - DNA, 249 bp, Triticum aestivum
tatgcttaatgtcactttgggcgcgattatgccgacttctcctgtgacgtggtgatgcccctcatgttccatatggcatctgcctaaattcatggtgttctcttggtcagctgcctctcaagttcgtcatcacgggtatatgttgctcctgggatgtgagatcttgcattatttactgattccacgctctacactggtcttgttctatgttactcattggtaagtttcttattgtcatttcatatattt

SEQ ID NO: 447628 - DNA, 153 bp, Triticum aestivum
cctataaagagacgtattaatctcttagtggtattgttggtatgaggcctgtatttcgtgtgccctggtgctacttcattagtcacgctttatgaagtattgactcaggagttactctttcttgggttctaccttatttgcttttaatatgac

SEQ ID NO: 447629 - DNA, 487 bp, Triticum aestivum
  unsure (1)..(487): unsure at all n locations
cgggtggccgggaaacaaacctagacttgacttggcgtaaatctccctagtaacggtgccagaatttctttctgctacttcttgagcgtgtgttggtttttcccttgaagaggaaagggtgttgcaggaacgtagagataagtatttccctcagttagagaaccaaggtatcaatccagtaggagacaacacacaaatcaccgaatacctgcacaaacaatcacacaacttgcacccaacgcgatataggggttgtcaatcccttcacggttacttgcaaaagtgagatctgatagagataggtaaacgataaggtacatatttttggtattgttggtttatagatcggaaagtaaaatattgcaaaatagtagattggaaactaatatgatggaaaattgacctgggagccataggtttcactagaggcttctctcaagatagaanataatacggtgagtgaatgaaatactgtcgagaaattgat

SEQ ID NO: 447630 - DNA, 359 bp, Triticum aestivum
ggggagttacatgaccggctgaataaatagtactactgtagctacgatacctgtagttcgcctgccctgctgctacttcagtagtcatgcttgaataataatggtctcagtattaatctttcgcaaaaaaaaaaaaaaaaaaaaaaaaaaaaaaaaaaaaaaaaaaaaaaaaaaaaaaaaaaaaaaaaaaaaaaaaaaaaaaaaaaaaaaaaaaaaaaaaaaaaaaaaaaaaaaaaaaaaaaaaaaaaaaaaaaaaaaaaaaaaaaagggggcccccaaaaggtttaaactttaatttccgtttaaagaaaattaaaaacctttcaaaaggggccaaaaaattaaattaaaggggcgtt

SEQ ID NO: 447631 - DNA, 287 bp, Triticum aestivum
cccggctcgacggggtcttatttgaaggatatatctctgctcaatgtatctgtcctcttggcaacaagactttctgcccgctgtgacgaattgtccagaccagttgcataaatacatttcatggcacgagacaggtggattgtgcgtttattttcataaatatatagacctgtacgtctgaaagtgttgttgacatttcatggcgttttttggggcaaatacatttcatgtttgtatttgtggattgcatcagttcctttgaatcctatcagttgttgctcttgctt

SEQ ID NO: 447632 - DNA, 172 bp, Triticum aestivum
tatctcatagctaattcccataatcaagtttattttctccaatgatcttcgtgaatttcttaacaatatcctccttggatatctatccctttcgacctagtttcaaatgttgctttaaataatcccatgcatttatatgttatgaccttgagcatcataggtctttctctca

SEQ ID NO: 447633 - DNA, 199 bp, Triticum aestivum
gagtgagacgaagtactgcttgctccctttctgcgcttcctttttaccaccgctacttgcttaagtgtctttttaagtttgtttttgacctcgccgttgtagatggtcccttttggttcaaaggaaaacaaaaaaaaaaaaaataagattaacaaaaaaagaaaccaaaaatagaaaaaaaaaactggacatcaaaaag

SEQ ID NO: 447634 - DNA, 455 bp, Triticum aestivum
  unsure (1)..(455): unsure at all n locations
gggnnnnnnnnnaatcttacggttcnnggccnggtgtggatnncnggctcgnccagctccaaantcgncggccgctctagaggatccaagcttacgtacgcgtgcatgcgacgtcatactcttctatagtgtcacctaaattcaattcactggccgtcgttttacaacgtcgtgactggaaaaccctggcgttacccaacttaatcgccttgcagcacatccccctttcgccagctgcgtaatagcgaagaggcccgcaccgatcgcccttcccaacagttgcgcagcctgaatgcgaatgggacgcgccctgtagcggcgcattaagcgcggcgggtgtggtggttacgcgcacgtgaccgctacacttgccagcgccctagcgcccgctcctttcgctttcttcccttccttctcgccaacgttcgccggctttcccccgttnaagctccnaa

SEQ ID NO: 447635 - DNA, 208 bp, Triticum aestivum
  unsure (1)..(208): unsure at all n locations
atntgttccntngggcatttcccattcctggatnnggngcctaaccctnnacacganttagccttnnatggggcaacgggaaccggancntccttgnaaaaggggttnccanctacatatgcntaantggntcaacccttggcctggncccncctnttaacaanggcggaaaaattcnggaccggntntccanaaanttngnccaaaa

SEQ ID NO: 447636 - DNA, 371 bp, Triticum aestivum
gacttgtgctcatcaactactcggaggcagacttcaccgtgaagccccgcgaccgcgtcatacagatgatcgtccaggtgattgcgacgcaggaggtccccggggtggaggacctcgacgccaccgtctagaggtcgccgaggtggaggacgacgccaccatccggagttcgtcaaggtggaggacctcgacgctttgtacatacatctagggaagtggtctggttaggttggtggtgaaacgctagggaaggtaccaaccttttgttgatggttgtgtgtgtcctcgggatctcttcgagttgagatgttgaatgttgcatccatgaacactgcaagtgttaagatggttctgtgaaatttattttgcac

SEQ ID NO: 447637 - DNA, 444 bp, Triticum aestivum
cccttagggtttatggaatatttgggtatttatatagatgagaggcagtggaaaggactcctgtgggccccactacccatcagggcgcgccaggggcctctagcacgccttggtgtcttgtgggccccacaggcctcccctctcgcacttccttggctcccaagttgtcttttgggcaaaaaaatctccaaaaagtttcactgtgtttggactccatttgatatggatattctgcaaagtaaaaaacaagcaaaaaacaacaactggcacttggcactatgtcaataggttagtcccaaaaactgatataaagttgttataaaatgaatataaaacatcccagaatgataatataacagcatggaacaataaaaaataatagatacgttggagacgtatcacactgccagaggcattcatatatagtcctaatgttctagatat

SEQ ID NO: 447638 - DNA, 406 bp, Triticum aestivum
cggctcgacggggctgtagaatacatgcccgaagaggaggtgaagagcacagctgcggagcgactgaagatatccatggagaggatagcgctactcaaggcagccaaacctaagatgccgcccgcgaaaaccgagcaagaggaagaggagaggaagcagagcgaggagttggacggatttgggaaccccaagggcccctccacgctctccaagctcacagcggaggaagccgagcaccgtgccctccaagcagccgtgctccaggagtggcaccagctgtgcaaggagaaagtcatgaaggcacagtgaggcctggtctgcgctccgcctgtataattttgtacctgccttttcctcgagccacattttgatttatttttttcagccgtccgacattttgattttt

SEQ ID NO: 447639 - DNA, 194 bp, Triticum aestivum
ggggtcgctgcactggttcagacgtcggcggtagagtatggcagctgacttcaccgaggagcttgtgtcagactcgatgattagtaggatcaatttcttgtctaggacgggctcggtcatggatccgagtggggactctaccagcccggattcagcctcaaagagtggtggcggttcgttcctcaataggttta

SEQ ID NO: 447640 - DNA, 303 bp, Triticum aestivum
tcgacgggtcaaaagtgaacgtgaatggaggagccatcgctatggggcatcctcttggagcaacaggcgcccggtgcatctcgacccttctgaacgaaatgaagcgccggggcagggactgcagattcggcgtggtgaccatgtgcatcgggtccggcatgggcgcggcggccgtgttcgagcggggggactcggtggacgagctctccaacgtgcgccatatctagtcgcacaatttcctgtccaaggatgctgcagagtacacgcgggcgtgaaacgaagtccatcagcctcacatgcagc

SEQ ID NO: 447641 - DNA, 423 bp, Triticum aestivum
caggttacggtacggagttccggcgtcgacgggaggccaggcatcgcgccggccttcaggaacgccgacggcggcaacggcaccatcaaaaccggcaacggctacccgtacgccagggtggcgacacccaaacggtccaaggtacgtgcgtgcgttctctgcgcgcgcaacgggcgtgccttggtttatcgcgtgcattgacgccaccaactttttgtccgcagaagaagagctggttctcctgcaccagctgccgattctgatgccgtagctgcttgccgtcggtggtgagagagatccgatacttcgccgcgccacgaccagatgcacgtactcggcgggaggcgacggtggaacttttggcgatcgtggtgcttctgaccctgctcggtcgccgcatctcacgtgcagaacatcatccat

SEQ ID NO: 447642 - DNA, 404 bp, Triticum aestivum
acggcgacgaaccgatctaccttgatctagcggcagaggagactagcaagggctggatttgattctctgggtatttcctaatataacaacaaaatttcataatacaaccagtgatgattttccaatcaaacctatataattgcaagctaaatgccaatcgtttcattatacaatgatcgttcttgatatattttaattttccataggacatttcctagtagcaaggtatttcatgtcatattttggagtaatttgattatcaacttcgtctactcgttgcgtatgtgaaattattgccctatattagctgtagctagacacccgctccagctgcaaaaaaagaagtgtgtgtctatgcatgaaatgtgaatattgggtaggttctttgaagcaaaaaaaaaaca

SEQ ID NO: 447643 - DNA, 350 bp, Triticum aestivum
gacggggggggattcaaccgcgatagcttcgcgatccgctcacgctatctgagatttggacgcgggtcatgcctgcagctcttgcccatatggctctcgttttgcattcacgcaccggcaacatgaatgccgtcaaggcacttattgctgcagactactgtgcggtcaaggtttagctccccatgaacttctagatgggtgtatcatacaaaatccctgaattcatcaagatgaacccccctggtaatgttcctgttcttgatactcttgatgctaatgtttttgagagcagtgctattacatgctatgttgctcgcccaaacggtgacaacctgttttagggtggtctc

SEQ ID NO: 447644 - DNA, 459 bp, Triticum aestivum
  unsure (1)..(459): unsure at all n locations
tttacttcggccngctccaggtanaggntgnggaggtnccgggntcgacgggttgtcacnnaanaaaaaannnaaaaaaaaaaaaaanncggccgctctagaggatccaagcttacgtngcntgcatgcgacgtcatanctcttcnatantgtcacctanattcaacttcactggcctcgttttacancagtcgtgactgggaaaaccctggcgttacccntcttaatcgcctngcncacatccccctttcgccagctggcttaatngcgaagangcccgcaccgatcgccctncnaacagtggctcagcctgaatggcgaangggacncnccntgtatcggcgcattatcgcgngggtgtggtggttacgcgcaatgtttgcgcnacacttnnccagcnnnccagcgncngcccgngnggtttcttcccttnnttccttcncannnttccccgggctt

SEQ ID NO: 447645 - DNA, 399 bp, Triticum aestivum
cgacgggcgcgcagcactgcggttggccccagtcgagcgttacgtcagacgggcgtaagattaggggaaagcaccgcgaggggaggaggcagcgtacctaggatggcgagggatggctgctgcgatgccatggccgactgcgcgagaaggtctcggcgaccggcggagagatcacaagcggagctgcggtggaggcggcggcgcggcgaggggactttgctggatgcgggtggtgcctatgtcatgccttcctcactgacacatgggggtcattggtttgtgggcctcagtttttgttagggaattgtgggccttagttcgtagctacagaaacgggataaaaacgtcggcaggctaataaatagattgcgctgcattcctgggaaatgggccagccca

SEQ ID NO: 447646 - DNA, 379 bp, Triticum aestivum
cgacggagcgaaaaaggaaaagcaagacggctccatacgccggcggcagaaagtggaagctgacaccaacgacgaccttctgtcggactcgatcaagattatcaacagtttcctgccgaggccggtctccagcatgcgtctgagtacggactcgagcagcccggattccgccgcgaagagcaatggcggctcgttcctcgatgggttcaagtccgtggtgcggaggtcaccgagcgcgccgagctttgcggactcggagaacggcgccggggcctccatgtggtcgagctccaagtggaccttcaaccacgagtccttcacccgtccgttgctcgatggcctgcccaagccctcgcccggccgcaggatgaaagctgct

SEQ ID NO: 447647 - DNA, 399 bp, Triticum aestivum
cgacgggcatgcatgttagcagaccatttcacaccactgatgtggcacgtgcgtcaagaatcgtacacgagctccccacacagatcacgatcagttcaggacgtgtcggtgcacgagccacttcgacgcattgggagggattcatgcgtacacatgcatgtgtgtgtgcgcaaacggtatcatgcatgtcatcccagagcatgacctatatatataccgtattacaagcaaaaaaatcccctcctaagtcaaattaacctctcttgttgtcaggcaaaaagtactgatggaccaagcgggcccacagatggaaagcatcgatatcgctgataacctcttaagtgggtgccagaggacaaccaccaccgctttgcatgtgggccgaacatatacatgttg

SEQ ID NO: 447648 - DNA, 379 bp, Triticum aestivum
ggggtgaattctcgacccacaaatcactgtgagttgtgagagcttgtgatctgcctttgtaccgaaggaacattcctctgtcgccatagatccggtaggattgcctctcgcttcttcggaaatgaaattcgtgcgcagatcatcgccgatgagatcagtgatccacactggatgctgttcttgtgtatggattttatggaggtttgggtttttttcaaaaaaaaaaaaaaaaaaaaaaaaaaaaaaaaaaaaaaaaaaaaaaaaaaaaaaaaaaaaaaaaaaaaaaaaaattaaaaaaaaaaaaaaaaaaaaaaaaaaaagacggggctacccaataggatcaaagttaactttgccgggaagggaatgtcacacccct

SEQ ID NO: 447649 - DNA, 437 bp, Triticum aestivum
  unsure (1)..(437): unsure at all n locations
ttcaatngccagggcncaggtaacggacaggaattccngggccgctctagaggatccaacttacgtacgcgtgcatgcgacgtcatagctcttctatagtgtcacctaaattcaattcctggccgtcgttttacaacgtcgtgactgggaaaaccctggcgttacccaacttaatcgcttgcagcacatccccctttcgccagctggcgtaatagcgaagaggcccgcaccgatcgccttcccaacagttgcgcagcctgaatggcgaatgggacgcgccctgtagcggcgcattagcgcggcgggtgtggtggttacgcgcagcgtgaccgctacacttgccagcgccctagccccgctcctttcgctttcttcccttcctttctcgccacgttcgccggctttccccgtcagctctaaatcgggggctcccttta

SEQ ID NO: 447650 - DNA, 198 bp, Triticum aestivum
gggggtaaaaacgagcgacggcgccgagatcgacaacgtgagactcgtcagggatggtgacaacctcctccttgtctccgatcagtgggcgcctgacactaccagcgcgcataggaatcaataatgaaaccactgatacattggttgggaaattacacttcgaaaactggttgtatatacgggggatttttaataatt

SEQ ID NO: 447651 - DNA, 178 bp, Triticum aestivum
  unsure (1)..(178): unsure at all n locations
angcggccgctctagaggatccaagcttacntncgcgtgcangcganntcatcnctctttatagtgtcncccaaattcaattcactgggccgtcnttttacaacgtcttgactgggannccctggcgttccccancttnatcgccttgcancagntntccctntngcccgntngnnta

SEQ ID NO: 447652 - DNA, 289 bp, Triticum aestivum
cgacgggggaggatacgaggaatgatgagacgaggaaggacgatattaagatgcataaggaggatcagacggaggagactaacgatgacaccacggagattaagccggagaacattaaggacacgactactgagaagaccactaccaagactaatctgcttatcaatgatgataacaataataatattcactacgatgaacatgcacatcgaggaggatatttatgactgacgacatgacgatggaggatattccgatgatctcccctctccctcctctctcccctttc

SEQ ID NO: 447653 - DNA, 390 bp, Triticum aestivum
tcgacggaaggaaaattatactcatatcaaattcgtatttgaacaaataaactatggaattatgagtggcataatgtttagcttcaagggtggagtgctggtaatgcgatacatagcaagtacgcagattgtattccatgtaaaagattgtagtctatgtaaaagctggaaatgacactttctttctatataatgcagtgttcgttgcccacacatgatggaagagatcacccagagaaatactagtcactcaagtctacagttccagtattttgagacagggtgctccaccctaaaagaatattgagaaaatctggaaatgacactttctttctatacagcgcagtgttcgttgccgagatatagatggaagagattacacagagaaat

SEQ ID NO: 447654 - DNA, 411 bp, Triticum aestivum
cgacgggggctcactgaagatggaatagggtttttcccgcctagtcccatcccggtggtgcgtctagcatcattgatggacatgtggacgtgtgtctacggtgtatatgtctttggtggatttgcttatatcttgtagtcttccgtctacgttcgtgtgtcttcaagttggatccttgcgatatacgctactcttcatcgcggtggttgttgttctggtgcgttagtcctatgggttttagcacgtttacttcctgactgtctactgcaacaagttttggccagaaaaggcgatgacgacagtgcgccttcggttcgcttcaatgcttatagtcgtcgctaggtgatctgtgaatctagatgtattttttattacttttaatgtttgttgtactatcatgatagaataaaa

SEQ ID NO: 447655 - DNA, 393 bp, Triticum aestivum
gggatcaacatcatcctacgcctcccacggattgataaaccttaggtcatccacttgacggaaatttgctattgtcctacagacctctgcacttgggggcccatcaacgtctacaagattaacgttgtgtactacacatcaagcaatttctggcaccattgccggggaagttagtgcttgaaggtatatctttacatcgtgcactcgaatctttgagtttcttgttttatcaccagtttagtcaataattcaactataaaatacggcactaagggtgcctcttatgcttcatcttttactatcgttcatgaagatcatgattccaataattgtgccaaagtgttatcagaagactgcattaacatgtttggaactaaatctttgaatgatgag

SEQ ID NO: 447656 - DNA, 100 bp, Triticum aestivum
tctcatctttgccccgaaacaaaaaaaaacgtaccagtcgatctagatgatgaaaactaatctaggaatccatgccacctgatagctcttcgatacctcc

SEQ ID NO: 447657 - DNA, 391 bp, Triticum aestivum
tcgacggggaacatggggccgtcacacttcaaatcccgggcaagagcgagaactggaggccaaaattcttcatagacagagacatctgcatgcttgcgggtaaatggttaagctttgtatttgacatccatcgtgcaggtcggcgacatcaggaacattgtaccggcaatgggtggggaaaggtccacattcatggtccatataggtcgtccataacctactcatcgaatgggtgttaaaagggttcgatccagccatgactctccggttggcgtggaaggaatgacaaatccagatgccgtttaggaatcgcaaaccgatggatgctcgcaaatggttggaggcaagtttgtccacggcaacggtctgtgttccgggacatgtgcctgtt

SEQ ID NO: 447658 - DNA, 320 bp, Triticum aestivum
tcgacggacaggtaccggccataatcgacaccgagatgacggggatggtctccatccgcgacctgcttcccgctgtggtcaccaagtacaaggatgagctgaaccagcgcagcacgaacatgtacgtgagtgttgacgacggcctgctctcgctcgccgtttcgccgaagtagatcaacgacttattatatgttaagatgccggatcagaccgtgtatcttcgcacacaccggacgcaaaacgcaaacatgtgtctcatacctcactcctgcttgggtaatgtttctttccgtggcctcgcgatcctccgcagcgttccc

SEQ ID NO: 447659 - DNA, 179 bp, Triticum aestivum
cgacggggtcaaaaggaaggtagtacatttaagtgccgattttcatgtcttaccaaagcatccaagtcatcgttcagcgtcatgacatgcaaatcagcttcaatcttgatctctggactaaagtccggttgtcacggtaagataaaactgtactatattgattaatgcaaacatcaggg

SEQ ID NO: 447660 - DNA, 452 bp, Triticum aestivum
  unsure (1)..(452): unsure at all n locations
tcctatcttatcaggnctcggtccagaaatccggnctcgacgggatgcnaggaangcgagcaaggtgcaaggcggcgtcggccaaaaaaaaaaanaaaaaaaaaaaaaaaaaancggcgctctanaggatccaagcttacntacncgtgcatgcnacgtcatacctcttctatagtgcacctaaattcaattcactggccgtcgttttacaacgtcgtgactgggaaaaccctggcttacccaacttaatcgccttgcagcacatccccctttcgccagctggcgtaataccgaaaggcccgcaccgatcgcccttcccaacagttgcgcancctgaatggcgaatgggacgcgcctgtagcggcgcattaanctcggcgggtgtggtggttacnccgcaccttgaccnccaccttgccagcnccctatngnccngccctttngccttcntt

SEQ ID NO: 447661 - DNA, 359 bp, Triticum aestivum
tcgacgggcgctttagttcgcagctggtcgggatgatcaaagcctgtatagtcgtgggggctaatccagatcgcttcgatcatgtcgtgtaagatcagctggcgggccgtcgtgtggtaaacttgtcagtgggagtcttcagacgtggcctctggtaagcctcttgcagcatagccatctttcgtcactcggagatggagcgatgtggtcaggttttataggacttccacgcagtcacgaacactgactggagacttagctgcatatagtccttgcggacctggcatagcagttgacgtgtttgacgctcagcctaaacagctcacttgcacaacatatcacgctgcactgctctcgtt

SEQ ID NO: 447662 - DNA, 324 bp, Triticum aestivum
gggagactaaggtcagatcccatctgcatcgtccagtcttggacagtcgtcgcagctaatccagacagggacaatgaactcaggtggccatattgtgctatgcttcacgatatatctggccgtcatgaggaaattcttttgcatccacttttttttgactttctcagcaatgccgtttgtcacactctggttgatattacagtgtgacctgtgtgttaagaagggatgtttgtcgcatctatagcttccggaaccagctgctgtacattctttcatatgtcgttgaccaatctgctcaccgcagtttgccatttacaaatcata

SEQ ID NO: 447663 - DNA, 393 bp, Triticum aestivum
tcgacgggagataacgcaactctggcaatggcgaggtcatgccttggagggtgcctgtaggtaatccggcacgtctgaacgatcgctactggcatctggtgcgccacgtacggtctatgcagggagtgggcatgtatgttccggcatgagtccacgctcacattagtagaatcaaagagccacacacactatggccgattgcattctgtaggaatactgccacgtcgtgctaacggccggagcagttggttgcaacctgaacggatggactcaactgttgatggaggttacgaacgtcaggactctaataatgcatttagcaaacaagtagtggctgaagggcctagtgaataggcgaaccggcggagcaattcatgcatatccgtgcttgca

SEQ ID NO: 447664 - DNA, 400 bp, Triticum aestivum
tcgacgggaagcaaacgtactgcagagacgccatggtgagaagactccccaacaccatttggccaaacggggcctttgtggagactgtcaaggtgtggcaataggagtggttctacatcactgaaccccgcaaggccaaatgggcggccagtcctgatttaacatacgatgccccctaagtgaatcacctcatggaccgccaatggtctggactatggatccgcagccaatctattgatgctgcaaaaatgcatcacaaacatgattaagaagaacacctgtctcactaacatgattcaggtgatgctcttctgccggattcttccctgccaactccgatcctcccacatgtgggagttcaatctggaatatcctccgacactaaagcacttcttcggca

SEQ ID NO: 447665 - DNA, 330 bp, Triticum aestivum
tcgacggagatgatgtttccatcgtagaatgcttgaaacatcctgtttatatcactgagggctcttatacaaacatcatggtgactactcctgatgacatgctcttagctgagcgtttgatgaacgataaatagggccaatattaacaatgtttacttgatttgagaggcacctgtatgaatttgtcagtacgacattccattgcctttccacagttttggcctcttgggaactagaaaagtaaacatgtagctcatacacgagatagataacctgtatgtaacattctttccgtggcaatgaatatatggcaaggttttctgtttgaaa

SEQ ID NO: 447666 - DNA, 274 bp, Triticum aestivum
gaattccgacgtcgacgggccaccatccattaccgcggtgctagcttcaaactccatccagagatacctatgttgattatcgctatgtagaatggttatatgctgagactgaacattatgtttcactctctcgtgatgttctggaatgacagttctgtagtatcacagagttctgcgtcttatgtatcttccgagtgagcctttagctgataatatttctggtgatggtgatcttgataccgtgcactgaataaagtaccacttcttatgtact

SEQ ID NO: 447667 - DNA, 384 bp, Triticum aestivum
ggggcacaactggccggaggacctagtgttatagtttcctttttagcaaggttagtcattcttccatgaggaaattgtaagacttactatataagttgttcctgatgaatcctttgagtagccaaagtccgaccttgctcgaaaaccatgtcaatgctacctcgaagcatgtttgtggtactccgatgatcaatagttacatttgaagcataacgcaaaatgttctttactaattaccccaaacaccgtttgtatgggtaatgacatgatatttctctcacctttcctaaagggttttctacgttataccttgtcgtagagataatgttctgcttgtccttgggaaggatatacccctgaaatatgtgtttaaacacattttcc

SEQ ID NO: 447668 - DNA, 442 bp, Triticum aestivum
  unsure (1)..(442): unsure at all n locations
tntcaatctnccnngtnccaggtaacggtcnggaantccggcntcgacggggnnntnnaaaantggaaaggcttacagcattgggcccggncgcncnaaaggatcnaagcttacntaacgtgcatgcgacgtcanaactcttctatantgtcaccnaaattcaattcaactggccgtnttttcnaaagncttnacnggnaataccctngcnttncncatcttaacccncctgcanttatccccctttcgctcactggccttctttntaaaaggtcctcacctggtaanncttcgcnttttncgcattcctcactgnccaacggnaccccctttgtnncggngcnttaatcgcgaggagtcnngtnnttatncccatcctcaccntttcncntgccagnacnctaacnccgactctttcgnttccgtcccttcatttcggggg

SEQ ID NO: 447669 - DNA, 251 bp, Triticum aestivum
ttgacagggttggtcgagatgagggatagtgtccggtcatcactagggtggaactgaaactatcactataggtagacatatgtgatgtgagcagtgcgcggtaaatcgatactgtaattatgatgtagctcagtgtagctgctgtgaacgtctcaacattggtttttatctatcctaccagctgcgttgtcttcaacagttggttaatgcggttttactcactgggtttaagtagcagaaggattttctta

SEQ ID NO: 447670 - DNA, 389 bp, Triticum aestivum
ggcatgtactgatgggtgctgttccattcccgagcgatgttttgcggctgcagaaccttggattttgtggtgtggtcacactaaacaaatcatatgaaaggcttgtttccaagtcactgtacgaggctcatgggattgaaaacctggtgctgccaactagagactacctttatgcgccgtcatttgacaacctttgcaaggctgctgacttcatccacagaaatgcttcatgtggtaagctgacttatgttcactgcaaagctggacggggacgtagcaccaccgttgttctttgctacttggtgcaatgcaaacaaatgacacctgctggagcttttgaacatgttcggtcatgcatgccaagggtgttattggcttccgcacaatgg

SEQ ID NO: 447671 - DNA, 387 bp, Triticum aestivum
cgacggggaacaacagaagatttgcctgatgacctcgtagaactttataagacagatcctgaagagaattatcatcagcgcaagacacggatccaacggattcgacgatattgggctgaacaatggttcaaatgcaagttcgtgacccaggaatatgctgagaagaatgctataaaaagtccttggggtgatattctctatcgaggccttcatcccaagaacagagctgaagctattgcacagggtttctatcactgtatggtccatggacctcagcctgaaaatgcctactcaacatcattgctctggtgtcgtgacgacaatctcttcaagcgtaactttcagcatgcaaaggcatcggccaaagaatacaagaagtcattggga

SEQ ID NO: 447672 - DNA, 278 bp, Triticum aestivum
cgacgggcggtgggctgaatcctttgcagacgacttaaatacgtgacggggcattgtaagtggcagagtggccttgctgccacgatccactgagatccagctccatgtcgcacggattcgtccctcccccacaactctccttcaccaactaaggttccaaaatggtagccaaattctgcacctctaagtcatggtcaaaaggaatggcaaagtcccttgtaagacatacgcaagcacccgataaggccagcggaaacaacactcaaaactatacgtcg

SEQ ID NO: 447673 - DNA, 299 bp, Triticum aestivum
tcgacggagtagaagagaccgagcacatgtaatacgcactgtcctggatgatgctccaattcttctcaccggggcatcaccagcaatgacgtctcgtcgtcgtaagagccaagcacaccgccgcgatctccttgggcctcactggagcatacgttgctctgtccgttgctgcggacctgaaccagacctcgctccgcgtcaacgatatgacaatgcagctcaacgcgcacgtgagcgataaagtcggtgacgtggtgcaacgcgatgtgatgatcgtcgtctacgaagcgatcgacagg

SEQ ID NO: 447674 - DNA, 86 bp, Triticum aestivum
tgccattcgatagctcggctattatgtaacaggccttcaattcattggccgtcgattaattgcgtagccagtgggaaaactgggac

SEQ ID NO: 447675 - DNA, 370 bp, Triticum aestivum
gggttgttgtagtggtggtggttgttgttgtggttgttgttgttgttgttgttgccttggttcaagactaatatctgcatcaaggcacactactagatttcccactataaccgagggtcaaattaccatcggatatttttgctcaccgtcggatttctgtataactgacggtacaccgtcggcaatctcccgtcggctatgcttggtcggccattaccataatagccgacggtactgtagggtaataccttctccgacggcaattacccgacggtgagccgtcggacatgttttggttaccagccgactcggataaacttgacgacacttatagctgagggttccccgttgggtatttattttctgatag

SEQ ID NO: 447676 - DNA, 383 bp, Triticum aestivum
cgacggacgccagcgcgcgcactgtccttgtttccactttggtgctaaggaagcaagcgcgggcgaggagttctgaggcatcaggcaaaggtttccatatcggcgcaacgagaccaagaccagcaggacggcaggacggaggtcactgtggagcccaagacggcatcaccaccagagcctttggcaggcgaagactacttttgtcaggataagctgtactagctgccccctttcaaattggccgttgtgggttcccttcccgctcaatatttgggaagaggaccggggcctctataaatagtactagccaccacagtagggggggatcgatctcatcttgagcaatcctcacccacacaagtccaccaagcacaagaacacct

SEQ ID NO: 447677 - DNA, 368 bp, Triticum aestivum
ggatgcaaataaatgaaattaagaaagttgaagcaggactatcagtaagagggaaggcttgaagttgaggcaactgtcttgtataacattttctgctttgtgtctgcaactgttttcttacttctaagcttatgttgtaagacacctgctgtaaacatttgagtgagatcgaattactggttcccatatgttctgatgtctattttataaatgtatacataaactgttgatgcacaatatttgatctgaaaataaagtaataccttcacaaaaagaaattaaccaacagtaaaaccgtcagacatgttttggttaccaaccgactcagataaaattgaccacacttatacctgagggttccccgttgg

SEQ ID NO: 447678 - DNA, 466 bp, Triticum aestivum
  unsure (1)..(466): unsure at all n locations
ggngnnnngnaaatcttattgctcagcnatcgcgatgaccaatccnggccgcnccagagatnaaagcttacgtacgcgtgcatgcgacgtcatagctcttctatagtgtcacntaaatcaattcactggccgtcgttttacaacgtcgtgactgggaaaaccctggcgttacccaactaatcgccttgcagcacatccccctttcgccagctggcgtaatanctaagaggcccgcacgatcgcccttcccaacagttgcgcancctgaatggcgaatgggacgcgccctgtancgcgcattaagcgcggcgggtgtggtggttacgcgcagcgtgaccgctacacttgccagcgcctancgcccgctcctttcgctttcttcccttcctttctcgccacgttcgccggctttcccgtcaagctctaaatcggggggctcccctttaanggttccgattttatgctt

SEQ ID NO: 447679 - DNA, 272 bp, Triticum aestivum
cgacggggtgccagttctgggatatgaacaacaatgtcaggatcaagcaagtgccggagatgaagccggtgctgcgggggacgaggaggtcgatgccgaagcgggtaaagatcatacatcggccttgtcccacctctgatcttgccaccagccatgtggaattagctataccatcttggtcatgatcgctgcactaatagattcatgaattatctgccctagatgaaaaacaatcagtcacacacagttcatttgtaaatcctttgaagaag

SEQ ID NO: 447680 - DNA, 270 bp, Triticum aestivum
ggggtgcacgttgtgggagaggaagaagaatgtcaggatgatgcgaacgccggagatgaggccggtgctgcgggggaggaggaggttgatgccgaagctggtaaagattagatgtcggcgttgtcccgcctctgatcgtgccaccagccatgtggaattagctatactatcttggtcatgagcgctgcaataaaagattcatgaattatttgccgtggaggaaaaacaatgaaacacacacagttcatttgtaaaaaatataataacaat

SEQ ID NO: 447681 - DNA, 392 bp, Triticum aestivum
tcgacgggagacaggacacctttgcctctatcaaacccacaacttggaaagttttgaaagctgtaatgagacagcaatttttcctccttactatcgtcgtgaattgcgtcgcaaattggagaaattaaaacacggcagtaacactgttcatgcttactaccaagagttcaaatcttatatgcatcattgtgacatagaagaatccgaggatgatacaatgaatagattttttggtggtttgaaccatgatattcatgcaagatttcagtatattcctcgttgcattactgatatgtatgtccgtgcttgtacctttgagagacatatacaggaggatgcattgggtgactacaacaactattattccagttcatgctcaccaccgccggttg

SEQ ID NO: 447682 - DNA, 281 bp, Triticum aestivum
gggcggttatcttgctgtttctttgttacggttggttgagtatttctctcccgtatgctgctggctagttggtttcgccctccggtcgcgatgggtttgttatgcatggttgttctccattggtttggtttgtgctgggagaatcgatcggaggacgaattcaatgttgatgacgactaaaaattgatgatccatagtgtcaaggagataatattaatgttagtagcttaaaaaaactcaaatgccatcacttaaaattattttgaaagtcttaaaaatca

SEQ ID NO: 447683 - DNA, 395 bp, Triticum aestivum
tcgacggaccacaaggggaaggggctgtttcagtggcaccatcacgactcgcacaccacactctcgctccacctgaggtggccatacgtcgccaacatggccatggctagatttgcaatgacctaattgttcctgtccaccactggaagaaacttgtcctggacgttgatccgtttgtcgtcaatgacgacgaacaccatcacgccccgactacatcgtcatttctccgcaaagtacaccgcttaaggacacaaccataaaacaacctttatgtaccagtcgcgggactctcacattatactttagtcccattcttcatattacactgttattcagcccttaacgacaagtcgtctcgactagtcatttttcacagtagacctccctctctctaa

SEQ ID NO: 447684 - DNA, 182 bp, Triticum aestivum
tgagtcgtattagaatgctgggatgtagcggatagataatgtatggaaacttcggacatgtttgttgatcataggatcattgatacgcagacttctccagttgatcgttcgatagcattcttactttttcaggagctatcatggcaagtggttggagctgttgatggtcttcgctactaatg

SEQ ID NO: 447685 - DNA, 398 bp, Triticum aestivum
gggaggtcattgcttgtgcctaaccaactgttatttcttctacagagtgtatgtataatctcacaaacggactgtacaaacagcttctcagcacgaaccacaccagtaagcacacaagtccaactgatcatatttatataaaaacactataatcggctgaaaatgacaccatgcatgcacgaatcctggtttttattttatcacttattaaaaacatgtagtactcctagtaacccatgatttggaccagtctatggatctcaggaggaatttaattggttaacaacagaacataggaccaaagaccaccagaaaataatgcaaagcgacattaacgacagagacagtagtgcatgccctaatagtatttttttttgcatgcaaatcagctgggcccc

SEQ ID NO: 447686 - DNA, 273 bp, Triticum aestivum
tgatctactcttctacgatacatgagacatgctgctttgggttcacgactaaactagccattcttgctatataacatcggctttgttataccttgggatccggttggattcatgttcctgatgcactatgtgccaagcttcatggctttagacagatctctgccatagacatttcccggaagttatagggagtcatttatttccgtctactgctttcagactctttaagtcacaacatgcatgactatgggaccccaaaactttttccggtcg

SEQ ID NO: 447687 - DNA, 344 bp, Triticum aestivum
cgacggggcaagaggtgaggatctctggagccttgatgagctcttcatggcggctggtggttattgatggttcttgtcagtgtggtctgcggatagcacaaatgtcccttgcatgtggccaagatgaagaagtggtggtgcatgtggccaggatgaaggataggttgcatctgttatgcttggtagcggatcaaaccctagctatgctaaagactgtatgctgctagcagtggaaccgtatgtcatgtttataagtattttgttgttgtatatcgcctctatgattgggtgcatgttggagactggagtttaataaataaatacattggtcatatgcctgatgt

SEQ ID NO: 447688 - DNA, 409 bp, Triticum aestivum
ggaattccgccgtcgacgggacagcagtcagcacatgccataatgctccgagaaaatttgtggtcggcttacaaatgtttttctcggtatacgccatgaaaatcgaattcgaaatggtatgaccgtgcaagttgagcatgttttaatgtaattgtgtacatagatggctaattgtttccaagttgttttattttataatgtgtgtactccgcgactgagctgtacatttccttctgatcctgtattcatatgcgggcactatttgctccatcactaaatctgaaaaatcgtacggtcggtaggcggcgattggtcttgggaggcgtgggcctacgataaaaattgtggaggccacatgaaagtctgcgggggcaaatcgattggaatcagggttggcaaggattcaact

SEQ ID NO: 447689 - DNA, 377 bp, Triticum aestivum
tcgacgagggggaaatatgaccttatatgcaattggctcggaaactcaaggtgggtccactccatggaatggtctggtcagaaagactttgccaaaactgctgaatcatcgtttttagtagacgatgcccaagctggagtcttgaagagccacggggcactcagcttcctcaaggttcacaatgctggccacatggttccgatggaccaaccgaaggccgcccttgaaatgctgaggagattcacccaggggaaactcaaggaggcggttcctgaagaagagtcatctacgaccacgttttacaccgcgatgtgatcgtcaacaccgaccaaaaagggaaaagaaactggctaggtagcctgcacgcgtcgcccttg

SEQ ID NO: 447690 - DNA, 241 bp, Triticum aestivum
cgctctttacgattgatgtgaaagatggaggtactgatactacagtcatgcgagttgggtgattatgaattcaaagacagcttgtgttgaagttagtgactcccgtagcaagcacgtatggttaaaggtgtgtaacacctttgagacatgaagtgtacttggcttgtgcatccatattagtaagagtcggagactagtgatggccctttcctaccactctatccccccagaagcaagcctg

SEQ ID NO: 447691 - DNA, 390 bp, Triticum aestivum
acttggaggatcatgaaatatgttcctatgatgagcatgtccaaaacttggaggaactgtccaccattgatattactgacgaaaggtcgcgtgatgatgtggcaacattgctgtttaggtcgaagaagctaaggatgcttggtgtgagagctaatagaggtggcaatacacatggtgttatacctttccttaatgagctccgaaaatataacctcgagtcactcatcattgaaagtgacctgtgcggtctggatgaatgggagccatggcctgagctccgaagatttgaactgacaaaactcctcccacgggttccagagagttgggcctcactggacagcctcacccacttggattttgcaattcgtaaaatccaagcaacggatgttc

SEQ ID NO: 447692 - DNA, 367 bp, Triticum aestivum
cgacgggaatgagacatctccccaggactagtgaagttgcttaagaacaagctctgcaggagatacctttggtcttcagtttcaaagacagtacactttcctgcgataactcaggcatcaccatcaggccttcttgtctcttaggtttcaggacctaccactttgtggatcatcactgtgcataagcccatgggctggggctgacacgagacattcatcccatggatcaaaacaggctgtgattgtctgtgtgcagaacacataagtgtgtaacgtttataatctcaacacaacacaatatatcgcacatgtgcagtcatgagtttggatgtgtccacggaaatagaacattcttcctcgatttcat

SEQ ID NO: 447693 - DNA, 361 bp, Triticum aestivum
cgacggacggaacatgatgctggtgacgagaatggtacagagttgatatgagtttcagaccaaaggaaggatcaagcaattgaacgcacatttaaaggacttgcaaggcacttccgcgaaatgttctctgaactggtgcaaggtggcaacggagacctggttacgacgacgaagtaggatggtgatgctggcgatgatgacatgaatgaggacgcgcctcgtgaagcatatcctgaagggaggatagagagatacactggtatgaaggtcaaggttaccatcactggcagaggagatactcagtcgataaatcatttgtctggacgacagaagacggtggtggcattaacactgatcctcg

SEQ ID NO: 447694 - DNA, 459 bp, Triticum aestivum
  unsure (1)..(459): unsure at all n locations
tttantctgccgatctnaggtatangtgtaggagttccggcntcgacggggaccaaaagatnnnnnaaggaaaanaaattaanaaanagcggccgctctagaggatgcaancttacntcncgtncntgcgacntcatatctcttcnanattntcacctaaattcaattcactggccgcnttttncaanntcntnactgggaaaancctgccnttncccaccttantcnccttgcatacatccccctttcgccagctggcgtattancnacgnggcccncaccgatcgcccttcccncngnttgcgcagcctgaatggcnantgggacgcgccctgtagcggcgcattaanctcgcnggtgtggtngtcccgctcagcgtgaccgcttcnnttgccagcgccctngcnccccgccctttcnctttcttccccttccttttnnccgcngnttnngnnggnt

SEQ ID NO: 447695 - DNA, 456 bp, Triticum aestivum
  unsure (1)..(456): unsure at all n locations
ttnnnngcccnngtttcggnaangaattccngggtcgacgagctcacaagtcggcggccctctagaggatccaagcttacgtacgcgtgcatgcgacgtcatagctcttctatagtgtacctaaattcaattcactggccgtcgttttacaacgtcgtgactgggaaaaccctggcgtacccaacttaatcgccttgcagcacatccccctttcgccagctggcgtaatagcgaagggcccgcaccgatcgcccttcccaacagttgcgcagcctgaatggcgaatgggacgcgcctgtagcggcgcattaagcgcggcgggtgtggtggttacgcgcagcgtgaccgctacactgccagcgccctagcgcccgctcctttcgctttcttcccttcctttctcgccacgttcgcggctttccccgtnaagctctaaatcgggggctccctttaggg

SEQ ID NO: 447696 - DNA, 359 bp, Triticum aestivum
ccgggtcgacgggccggcgtagtcatcggctccggcatgggcggcatcacggcgctctccgatggcatcgcgagcctggtgaccaaggggtgcgggaagatatctcccctgtgcatcccgcacgccataaccaacatcagctccgccttggtcgccatggacgctgccgacggcttcctaggcccgaacttctcgatctccaccgcgtgtgccacctccaaccactgcttcaacagcgccgcggaccagatccgactgggccgagccgacgtcatgatcgccggtggcaccgaagctggcatcatcccgatcgccctcggcgcgttcttcgcgtgcagggcgctgtcgcagaggaacga

SEQ ID NO: 447697 - DNA, 208 bp, Triticum aestivum
gtgtatatgtgttccgccacggtacatcgggggcagaatgtagtggcagtaatatcttgttctacgttcgagttgttagtcatgtggtgttgtcattaacggtgtgatgatcatcattattagtgtattgcccatggaggggatgatgtaggacaggcgaaatgaaaaaaagtccccatgcacgcaataactcattaaaaaacataaa

SEQ ID NO: 447698 - DNA, 376 bp, Triticum aestivum
gcatggagacagcaggacggcaaggttggggaaaggcccgcccaaggaaaacggataacccatttttggcaaaatgcttcaacaaccgttggaattggctacaaacggcatcaaatacagctgcaacaggagtcatgttttgcaacaatgcaaaaacggggtcgagtttttgttacaactggcgtcgcattttgctacaaatgttatcattttttgctacataagtccaccgttgagttgtgagttgccatgatggctataagcagtggcgacgccgaactgtggtcgtccggcggcgacaatgatagctccttggaagctccgcctcccagctgggactggaaatccaatggcgccgtcacaccggtcaaatccc

SEQ ID NO: 447699 - DNA, 207 bp, Triticum aestivum
gtaaccttcgggcgttgaaagtttggttccttaggctggcaacgtgaacatcaagcgttgctgaatatgtgcctgcggctgctgttgtatgtactagccacacatgataattatatgggatgttccagaaagaaaaaaaaggaaaggaaagcagtccgacaaggtgatataaacaaagcgaaaatcacaataatactgcaacaaaaa

SEQ ID NO: 447700 - DNA, 119 bp, Triticum aestivum
  unsure (1)..(119): unsure at all n locations
ctgacnctgcngcancatnatcgatnnctatatcgactgaacttgctntgnctcgtngcctnntatangtttacgcgatattgatgattgtcantttgggatatactgttacncntnac

SEQ ID NO: 447701 - DNA, 396 bp, Triticum aestivum
  unsure (1)..(396): unsure at all n locations
taaattccccaactccaaaaacctggaaccaaacacggtggaattggtaccgccgcaccgccggctattacctcgctgctcggagcaaggcttgacggcggtattcctcccccagcatgagatccatcctccgtgtggcgtcctgctgcgtctcatcgaacgccaggacccgcgtggagcgatgcttgacctcgtaagggagaaccgcttctgctccatagatgaggaagaacggcgtttctcctgttggcttggtcgcggcggtgcggatggaccacagcacggactgcagctcgtcgagccagcccctgctgtaggcctcgagcttcttcttgaaggttcgggtcttgaggccccttangactttcgcattggccctctcagcctgcccattac

SEQ ID NO: 447702 - DNA, 372 bp, Triticum aestivum
caataaggtaacggtcccttaaaaaaacgttaaacggcaaaatacaagggtaatttcaaaaattccttcccattgtatttgcaatggccttttcccattgtataaaatttggcactctccatcgcatctccaaaggacaaggtctgttgtaacgatcttctctgattttacttagcactctccatcgcgtttctttggacaagtttagttgcacgtcaccggcctctaccaaccacatatagttcttttccctcagtcactggagccaacacaagacatggaagcacaagaggacttaaggtcaggtcggctccggtatatgggagcggcgtcaactgtgcgttggcagcttgttctcgcaacggcaatggt

SEQ ID NO: 447703 - DNA, 475 bp, Triticum aestivum
  unsure (1)..(475): unsure at all n locations
gggtnnngnaatcttattntacggnanggntgcaganatccggcctggccgggcttgnaaaaanaaaaaaaaaanaaaaaaaaaaaaaaagnggcngcncnaaaggatcnaagcttactacgcntgnatgcnacntcatagctcttcnatagtgtcacctaaattcaattcactggcgtcgttttacaacgtcgtgactgggaaaaccctggcgttacccaacttaatcgccttgcgcacatccccctttcgccagctggcgtaatancgaagaggcccgcaccgatcgcccttccaacagttgcgcagcctgaatggcgaatgggacgcgccctgtagcggcgcattaagcgcgcgggtgtggtggttacgcgcagcgtgaccgctacacttgccagcgccctancgcccgccctttcgcttttctcccttccctttctngnccancnttcgccgggctttcccgttcaagtct

SEQ ID NO: 447704 - DNA, 242 bp, Triticum aestivum
cgacgggggcggaagtgaagaccaatggcatgctgtcatcgatcaatcaatcaaccatcccatcatcaagccgtaagcaggagatgtagtacatgaaggtcattgaaagcccgccgaggccacgggccccacgtgtcagcggcatttgccttagctccgtggcctagcttaggtcgttcatctgtgaggtgtacatatacgtggtaacctgcaataaaatctcactcacacggctgatatgg

SEQ ID NO: 447705 - DNA, 316 bp, Triticum aestivum
ttccaaagccatcacgcaggaggtcggcattgaacttacacaagttcaggttctcaacaccttccagttccgccggcacggcataaaattcaggacaaggagttgccgcgtcataattccaagggaaaaaacagcacaatagctgtcagtgactagcttgcacatgacatcggagcacaaagattgaaggaaaaataatgtagtaaagatagatcattcaccaggatggggaagcatttgttgctcgggcgaacacaattggtcagcgcgaaatggctgagatgaggtacatgagtagctccaacttgaaaacatc

SEQ ID NO: 447706 - DNA, 403 bp, Triticum aestivum
ggttctaatataaagttttaaaaacaaaaataaataaagaggggaacttaaaactttacaaaagtaaaagtgaacatgagaaggacgaacaccattggagtgggggatatcctgaacttgttcatgcccatgggaactttgtgaatcttgaattacagaaactttttaacaaaataattatacccttgtacaaattcattttattataagtttatgtgccaaggtttgactttaggatgattagattgcttgttggtatgtgcggtgcaaaaacagaaactttggctgtagtgcgtgattttacattttttactggaatgtcaaaagtttctgaactttttacacaatactgctatgcaattttttttattttgccctattttttcagaatttttggagttat

SEQ ID NO: 447707 - DNA, 163 bp, Triticum aestivum
acacagcgatcgcaagagctgtagtacgtacgtaagtgtagcttagcctcctctgcacgccatggcgatgctgaacaagaacacgggctccctcagcttcttcgtggccgccctcatggtggtcatggctgccatccttctcctcttctcgttcgacgccctc

SEQ ID NO: 447708 - DNA, 510 bp, Triticum aestivum
  unsure (1)..(510): unsure at all n locations
gcggntnnngnaantcctactctctccgngccnggtcaccgacaacccggggccgnccnagtagggaaantcgaagtnantcccctaggtnncgttcccannaactnctttggggcccagttaggggncttatttataaaattcnggncttcaaccnannccngcattctttcaccgcatggcttccaaggaanaaggctnatcnaatgtggcaacatcatctgcgatnantccgacnctctgcgcggtgacagnccnnncnanntcacgcaaactttgagcatttctttttatatgagattattctccttggaaatcnttccctctgtatgaaaaaacctgcacacgatggggccttcaactattngaatatgcccttggttctgtttccgggtctgctcantantttgancgctacntcnanancgggcaanggtggccttccncttgttngcaaacactcacnttcctgtcntgaatccncnccgacanttttaaactgcngcctcc

SEQ ID NO: 447709 - DNA, 319 bp, Triticum aestivum
gcacgagcccgtcaataggatgcgcatctcgaggacctgatcgcagtgtgaatggtccatggagtcccacactgcgagagcatcagatccagcgaatcacacatgtcacgtacgatgcagcgctcataatgatgtgagtcattggcgacacgacgtgatcatcacgagttcacactactcgtgatacgacctccaaaggcatcatccagggtggcgtacttggcatgatcagcattagacactcgcgacttcagattagggcgtgagcctatgcagataacatccattgcagcgtatagtccggtggcgtgagactgtg

SEQ ID NO: 447710 - DNA, 93 bp, Triticum aestivum
  unsure (1)..(93): unsure at all n locations
ttttntttgtttttntttgtttttntgtnttttttttntttntttnttttctgtttntttttttttctttgttttnntatttttttattttnt

SEQ ID NO: 447711 - DNA, 56 bp, Triticum aestivum
  unsure (1)..(56): unsure at all n locations
ttggggtttcccgaacttantcgctttgcnatagttccncctttcnatncntggnt

SEQ ID NO: 447712 - DNA, 425 bp, Triticum aestivum
cgacgggaactaagtaaaaaatgttaatcatgtattaaaaatatattaaacatgtatataaataatattcatgatgtataaaaaaatgtacaatgtgtatgcaagaaatagacttaaaaatatgtattaaaaatgttaatattgtaatacaaaatttttaaatgtatgtattagaaatattcctgatatatacaaaaatgtaaaatgtgtatgaaaaaaagttcacataacaaatatttctttgaaaaaaatgttagtcatgtgtttaaaaaatgttcaacgtgtataaaaaatgtttcttatttagggaaaattttaagtgggtataataatgttcctattctatacgaaaagggacaggatcaaccgatggaaaccaataagagaaagaaataaaaattaaggaaacctaaaaaaaaacaagg

SEQ ID NO: 447713 - DNA, 423 bp, Triticum aestivum
tcgacggagcacagtacctgcgcaaggtggacctgcggacgtacggggggtacggggagctgcgggccgcgctggacgcgctcttcggctgcttctcctcctgctccggcccctcgccggacaacggccagttcgccatggcgtacgaggacaaggacggcgacctcatgctcgccggcgacgtcccgtgggacatgttcatctcctcctgcaagaggctgaggataatgagaagctccgaagcacgatgatgacgatgatgaaaaggacccgatcaagcacacatacatacatgaagcaatctggagatgatggaaaccggccgtggcacatgatcaggagaaggacgcacgcatgggccagatgcatgatcaggccatgggtgaacggcgaacggaggccgggttacccgggcacgcgcct

SEQ ID NO: 447714 - DNA, 210 bp, Triticum aestivum
cgacgggaatgaagctacaaatgtactgtggtgatgcagattctgatgcaatacacaacaggcaggcaatgagcatatgtgtgtaggtcccagttgagtaacctttacacaccttcccctatatgagcacatcaaagataatcatatacagactcgaaagtctagtagccgaccacgtaaaattattctgtaacagatctgcgtactgcg

SEQ ID NO: 447715 - DNA, 387 bp, Triticum aestivum
cgacgggaatcagatactcagatgctcaggagcaccaacagatggcccaatggaacaatttaaacaatctaggtctcattctgcatgatggaatttctataaccattggaaccctatctatccttgaccacaattggtgtccatcaatttcacgatcctacatcgccaccgtgtcagtaggagcatgcaatctcttttctcacgtgacacagggttcagtagccaccgagtggcgaccatcgatacacttcgagaccatatattttgccgacatcacatgtgtacctttgaggaaaatcattttgtgatagtctaatatgagaataaatccctgggtcatccaaagacagagacccttttgtacagcaactgtcacgaattctggcc

SEQ ID NO: 447716 - DNA, 211 bp, Triticum aestivum
gcggtggaatgaatcctttgcagacgacttagatacgccacggggcattgtcagtggcagagtggccttgctgcgacgatccactgagcattcagccccagcgtctcacaggattcagtctaaggaaacgagaggccgagcattgtactacactttgtgagccacttctgaaaagtgtacattgaactgtcacgcatgatactgtgggcct

SEQ ID NO: 447717 - DNA, 392 bp, Triticum aestivum
taatgggtgacactaacgatactgaagattagtttcaacgtggatcccttcgggaaggagaattacaaacttaaaaattaatctcattaggtgtttttgagagaaatgaactgcgtgatgacaacagcatgcttcgcaatgaaatcctggagcttcagaacaagcttagaatgcgtctgcagagcaaccctatttggagccaggatactactacaagatcagccgttgcagtaccttatcccacaagcggagtgttcccagtacatcattcgccacattcaccagtcatcacctcgacagcactttctctgcatcccgtaatcactgagcaatgctatgctgccccaccacgagagctgcagctcttcccgggaagcttcatcttcatccac

SEQ ID NO: 447718 - DNA, 329 bp, Triticum aestivum
gggggcgaagcagagatgcgtgcggccggttctgcaacgatgccaccaacattgcatccgtcgatgcttgatcatgtatgagcatgcgctgaggtcccgatcgtcttcccagtggcttaccttcttcgtcgttgctgctgcctcagccgttatctagttcttgctttagctatgatgtgctaggctttgcttccaactactgtatgctgtgtctgaagtgttgtgtgggtgctctgcttttactttcagatcttgcacgatccttttgaggtgctgggctggggttcgtcgtaatccccggtcatgttagatagtatgtcgtgtgcggg

SEQ ID NO: 447719 - DNA, 346 bp, Triticum aestivum
aagggcttcaagttccttgcccccctccttctcctggtcctcctccaaaacaacggccccaattgaacaacctaaggccttcaattgcggcaccccttgcccgtaccggtgcagcaagtcgagccggccgaatttgtgcaacagggcgtgcaacacgtgctgccggcgatgcgactgcgtgccgcccggcaccgccggcaacgaggacgtctgcccctgctacgcccacatgaccacgcacgacggccgccacaagtgcccatgattcaaccgccttctcgacggccggtcgaggctaatgcatactagatcatggcgtctcagtaaatatcccatcaagctagct

SEQ ID NO: 447720 - DNA, 473 bp, Triticum aestivum
  unsure (1)..(473): unsure at all n locations
tggtnnngnaaatctttntgttcggtcaangtattagtgaggaggccggctcgacgagncaaaagtcggcggccgctctagaggatccaagcttacgtacgcgtgcatgcgacgtcatgctcttctatagtgtcacctaaattcaattcactggccgtcgttttacaacgtcgtgacgggaaaaccctggcgttacccaacttaatcgccttgcagcacatccccctttcgccagcggcgtaatagcgaagaggcccgcaccgatcgcccttcccaacagttgcgcagcctgaatgcgaatgggacgcgccctgtagcggcgcattaagcgcggcgggtgtggtggttacgcgcgcgtgaccgctacacttgccagcgccctagcgcccgctcctttcgctttcttcccttccttctcgccacgttcgccgggtttccccgttnaagctctaaatcgggggctcctttagggt

SEQ ID NO: 447721 - DNA, 352 bp, Triticum aestivum
cgacgggggaggggtactacatcaggtccgggatcgtggtgatccagaagaacgcgaccatcaaggacggcaccgtcgtgtatagcaccgccgggtcggcgtgacgggttctgcgacaacctctgcgctgcgttgatcgtcgtcgtcgtctcgaggcccgggagggactgaagaagtgacccggggacgggaggcgtttgaagcttgaatgactgagaaggcgcgcgcgggcagcattagtagtaagtagtagtaaggagcagtggaacaaagtaatagtcgttcgtttttcccctgtaataaataagaggctgtgtgttgaggtaaagaagtggcagcgagcaaacaaact

SEQ ID NO: 447722 - DNA, 328 bp, Triticum aestivum
gactaatagattagtgatgagagcacgtgcgtttctgaaatttttgtaaatctcgtttttctctagtccttccttgtcaaactgtcaccgtgtcagcatcagcattagtcctactagtactacgataatcctccttacagtttccaatttgtggtcccaattgtaaaatgccgttctcctgttctgttcaccaattttaagcacagaacgtcataatgatactctcatactgttgctttgggacaagtataacatcttctgaaatgtcaatcttgttcgattcacagccattatatgatgaatataatttcagatatcaccatggcat

SEQ ID NO: 447723 - DNA, 368 bp, Triticum aestivum
ggggatcaaaagaagattaacatgtcaacatttcgcaaggtgttcggtaactcagacttcctcatcagatcaatctcgattgccgagttccaagggcgcccgcttgctgatcagcctgctgtcaataatggccgtcctcctggtgctcgcaatgtcccccgtgaccttcaccaaggctcaatggtcgccgatgctatcagtgtcatctcatgctggtatgaagacaacacagagtggggtcagcgtatccgatggatttatggctcagtcacagacgatgttgtcacacggtaccggatgcagaaccgtgggtggaagtcagtctactgtgtcaccaatcgtgacaccttccactgtactgcaaccat

SEQ ID NO: 447724 - DNA, 391 bp, Triticum aestivum
  unsure (1)..(391): unsure at all n locations
gacctctagtacaccgatggttatctcggcaaagatcagaaggttgtcgtcgcccagttgtgcgtgcaccatcatgtcctcatcttccactactgcatggccacaaagccttgtgaccgtttcgccaggtttgtcagcaacaccgactacacgttctctacggtggaaacctgcaacgatgtaaaggcgctcaaggttacaggcttggcctgcaaaaaccttgtcgaaatccgtgagcactatagggtctggggcagcttgaagaaggactcactggttgaactcgcctcggccatcatcgacncctactatgacaagatgaagcaggatgccaagagaacaaatcctgtatcctggcacggggcctaaacgcggcaactagatgaaactc

SEQ ID NO: 447725 - DNA, 169 bp, Triticum aestivum
  unsure (1)..(169): unsure at all n locations
ttttntcacaaanntnacccnngnnttttgggcntanctataacnntttcacnttttncctactaccaatgttttgcctnccaaccctggcttggaatcaagcccnactttccnttccccnggttttgttcccntnanaanaaaccccttttaaacttnnggtttcccc

SEQ ID NO: 447726 - DNA, 423 bp, Triticum aestivum
gggaactactgtacttcatcagaatcaaaccctttgcaccacattgattatttgccaaaaattgaaccaaatcgcaggaacttctctagtccttgggaagcaaacagttcacaatctctgcttgatgacattcgggaccagcatggttgcttttcttctgttcaagctcagagaaactctactccatgcctttttgcagatggaaacaatttccaacaagcagaaagtgtcaacagcaatatcaagcacatgtgcagtataagtcctcgttagaatgtcattctattctgttggtggcgtgttggatcgaccataagtagcaaggacatgcgcttcttaccacactttaatatcctgccagtaactgtgataatgctctacgctggcaccaagtacccaactgaaaatacctggccattgtgc

SEQ ID NO: 447727 - DNA, 53 bp, Triticum aestivum
gacgggatataactgataatatcgatataggttattctacaagattactctat

SEQ ID NO: 447728 - DNA, 478 bp, Triticum aestivum
  unsure (1)..(478): unsure at all n locations
gggnnnngnnatttctttcggncnggttccaggtacaggtgcangagntccggcntcgagagctcaaaagtcggcggccgctctagaggatccaagcttacgtacgcgtgcatgcgactcatagctcttctatagtgtcacctaaattcaattcactggccgtcgttttacaacgtctgactgggaaaaccctggcgttacccaacttaatcgccttgcagcacatccccctttcgcagctggcgtaatagcgaagaggcccgcaccgatcgcccttcccaacagttgcgcagccgaatggcgaatgggacgcgccctgtagcggcgcattaagcgcggcgggtgtggtggttagcgcagcgtgaccgctacacttgccagcgccctagcgcccgctcctttcgctttcttccttcctttctcgccangttcgccgggctttcccgtnaaagctctaaatcggggggtcccttagggg

SEQ ID NO: 447729 - DNA, 224 bp, Triticum aestivum
tcgacggagagcaggtacaagatggggtcaagcctcaggccgggaactcctccatggccatcatctgcgagtcccacgtctccgccttgctctgcacgctcatcgtcgcgctcggcccaatccagttcggcttcaccggcggcttctcctccccgacgcaggacgccatcacccgcgacctcggcctctccatctccgagttctccgtgttcggctcgctctcc

SEQ ID NO: 447730 - DNA, 308 bp, Triticum aestivum
  unsure (1)..(308): unsure at all n locations
gatgcaataacaatcagagctttcacatatcctgcttgaccggacagcggtggttgtgaagtctgtcgagcagatgaccatggtggggaggcgggtgttcagccgctgatggaggcactacccaacccctatgttttatgcatgtttctttgtgaaaattgtgtgatgatcaagtcgaatggaatcttgattagtcagattgctttacttttgatccacctgaactatctgtaatggatcatcagatatcaacatgctacctatgggttcgtatgtgtttagaaaacatncacaccccccccaccctc

SEQ ID NO: 447731 - DNA, 218 bp, Triticum aestivum
ggggctaatagaaggggagaaggctccagaaaaacggtaacaacccgggttacctttggaacatgcccacaaccttaaaaaccccaaaagaaggaagggttccagcacaaacaaccactgaacccgcgcattgcacacaaagcccttgcacagacacaccattgtcttggtcaccatgtccaatggcatgtattggtggacattggttgtaaattgtt

SEQ ID NO: 447732 - DNA, 502 bp, Triticum aestivum
  unsure (1)..(502): unsure at all n locations
ggggnnnnnatntcctatcgttgtcggcccnggnaggacaccatcnggcctggacccggttngaaaagaangcttnngggcgaangncccccttgggggccagaattttggcntttgangngggttccttgnggngtcgttnccccttgttnaaacccttgngganaatcggcaaanactggggcactggtggngattnctttgttnctgnctgtnntggtgttngaacaatttcttgatgggaaatgtgatttgggtcnncctggtttnantttcaaccacactgggnctgagaacnggccaancggctgctctagaggatccaagcttanntttcncctgtttggcgacgtctaactcttctatagtgtcacctaagttcaatncanatggggcttcgttttataatttcggantgggaaaaacntggngtttccaaggtttaannccttgnnaanaatttcccctttcgcantnggngttaataggaaanaaggccctt

SEQ ID NO: 447733 - DNA, 381 bp, Triticum aestivum
gggatacaatgaaatgcgacgcaagctacacaaaaatgacaaataccgattttgaaacattgatcggtgtgtaaggctcactacaaataaaatcaatgattttaaaacctttgtgtaccttgcatgtcaatgtattttctcatgaaattttgcacacatgtagtatacatctatcgttagtgggtaattttttccagaatttttggagattgtgaaatgcgaagtttcaatttttcaaaacaaccaagctcaagcaccaaacgtgttttctgaggtaccagtccaaaactagaaattcataaaaaagagaatacaagtggaatagggccagttaaaaaactaaaaagttggacttgtctaaaagtacctctagaaagcctt

SEQ ID NO: 447734 - DNA, 187 bp, Triticum aestivum
cgagcgatggtctgttccaatcaatctagccctctaggagtatgcgtttaacgccttggtttttgataaattctaaatttttgcacgaggtgcatgagtttttgactaatgttgactccatggataagacgcactctcacccttcgaccattgctagcctctctaagaccgtgcactttatgccggt

SEQ ID NO: 447735 - DNA, 159 bp, Triticum aestivum
aagacagcggcatagcatagacttccaaatgtatgaagttgtatgcactaaaaagcggcgcagtcgcatcaacagtatagggcatctgcacactgcatgtcaaatcacaagttcacacgctgtcatgtagaacaaaaggatccaagcttacgtaaacat

SEQ ID NO: 447736 - DNA, 364 bp, Triticum aestivum
  unsure (1)..(364): unsure at all n locations
ggaataaatatagtgtctgataccaaaataattcacaaggaaggtggcccttaaaattccaaacaaaccaaaccttgaggaaaagcttaaggaaaaggggtgtacaggagagtcaggtttcgatcctgtggaactgtgggttacgggcccaccatgtgggttaaaagtangaagggcggagacgtcttgcgtgatcatgcaagcaaggtatgtcagaggatagcctatcagttatgtcggcaacaacatcagtaccaagggcgagggatgaagagaaccattttcctgctcgttgaacgaggcggaccagtaggcaaagttctcatccatcggtggttaccgaaatgtcatcaacaagaataac

SEQ ID NO: 447737 - DNA, 379 bp, Triticum aestivum
gctccaatagagcaagatcctgcatggaagtctccacatgcttagacagtggattacattgagcgaagactaatgatcaacatttaacttgataatgcatatgtccaggtgaacctccttggagtccccgtgcaccgcatcggcgggtaaaggatgccatgggttttccaagtccacattggcgggatagtcccagctccccggagtccaagtccgttcaatgaggccggtgtcgccgcccacgcgacccggaggggtagtaacaccgaccacgcacccgtacataggcctcgtgtcagtgtcagtgtcagtggcgtcgcccctgacgcacattacagagacggggtggcggcctgcgcgagcctcgccggtgcccacg

SEQ ID NO: 447738 - DNA, 122 bp, Triticum aestivum
ggtataactgaaaatatcgatataggttattctacaagattactctatagatccatcagctctaagtaaactgcgtataaatcatgtatgtataaggtatgtgttactgatgttagaagtcg

SEQ ID NO: 447739 - DNA, 275 bp, Triticum aestivum
tcgacgggtaattcctcgccttccagccgccgttgctctggaccagttctgctgcccaagtgcgagaccttcctcaacgcctctgcttcaatcgctgataatatttcaagttgccccgatacaaattggaacgtataagaaatttctatggtagacagccacagtacattactactcatgcatccctctatttagcacgaacacaatttttatcctgatttgattcatttattgggaaaattcttggaggctgtgtttcggatatatttgttcag

SEQ ID NO: 447740 - DNA, 366 bp, Triticum aestivum
cgacaaagtctagattgaagtaagatatagagcaacgggcacacgaaattaaatttttgtattgcatcatatgcgagactttctaagatctgactgctgttgcaccatatgaacatgaccaactagaaagaggaggttaggaatgaccttataagtggggtggtttcgtcttgcacgtgggataacacaatgggaccagggacctagaggaagaccagcctgccgcatggcggagagagatctacatcagcatcgcgactcgtgatcggggccctcgggggaataggatcatcgcgaagcagcggactcgcgatgggaagaaggaaaacagtgatttctccgtgcgtctaggtcgatgcctcctta

SEQ ID NO: 447741 - DNA, 380 bp, Triticum aestivum
ggggatctacggtgataggatcacgacgagaacgactacttcaaccctgttcttttgaacgcttccgctcgcgatctacaaagtggtatgtagatgcatctcccatgactcgttgcttagatgaactcatagatggatcttggtgaaaccgtagaattttttttaattttctgcaacattccccaacagcttaacccccacatggtcaacacggatcatgacgcatgtgttgtgtgaccatgatagctatttccctagcaagctatatatatatatattctccactagttccattcagtatgtggacatgaattgaatcaatgatgcaccctcctgaccactgaagctaagaataggagcagaagttagagcgagaaaga

SEQ ID NO: 447742 - DNA, 387 bp, Triticum aestivum
  unsure (1)..(387): unsure at all n locations
aagaagtacgtgaaacacaaagaaagagtgaagaaactatacagctgaaggagcagtgtcgaggggcggtaagattggagcttgaaattattggaaggagatacactgatatggcttcaatattgcgtgcattgggcattcctgttgaagggggcgaggttaaagctgcttataagcaagccctcctgaagttccatccggacagagtatcgagaaacgatatttatgagcaggtcaaagcaggggagacgttcaagttcatctcgcgctttaaggagaagctcaagatatagcttcnctgctaccagttatataggaaggtttaactttttgataggctgaaatcttgtcagcaggtcaagctgtgaaattgattgacgctgaacg

SEQ ID NO: 447743 - DNA, 428 bp, Triticum aestivum
tgatacagaaggaagaactgcagctagcattattcataactcctagcgggcaaaatctttttattgacagggtttttgatttgtttgatgaaaagaagaatggagtaatagagtttgatgagtttattcatgctctcagtgtcttccatccatgttcacctgtggaggataagattaattttgcatttaagctgtatgatttgaggcaaaccggatttattgagcgtgaagaggttatgcaaatggttattgccattttgaatgaatctgatatgaaattgtctgacgagcttcttgaggccatcatagataagggacatcacaacatcttttcctagttttgtcttcaacacggcagttgaagactaaatagtgcaagaattctaaaatgacggcaacaagttggaagcatattatgtctgtcagct

SEQ ID NO: 447744 - DNA, 389 bp, Triticum aestivum
ggctcgacgggattaaatccatcactttatatgaaggagtcgccatcttctaattatctgcgtcataacccggctgatacttggtgagcttggtctcttcggcaatgattgtagcatgagggcgaatctccttgacacaagcagcaaagtcttgttgatcaaaaagagttccatcttccttgagactgggatacccactggctatgtccgccggatctaactctggtacctaggctttggcacggctcaaagctgtcacagttccggctctagcacaggatcgcttgatttcttggaacctagtgggcaagatggacaacttcttcaagacatcacttaataagtttggttcttgatttgcgggggagatagtggcaagagtccgctga

SEQ ID NO: 447745 - DNA, 360 bp, Triticum aestivum
cgacgggtctgatttggttgtgtttttgtgtttaattagtgcttgtgccaagtataaccgttgggaagacttggggaaaatctttttaatctcgccgtatcaaaacagaaactttagcgctcacgataactgcagccatttttatttcgaaagtgatacatagttaattattcttgcatataattagtaaatacattcctcacatccagcaatttattttagaattgttggggttccatatcttgcgttagcaacagattactacaaactgttctatttttgacagattcggtatttcgtgtgttgtctgcctaatttgatgaatctatgtctagtacaatactttagaaaccatacata

SEQ ID NO: 447746 - DNA, 355 bp, Triticum aestivum
tgcatgaatgttacatgtgaagagcgagggcctgcaacaaagaaaaccgaagaatgggcttcgtacgcgtatggtatgatgggctgggcttgtcgagctggaccggccagagataacaataccggtccgttctcatccccaagaaaagagaaaatgggtccgttgaagagggcttgctcccactcacccccgcaaaaaaaaaaaaaaaaaaaaaaaaaaaaaaaaacacaaaaaataaaaaaataaaaaaaaaaaaacaaaaaaaaaaaaaaaaaaaacttgaaaaataacaaaacaaaaaaaaaaaaaaaagcggccgcccaaaaggttcaaacctaacttacccttgaatgca

SEQ ID NO: 447747 - DNA, 478 bp, Triticum aestivum
  unsure (1)..(478): unsure at all n locations
ttactctgncgcggtcaggtacaagtcanngaattcccgggccgacgagctcactaatcgcggccgctctagaggatccaagcttacgtacgcgtgcatgcgacgtcatagctcttcttagtgtcacctaaattcaattcactggccgtcgttttacaacgtcgtgactgggaaaacctggcgttacccaacttaatcgccttgcagcacatccccctttcgccagctggcgtaatgcgaagaggcccgcaccgatcgcccttcccaacagttgcgcagcctgaatggcgaatggacgcgccctgtagcggcgcattaagcgcggcgggtgtggtggttacgcgcagcgtgaccctacacttgccagcgccctagcgcccgctcctttcgctttcttcccttcctttctcgccagttcgccgggtttccccgtcaaagctccaaatccgggggtccccttangggttccaataattgc

SEQ ID NO: 447748 - DNA, 57 bp, Triticum aestivum
  unsure (1)..(57): unsure at all n locations
ccgccttgcngnacntccccctttcgcgagctggcgtcgctcccnnctcaggccngc

SEQ ID NO: 447749 - DNA, 124 bp, Triticum aestivum
agatgctccaggcatctgtgggcgggttcgtctcttccagctgcgtctcttgcgttgattgacttgcattcctgagtctgtgtgctctgtggtcgggctagggagatacccggcgttcccgctc

SEQ ID NO: 447750 - DNA, 272 bp, Triticum aestivum
gcgggtaattcagtatgatgattgtgatatcaagattaagaaggtgaatgttaaaaccaatcctgaaaattgtaataacaagtttgaattttgcatgtaatccaatccaatgtggtgttcctccgaagaaagctttaagttaaccccccaaaaaagttagaatccaagaatgcgttttaagccgccagcacggcgagattgccatggtgctgcgtgaaaagccgcaagacgtatcaaaagctggaaccctgatggactgcatcaaattgggt

SEQ ID NO: 447751 - DNA, 397 bp, Triticum aestivum
  unsure (1)..(397): unsure at all n locations
aacgaaaaagcttctcctcgtgtggccgagcagtgagcgggggagtggtgagaggcgaggattttgctagctagttggtgtgtgctcggggcaaatcaacccagctgctcatgtgtacataaagggcaaacccagtagaagaagagccggtgagggcgggttgagctgagaacggagggggcttaaagggtaaactcatcaataaaattaaaatcaagggtaaactaantcggcccgccccgtttgaactaatgcaatccccggttgccctctggctcccttgctcaatgccgtgtactgcaatccctgttaatttcatctttgtttatcctgtttgttatccgaatcaactgataccgtgcatgaattgaaacaataatatatactccattagacc

SEQ ID NO: 447752 - DNA, 300 bp, Triticum aestivum
gtcgtctatcatttatcttcaaatgagattgaagctatatagatatccgtgagatataactagaacttccatgaatgtgtgtatttctatacacgcacaatcaactttatcccataattaaggcttggccacacctgtgcaacgtatccatatgtattgtgatgatactacttaattatctcagtgcaactcaggtacttcgcatataaaaaaaaaaaaaaaaaaaaaaaaaaaaaaaaaaacaaaaaaaaaaaaaaaaacaaaccaaaaaaatcaaaaaaaaaccaaacaatacaaaaa

SEQ ID NO: 447753 - DNA, 479 bp, Triticum aestivum
  unsure (1)..(479): unsure at all n locations
ttcantgccnggcccngtcaagncaganngnccgggccgacgagctcactaatcggcggcgctctagaggatccaagcttacgtacgcgtgcatgcgacgtcatagctcttctatagttcacctaaattcaattcactggccgtcgttttacaacgtcgtgactgggaaaaccctgggttacccaacttaatcgccttgcagcacatccccctttcgccagctggcgtaatagcgagaggcccgcaccgatcgcccttcccaacagttgcgcagcctgaatggcgaatgggacgcccctgtagcggcgcattaagcgcggcgggtgtggtggttacgcgcagcgtgaccgctaccttgccagcgccctagcgcccgctcctttcgctttcttcccttcctttctcgccaagttgccggctttccccgtcaagctctaaatccgggggctccccttaaggttccgaattaatgcttaang

SEQ ID NO: 447754 - DNA, 381 bp, Triticum aestivum
gggacaacaaatccccacatggtacctgctcgtcctcatgtctgcatatatacctccccatttttactcaagcagaagcatcggcttctactagttggaacagtctaccgcacatttaaatatgtgggcaatgaagaaaaaggggaaatatttctgagagacagtagatgatcatcaaaagaatgtgaaatgtataagagaattagaggcaccgggaagaactgcatcgttgctatgtagaccatgcatcaagctcaattttatcattcacaatggactccctttacctgccactagtgtcattcttttttttcggaaaaacttccaatctattcatcttcaatcatggcagtacaacgaatgccagaaataaaaattaca

SEQ ID NO: 447755 - DNA, 491 bp, Triticum aestivum
  unsure (1)..(491): unsure at all n locations
ttactctgcccgggncaggtacnagtcacagaattcccgggncgacgagctcactaatcgcggccgctctagaggatccaagcttacgtacgcgtgcatgcgacgtcatagctcttcttagtgtcacctaaattcaattcactggccgtcgttttacaacgtcgtgactgggaaaacctggcgttacccaacttaatcgccttgcagcacatccccctttcgccagctggcgtaatgcgaagaggcccgcaccgatcgcccttcccaacagttgcgcagcctgaatggcgaatggacgcgccctgtagcggcgcattaagcgcggcgggtgtggtggttacgcgcagcgtgaccctacacttgcaagcgccctaacgcccggctcccttcgctttctcccntcctttctcgcccgttcgccggctttccccgttcaagctctaaaatcggggggctcccntttagggttccgattaagtgcttaangcacc

SEQ ID NO: 447756 - DNA, 414 bp, Triticum aestivum
cggtcgacgggtgaggaacgctgatgtgtgtatatgtgttctgctaaattaaatagggcccaaaatgtagtggcaccaaagctttggtgaactgattaattgaattgtatggctgtagtgaattaaacgtatgagttagtacataataatgtttgtgtgaaatggaggggatgctgttggtcgaggtgatctaaaaaaaaaaaaaaaaaaaaaaaaaaaaaaaaaaaaaaaaaaaaaaaaaaaaaaaaaaaaaaaaaaaaaaaaaaaaaaaaaaaaaaaaaaaaaaaaaaaaattaaaaaaaaaaaaaaaaaaaaaaaaaaaaaggggcccccccaaaggttccaactttaatttccccttaaagcaaatttaaaccccctccaaagggcccccaaaattcaattccagggccc

SEQ ID NO: 447757 - DNA, 399 bp, Triticum aestivum
gggggctactgagcgaggcacggagacacaattgagatgaaccaattgacagattgcgatcagattgagttatcacccttctactgtcattgttgggtggggggaagggggagggagagaaaggcgtatcgagagtgtgcgcagtaggcatagaggcacaactagcgactgtgtgtgtatgtgtgtgtgtgtttgaaagaggagtagatagattactatcaagatcgaggtgccaccctactccttcggtgtcaggtaatgtgtgtgtgtttgagagagaagccatgtcgatagattagtatcaagatcgaggtgtcgccctactccttcggtgttgggaagtgtgtgtgtgtggttgtgtgtgtcggggggaagggggcagtgacacttacatatctc

SEQ ID NO: 447758 - DNA, 275 bp, Triticum aestivum
ggggaatgaatgataatatcgatataggttattctacaagattactctatagatccatcagctctaagtaaactgcgtataaatcatgtatgtataaggtatgtgttactgatgttagaagttgattcaaaaaaaaaaaaaaaaaaaaaaaaaaaaaagaaaaaacaaaagaatataaaaaaaaaataaacgtgtaaacaaaagaatatatctttacaatcgtgtctaaaagtcacatcacagtgcgtctctttaaaaaacattgagtgtgaaaa

SEQ ID NO: 447759 - DNA, 278 bp, Triticum aestivum
acggggtatgcaagacaatgtccatatacgttattctacacgatcactctacagatccatctcctcttggttaactgcgctatcaaccatgtctgtataatgtactgtgttgctgacgttggaagttgattcacaacactgtgaccagtaggcagggctgcccacctcccccatcgtgtctcgaccctctgtgtgcgtctgaccacatcagtacatcgcctccgctcatccctcgacgtcccaccctactccctctctctccagtcccttgtctgctg

SEQ ID NO: 447760 - DNA, 557 bp, Triticum aestivum
  unsure (1)..(557): unsure at all n locations
gnggtccgnanttctattgcgtcgggccncngtcacacatacccgggnccggcccgganaacaaatnantccagttnnnaccaagattgtggattcaaaaacnggggaanaancnggnatngtgggcctnagcaaatgntggaaatcgggtccaantacaaccgtgggcagttcctgtgaaaacttnggncaacanttttccattggacggggantacncctgctggaanatgctncccantttcnnttantggagctggaagctgtccataggtanntnacggcnngatgttncacacagnaaggggtcttccaaattcttgngaaatcnataggaaccttttccttgcacttgnaagttnattcnagccngtgatggggtccttggnccntgctntttgctagcttatncaccnntnaagggccccggggccttcaanattnctnnacctttgaacncctttngaanattaagngnaggctttttnccatcccaantctggtggtcctgcncannnanatctttggatnccgaatnccgnccnaagtcanacngt

SEQ ID NO: 447761 - DNA, 388 bp, Triticum aestivum
  unsure (1)..(388): unsure at all n locations
ccgggccgacgggtggcggtaaacctgcccaggagctgcaagacaaggagcaggcccgagtgccggatgatgcggcggcaaaggtctgagccaagcaagcagtgatcggcgatgggacagaaaagattgtgtcaggacatactactggttccagactgtgttggaatgcaacgcatgcaccgtgaactggcggcaggccaggacgataagatgggcagtgcgccattgctgtacccactttctgcctgatggtttcctttcaagtagctagtaccagacgtctcccgttgatgttgtatgtaccgaattaataaaacaagtttcagatgcttttagtgagctcctatgtgggtggcttcagcacgcaccanagcacaattttacattt

SEQ ID NO: 447762 - DNA, 156 bp, Triticum aestivum
ggtcgacgggagaggccaggagatgatcaggaagcgtcaaggacgaccaacgttcgcaaggtcgacgtaacggacgaacccgtgcaaacgacctgaaccggaatgcccgatcgatttcgcccaggacgacgacctcgccgtcgacgacttcaagga

SEQ ID NO: 447763 - DNA, 443 bp, Triticum aestivum
cccgggccgacggggatgtcaatggatggtatctggctgattatttatatcctcacctatataaatatatgcagtgcaatattcttcagcggtagatagggtccctgctgtcatgtgcattctacttgacactgggtttttttcatttctgcacgggcagacctaaccctgtttcactgaatgttgcaagtaatacagaccaaagtttacaaccaatggcagaagaatgcgttttgacacttgagaaggcacataaatcttaaacacaaatacatctcctggaggcatatgtggcttgcttcggaacaaacaatgtaggtgcttcacagggttgggtcgctgcaaaaattacttaggtgtgcatgacagacttaatatatatcttaaaccaaaaaaagggaaaactgttccaaagctaaatggcgttgttgttcacaaaatga

SEQ ID NO: 447764 - DNA, 230 bp, Triticum aestivum
gggataacaatgcggattattgcgcgctgtctgctcctcgatgtagagcatgtgccgaccatttagaccacggtgaagagcggtgctctctcttttgcagtatcagcgacagatcaaggaaacgaaggccggcattgtactaaatttgtagccacttcggaaagtgtacattgattgtagcgcatgatactgtgaaatctgagatgtcctttcaccactcggtgacaagt

SEQ ID NO: 447765 - DNA, 591 bp, Triticum aestivum
  unsure (1)..(591): unsure at all n locations
tgcngntnnngcaaattctatntgncncggncncggtcttaccatncccggggncgaccggagtggcaaggtaagagctgctgaacggcgtgcgggcnccgcgcctggaagttagaatacgggtangggcncaataacccctcggggttangcaangggcaattggcaangggctcatgccntnacgngccgttttcctttttttcgggacngtttgttacatccngggcaaagnggaaaanngccaagggaaaaaannnaacaagcgggtgggctccgttttggcnccntgcccgntcngtctcatccgctttcttccncgngcaatnnggcgngncatcctgcagcnnattcgtcccnttccatcaatncgtgtcggcctttgttccggttggtgccnttncaggggtnnagttncnannnaaattngnaaattggttcctcgctggcttggccnnttctccaaanttacntaccctcntttccttcctacccactccncccctncnncctnncccttcnctnnccnttcanncaannntccggcctcncntcnacacntttcnacttctnctttcccccttncntccc

SEQ ID NO: 447766 - DNA, 226 bp, Triticum aestivum
cggggagactaggcatgtcaaatccccgacgtgtcatgagtatacactggccttcgtatgatattgaatactttttacaagggtgcccccccatatgtcgaagcctaattaatcctggatacgaaatcatagctcttccccaatatgatctaaacttacgtaaccgtccattctatgtcatagtccttccagggaataccctaactcattcaccgaccgtcctttt

SEQ ID NO: 447767 - DNA, 133 bp, Triticum aestivum
gggagtgggtattatgtatcgttgctactaaggataaaacgatagggtatatctacatagatagatcttgtctacatcatgtcatcgttcttgttgcgatctattttcctttgcttttattttcagatctatt

SEQ ID NO: 447768 - DNA, 411 bp, Triticum aestivum
gacgggacagccaaactgcgacgtcatctacagtgtactggtccccttggcactattttataaagtgcccaggggacagcctgacatgcaccacacctcttatgggcatggtgccccatgctcacttgccccccacgccactcacctagcttaggaaattagctaaccattgcatataagggcacacatccatccatccagggaatggatccccatggactctcacgcacacaccctatcatgcgagctctcaagagagctatctacccatccatccattcacacacaacacacacgcgcatgagcactcacatgctcacggccatgagcatggccggccactagcatgccacatacgaggccaggtgccagatgcctacggcatttgactcagatacagctcgaggagca

SEQ ID NO: 447769 - DNA, 361 bp, Triticum aestivum
gaagtcccgggccgacgggccaccggacgggtctgtggagaggctgtgcccaagggcaagcttttattgatgacaagtgtggacgaggatgccgaggcaagattatttgttttgcctcggcgagtatatgtacatgtgttatgcctcctggtcgattcgaggggattggcagttggaagatagtttttttttgctgtgacttgtagtgatgtggtgggagctagctgctcgtcagtttcatgttggagcccgtgcagttctgtgtctgatcatgtatgtgttttcccctgatgtaaaagttgtaaagatgatgattctgctgtgaagaaatctaatacgaaaagaacaattcattcctgac

SEQ ID NO: 447770 - DNA, 139 bp, Triticum aestivum
gtcctgcaattgaggagattactggtgatgccgttatggcgtctcaaacttcacgcacagtaaatagggctactaacatctctgctctagtgcttatcaaactgatgtacaaagatgttcctatacgttgtggagttga

SEQ ID NO: 447771 - DNA, 478 bp, Triticum aestivum
  unsure (1)..(478): unsure at all n locations
tnnctctggcccggtcaggtaacagtcngngaattcccgggccgacgggtacggctgcggaagacgacagaagtcgagggaaaaaaaaaaaaaaaaaaaaaaaaaaaaaagcggccgcctagaggatccaagcttacgtacgcgtgcatgcgacgtcatagctcttctatagtgtcactaaattcaattcactggccgtcgttttacaacgtcgtgactgggaaaaccctggcgttcccaacttaatcgccttgcagcacatccccctttcgccagctggcgtaatagcgaagagcccgcaccgatcgcccttcccaacagttgcgcagcctgaatggcgaatgggacgcgcccgtagcggcgcattaagcgcggcgggtgtggtgggttacgcgcagcgtgaccgctacactgccaacgccctaacgcccgctcctttcgcttcctcccttccttttccgccaagtttgccggnttc

SEQ ID NO: 447772 - DNA, 441 bp, Triticum aestivum
cccgggccgacgggtcatcttatcttgatacattactctgtttatcatgagcttaatactttgagatgcatgctagatatcggtctttaggggcggagccaggatttgacgataggggggcgaagtattcaataaacatatagaagtttttttttcctaacaatgaccattctatgaggaatacaagataatatggattttgctattagaaaatggtagattttcattagtttgaatgtggttcttatgcctaaaactcacaggacaaaatgtataatcttatatggaattctaacaataacaatctctcagtttgtgaaattctaacaataataataacttgcgatgatgtagacatgagccgatgatataccttagatctgaagtgagtcctgttgagtagtgctaagggcaaattctgaaactaagatgatagaatca

SEQ ID NO: 447773 - DNA, 389 bp, Triticum aestivum
gggatacatcaattttgaaaaaaaaatcatcggttttgaaaagagttcattgattttgaaaaacagttcatcgattttgaaaagagtttttcaattttgaaaagagttcatcgattccgaaaagagttcatcgattttgagaaacaaagttcatcaattttgaaaaagagttcatcgatttgaaaaatagttcattgattttgaaaaaagttcgtcgatttttaaaaaagttcatcgattttgaaaaaaagttcgtcgatttggagaaaaaaatatttcttttgtaaaagagttcatcaattttgaaaaaatagttcacgaattttaaaaggttcattggattttgataaaaaaaaattcagcaaattgaaagagttcacgtatttaac

SEQ ID NO: 447774 - DNA, 608 bp, Triticum aestivum
  unsure (1)..(608): unsure at all n locations
tggnnnnngnanttctactttgnccggcccggtcanaccanacccgggncgnccggcttatcaaattcttgctcgttctttgattncctngcagggaataagaacttccgtngtcaggctggaaccnttacttncgggcaatcctnaagttaacctcanggaagaattggtttaagcaattggctaaagggcgcaaacgtccnttgcacgtttggttagtccgggattggtcaaaatcgtctccaaccaaaatccgataagtttatcatcctcatccgaaaagatnggggaacaacctccgcctcctatcaaagtnggtaatcnagtttttcaaggtttgcctcccggtnaanatttccaagtttttcctnanaatnaagatttaattttccttaccctaattggtcccaagnaaaaaagccccccaaaaaaaaganntttagattnnattcaaccccttgggtccnaaanccntttctgaancccttttccaaattttccctttccaattcccttgcaaaaanttnaaattacccgggttggcancccnccccntnccnaatttccccgggcccntaaantctncaaatnccnttttaaaaantttc

SEQ ID NO: 447775 - DNA, 419 bp, Triticum aestivum
gggtccatggaatgtactacctccgtatcaaaatagaatacatttttgtaggctaaactagcattcaacaacgttttactttttgctacggaggtaatatccgattatcagctcactcgtcagcgcgcaacgattttgatcatcccccctcttgcaacttgctaccgcatagtatatatagagatactgtacaagacaatatcacaaccgcctttcatggtgtgagtaaacgctttctcttctcttttatcaaaacattggacattcactcatgtccatttgtgtccccctctccccctctttgtttttctgtttttttggtggagagagtttcccgcctattgtgtttagagcaacgttcttacatctgcaacctccaaagcgtttttgttttggaggatgctctattctctttgttt

SEQ ID NO: 447776 - DNA, 270 bp, Triticum aestivum
tgggcgcatcccacactgagttgtacaccggcggcgagaggagtggaatggttgttagagatcgatccaaacgcacaaatgttgcggatgacgtttttaagcaagctaagaggaagggagctaagcaaggcccagctcgccggcaatcttctagttcaaggagccttcctgggactagcagacttctaacaggtgaaactgtacagcctgacacaccacagccaccagaggaaattgttcacaacatccacttccggagtgatgggttca

SEQ ID NO: 447777 - DNA, 468 bp, Triticum aestivum
  unsure (1)..(468): unsure at all n locations
ttactctcccggcaggtaaagtanngaattcccgggccgacgagctcactaatcggcggcgctctagaggatccaagcttacgtacgcgtgcatgcgacgtcatagctcttctatagttcacctaaattcaattcactggccgtcgttttacaacgtcgtgactgggaaaaccctgggttacccaacttaatcgccttgcagcacatccccctttcgccagctggcgtaatagcgagaggcccgcaccgatcgcccttcccaacagttgcgcagcctgaatggcgaatgggacgcccctgtagcggcgcattaagcgcggcgggtgtggtggttacgcgcagcgtgaccgctaccttgccagcgccctagcgcccgctcctttcgctttcttcccttcctttctcgccacgttgccggctttccccgtcaagctctaaatcgggggctccctttaagggtncgaatta

SEQ ID NO: 447778 - DNA, 322 bp, Triticum aestivum
gggtccgataaagctatacacattcgcgtaggagtatgtgctttgttgtgggcaatttggaactgcagaaatgatttggcttttaacacaacagcaactattcattttttgcaggttttattccgagctactgcgctgatccgtatgtggtcgttactcactccggcggaggccagggagcgtttggttaccggatctgtccggtgggagatggtagctcgggatatcttcaactggtttgatggcggtcatgtaataggatatgtgattaatttacctatctttcttttgccagccggtggtggcttatgggcctttagtt

SEQ ID NO: 447779 - DNA, 454 bp, Triticum aestivum
cgggtcgaccgggatcagaaggatatggacaacgcagatgcagctggagaacttgtaggtccgattcctcctctgccggatgctcaagtggataatgatggagcttcagttgaacagagtacttctaacgctaagagtggtgagaacgttgccatgaatgagggagctgttgacaaggttgattcgtccaaattagatggtcaagacaataccaatggtagcatggatgttgatgctggtagccaggaagagggaaacaatgttcctgccgctcctgatgctacaattgtagatgtagggaacacacctgtatcttcagattaagctgtctcgaatgaagagagtgacgtggtccctgaatgaaacatctaccacatacctcatctgcggcgcatgtcacaagcatgatgaggaaggtaactagaaacaggatgcagttgcaaagtgtgaaact

SEQ ID NO: 447780 - DNA, 307 bp, Triticum aestivum
acggggtaagttacgtgattcataagggagatgtgagagtcaagatgatgacaaccccatgacttcaagctcaagatggacttcaaaattcactactggatggaggacggttgacgggcaccctacagaaaccagcggatggtcgggatgcatggagaagcgccatgacatcttgcggaaagcttcacccagccacgatgagatggatggataccccattgaccggaagcttacatgtgcagccgcaagccattatgggccctgtcttgttcgaccctaagcgttactttggctggaaggtgctacc

SEQ ID NO: 447781 - DNA, 429 bp, Triticum aestivum
acgggcatccccagcttgcaacaaaaaatcgagcgcccagggagatgcccagtgctgcaacctacgacgaaaaaagcttcaaccagctacgggaaaagtttcaaatcgtatgacagaaacctatgaacgaccaaagaaaagttacaaccggtgacaaaaaaaaacttcatctgacgacgaaaaaagcttcatccgacaatgaaaaaagcttcaactgtgaagccgtaagccatggacgacaaacgaaaaagctacaaccggccgttgcaaaagctacaaccgcattgaaaatgtcacacagtcatagcaaaatgttgttacaattgaagcatttctgttagcggttgcaacttttctaatttgcatggtgtctagttgtagctttctctctcaatggttggagctttttccaactacagttgaagcttt

SEQ ID NO: 447782 - DNA, 82 bp, Triticum aestivum
  unsure (1)..(82): unsure at all n locations
tnttnnttttttttnttttntntatttactttattttncttttttctttatncttttcttttttnttgtntttttcttttnt

SEQ ID NO: 447783 - DNA, 388 bp, Triticum aestivum
acggtggataaaggcatccgcgtctcgttgtcaatcaatgatgcatgctgttttaccccggcgttggacacgacagcagctccttgtgccgaccctttgcttgccagtgataactccaactacgttaaccatttggcttgaaaaaatttgatttgtttttgacgggtaatttttgtttccattataggtggacaccatgatatactccctctgtttttgaatataagcccttttagagatttcatcgatacggactacatacggatgagcaagttgggcggctagtgacttatattcagtcggtgatgagatgagatgcgtcgactttgacgtggagtatggaagcaaactgtggaaagttggaccggcaaccatggccaaggaagca

SEQ ID NO: 447784 - DNA, 244 bp, Triticum aestivum
acggggatgacaggtttcgggttcgggtattgctcaaacaggtttgaacccgtgaaacgtgtcgggttttatattttacccagcagctgccccgtggggttaaaaatacacccgtccccgtcccctaatagggtaaaaacccgtggggacgcgggttttggggccccattgccatcttgagtcaggcacgaactcgatgtcgagaatactcaccaatagccgggccaccccgttagctcgggcc

SEQ ID NO: 447785 - DNA, 350 bp, Triticum aestivum
aagtcccgggcagacgggcagcggacggatgtatttgctctccagtgcacgtgttgtctcgattgacgacttgttttcttctatgtatcgaatatgtggaatattatttgtaatatacttgaaaaaaaaaaaaaaaaaaaaaaaaaaaaaaaaaaaaaaaaaaaaaaaaaaaaacaaaaaaaaaaaaaaaaaaaaaaaaaaaaaaaaaaaaaaaaaaaaaaaaaaaaaaaggggccccccaaaggattcaaacttaatttacctttaaaggaaagttaaaacccctcaaaaatggcaccaaaattcaattaaagggcccttcttttaaaaggttctaaccggaaaaaccc

SEQ ID NO: 447786 - DNA, 508 bp, Triticum aestivum
  unsure (1)..(508): unsure at all n locations
gggtnnngcaactctatttcncggcccggtacacannccgggccgaccgggtggtaaatcatcgattgcactaaaacaattagtgcgtgtgcaaaaaaaaaaaacnaaaanaaaaaaaagcggccgctctagaggatccaagcttacgtacgcgtgcatgcnacgtcatagctcttcatagtgtcacctaaattcaattcactggccgtcgttttacaacgtcgtgactgggaaaacctggcgttacccaacttaatcgccttgcagcacatccccctttcgccanctggcgtaaaccgaaaaggcccgcaccgattgcccttcccaanattncccaaccntnaatgncaaattggaacccccccctgttacccggcnnattaaancccggcgggttttntngttaanccacancntnncccnctnaacnttnccaannccccntaaccnccccgnccttttcccttttcnnccnnccntttcncccaantttncncgggnttttccc

SEQ ID NO: 447787 - DNA, 492 bp, Triticum aestivum
  unsure (1)..(492): unsure at all n locations
gggnnngnnnaactctctcnggccggccggtagaaaaccgggtcgaccagctcactaatggaggccgctctagaggatccaagcttacgtacgcgtgcatgcgacgtcatagctcttcatagtgtcacctaaattcaattcactggccgtcgttttacaacgtcgtgactgggaaaacctggcgttacccaacttaatcgccttgcagcacatccccctttcgccagctggcgtaaagcgaagaggcccgcaccgatcgcccttcccaacagttgcgcagcctgaatggcgaatggacgcgccctgtagcggcgcattaagcgcggcgggtgtggtggttacgcgcagcgtgacgctacacttgccagcgccctancgcccgctcctttcgctttcttcccttcctttctcgcacgttcgccggctttcccgtcaagctctaaatcgggggctccctttaaggttccgaattnntgctttnncngaaccccc

SEQ ID NO: 447788 - DNA, 64 bp, Triticum aestivum
gtagaaagtacggttataccttattgttatatctccaattgctatatcatatatctgtaaggac

SEQ ID NO: 447789 - DNA, 357 bp, Triticum aestivum
  unsure (1)..(357): unsure at all n locations
catggnagatatagtgagagccgaacagggagaccaccgctgactctgatgctcgccattctccccgacaaggcgatctggttggaggatgtcgaggatgcgaagctagtgaggcagttgtccgcggagccgcccggaaggccagcaaataacaccgaggaacatgaggcgtccccgaattacttgtcgcacgtatggatgtatctagatgtattttagttttagatacatccatttcaacgacgagtaatttggaatgaagggagtatgagatcaaggtctcatttatactacatatctgctcaatgcttgcagtagaaagcttttctcattgttgtgtggcaagagctgatattt

SEQ ID NO: 447790 - DNA, 72 bp, Triticum aestivum
  unsure (1)..(72): unsure at all n locations
tgtgcncnccctncccnattnttgcnatcccccacggccnctctttgcctttcttggnnacctcttccgccc

SEQ ID NO: 447791 - DNA, 370 bp, Triticum aestivum
cgtgaagatgaacagatcgagtcctgtacctgtgtgccccccggcttaaccccttggttccttccttgaattaaaggacctgcgttcccaaaaccctttcgatctgttggagtcaggtgcgatgtgcccgcggctggaaggagttagttgcaagccagctagatggttggccgggtcatgctagtgcatgcatgggctagcccggcgggtcatgtggtcatgcatggatatggatcgtgcatgtagtggttagcctagtgcgtgagttagttgccgggtgtgcaggccgtgtggtgtgtgtgcacgggtataaaaacccctcctccatgtactgatccagttgagccggtgtgtagccatgttaccactg

SEQ ID NO: 447792 - DNA, 58 bp, Triticum aestivum
gagtgaatattcaattgattgaatgaacgattgaaaaattccgaattaaattcgtttg

SEQ ID NO: 447793 - DNA, 159 bp, Triticum aestivum
acaatcaatacatgacgctttttaaagggaaagaatttaagttggccgaattaattgacagttcacgacggaaaaaaaatgtttccattcttaaaatttgttctatttttagacagattttatctctttacacgatcgtgagaggttggttatatttcg

SEQ ID NO: 447794 - DNA, 445 bp, Triticum aestivum
  unsure (1)..(445): unsure at all n locations
aatgcccgggtcgacgggaaggtaaagaggattaacgctgtcgccgtcggcgagggagggaatccactaccggtgcagctgttcactttcacccagcggcggcgcgggaaggcctccgagcccttcttcttcgccgccgtcccgtcgcccaccgaaccacgcaccaagaaccttaaggtataatttacttattccacatgcattgctctagttgcatgtataccatgaatctaggacgtggttcaaagaggaaaggagtgggggaaagtagtgggaaaagttgtatagcatgaatctaggacgtggttcaaagaggaaaggaagggggaaagttgtatagcatgaatctaggacgtggttcaaagaggaaaggaatgggggaaagtagtggggaaagttgtatcacataaatctaggacgtggttcanagaggaaaggaaagggc

SEQ ID NO: 447795 - DNA, 79 bp, Triticum aestivum
gggacaggaataaagttacgtagccaacttcttgttttcaaaaggtttccaaataaaagttcagtgtcatgacgttggc

SEQ ID NO: 447796 - DNA, 78 bp, Triticum aestivum
acgggaaagttaacacgttgcgtacccttgttcttgttttcgaacggtttctacctcggatttcactgtcttgatgtt

SEQ ID NO: 447797 - DNA, 427 bp, Triticum aestivum
agaatgagccttcaggatggaaacacctcctgtcttgccacttgcagcacagctgacatcgacgatgatccatttagagcctcatattcgtatgatgctgaagaagacattggggatgaagagtctggtgccttcacttcttgtgttggaacacggtggtttagagctcctgaactcctatatgggtcaaccagctacggccaagagatcgacctgtggtcactaggatgcattttggctgagcttcttagtttagagcccatattcccaggccaatctgatattgaccagattggtagaatcatcggagtcctgggcaatatcacagaagagtcctttcctggctgttcaaatttacccgattacaacaagatctttttcagcaaggttgagaagcctacgggcctcgaagcatcacttcctaaca

SEQ ID NO: 447798 - DNA, 67 bp, Triticum aestivum
  unsure (1)..(67): unsure at all n locations
gngnttcncagggntntatttccggaaaantctttttccacggttaacttncccnncttcctntnta

SEQ ID NO: 447799 - DNA, 370 bp, Triticum aestivum
  unsure (1)..(370): unsure at all n locations
cccgggccgacgggcacataagtctaaagatgaccgctaaaccagcatatataaaaaatatgcagatggcagcaagcccacaccaaaaagtcattttctccaaatctatggctacctttaaaagcatattgaaagtggagggtgtaacaaatagtgatgatcacaacttttcacattagctagtcattctgttttctctgactattgatgcagtgtaggtagattgttatgaaggagctacagaaaactccatcaagaaaatgtcaataaacttatgatgattgtaacctagattaagcttaactagaaactacgtaatttgtaacagtggtaagggtttgctgcatgattcatgctcattaacanagct

SEQ ID NO: 447800 - DNA, 89 bp, Triticum aestivum
tccttcgtctcgttgaatgtatctgcgcttctgtaatatagatcggttgtaagatacttgtatgcttatggacgccattttgctgtgtc

SEQ ID NO: 447801 - DNA, 226 bp, Triticum aestivum
tcgacggggagggaaatttggattgaactgtttcggtaaaaattctgtgttcaaaagggcactgaagaatgttccctggaaaataatgtacatattgctgtcttttctttctcttgtaaataaaatgaacagtatagaaatttcaggatgaaccaactaggaagacatttgcgttgtatattaattaaaacctattataattgttgaatattcaattttgtaaaaa

SEQ ID NO: 447802 - DNA, 491 bp, Triticum aestivum
  unsure (1)..(491): unsure at all n locations
ttcttctggcccgnccaggtacaagtcacagaattcccgggncgacgggggtgtttnagtgaaaaaaaaaaaaaaaaaaaaaaaaaaaaagcggccgctctagaggatccaagcttactacgcgtgcatgcnacgtcatanctcttcnatagtgtcacctaaattcaattcactggcgtcgttttacaacgtcgtgactgggaaaaccctggcgttacccaacttaatcgccttgcgcacatccccctttcgccagctggcgtaatagcgaagaggcccgcaccgatcgcccttccaacagttgcncagcctgaatggcgaatgggacgcgccctgtagcggcgcattaagcgcgcgggtgtggtggttacgcncanctgaccgctacacttgccagcgccctaacgcccgctctttcgctttcttcccttcctttctccgccaagttcgcccggctttccccgtnaaagcntaaatccggggggtcccct

SEQ ID NO: 447803 - DNA, 345 bp, Triticum aestivum
acgggcaatggaggatgtaggtgtgatatgtcaagtagtggacagataagccaaccactggatgtggttttcagggatttttgcagtgggatttgtagggtactatgctgcgctgtgtttgggatttgaaataaaacgatgggagatgtgccacgctcttaaatgccagtcttctgctctaatcttgctaaattacttgttgcattttgcaaaacagaaaaaaaaaaaaaaaaagcaaaaaaaaataaaacatccaaacaattgcacaaccagaaatggaaaatgggacacaccatttaaacggcccattaaacacagaaaaaaaaaatggggcccctcaaaggg

SEQ ID NO: 447804 - DNA, 468 bp, Triticum aestivum
  unsure (1)..(468): unsure at all n locations
ttaactcngcccgngacaggtacangtccngaattcccgggncgacgggagagctangaacagtactccgaaaatctcaaattgtaactgcaagtgtgaattacctctgctctgtttcgtgtgttgtactcctccaaagatcaaaaaaaaaaaaaaaaaaaaaaaaaaaaaaaaaaaaaaaaaaaaaaaaaaaaaaaaangaaaaaaanttaaaanaagcatnaaaaaaaananaanatcaaaaaaaaanntnancaaaattnaattnanatggccagacgnntnaaaanntcgtattgnaaaaaanntnanctccngaaaantaaacgcnatgcaccanatancacttncgcatnnggaannaatatnnagnanncccgnnccngatcncccttcccaanacttncnaanccgannggntattgggaggggnncnntaccnggtaaanaaccntnnnncngtnttng

SEQ ID NO: 447805 - DNA, 359 bp, Triticum aestivum
gggaggacaacatcgattcatctgttatatgatgcggtagctgaaccccttttcctctgcatgaactgtcattgccacagtccatagatgagacccactagcatgaatatgagttgtttgacccctgatgtgcctacgcaatcatgcgtgtatgtcatggctgctactgcttagagttgagtcaggtctgattcatcgaggatgaattgggaaagtggtaaacatgtcctactgggattgcgctcactgtgtaaacactagttggtagatgtatccatgagacgccatgtacgactacatggagggttgtttcattagcatcatccttaagcactaagatctgtatgtatgctttaaga

SEQ ID NO: 447806 - DNA, 151 bp, Triticum aestivum
gggacagctaacaccccagctccagtgcctacaaagtcatcatcgacatggtcgtcgaaaaatacttcagatacatgaactagctagctatgagtggtagaggacaaagggggaaaggaggaaaaataaaggaagaacgcaataactctgc

SEQ ID NO: 447807 - DNA, 503 bp, Triticum aestivum
  unsure (1)..(503): unsure at all n locations
ggngnnnnnnggnaaantttacttggccagtcccggtcanagaatncccgggncgacggcaaatatatctgtcggatggcaaaaaaaaaaaaaaaaaaaaaaanaaaaaagcggccgcctanaggatccaagcttacgtacgcgtgcatgcgacgtcatagctcttctatagtgtcactaaattcaattcactggccgtcgttttacaacgtcgtgactgggaaaaccctggcgttcccaacttaatcgccttgcagcaaatccccctttcgccagctggcgtaatagcgaagagcccgcaccgatcgcccttcccaacagttgcgcancctgaatggcgaatgggacgcgcccgtagcggcgcattaagcgcggcgggtgtggtggttacgcgcagcgtgaccggctacactgccaacgccctaacgcccgctcctttcgctttcttcccttcctttctcgccacgttcgcgggtttccccgtnaagctccaaaaccggggg

SEQ ID NO: 447808 - DNA, 319 bp, Triticum aestivum
acgggagagttatggaagctgctcagcctcaagcacggcagcggcaacgactgcctcctcgaggatttcgcgacgcacggaggagacacgaacgatgtttttttcgacgaaccggatcatgagcatcagaaacccatggctcttcttatggatttatatccaggagtgcttacaggaatacatagcatcgactaccagatcctattcaaccagaaaactagctacctttcagaccatggtggtggtgccggcgacacttgggctagtggataacatcacggccaacaagtcgtggacaacatcctggacatggtaaatc

SEQ ID NO: 447809 - DNA, 203 bp, Triticum aestivum
ggggtaaactttgaacgggataggtcatcacagtgtatgtgtgagtgaaatggaattgccggatttcttgtcgacgcgagtgtcttcgctcaaatggttgttgcaatcatgatatacactagacgggaaggtatgaatcttacaggaatcaggtagatatagtttcattcaaactattgatctctcaagcatcagttaaagca

SEQ ID NO: 447810 - DNA, 415 bp, Triticum aestivum
ggggtcgtacaatggcaagttcagcttcgactgcttcacccacagaaaggcagtgctgatccgcgggttcggtggcgaggcgaacgcaaggtacccaccctacacggcagagaaacagaggatcttgaggggcctcatcaagggcagcttctttgcgctgatccttgcgctcctggggttcccaagggagaagcgttagctgagttgagttccctcccttctccagtacagcatagcaggattgttcatgttcatgagggtgatgtgcaggactggtgatgtggtgcacttctgcactgtgaagcgccagtgcgcgagtgtgttcaacaggtgtaaaatatgggactatcatcggatttctggatgtaatttaattttacataaataaacctggtttgctacttaaaaaagaaaa

SEQ ID NO: 447811 - DNA, 351 bp, Triticum aestivum
gggaaagggcactcggcggttcaagcggatctacaacgggtacgcattattgtctaacacggggaagagggccatgtacgattcctggctcgctgcttgcctatacgactacaaccaggatttctcgaacctcatgcatgagatgctgtcgatgatatataccgtgacgaacgattcgtcggacacgcttcaggacctggaaacaatgctgcatgagataatcaaaggcaaggggcgtagctgatccactgcttctgctagttctaccgcaaggagtcgtagaagttgcagtggtccagtgaatcgaaatgtaccagtatttgtcatgtcgcaccgtatccggaaccgtca

SEQ ID NO: 447812 - DNA, 435 bp, Triticum aestivum
tacaattgcaataatgtcatgacccgcatcatctcacttacacgcaatcgcaaaatggagttgactttcatggcgctgcactcggctatacaggccaatgtgtatgtcaaccttgatttcatatcttccaatgccactaggacgggcaccatctactatgtttatggtgaaatcaccgcacaccatcaactctataacggtcagagtgttttgctcttttctcgcggagaagagaacaaagcagaggtcattgatggtgaacttccactgttacggaagtgtgcagttgttcctatttacttggagccgctcctgatactcaagttcgacctgcatgttccaattaattgtgatcacgatgatggtggttgtaccatcgccttccgagactatgttacattttaccgttgacagtatgaagaataaataatctgc

SEQ ID NO: 447813 - DNA, 427 bp, Triticum aestivum
gggtcgacgggtcggtgtacgtcaggatacatacttgatccttttctgcttcggggtggtgagaaaaatcgtcttgcgagcacagtcgatgtttccttcaaacttggtcaaccaatccatgcctagaattacatccaaactctgggattccaatactatgaggtctgcggaaaaatcatggtttccgatgctgagggtcgaatgacagcctaagcctgccgtcatccctccccctgggggaaataactgaaaccgggttctaagggttctagtgggcaacccgtacttttccacaactacccttgatatgaatgaatgcgttgcaccggaatcaaagagtaccaatactggatgtgaatttaataaaaacttaccaaccacagtgtctggctgatcatagacgtcttccacgtcaaggtgattcacc

SEQ ID NO: 447814 - DNA, 197 bp, Triticum aestivum
gggccgacgggtagctcaagacgctcacccagttcgtcggcagtcaagtcgaggcaaggatgaagatctacgccgtctcaacgaggcattatttcgccttcggtgccctagtctctgaggaacactcctacgtcatcaatgcgttgcctaaactccgttgggttcgtccagaatcccatgtgaatgtcaaattgcca

SEQ ID NO: 447815 - DNA, 225 bp, Triticum aestivum
ccgggccgacgggaagctgaaacaagagtcgtatggcaggcccatcaagctgaacggcacttgtctacttcaccggatatcagatccccaagaatactactgtgcatcttttcacgggtggtacttacctggcctcagcaactgacgatgcacatagtcatggtaataagcactgtaccatttcacatcatgagtgctccaactgtgcaaggagtccaaatacat

SEQ ID NO: 447816 - DNA, 291 bp, Triticum aestivum
gggcacattcacgactaacggttctaggatagagactgcctcaagtgccatctagttgcaagtgtcacactatgctcgcgaatgagaattcgatctatggagtgctccacagcaggtcgcaattttaggatctcttcatgaggagaggtaccttccacaacatcttcgaaggcactctcaccgctttcaagaccggcaggactattgcaaatgataatgctattgatttctcgagcccatttgctgacgtcattgagcaattttttggatgccacatgacaatcaaaccaa

SEQ ID NO: 447817 - DNA, 405 bp, Triticum aestivum
  unsure (1)..(405): unsure at all n locations
gggatagattatacctgcctcaaggagctttagtatctcctttcttaccacttctttcattttagggttcagccatcgtcgatgatcacaaactagtttagcatcttcttccaaattaattttatgttgacataaagtgggactaatgcccttaagatcatcaagagtatacccaataacaacacggtgcttcttcacagttttcaataatctctcttcctcatgctctaaaaggttagcactaataataacatggtatatctttttctcatcaaaataagcatatttaagagtatcaggcaacggtttaagctcaaacacgggatcacccttgggtggangaggatcccctaaggtttcaacaggcaaattgtgtttcagaataggttcctgtttaaagaatac

SEQ ID NO: 447818 - DNA, 391 bp, Triticum aestivum
aggctttggtcgtctcttgtacatggatgtagtagttatgatccttatgaactcatggttcatcagtgtaaagttcaggatatgtatgtccctgttcttgtagatttatacatattgttgtatagaaagaaagcaagactcggaaacgtgaactaaaaaaaaaaaaaaaaaaaaaaaaaaaaaaaaaaaaaaaaaaaaaaaaaaaaaaaaaaaaaaaaaaaaaaaaaaagaataaaagaagaagaaaacaataaagaaacatcaaaagcacttcgaataatgtcaacgaaattcgaattaattgaccgtcatttaaaagattagctaatgggaaaacgctgccgttacgcgaaacaacgagcggtgcaacaaagcctccttttacaagaag

SEQ ID NO: 447819 - DNA, 425 bp, Triticum aestivum
gtcggcgtcatggaggcagctctgcctcggcttcagctgctaagtccttgagggtgttgcggttgcggttgcattggacgacgacgtcagggtaccggctccggcgtgatggaggagggcggcggtggattgggcgcgacggcgatggagacaccgacgaggacgacgagctgccgtcgttcgacacccacatgaccatcctcggccactgagaggagccaagcctgacttctagcgcatggttgtagtatcttcttgcatttgcgttgcttgtgtagttgtgttgctgcccagaagaaacagtctggcaaaacataaaagaagaagaagaaagaaacagaatcaggaaagagatgagagagcgagcgtgtcacgatgatccccgctagctgatgacgaaatttgccggttgctcttgtttcttg

SEQ ID NO: 447820 - DNA, 302 bp, Triticum aestivum
ggggtaccctaacgtgactcaaagaacctgtaccatagtggacgccgatcgaagtaactagatcttgcacctatcctgccatgcggtctcggcatccacgattttatatgtgtgtccccagtgaatttgcgtcaataggggaatatcttgctgtctgcacttcaggacagatcttgctaacgcccgctacatcgatgacattttcaaaggtcgactattgctggctgagccattcaaggtccgacttcgggagtcggacatggcaataatgttcctcatgctacacacatccacgctagacg

SEQ ID NO: 447821 - DNA, 438 bp, Triticum aestivum
gggggtgttattctagtatgaattctagggcagtttgtgacacttataggaatagcccaacggattgactggaaagaacactactaggaaaagggctatagatggaattgacactaatggcgcaccagacatgtggtgcaccattactatatactaatggcgcaccatgtgttggtgctccattagtgtgcaaatactaatggcgcaccacgtccacggtgcgccattagtaattttttttaattttttcaaaattactaatggcgcaccgtggacgtggtgcgccattagtatttgcacactaatggagcaccaacacatggtgcgccattagtatatagtaatggtgcaccacatgtctggtgcgccattagtgtcaattccatctatagcccttttcctagtagtgttctttccagtcaatccgttgggctattc

SEQ ID NO: 447822 - DNA, 298 bp, Triticum aestivum
cccgggccgacggggaacccaacatgactctactcgagctaactgtcactcctgccttgttcacatctatctccttgcctttcccctcctagtcatcccgtgagatggacagacccagcgcactccgacaatggctgcccacgcgactgccaaccacatttcgatcgtactctccatctaccatccgcccctctgcttccatttgcacttctcctgggggatcgatttccaggtctgcttccagcgcaccatcgtctggtaactcttcggcattatctacacgctctgggtcatcacc

SEQ ID NO: 447823 - DNA, 74 bp, Triticum aestivum
gggaaactcaaattgtagacgcatggttctacaaataggacgcatggaggtccggatccccaggttcaacaaag

SEQ ID NO: 447824 - DNA, 474 bp, Triticum aestivum
  unsure (1)..(474): unsure at all n locations
ttannnttccngcggcccaggtaaaggtcaaaganttcccggggctctagaggatccaacttacgtacgcgtgcatgcgacgtcatagctcttctatagtgtcacctaaattcaattcctggccgtcgttttacaacgtcgtgactgggaaaaccctggcgttacccaacttaatcgcttgcagcacatccccctttcgccagctggcgtaatagcgaagaggcccgcaccgatcgccttcccaacagttgcgcagcctgaatggcgaatgggacgcgccctgtagcggcgcattagcgcggcgggtgtggtggttacgcgcagcgtgaccgctacacttgccagcgccctagccccgctcctttcgctttcttcccttcctttctcgccacgttcgccggctttccccgtcagctctaaatcgggggctccctttaggggttccgatttagtgctttacggcacctcgaccca

SEQ ID NO: 447825 - DNA, 340 bp, Triticum aestivum
gggatcattacccggcagccgatcgataagatccaggctcacgtgctcctgcattggacctcatatctcgtctatactgtatgctagattcatgtcactgtcattactttgagaagttactaacggtaaataccctgtagattataaatgtaacatctttgcaccacattccgctttcgtcaacgagtatacgagcgtgaatgcgagcacgggtctcacttgacaagagttgcgatccctctataggtaatcctacgctcctagtagccgtccactgttagctgatggtgtagcgataaggcacgtcgtgaccacctaagatacatgtgcgctagcgcct

SEQ ID NO: 447826 - DNA, 405 bp, Triticum aestivum
ggggacgtgtacgatgaccagccgatcgagtgcggcctggacagcctctacgatggctcggatgagcagctgctcgagcgcgcgatgatggaggcgagcgtccgctcggcgggagccgctgagggcggcgaggatgccggggtggacgtgaaggcggacgagttcatcgcaaagttctacgcgcagatgaagctgcaacggcaaatctcgtggctgcaatacaacgagatgatggaaaggagcgtctgctagaacaacagtgtcgtttgctcaatcttgagttttgattcatcgatgtcaattgcaagttagatacacataatgcataaaccgtagttgtcacatgtatatatgtgcatatatttctattgatttctcaatttctgaactttgtatgcaaagttg

SEQ ID NO: 447827 - DNA, 315 bp, Triticum aestivum
gggtctggtattatgaaacgcttcatcattggcatattggatgcatgatcatagacttgacatcgtatttgtcgcagagccatcggttcatagtcatcatacatgtcacgaatgcatcattgcacatcccggtacagcgcgggacgcattcacatagcagcacatgttgttctaactagtgcagttgtattcttgagttgtaaataaattaaagtgtggatgtcatcaatgatacagcattgtctcacgtgaagacagaatgatgaatactatgatttccccacaagtctggattcaactcccgttgatttacaa

SEQ ID NO: 447828 - DNA, 339 bp, Triticum aestivum
gggtgactatctgttgatcaacgagctagtcaactagaggcttactagggacacattgtggtctatgtattcacacatgtattacgatttccggataacacaattatagcatgaacaatagacaattatcatgaacaaagaaatataataataaccatttattattgcctctagggcatatttccaacatcttcatcccgcgccttccacagattgataaactttaggtcatccacttaagggaaatttgttactgtgctacaaaacgaggctcaacacgagtctaaaaaataagttgtatagtagacatcaagttctcttttggcgtcgtaaccgggg

SEQ ID NO: 447829 - DNA, 321 bp, Triticum aestivum
gggagaaggtcacatatgtgtaccaggaaaaagtttgcggtttgaaggaggactgaagttcagagtgatgtggctgtgaaggttcagagatgtttttttagtatattcagacatgtttttcctctcttattcttcattttttaacttcttcataattgattagataacttttaaggcaacatgttgttgtctgaaaagcttagggactcttgtgtgtacgtgaaacactttgatcaatagactctttagtttagaaaatgatgaaaaaatatttaaaaaaattccttcagcgaaaatagggagaatataattttcatgggc

SEQ ID NO: 447830 - DNA, 72 bp, Triticum aestivum
gggaaaaagtaacataattctcccagttctcactttgcggctgaaaggaggcaggacattcaggttcaaatg

SEQ ID NO: 447831 - DNA, 416 bp, Triticum aestivum
gggacaaagaaatattacactcacagttctaaatatacgtctcaaagaagtcacggacacccgggttctaaaaagcctgtctcatcatataaggatgatcacaagcacacttttcgtctacaagtttaattcactactgagtcactcagcaatgtaggacccacttgcatgacaaacagagaaagaaaacaatcagtttaggagggacatgaatcttagatctactcgattctagaaacgatggcaccgcaacattagaagcagcaaatggaccaacacaatcgactacaccgtgaggagattagcaacaccaatgctggatctgtgatgcatcgaggaaagatgggcagggaatgaacgaaaaaggtaaccaaaaggaagactcactgtgctttgttctagaaccttcctactgg

SEQ ID NO: 447832 - DNA, 290 bp, Triticum aestivum
gggctgcatagaggggggaagagttggtgataaaggcgtgaaattgttggtgaagattgcggtgatgatgatggcccccggcggtgttccggcgccaccggaagcaaagaggagagagcccccttcttcttcgtcttccctgacctcctccctagatgggagaaaggtttcccctatgattcttggctcccaatggttgggaagggcgagagcccctccgagattggatctaactctctgtctctctctgtccctctccgtttctgcttccctgattctgcccttcaacg

SEQ ID NO: 447833 - DNA, 413 bp, Triticum aestivum
  unsure (1)..(413): unsure at all n locations
gggggcaagggtggtatttctcctcaggaatttgattgatatcctggaacagctcagaatgttggtgatgatcacgacacatttgtcgagagatttcatgcagatgtaatcgatcggcaatgacatcaagtcaaaggaatgatggagcgaaaggttattggaatcatgggtacaacacaaactcgaaatcaagcttgctgttcaaggcgaaaagtgataagacaaggaagatcgatgtaagcttaacgcattgttggaagttgtgctccgggaagaaggaccacgtagcatagttaaaatttagcatggtaatgatatagccgatcaggctangaatgactataaggattattaaactcgtaagcaacaaacattacctagagttatagaatcggagtgtggaatcgattcac

SEQ ID NO: 447834 - DNA, 109 bp, Triticum aestivum
tcccgggtcgacggggacgacgacagtgtctcggtggtgtacggtgattgtgtccgcgaaaagctagaagcctccaacaatagcttcacaacggtcaacatgatcttcg

SEQ ID NO: 447835 - DNA, 452 bp, Triticum aestivum
gtcaggaggtcccgggtcgacgggcccttagccgacgtctcggtgcccgaaggtggttgtgttggtggaaacaaggcaatcagatatacgagctttataactttcacttagtcataggagcttaaagttgggaggcgagcaagtagccccctgcttagtgtttggcgacagccaaggtcaagccgtaaacacttcggccaatgttatgaacggcccgtcatttaatatagccatcggatcactgaccggtttatgctttattatggcagtcagttttcggctttctccaccgaggtgcttaaccatgcgagctggaagcacaatcgcagtggttatccttttgcacacctaaccgaacaaagcggaatgtaggaggcaagcacaggagccgggcaacccaactatcgaccgaagacacaatttgaaaccgatgcatatttagcaatatccaa

SEQ ID NO: 447836 - DNA, 427 bp, Triticum aestivum
gggtcgacggcagtcgctggtctgactgaactgctgggactatattaagtcgccggtctgcctgagccgcctctgtcgcgattgtccgtcgtccgaaagaatcaagtcatatctctctaaatatattttaataacacatgttgtttttaaccaagaacaaattactttggccaaaatatttttgtaaacaggataattattcactacaaatagggtttatgccacgggtgtggaacacgggctgatagtgttccgcccagcgatagtctgtgacatattacccgatgaatggacgcgcacaagccgccgccctagtggcccggtctacatcgacttgcggggatcgcgtttgttcgcttttcaatggacgtgcgcaagtcgccgcccatgtggcttgatctacatcaactagtccggaccaagcctg

SEQ ID NO: 447837 - DNA, 482 bp, Triticum aestivum
  unsure (1)..(482): unsure at all n locations
ttacgttgccanggcccggtcaagaatacccgggcaccgatcgcccttcccaacagttggcagcctgaatggcgaatgggacgcgccctgtagcggcgcattaagcgcggcgggtgtgtggttacgcgcagcgtgaccgctacacttgccagcgccctagcgcccgctcctttcgcttcttcccttcctttctcgccacgttcgccggctttccccgtcaagctctaaatcgggggtccctttagggttccgatttagtgctttacggcacctcgaccccaaaaaacttgattaggtgatggttcacgtagtgggccatcgccctgatanacggtttttcgccctttgacgttgagtccacgttcttaatagtggactcttgttncaaacngggaacaacactnaaaccctattcggtcnaatcctttgaattataagggaatttgcccaatttcgggccaantggttaaaaatgaagctga

SEQ ID NO: 447838 - DNA, 98 bp, Triticum aestivum
gggccgacgggcacattaatcacaagtcactctaaaagatttatccgtattgtcgcttcccagccactgtaggtcacttcaagagagtatgccaaatt

SEQ ID NO: 447839 - DNA, 110 bp, Triticum aestivum
agtcccggcccgacggggatcacaagaatgcctcggatcacaccaataaggaccgcgatcatactaaggaccgcgagcacaaggatggcatgattaagcacatcatgacc

SEQ ID NO: 447840 - DNA, 485 bp, Triticum aestivum
  unsure (1)..(485): unsure at all n locations
ttcanntggcanggccnnntcaaggtcaaagagtcccgggtcgacgagctcactantcgcggccgctctagaggatccaagcttacgtacgcgtgcatgcgacgtcatagctcttctaagtgtcacctaaattcaattcactggccgtcgttttacaacgtcgtgactgggaaaacctggcgttacccaacttaatcgccttgcagcacatccccctttcgccagctggcgtaatacgaagaggcgcgcaccgatngcccttcccaacagttgcgcagcctgaatggcgaatgggcgcgccctgtagcggcgcattaagcgcggcgggtgtggtggttacgcgcagcgtgaccgtacacttgccagcgccctagcgcccgctcctttcggtttcttcccttcctttctcgccagttcgcccggctttcccgtcaagctctaaatccgggggctccctttaagggttccgantagtgctttacggc

SEQ ID NO: 447841 - DNA, 431 bp, Triticum aestivum
ggggctaacaccatggaatgttcggtgagtcagtctacagaatatgcctgtgcaaattgagctataacatgccatccatcttacaacataattaaggatatgtgagtacctatttatactactctatgagtatctccaagagatgcacacaaccgtcgcgatgtgacgtaccagcaagtcaaactcaacataagctaaagtgtggaatactgatgatgcaacacctcctactgaagaatgtaaagcctcaatgataacgacatacataaagcaaccaagtaaccctcttgtgaattgtatagccagagccccggctaaacctgcattcaggaataatgttattattcaaacaagcaagattgaagcaagaatatcctgaactatcactaacagaattctatcatcattaaggagtatacatttcaaccttt

SEQ ID NO: 447842 - DNA, 430 bp, Triticum aestivum
gggaacaaggggcggtgctacgacttctggctggacttcagctcgtgcatgagccgctgccgccagccctccgattgcggcctcctccgcgaggactacctcgagtgcctccaccactccaaggagttccagcgcaggaacaggatctacaaggaggagcaacgtcagataagagctgctgctcgcaaggccaaggacgaagccgaaggagctcctgctgttgcagctcaccactagcatccgtttttatttgctgcaagtgcttccatgttcggctatgagcaaggcaataatttcctaaacattctaccctcccactccatgacttgttccaaaatcatgagttcgataaacaaccttggtcaacaagtttgtgcatgtttgagatattaagcgataataaacgcttgattcaaccatgaaacatgat

SEQ ID NO: 447843 - DNA, 364 bp, Triticum aestivum
ccgggtcgacggggattgtgaaagttcggacactgtagactactgaggtgttcaaacacagcgaaggctaaatcgactactaacggcacagcaacatcacgatgacagctatagctattgacacagctcaggacgctctcgtgcatcatcgcacaatgtaggcgaaatcgatgaacgcttgggagaagtgtggcaaacagatacagtcgcaaggtatggtgcatgtgatatcatatctctgcaatgctttacatgtctcacagatcatgggacgtcgaataataacctcgctgcagtgaacagcacggtgcttgtaacattaacgtcaatcaatcatgttggcattcacgcatcgccgttggta

SEQ ID NO: 447844 - DNA, 420 bp, Triticum aestivum
gggtatccaccgtggcgaacttgtagtcagtgctgttgacaaaccagttgaaacggtcgcaaggctctgtggccatgcagtactggtagatgaggacatgatggcgcacgcacaattgagcgacggcaaccttctaatctatgccgggacgaccggcggtgtactgaaggtcgatgccgaccaccttgtacttgtctccagcaagcaactgctcaatgcggttgatgtagtcatccaccatggccgagtcgatggtgtatagaaaaaatgaaaatgtttttgaaaacaaaggataaaataaaaacgaaaaaggataaataaaaggaaagaaatagaagcagaaacagaaaaaagcacaacaaaaaagaaaaaggaaaacggagaaaaccagaaaaccggcaaaaggaaaaaaattaaaaa

SEQ ID NO: 447845 - DNA, 354 bp, Triticum aestivum
gggtcgacggggcggggacggcgtcggtggtgaggtccatgaacgacaagttcgacctggtcatcgtcggacggagaggggaggacagggacgtcgaggggtcggcgctcacaagcggcctctcggagtggaacgagtgcccggagctcggcgtgctcggtgacatgctcgccaccgcggagttcgcgtccaaagtgtccatcctcgtcatccagcagcaggccgggattaccactggcggcgatgccgactatcaataatagggactggttcgactttggttcatcgttacattgtttctttctcgttgaatatatgtatgtatgttgtaatgaaagcaaggtaaatttgttc

SEQ ID NO: 447846 - DNA, 356 bp, Triticum aestivum
ggggcgctagacttacggcacatttacggacggagacttggctcctgaatgatcgttcttttttctctctctacccgcgccaccttgctgcacaggagggattgctaacacataatactgcgctgcacctctgaaggaaaattagtagccaccatgaacgcggatcatgcccggtcggtacatttctttgatgcatcttgtttgttcaccttgctgtatagaaagatgagagatcagtgatcggaaccgatgcattctgagttagagattatctgttcttccgtacagggttcaaatatcagtttccgtaccaccatggcgattactatctgacatggagtcagcttttcgcaaga

SEQ ID NO: 447847 - DNA, 494 bp, Triticum aestivum
  unsure (1)..(494): unsure at all n locations
aanntttacgctgccangggccnngtaaaggtcaggaattcccggggtggcacttttcgggaaatgtgcgcggaacccctatttgtttatttttctaaatacattcaaatatgtatccctcatgagacaataaccctgataaatgcttcaataatattgaaaaaggaagagtatgagattcaacatttccgtgtcgcccttattcccttttttgcggcattttgccttcctgttttgctcacccagaaacgctggtgaaagtaaaagatgctgaagatcagttgggtgcacgagtggttacatcgaactggatctcaacagcggtaagatccttgagagttttcgccccgaagacgttttccaatgatgagcacttttaaagttctgctatgtggcgcggtagtatcccgtatgacgccgggcaagaacaactcggtccgccgcatacactattcctcagaatgacttgggtagtactcaccantcacagaaaa

SEQ ID NO: 447848 - DNA, 237 bp, Triticum aestivum
ccgggccgacggggaacgtgaaagtgtgcgccggtacgctatgagctgttcatacagagtgaaggttcatttgtatcttgacagatgacccaacttctgctgttcattgcagctgttttgaactatgaagaggatctcgatcctacactcgtgtgtcagttcaattactattttagatgcatgttgtcgctgtgttgttgcactgccaggtagacgtgcatgcgtcatcaaagctca

SEQ ID NO: 447849 - DNA, 353 bp, Triticum aestivum
gggcacaggaaaaaggtggaacactatgtgatctctgtttactcaccattagtcacaagaacgtcacacacctgttgcgtaacacgataatttatcactacacattcttagacggatcctcctacgcgcatgcactcagtgttcactgaaatctatctctatgaactattgctcgaactgtggtcaagaaatatgttgaactcgctccatcttcatcagacatctgtacactatacgatcctgtctcgatagttgcagtcatcatgccacgtatatcctcagtctcatgacttctctactgcctgtactcatatactgtcatcatcatatctcaatttctctctctccgttcg

SEQ ID NO: 447850 - DNA, 342 bp, Triticum aestivum
gggcatgatatcactgtggcggactatgagatcgttgctcatgcactagaggatacggtcacggagcacaccatccgcgtaacacgctccacactaaagaggcgtgctaccacagatgcgggagcgtgaaaccccactgcaaaccaatgttttactgcctcaagtaatcgtcgctctcacgtgctgagtcattctcacattgtcccgtagtcatatgtcgagtgcattcgttagtaacccgtatcaatagttgaactcctcattcatcgcagcgtcctctctaaaggattcaatcctacatgcacgtacacacgtcgtcctagctatacgaaattctctctc

SEQ ID NO: 447851 - DNA, 494 bp, Triticum aestivum
  unsure (1)..(494): unsure at all n locations
aacntttacgctggccggnnccgggtcaaagaattcccggggctctagaggatccaagctacgtacgcgtgcatgcgacgtcatagctcttctatagtgtcacctaaattcaattcacgggccgtcgttttacaacgtcgtgactgggaaaaccctggcgttacccaacttaatcgcttgcagcacatccccctttcgccagctggcgtaatagcgaagaggcccgcaccgatcgccttcccaacagttgcgcagcctgaatggcgaatgggacgcgccctgtagcggcgcattagcgcggcgggtgtggtggttacgcgcagcgtgaccgctacacttgccagcgccctagcgccgctcctttcgctttcttcccttcctttctcgccacgttcgccggcttttccccgtcagctctaaatcgggggctccctttaaggttccganttaatgcnttacgggaacctcganccaaaaaacttgattagggtgag

SEQ ID NO: 447852 - DNA, 487 bp, Triticum aestivum
  unsure (1)..(487): unsure at all n locations
ttaacttgccgcggccaggtaaaggtcaaagaattcccgggtcgacgagctcactantcgcggccgctctagaggatccaagcttacgtacgcgtgcatgcgacgtcatagctcttcttagtgtcacctaaattcaattcactggccgtcgttttacaacgtcgtgactgggaaaacctggcgttacccaacttaatcgccttgcagcacatccccctttcgccagctggcgtnatgcgaagaggcccgcanngatcgcccttcncaacagttgcgcagcctgaatggcgaatggacgcgccctgtagcggcgcattaagcgcggcgggtgtggtggttacgcgcancgtgaacgctacacttgccagcgccctancgccccgctcctttcgctttcgtcccttcctttctcgcacgttcgccgggctttccccgtcaagctctaaatcggggggctccctttaagggttccattaatgctttaagg

SEQ ID NO: 447853 - DNA, 494 bp, Triticum aestivum
  unsure (1)..(494): unsure at all n locations
ttaanntgcccgcggccaggtaanggtcangaattcccgggttcgccctttgacgttgggtccacgttcttaatagtggactcttgttccaaactggaacaacactcaaccctatctcgtctattcttttgatttataagggattttgccgatttcggcctattggttaaaaaatgactgatttaacaaaaatttaacgcgaattttaacaaaatattaacgcttacaatttaggtgcacttttcggggaaatgtgcgcggaaccccnatttgtttatttttctaaatacattcaatatgtatccgctcatgagacaataaccctgataaatgcttcaataatattgaaaaaggagagtatgagtattcaacatttccgtgtcgcccttattcccttttttgcggcattttgcttccnggtttttgctcaccaanaacgctgggtgaaaagtaaaaaaagcctgnaagatnattnggttgcacgaattgggttc

SEQ ID NO: 447854 - DNA, 450 bp, Triticum aestivum
tcaagaagtcccgggtcgacagtcaattaaatgtgtttgtccaacggtcccagaggataggcttgtcaactgtagacctttccacctcctgtgtgccactgtggcaacccctttttcctataaaaggaggcccgaggtgaccaggagggggattcggctcttttgggcaaagttgcaccccgtagctagctcaagaacacaagaacactcgaatacatccaccaaagcaggactacggtattacgcatctttgtggcccgaacctgggtaaacgatatgtgtgcttcctgtagacccgctcttcgcacaacctcgcacccgccaaccataaaagggatcccagtgaccccataggtgtcgtttccacttacttctctggcgcgccaggtagggcgcgcaattgtgagaatctggtctggtcggggcagcgacttcattatggctgtcatt

SEQ ID NO: 447855 - DNA, 190 bp, Triticum aestivum
gcgatcatcaacaccaacaccaacgttgccggcagcatcatacccaagcgatgacgtcatcgtcaccgcaaacatttgaccccacatcagtataaggtacatttgactacgggagtcgatcgaacactgacactaactacaggttggtcaaaggttcaaagaaattctcctttaaattaggccaatgcta

SEQ ID NO: 447856 - DNA, 80 bp, Triticum aestivum
taagcgacggagttagaagttgtaaatatgcattgttgtaccgcgacctgaatgaaatagacgaaataatgctcttgttc

SEQ ID NO: 447857 - DNA, 474 bp, Triticum aestivum
  unsure (1)..(474): unsure at all n locations
ttaactttgccgccgccaggtaanggtcaggaattcccgggtcgacgggcncactagtcgnngncgcnctataggatccangcttacgtacgcgtgcntgcganntcanagctcttcnnantgtcacctganttcaattcactggncgtcgttttacnnagtcgtgactgggaaaacctggngttacccaacttaatcgccntgcagcanancccnctttcgccagctggcgtaattcnaataggcccgcaccgatcgnccntctcaacanttgcgcagcctgaatggctantggacncgccntgtatcggagcattaagcgcggcgggtgtggtggttacncgcagcgtgaccnnacacttgccancgcnctntcncncgcncctttcgctttntcccntcatttctccncccgttcncccggcatnccccgtcaagctctaaagtcagggggctcnctttagggttccgatt

SEQ ID NO: 447858 - DNA, 310 bp, Triticum aestivum
ccgggtcgacggggatgaggacggtgacgagggctatgagtactatagccagcctcctgttgctttcccaacgcatgccgctgcaatcgtatgatgtgcccgagtggctttatctgttatctgtctgtttgaacatttgctttgtggtgtttgttttacaacctgttgtgttgtaagaaccttgtacgtttgaacctgttatgcaccttgggtaagaagcatgctatctggttatctaaaaacagaccgaaatcagcaagttgcactaaccatgcatcaaaacaaacagccacaacaatgcaagtaatac

SEQ ID NO: 447859 - DNA, 483 bp, Triticum aestivum
  unsure (1)..(483): unsure at all n locations
aactttacctgccagtcccggtcaagaattcccgggtcgacgggtacggctgcgagaagcgtcagagtcgcggggaaggcggcgcgggcgagccaaaaaaaaanagaaaaaaaaaaaagcggccgctctagaggatccaagcttacgtacgcgtgcatgcgacgtcatagctcttcttagtgtcacctaaattcaattcactggccgtcgttttacaacgtcgtgactgggaaaacctggggttacccaacttaatcgccttgcagcacatccccctttcgccagctggcgtaatgcgaagaggcccgcaccgatcgcccttcccaacagttgcgcagcctgaatggcnaatggacgcgccctgtagcggcgcattaagcgcggcgggtgtggtgggtacgcgcaacgtgaccctacacttgccaagcgccctaacgcccgctcctttcgctttcttcccttcctttctcgcagttcgccggt

SEQ ID NO: 447860 - DNA, 445 bp, Triticum aestivum
gggaatgtatcgcgctgaggcagacgaggaccatcaaacttgttatgataattggacgggctagaatcagatgctttgcccgaagagaaatcttccagagcttgaatggtgtctcgaactggtgggataaagctcttgtgtgctaccttggccagataggtagtcttcagagaatgatcaatgacttgttggatccaaggagcaaagaatttcaggcacattgggtgatgcgcagaatccttcagaatgcggaggaataagtcttcgacatcgaagacaaatcgatgagaaatagcatatattgtgttccgaagaacatccgagattgatccatcagtattcataccgtccagaggacaaatagtatatgtgagcagatgataaatggtttgattctcgaaggtcaaatgcttaagcatcggagggccatcataatccttaatct

SEQ ID NO: 447861 - DNA, 338 bp, Triticum aestivum
gggataagggtctaaggtacctatggattatgacgtcacgtcgtttttgcatgctatcatgtgactccgggatgcctgttttaagatttcgcttgtgttgacagatatgactatctactgcctgtagcctacctgggataccatcatatgttgctgaatatggtactacttttatcctgcttaagttctgtattttgccctagttgaaaaacaagcatagtaatgaatcttcatttttaaaacattgtcccaggtgaacaagacgatgatagcgactatcattctcccagagactccatatatgactcttagtgatcacataaagaggccatacaaga

SEQ ID NO: 447862 - DNA, 293 bp, Triticum aestivum
gggaaaccttcgacagcacgatcacctaccggctctcaccataacacgacggtcacttggatccttctccacagaggtgcttaatcatgctcgtccattgcagaggcggagggcatcgcacagggctaacttaatgtctgttatggtatctaaggtgccacctgatgcgaacatggcagaccaaggtggtgaaacaggacatgattcggagccgatgcatatagtactatctattcggtgtgacccaactgtgacagtgttccgacttaacagaccatactttgtggtaccta

SEQ ID NO: 447863 - DNA, 408 bp, Triticum aestivum
tccaagataaagctggtgaattgccgaaattagtagaggatcttcgccagacgtcgattagcacagggcctcgaggtgcctttaggatggcgcaagggatccaagctctccttggggttggcggggagtggctaaatgacttctcgaagacagctaacacgtcagaaggaattccagctcagatgcgtcttggtttgctttcccctctttacctcagaaggctttttgaacgcatgggtgcaacttatatcaagctaggtcagttcatagcgtctgcaccaacttcctttcctgcagaatatgttgaagaattccagaactgttttgaccgagcaccacctgttccttatagcgagatcgagtcgatattgcgtgaggagttgcagcggccattggatagtgtctatg

SEQ ID NO: 447864 - DNA, 337 bp, Triticum aestivum
ttatcatctaagggttgggattgcctctgtagcctctcggccctcagataaccatgtatggtatatgtggatgatatggccaatggcatggctatcaatggtactagcatgggtttatggatcatctgcgtttgtcgtcgaaagtctcaagctgaagaagatcatgatgcaaacatggctgataccaagatacaacttccagtacagcctgattagggagagggaatccatcaatacgttaattgagcaggcaatatcagatgcggatcaaagaggggtcaaagtgctcagtcttggacttttcagtcaggaaagacgactcaatggaagtggtgaa

SEQ ID NO: 447865 - DNA, 409 bp, Triticum aestivum
tgccggttctcggggtgccatcaggggaccaaagcagggggttctgctccgtccggcgcttcgcaggagatagcgctgccgtcgaggagccggagaatggacttgccgcaggcgatctgcaggtatctgtgcactcgtatgttgtggtacatacagtaggacggccgcttctagacatgtgtgttctacagaattgtctagtagtggtacgtagtaccatgaatatttaggatgctctggttttgaagattacattatattttccgcaaaaaaaaattacattatatctatatatatatgcaacagggaaggtaagcagataacaaccattcaggatgctgcgcctacgatcatgtgatctttctccttgattaaagaaaatttagtggatatcatcgtgattctcact

SEQ ID NO: 447866 - DNA, 357 bp, Triticum aestivum
atggcgacggtcagaagagagaacctgaggcgcctcttcatgtacatagataagttgcccacggtgatccccgaatctgttttcgaggtatacgattcccacgtaaagtgaccctgtgctcggctcggcgctgcgccaattgttcatcagttgggtactgctagtgctgtagacattaccaattgttcgtcagtggggtgctgctagtgctgtaggcattgccggttgttcatctgtgtgctgctgctaatgttgtagacatttctggagccccgggcgctggctgcctcgagcttatgaacgctccgagcagttcgccggggaagctctgtatgtatgtgacgtactcctatatat

SEQ ID NO: 447867 - DNA, 387 bp, Triticum aestivum
  unsure (1)..(387): unsure at all n locations
tctctttngcccgccggtccganattaacgggtcgacagangacgacagaaaggtacggctgcgagaagacgacagaaggggggggccgcagtgaccaggcccgggcgactgtttaccaaaaaaaaaaaaaaaaaaaaaaaaaaaaaagcggccgctctagaggatccaagcttacgtacgcgtgcatgcgacgtcatagctcttctatagtgtcacctaaattcaattcactggccgtcgttttacaacgtcgtgactgggaaaaccctggcgttacccaacttaatcgccttgcagcacatccccctttcgccagctggcgtaatagcgaagangcccgcaccgatcgcccttcccaacagttgcgcagcctgaatggcgaatgg

SEQ ID NO: 447868 - DNA, 370 bp, Triticum aestivum
ggataattgtttgtcactcatagatgccttgataataattgttttattaccattaacggacacattaatagctagtgcacagaatacagattcctggtaccatcaatgctaatctgcccgcttaaacttgaaaggcaaatagctaattccaacagcatcagaggagaaggggcagctcaaactttaaattgcgaaggcgctaccggcgatgttctttgtcgagggcataccggcagtaacatcttcttcgatgccacattcattcttgccccttatgatcttgaagtacccgtcatcgccccagcctctgttccactgatttgcaagaagccagtaatcctcgccagcatcactaatttcccaaccaatc

SEQ ID NO: 447869 - DNA, 371 bp, Triticum aestivum
ccggctcgacagcttcccaagacaagccatcgacgttttcggtgcactgcgtgctcgggcgtacgacgactatgtgcgcaagtgggtgacctctaacggtatcgagaacattggcaagaagctggtgaactcgcgggacggaccagtgacctttgagcagccaaagatgacagtggagaagctgctagagtacaggcacatgctcgtcgatgagcaggacaatgtcaagcgtgtgcagcttgctgacacctacatgagccaggcagctctgggtgatgctaaccaggatgcgatgaagactggtaccatctacggtgaaagggcacatcatggtactttgcctgtaccggcaggatgcaccgatcggactg

SEQ ID NO: 447870 - DNA, 395 bp, Triticum aestivum
  unsure (1)..(395): unsure at all n locations
atccgagaaccctcaacaagatcctgtacatgaggccaccggcgaacattgtgtcccacaacgagctcatctcgatgtgggagaggaaagcgggcaggactttccagatcgtgcgcatcccggaggcgggtctcctcaagttgatcaaggaggcggctttccctctgaacatattgctgtccctcgcgctctccatcttcatcgggggcgtacaggccaactttgagattgaagcatcctttggcgtcgaggccaccgagctgtaccccgacctaaagtacaccactatcgacgagtatctcgagcaccttcactgacagcttttggctggctggaatggcaccatccacagtcggcatcaacaatcangatgatgaacaggtggatcctccaaa

SEQ ID NO: 447871 - DNA, 276 bp, Triticum aestivum
  unsure (1)..(276): unsure at all n locations
acanatacagaattcccggcncgactatttgggaaaaaggaggaaaatcactctgatctctgatttcggagaaataagtggctcacgaggaatggagagacagattctctatttgatctcgaagtcctcatataacacttcttccagtcggatcacttgttggaaaaacataatgctcacacatgttccacacgggcaaggaagcataatatcatgaaagccgtctgataatctttctataggttccccgaagagaatggaaaaatcacaannnnn

SEQ ID NO: 447872 - DNA, 452 bp, Triticum aestivum
  unsure (1)..(452): unsure at all n locations
ccggtccggatttacgggtcgacatgcaggaaggaacacttgaaatcgggattgagtacaggacagtttctggagttgctggtcctcttgtgattcttgacaaagtgaagggtcctaaataccaagaaatcgtcaacatacgattgggagatggcacaactaggcgtggtcaggtgcttgaagttgatggagagaaagctgtggttcaggtttttgagggaacttctggtattgacaacaaatatacaactgtgcaattcactggtgaggttctaaaaactccagtatcactggatatgcttggccgcattttcaatggttctgggaaacctatagataatggcccaccaattttaccagaggcgtacctggatatttccggaagttctatcaatcccagcgaacggacataccctgaaganatgattcagactggcatatctacaattgat

SEQ ID NO: 447873 - DNA, 421 bp, Triticum aestivum
tttcgacgtgataaggcggccggaaatcgactcgggagcaatgtagcctgtggctcctcgcacatgagatgtgttctggttggatccacctcggtttagtaactttgccaacccaaagtcagtgatcttaggctcaaagttttggtccaagagtatattctcgggtttcacatcgcaatggatgacccattctaggcactcatggtgaagataggccaaccctttcgcaacacctaatgcaatattgaaccgttgcttccagtccagcaagatgatgcttttatcaccgaacaaaatgctagcaagtgagccgttctcgacatattcacaaaccaacagcctgtgagatccttccgaacaaaacccccatattctcaccagattcatgtggtaaatcctagcaatcacactcagctcggct

SEQ ID NO: 447874 - DNA, 396 bp, Triticum aestivum
gttcatttccaaggagaagaaggcattgatgccggtgggctcacaagagagtggtatcagttactatcacgagtgatttttgacaagggtgcccttctattcacgactgttggaaatgacttgacatttcaaccaaaccctaactctgtgtatcagactgaacacctctcatatttcaaatttgttggacgagtggttggaaaagcgctctttgatgcccaacttttggatgtccatttcactagatctttctacaagcacatacttggtgccaaggttacttaccatgatattgaagccattgatcctgcttactacagaaaccttaagtggatgcttgagaatgacataagtgatgtcctggacttcacatttagcatggatgcagatgaagag

SEQ ID NO: 447875 - DNA, 412 bp, Triticum aestivum
aaactaatcaaatctatcaactgttggtacccaggatgcctgcattttgcaaatgtcagtggatcctgaagccagaaacaagcaagagctaacagctcatgttttatcacctcaacatgtataggagaatttggcagcaacaactgatggacagattgatgagacaatacgtcttaaaactatcagaacccgcagtccagtagaggctgcgccggttaacagtgcaagtcaaaaggttaatgaggcaccgaaaccaaatgatgaaatgacgattggagtggtgcaagagcacaggaagggtgtgaagacagagtcttgtcaaggagtaaaacaaggcatgggtgatgtagatgttgtcacggaggaatcatcaccagtgagcacgctaaaattgggaaatgcatgcagcgca

SEQ ID NO: 447876 - DNA, 453 bp, Triticum aestivum
agccctgcaaaataggtagaggtgaaaaagctggacaactgggcactctttgtaggggctgatgtgaggagcccgccgttttcttgcttgagcccagagaagtggggaggaacgagcaaccgcctgtactatgcccattactctcagccttggagcgtacatggctttggtgacgcggcagatgctgtgtgggatccttccaccgaccctgatcttgtgtacaagagaaactggtacggccagcttcaggccttctgggtgtatccaagcatgttctactctgatggccagtgatagtcgatgggcaactatggcttgctgcactaccagcttcttttggaaaaactatctcttccaacagagacttatgcagctgaagaaaagaagtgattttcatggtggcagtcgtactggagcttctgcagttagtttcatccttcagtttttagaaca

SEQ ID NO: 447877 - DNA, 357 bp, Triticum aestivum
gacacagataatgatggagaggattaactacgaggaattctgcgctatgatgagaggagggatgcagcagccaataaggctcaagtagtctttccttgtagaaatggtgtaccattagcaactgttcttggttccttttttttcgctgctgcacggatgagaagttctctttggcgttgttgagatgattgtgtatatcttgtggccttttgctcgtgcatgttgttcctcaagtgttttggacctactttctgtaagttggtttttgcaagtacatctaataaaagagtatttttgcacgtcaaaggtgcatatttaaaaaaaaaaaagaactaaaaaaaaaaaaagcggccgctc

SEQ ID NO: 447878 - DNA, 394 bp, Triticum aestivum
ccttcatggctgtaaggcctcttcccaacatgtttggctgagcattgggtgggaagttcataccctttctgtgtggattttattgaattccaggagcaacatatgaagtttcaggatttagttgtaactattaatgtgaacctggcccctcaatcctgtatggcggccactgtttttgcaaaatcagcatgtgatatgtttgttttcaagcttactcgatcactgcaaagatttctatttattggaattagggaacatacacatgttttctggctgaaacacagcctcctcaaatgatcatagcactgtctctacaggcttccatctgtattatggttatgttagtactaccaaactacgaataaaacagatgatctgctggtgaaaaacatgg

SEQ ID NO: 447879 - DNA, 388 bp, Triticum aestivum
gacaacttacaaggcttgaaggggagaagagcagctccaagaggtcgggcagcaaacatggcattctgctgcccacacagcaccacatccctgcgctccccatgcaccaccatcccaaactctggcttcaggcagaaccaagtcatcctcttcacgaccagaagcagcaggaggagtaacacgaggcatggggcaaggaccttccaggtctcatgcgcagttgagcagccaatagtgattggcctggcagcagactcgggatgtgggaaatccaccttcatgcgccggctcacaagcgtgtttggaggtgctgcagagccacccaagggcggcaacccagactccaacacgctcatcagcgacacgacgacggtcatatgccttgatg

SEQ ID NO: 447880 - DNA, 316 bp, Triticum aestivum
ctgatcggaaacctacatttattttgtgtacgtatctattttgtgtacgcacttaagtagccgttatcggtcaactgatatgttaccaccacatgcatggttccggtgatattcacgcagtgggggagagggagacaccatcgtcgggagaaaaacaactggacataaactgaagggagaaagcagtacataagaaaaagacaagttgacagaaaaggaaaggacaataatatattaacaagaaaaggaaaataatagcagaaaaggaaactaaaactagaaaagcacactcagactttgggtggaacagattaaa

SEQ ID NO: 447881 - DNA, 460 bp, Triticum aestivum
  unsure (1)..(460): unsure at all n locations
agcggaagcganaatgtcggcttgagtaacgaaaacattggtgagaatccaatgccccgaaaacccaaggtttcctccgcaaggttcgtccacggagggtgagtcagggcctaagatcaggccgaaaggcgtagtcgatggacaacaggtcaatattcctgtactaccccttgttggtacggagggacggaggaggctaggttagccgaaagatggttataggtttaaggacacaaggtgactctgctttttcagggtaagaaggggtagagaaaatgcctcgagccgaggtccgagtaccaagcgctgcagcgctgaagtatgagccccgtggactancgattgcttctccacgaggctcataccaggcgctacggcgctgaagtatgtaactgatgccatactcccaggaaaactcgaacgaccttcaacaaaagggtacctgttcccgaaaaccgac

SEQ ID NO: 447882 - DNA, 308 bp, Triticum aestivum
accggtacgatattccgggtgacggtggtctttaagctgtcgggactcaattggccaatcaccttctaggtgctgaccttctacgtgcgcttactggcagggactggagcaacgatctttctactatttcgtccacatcagagatgccttagcgtcgatgacggttaacatcatgtaggaattggcctctgtggcatccaccttcagatcctgcttatcatgttttcacgaaacagcatgacgaggacttcgccaccactctgccgcactacactttacaatgctgcggcattccggtaccagcagcc

SEQ ID NO: 447883 - DNA, 409 bp, Triticum aestivum
aagtgattgtggctgacgagaagaattgggataacatggtgatcgcgtgcgagtcgccggtgctggtggagttctgggcgccgtggtgcgggccgtgccggatgattgccccggtgatcgacgaactggcaaaggactacgtggggaagatcaagtgctgcaaggtgaacacggacgactgcccaaacatcgcatccacctacggcatccggagcatccccaccgtgctcatgttcaaggacggcgagaagaaggagagcgtcatcggcgccgtcccgaagacaaccctctgcaccataatcgacaagtacatcggcagctaattaatcattcttaattagcgattaatcgaggacgcacacacctttactgttctgttcgcgagacagcatatatgtatgtatatgat

SEQ ID NO: 447884 - DNA, 338 bp, Triticum aestivum
gtcggaataccgggtcgacgtcgacgtcatcgataaattgtgcgtctcgactaacatcactagtctcgcgcatgacacacatttgagcatgttcaagaacttgacgagcaaggtctgcgtttattgcaatgttgggagacacactcacaactcttccacggtttcccacaggcagctctagactctcggagtcgcatgtcacattggttgcattggtcacggcaagtatcgtcaggacacgcagcacggcgctaatttcacaagtttgagcgctcattacaatgacgattaggtcggtcccacacgcacatgtgtcgtctctatagtttctaggcact

SEQ ID NO: 447885 - DNA, 404 bp, Triticum aestivum
cgtacagcatcacctggaatcctaggaaatctcccggtagatatgtttcagcactaagcttcactggttgcgacttcgacatgtacgtgctagagcatggcacgaacaagacggtgggtcagtgcactgctacatgccctgtcaaagatatcacggatacggtggcttggcagtattgcaacggtacaggatgttgcttcaccaacgtcgatgccgagtttgctacaggcatcgagataaagtttgtccgccacaagattggacagctgaagttccaagcgaacagcaaccgaagctctatatggcatacagttgatgtaaccgctgattccattattatgtggggtatcatcgttaatgaacatggccccttgcaaaacagcacagattatgcatgtctcagc

SEQ ID NO: 447886 - DNA, 410 bp, Triticum aestivum
taggggggacatcatggacggttctacttgggaggagggacgccaccaccgcaagtgcgtccttggccaacagtgacctccccggccccaactccaaccttaatgatctcctcgccgctttctccaagaagggattaagcagcaccgacatggttgctctctcaggggggcacaccatcggccgggcgcaatgccagaattaccgaaaccggatctacgccgacaccgacatcgacgggaccttcacggcgtcgctgcgaggcgactgcccacagggtggtggcaacgacggcaacctcgcgcctctcgacgcgtcctcgcccgactacttcgacaacagctacttctccggcctcctcagccatcgggggctgctccactccgaccaggcgctgtacgacggcggctcc

SEQ ID NO: 447887 - DNA, 442 bp, Triticum aestivum
gttcattcttagaaaattgattattgaatcaccattccaatgttggccatgcaacccagcccatatttcgggtgcacctttcaaccattgttaaattgtgtatgttttcctcgagcatacatcaatatatcattttgatctgacaaatgttatatccttgttcacataattgtggaaatccatcctttggaaatcttgatgaattgtcgctgagttcatcagccacctccttgtcctctccttgggttaatgatgaactcttgttaacagaaatcacttcatagttcatttcccgagaatcttacagtgtcatcccgtcaaattgtgtcgcaccttttcttttcaagcatcctgagtctgaggtatcctaacaccgatcagatctgaatctcggtcagatatgatggttggaacacttttcaagagtcacaacattggtctg

SEQ ID NO: 447888 - DNA, 446 bp, Triticum aestivum
  unsure (1)..(446): unsure at all n locations
ctatcaancccaaaaaacccaactctgccttacgtaaagttgccanagtacgattaacctctggatttgaaatcactgcttatatacctggtattggccataatttacaagaacattctgtagtactagtaagaggaggaagggttaaggatttacccggtgtganatatcgcattattcgaggaaccctanatgctgtcgcagtananaatcgtcaacaagggcgttctagtgcgttgtacattcttatccaagacttgtatcatttgatgatgccatgtgaatcgctagaaacatgtgaantgtatggctaacccaataacgaaagtttcgtaaggggactggagcaagctaccatgagacaaaagattctcttctaaagagattcattcggaactctatatgtcaaaggttatatggaaatcttcanaggttttccctacttt

SEQ ID NO: 447889 - DNA, 248 bp, Triticum aestivum
tgatggtgatgggttttattacatatgccaacctgtttctcttgatgtacagacctgtactgtatggtttgtttaattcccaactatacgaatctcagacagtatgtgtgtgtctggtttgtgtacgggcttgtatattgtacaactctattttgattaaggcagactagaggatactcaagtctcctctagtttgatttggatgtgaaaaacagaaaaaagaaaaaatagaaaagaaacaataatat

SEQ ID NO: 447890 - DNA, 460 bp, Triticum aestivum
  unsure (1)..(460): unsure at all n locations
ctttctttcgcccgtcnaggtaccaagtanaagaattcccggctcgacgagaagacgacagaaggggggattggctttgggcctttcctgcgcagcttaggtggaaggcgaagaaggcccccttccgggggggcccgagccatcagtgagataccactctggaagagctcggattctaaccttgtgtcagacccgcgggccaagggacagtctcaggtagacagtttctatggggcgtaggcctcccaaaaggtaacggaggcgtgcaaaggtttcctcgggccagacggacattggtcctcgagtgcaaaggcagaagggagcttgactgcaagactcacccgtcgagcagagacgaaagtcggccttagtgatctgacggtgccgagtggaaagggccgtcgctcaacggataaaagttactctanggataacaagctgatcttccccaagagtccac

SEQ ID NO: 447891 - DNA, 358 bp, Triticum aestivum
ggtccggcactcacgggtggacgatcttgacgacggactcgtcgctgacattgtcggtctggaagatacccttgcagacaccgatacggtcgtcgcgggtgggagcccagtagaacttctccatacgaccatcacggatcagaggggcgtacaacgtcgagaaatcgttaccagtgacgacgatgggcacacgtgggttctcctccttgttgtacatgcctgggagctgcacattggtgggggcatcggcgatgttcatgagggtggcgttcaccatctggttgttgacggtgtactgtgtggtcccgcccatcctacccgcaccggcgtcaagatcgttgatgaagaggcgtcgacc

SEQ ID NO: 447892 - DNA, 457 bp, Triticum aestivum
  unsure (1)..(457): unsure at all n locations
tcccgggtggacaagctcaaagagcaaaagagattaatagaaaaggcagaggaagaggagcgcctaataaaagagaaggaagaaaagagaattaaagaagaagctgaaaaacaagcagctgaggaaaacaaagcacctgatgcctctcaggaagcagattctcaggacactaatgagaaggcacaagaagatgaaagcaaggtagttgaacatcatgatggagatatcacggaccatgacaatcactcaccagaaggcgagacatctgttgaagtgcctgacattaaagctgggactggagatgatgaaccaccggtggagacatctgcagtacctaccgaggagcaggaccctacttctgtcaactctgaaggtttgtcanaggcggaattgggtcgtctggtagcttctcgctggactggagaaaatgtagatgatgttggtaaaagcgataaaa

SEQ ID NO: 447893 - DNA, 135 bp, Triticum aestivum
aatagcgggaaaatagttgggatcaaatgcaaagatggaattgtccttggtgtggacaagctgataacctcacagatgagacttgccgggtccaaccggagacttcattccgtgcaccggaactcggcttggctg

SEQ ID NO: 447894 - DNA, 328 bp, Triticum aestivum
tccggctcgactgccaggccaaggagccccagggcggcgtcctcgtcttcgtctccggcaccatcaccaccggtcccggcgagcagcccctcaagttctcacagatgttccatttgctgccagctggagggagcttcgacgtgcagaacgacatgttccgcctgaactatggctaaggaagggcgaccgctctggaggcaggcagcctgttgagggatttatgttagcacagggaagatcaggtggatatgctgcaggagtcgttgggtggtcggcagcttgtgcaggttggcgcaggcggttgccacggcttggggaggcagcgacg

SEQ ID NO: 447895 - DNA, 413 bp, Triticum aestivum
agataaagcatgagctcgctaacatctcagtcaaggtgaattggtccacaaattcagctttctaggctcatggcaatgttgattagtcacgttccatgcgaagatctatggttgctgttaacgtgggaaactttgatgctattgaagttctttcttttttgttggtagcttaccaagctggtcgcttggtgctgttgaagcgttaacgccccttgctaaagctatatggtcgtgctagtctgacagacaacatggagctagcttctgtcatggggaaagtgaaatgaaaagaagccaggtaaactacagtctggagctcgcttctatcctggggaagatgaccagttggtgatacttattttggaacggagggagtaatgtagcactggacggatgtgccctttattacatac

SEQ ID NO: 447896 - DNA, 367 bp, Triticum aestivum
ttccgggtcgactgctaccaccaagacttcaagcatctcagctggtcacaggcgagcgttggctctatcaggtggtatcaggtttccacgatgcgcggtgagattctacagtgtttcctcggttacatcgactccgttcggcatacctacagtccacacgccggccacaagggcaactacggctagttcatcatagccgaaccgctcggagccattgcacagtcgttctagggttttactttggtgaatttgcggttgcatcgtcggtatagttgcgggtcttagcgtctagtcatttatagtttcgagttctggtcatgagttgtcacgcagtcgccgcaccgatcatcatcgcccctgccagcta

SEQ ID NO: 447897 - DNA, 427 bp, Triticum aestivum
aggtaccgatctacgaattcgcgactcgacattgtgacaaaaaagagcggcacctcttattgattgtgtgtgtgtgtgtgttgaggaggggcgattcaaatcagtggggtgaacttgtggtagtgtcgtgtatgtattttcaaccataaataggtagggaatggtagaaaaatgtgatataaagtgagagagaagtggacaacaagagagaataagataatggtgatgcaagtcagagaatcggaactatgcaacatgcaaaatcacaaaaaagaggggaaattatttcgaaaaagggaaaaaagggtgcaatggccatatgaatggtgccctaccgcatgggttaaagttctcaatggcacaatggaaacacctcgtggtgcagagtcccacatatgtgtgtttagccataatataagtagataga

SEQ ID NO: 447898 - DNA, 407 bp, Triticum aestivum
cgcttaaagttgtcctagatgtaagaaatcagccattgcttattcactgcaagagaggcaagcaccgaactggatgtgtcgtcggttgcatgaggaagttgcagaaatggtgcctgtcttcggtcttcgatgagtaccagcgcttcgccgctgcgaaagtgaggagcaccgacctgagattcatggagctgttcgacgtctcgagcttgaagcacctgaccaactcacattgttaacccagggcgagtgatcgctcgcccccgacgtcctcccagattctagtacatctccatgctgtcctccggcggtcactgaaccgaatcagcagtgaataacttttggaacccgtagaatgaatccatgagatagtggcgagacctctgcataaaataagattgaagaagaac

SEQ ID NO: 447899 - DNA, 275 bp, Triticum aestivum
tccgggccgaccattctacacaaactgttcagtgacgcgtatcagaggtacttgcgcataccactgtccgatatacctctggtattctgtgcactgcccttgaactgtccaatggtcatgacatagatgtacactctgtgccagcagggttgcttcaaagatttgtcagactactcggtgctggagataccgaggttccttacgtccttgatgctctagcaaggaaattgcgagcgccacggcggcctcaggatgcgctcgtcattacaactatg

SEQ ID NO: 447900 - DNA, 412 bp, Triticum aestivum
acagcgagtatgatttagctacccatgcatgcaactattggatatgtgatggaatcatacagaaagacacagacattgctgaagcatggcaagttggtgagagactgcaaggtgatatccgatggaatatggactaccgcgacaatgaatttccctctcgctttctatggtatgccgagtgcgtaccacactgggcatcaccagctcatggatttgtgctggtccctgatggagtcgttcctagcagaacgttccagcattttgacaagcttggcgtgatgaaactctcaaggtgtagcttcagcttttcatcacctccatttctctgctgccacagccttagatttttatggcttgaccactgtcaaaacctaggaaagagaaatggggcgcaatttggagaagaggacac

SEQ ID NO: 447901 - DNA, 382 bp, Triticum aestivum
gcgccgccgtcccctggtatgcggagtttaggaatactgggttggagagatccgagccactgaagaaagatctggaatggttcacggaacagggtcacaccattccagaaccaactgctgctggtactgcatatgcttcctatctggaagagttgtctgagaaggatccccaagcatttatctgccacttctataatgtgtactttgctcatactgctggaggccgaatgattggcaaaaaggttgccgagaagattctggacaagaaagagctggagttctacaagtgggaaggtaccctgtcccagctgctgcagaatgtccgcatcacactaaaccaagttgcttctagctggtctcgggaagagaaggaccactgcct

SEQ ID NO: 447902 - DNA, 302 bp, Triticum aestivum
tgctctaagattcactgatcgagcacttgctgccatcgctgttgccatcgtcccctacgccatcgttgctggatctacgcttagtacgttgaggtcacacacacgcacacccacatatatatatgaataaatgctctcatattatctcactgcgtgagagagagaggagtacgtacgtccaagcagctctgcatggccggccacactgttgtatcgatgtttggttgttcttccactccccgagtttgctgtactttgtaccatgtgtacttttgatatatggattgtatactcagctgatc

SEQ ID NO: 447903 - DNA, 359 bp, Triticum aestivum
  unsure (1)..(359): unsure at all n locations
ccaaactggttgagaagcctgacatgctgttcgggaagcgtgggaagagtggccttgtggcactcaacctggatgtagcccaagtcaaggagtttgtgaaggagcggttgggagtcgaggtcgagatgggtggctgcaaagctccaattaccaccttcatagttgagccgtttgtcccccacgatcaagagtactacctttcagttgtgtccgaaaggttgggtagcaccattagcttctcggaatgtggaggcattgaaatcgaggagaactgggacaaggttaagacagtctttcttccgactgagaagccaatgacacctgatgcttgtgctncccttgattgcaaccttccactg

SEQ ID NO: 447904 - DNA, 441 bp, Triticum aestivum
ggtcggaataccgggtcgactcctgcgtctcaggccaaacccttcacgaacttcatcttcgagcaaaagatggcattctctctgcccggttgctgaccatcttcgctctgatgctccctcatccactcctggatgaaaaaaactgcattacataaaggagtacaatcgccagcgttactcgtactaatttgcatcacacagcctatcttgaaaataagttcaaatatctatatgggagaaagtcatgtacgtgtactatgaaaaagtttgtgtacgaaattgctgatgacattattatcgatgtgttcatttatataacacacatagagagttaatagcatatagatccttcaaaaatagtaggggtccatttggacaaacaacgggtattcgcaaaatagtttaacaggataatgaaaaaagttaacagttctcacaaga

SEQ ID NO: 447905 - DNA, 422 bp, Triticum aestivum
gtatatcgaagtcctagataggaaagtagagtaggcacagatcctccacaaaaggcaaaatgtatatgaaaaaaagattgattgaactttccaacggactcattcgatgagtaaacgattgaatgggattcgcttgggcaacgaaatcaagtcctggtccccttttctctcttattgaattaactaattcatttcctttttacttttggatttttttttgatttgatttggcattattcaacaataaaaaaagaaaaatttcgacaaattccctttttttaattatgtgataattatgagaaccaatcctactacttctcctcgcggggcttccacaattgaagaaaaaagtacaggtcgtatcgatcaaattattggacccgtgctggatgtcacttttcccccaggcaagttaccttata

SEQ ID NO: 447906 - DNA, 410 bp, Triticum aestivum
atgccgcggaatcagagcagtgtgcggggtgtccgggaggagagctgtttcagggctggctcttcttggcgccgctgcctcttgcgcgaatctcctcgccgtgcccatgccggtgcaggcagcaatgctggagcccgatgtcatcaggtacagaaagctggacagtggagtaaagcttgaagatgtagtcgatggcgaagggccggaggctcgggaaggcgatttagtgcaattcaactacgtgtgccgccgtgcaaatggttatttcgtgcatagcacggtgaatcagttcagcggcgagagtaagccggtgacacttcgactcgacgtgcaagagatgattcggggcctcaaagacgtcatagtcggcatgaaagccggaggcaagaggagggctctgataccccctg

SEQ ID NO: 447907 - DNA, 461 bp, Triticum aestivum
tgggactacatcaaggagaatgaggatcactatccaggtgtacatgatagtttcaaggcttgtggagtcgatgagtttgtggctcagaagctcacaaaatggaatgatgagctcatcatgcagttctactccacaactcatttctacctagatggaaggattgtctggatgtctgaaggtacgaggtaccagtccacggttgctgaatgggcgaagttgatcaatgccccaaaagagagtgaagatgacttggatgtctatgccaaccggaagaaggatcacaacacaatggcacacatgtacaaggagatcccacatgctgctcttgagacacataagtttggatctgtacattaccttctgtcaggcttgccaaccatcaactggatcctcaggcacactctctttcccaagtcaggtgatcacaagatgatcagaggccatgcaattaacttgcttca

SEQ ID NO: 447908 - DNA, 448 bp, Triticum aestivum
acggctaataacgtacactgcatgcaaggataccttccgtgggcgtgtttgtgagtgccctattgtcaaaggtgtaaaattcgtgggggatggatataccaactgtgaagcttccggtgttggtaggtgtgagatcaacaatggaggatgctggaaagaaactaagaatgggaagacaatatctgcctgctcgcatgaagaatctgaaggttgcaaatgtccacaaggtttcaagggcgatggtgtaaaaagctgtgaagatattgatgaatgcaaagcgaaatctgcctgtcagtgcaatggctgcagttgcgagaatacatggggaagctatgaatgcagctgtggtggtaacaacatgttatacatgagagagcaagacacgtgcatcagcaaacaagctgcctcctcagtcggctggagcttcatgtgggttattttcttcgga

SEQ ID NO: 447909 - DNA, 349 bp, Triticum aestivum
tacggcttcggcgaaaccacctacgtcttcacattgaacgacgacgtcaacattgtgccgtcggtggtgtaactcaagccgcccaaaccgaaacaaggcatcccgctcgtgctccactgcgtctaagagccgcacacccccctctttacaccaaagctcgggaaactctcccaaaaaggggtgcgttcgtcacaggtacctccaaacattacagaattattacaagtgggatttggagttgctgttgttgttgtaatcctcaacctgttgtgtgttgtaattggtgtaatccacaccaagttttgcctccaacaaacaaataaatcactgaagggttcctccttccttg

SEQ ID NO: 447910 - DNA, 393 bp, Triticum aestivum
gccataggatcaggggactggttcaagaccatcatcagcaggaagaagtcgaaccggggcaagtcaaagcacgcacaggttgctgcacaacgcaatggagccaacctgccgcatcacaagccgagcaacgctccatcttccagcatcgaccctcaagacaccgcagcactggaagactgggcaacgacccggattcaaaacgcgtttcagcgccacaaagcaacgaggacgctccgttgcctgaagcgacttcaaccactgagcattgttgggcacagcaatcgagttaccagccagaccagtgccacactgaactccataaattcgttccacaagtctaaggctgagcctacacaacggcgtgccttcatcgtccccgatgggctcaacacg

SEQ ID NO: 447911 - DNA, 383 bp, Triticum aestivum
ccgggcggacatgcatagagagtacgcggatggctcttgcccgtgtcaagacatactgggcagagatgaaggccaccgatgttgcatccccagattcggacggaagctgagtacctatcgagcaatattttcaggaagttctgcatggcgctcgtttaatagagacgcagtgcttgaaggatattatgttcgaataacatgtattattgtgaaacaatgtttcgatgtaatataaaagctttttatacttgtgccttcaagaattaaaatacctcctgtgcggacgttaatgtatatgtgtatataacccgactgatggcagtcttcggcttcagcccccacgcatataatgccgggggtgtatggcaaaatgtgcattttca

SEQ ID NO: 447912 - DNA, 454 bp, Triticum aestivum
tgatcttacttgcaatcgtttctccaaagtgtttcttcacaagatgtctctcatcaactcctttagttttatcatgaatactcgatcaacaatatctggccggtcggctggatttaagcctcctcctgcttcatctagcatgtattggatctcgggccactttgcattgcatgtgaatgttataaacaggtctggatatccagcccaacggcatattgcaaaagcgtcttgcaagttctgtgccttgtatcttctgcctcctgtaaaagatgaaggtacaattatcctctttccaacctgctctgttctggtgtcacctcgctcaatcgcgtcttgcagtccactataaagttcagttcgtaacttcccttgattattcctgatctagtttagtctgttttgctcaatgcatgtgtaaacatcttaccaaaattgcagcgatagatgtctagac

SEQ ID NO: 447913 - DNA, 418 bp, Triticum aestivum
  unsure (1)..(418): unsure at all n locations
aagtcagttaaagtacccaccgttgagccagtttatgtcaatgaagagtacatcccgtttcctcccttccgcatccgcaacatcagggatgcaaagaaggcagcggctgatgccaggagtggctcctacggcaatgccaccatctctcatggatcgtacagcgaggagggtcatctgtagttctattaggcgacttggcttaagggttggtatgaactatgatcggcgaattttgtcagattggctggagttttgcacccttgtggggtagtgttaggatcgaccggtgaatttggtctgttcttcagaccgacccttgcgcggcagctttgaattgctgaggccagtttgaattatgctaaaccttcatggatgatgttatgggcgttcaggcttactttcanggttgttttctgat

SEQ ID NO: 447914 - DNA, 421 bp, Triticum aestivum
cgggtcgacctgttggtactggagaaggttctactaagctcgtacatgatgttgactgccccatggatttcgacttttcaccttatgtgagtgctaatggaggagtcgaacaaaagtatgacttatatggagtcattcatcataggcagtatggcccaaaaggtgggcactattggtgcttcaccaagtataatggagaatggtacgagatcaatgacgaacgggttacatctatcactaaggagggtgtagaaaagaaaacaaagaaagttatatctttttctataaaatgaaaatgggagaacattctgaaccacatggcgagcgtgcaactgaagacgacatcccaagacggacggacgctgatcccttacttttcaggcccccacctgatgaagatacccccaggctatctgataag

SEQ ID NO: 447915 - DNA, 462 bp, Triticum aestivum
ttccgggccgaccagggttgccaagaccgatccaacgcctcgtccgacggcgctgccggccggcgatggatatggagaggagctcgggtcttccttgtgtatattagggcagcagtagttttagtttgtcttggcttcatgccgtggtctggcgttatgccgtggggatgcaaaccactggagctctcgagcggcgtctggtggtggcctccgtcgttttctttcttgccaccatggtggtggaaagtggaagacgccggatctggcaagatccccttgaataagctcgttctggtgttgtggtgttccctgatctggagggcatccaactgctactgcttgttttctcaggctaccatggtggtggatgagaagcaggatagttgcagaatcctgaagtttataggtcgagttcgagcatatcagcagaggtccctttggtggagcgacgggcgccatcga

SEQ ID NO: 447916 - DNA, 336 bp, Triticum aestivum
tatcgcaacacccaatatcatggggtcatcggcctcggcacgccgctgcaaaatttcacggtgagattcgagaccgggagctccaatttgtaggttcccactgcgaaatgctatttcactagggcatggtagttccatgccaaatagaaatcgagcacgtcaggcatgtaatagcatatggtgagatttgcgatacatatggggatctagaacttacactggacttttcagcattgagaaagtattggttggagacacagatgtcgtaaacattgggacattgatcacaacagtgaatatatgtccatttgcactctcgtgagtatgatgacacca

SEQ ID NO: 447917 - DNA, 385 bp, Triticum aestivum
gggtggccgaccgtgaacctgaagggggtggacacctccgccgtcctcgccgacgcctccagcaccgtcgcaaccatcatcggcaagccggagaactatgtgatggttgttctcaagggttcagtgcccatggcgttcggaggtacccaggagcctgcagcctacggtgagctggtttccatcggagggctgaaccctgatgtgaacaagaagctgagtgccggcattgcttccatcctggagtcaaagctgtccatccccaagtcccgcttctacctcaagttccatgattcaaagcgctcggactttgggtggaacggatcgaccttttagacgcctcatatggcgtggagtcctgtatgaacttcacagttcctagtattct

SEQ ID NO: 447918 - DNA, 206 bp, Triticum aestivum
gtcgcaggctaggttaaggaaggagatcaacgaactcgcgcttaaaagatatcttcattttccagcgcgctttggattcctggagcgttgcaagatcacgctcaagtccgtggagaggaacaggtcgtgggaggtggaaggtgggataggggatccaccggtgagcaagccctgtgagtgccatacaccagggaggagggcggact

SEQ ID NO: 447919 - DNA, 344 bp, Triticum aestivum
acagcaacgtcttcgagtggcaggtcaccatcatcggcccgcccgagaccctatatgatggaggctatttcaatgcaataatgagcttcccacaaaattatccgaacagccctccaacagtcagattcacttctgaaatgtggcatcctaatgtttatccggatgggcgggtatgcatttctattcgtcatccacctggtgatgatcccaacggatacgagctcgcgagtgagcgttggacaccagtccatacggttgagagtatagtattaagcatcatttcgatgctttctagtccaaatgatgaatcaccggcaaatattgaagcagctaacgactggaga

SEQ ID NO: 447920 - DNA, 400 bp, Triticum aestivum
ccctcgatggcaacaccaacttcgttcatggctttccttttgtgtgcgtctcgattggcctcaccattgggaagattcccaccgttggagttgtgtacaaccccatcatgaatgagcttttcacagctgttcgtggaaaaggtgcttttctcaatggttctccaattaaaacatcgcctcaaaatgagttggtgaaggctcttatggtgacagaggtatggaccaaaagagacaagtccactttggatgatacaaccaacagaattaataagttactattcaagattagatctatacgtatgtgtggctctttggctctaaacatgtgtggagttgcctgtggtatgctagatttgtgttatgagatcggttttggtggcccctgggatgtggctgctgg

SEQ ID NO: 447921 - DNA, 250 bp, Triticum aestivum
ccacgttagtcccattcatatgatgttgacgcgaaagcttgtatgtatcacgactcatgatctgtctcgagatgtgcaactggtaatatcactgtactggaatatggttaggcgtctatgatgtgctggaaatgctgcatgttgttggcattgttccacttgagtctcggctgatatggcttgttgctgcgtgtttgtacttattggggtcatagtcttacacaaaagagacaagtcaactttggatgat

SEQ ID NO: 447922 - DNA, 311 bp, Triticum aestivum
tgtattcgggtaattaataatgagaaacatctttgccaccacaaaaaaaaaaaaaaaaaaaaaaaaaaaaaagcggccgctctagaggatccaagcttacgtacgcgtgcatgcgacgtcatagctcttctatagtgtcacctaaattcaattcactggccgtcgttttacaacgtcgtgactgggaaaaccctggcgttacccaacttaatcgccttgcagcacatccccctttcgccagctggcgtaatagcgaagaggcccgcaccgatcgcccttcccaacagttgcgcagcctgaatggcgaatgg

SEQ ID NO: 447923 - DNA, 440 bp, Triticum aestivum
gcgagctgcatcgacatcgaccgattctcttcttctttggcggtctgcaccttccgtgcgggctgtggaggacggatgacgcggtgctgttagggcgctgacaggcagcggttctacgtcccctctccgagcagctctttcatgggacaggcaattgaaggtatggactacaacagtacagactgttatatatctggaaggcgaaattttggggcggtacctggttattgaatgacagacagttatataagagagaagattcctaggtttgccatgacagacaagatggtggcaaggccttgctcgttttagaggacatgggatacatacaggaagcagctgaaattgatgttggcaagtctggtatttagaagaaatctcatgaagtcattcaacaaacgtttgcgaacaagcaatttgtcttcctggacatggcttca

SEQ ID NO: 447924 - DNA, 389 bp, Triticum aestivum
  unsure (1)..(389): unsure at all n locations
agattgcgacaagcttttcctgcggttcccgtgtatgttagggctcaagacatgtctcatttgttggatctaaggaaagcaggtgcgaccgatgttgctctagaaaatgccgagactagcttgcaactaggctcgatgcttatgaaagggctgggtgtcatgtctgatgatgtatctttcttgagtaagcttgtgagggactcgatggagttacaagctcaggaggcactcaacaacgtcgaggatcgtgaaactactaccatggagtcacttcaggttagagtatcggacttggttgagtccaatgggaacggttccggaatgattccccgggagcaatcgctaggtctaagcagtcgcccgggaggtacngggtggataaaaacgac

SEQ ID NO: 447925 - DNA, 402 bp, Triticum aestivum
  unsure (1)..(402): unsure at all n locations
tcaagagggtattcccagataaaaagatcggcaagataatcgaaacaagcctatcagcgaaccaagagcgcgccgccatggagaagaagaggctgaagtggaaggtggctgggcctcccccaaaagaaaatgtggtccgtggagggcccgtggacccctccaagctcgtcgtcgagctggcacccatggagatccgcacattcgtcatcaacttcgaccaccgactcgccgcacatccgatctaggcgccgacattgtaacttttttgtaattttgaaccagaatgttgtattgttgaagctgaactcgaatgagttgtgaatagcaataagaaataatgtggccaacggaggctggagcgtcatcaacttcttaaataagcttccgctagtgagatcaana

SEQ ID NO: 447926 - DNA, 375 bp, Triticum aestivum
agtgctgctgcgaaccgtccatcatattcgtgagctgatcgaaacacgtacgcggtccagacgacggccgaccgatcgaccgaccgacgaaccatccgagccgagctacgtacctaacgtactggtagtagtacatgtgcgatttatatatgcgtgtcgtgtgtatgtgtgcttcccttgagctgttgctttcagctatagcaatagcatatgcccctagaggcctagaacagagtagaactgcagaaagaatagccagcccgtcctgccgttcggttcagctctccagcggcacgacgggtgggtggtgtgtgttgcatgtatgtatgtatctgatgtgatcccctaaaaaagagtatctgatgtgagtctacg

SEQ ID NO: 447927 - DNA, 191 bp, Triticum aestivum
gatagctcacccactaagctcgaagctttccctgatctggatgatcgccgtcaccatgcttctaattgttcgtcgctgtcatattgatcgggacatgtcatcgaaggggtggcctgcaaatttggttcgagtgagtttgttcacattatcgtcagtgcttgaagttacgcgactgggtgcattcgaccatg

SEQ ID NO: 447928 - DNA, 350 bp, Triticum aestivum
ggtcgccaaagttcgtacagagaggaccattcctgatgtacagcctggatgtattgttcaaatgagagtgcaagttcctgagaacaagcgacgtgagtctacattgaagggcatcgtcatagcacggcgcaatgctgggatcgctacgactttcagattgcgtagattactagctggcgttggcgttgagtctgtctttccactgtactcgccaaatatcaaagaaattaagatcttagacaggtagagagtcaggatagcaaagctgtattacctgatggacagaatgattgcactgatgaaatgagacaccatcagcttggttcttgccattttgtttctgatgtgga

SEQ ID NO: 447929 - DNA, 453 bp, Triticum aestivum
ctgccctcaagcacttgatttcctaggtggttgcggctcgcgcgccaactgctcgacgcaattccgctgcagaatcttctctgccatttgggggagcgcatgcggtgacggtgtttcctatggcgtgtgctccaaattatattgccattggcttttccaactatggtttagatacggggacaagggtactctcgccgagctacaagaacttcccacggaaatcctcctacaagtttctcaaggtccgtgctctgcatggaaatgatggccgtagaacgctgattgacataatctggatcatgccggagctgtcaatgaactatttcataaacgggtccatgagagctcttttcggcggcatcgcactgctgggtggcttttatgttgcgcagacattatccctgtcattcggtgctttgggcgttaacgatgttatcgcatgagttgtgtgtg

SEQ ID NO: 447930 - DNA, 439 bp, Triticum aestivum
tcgtccgtggtcttcttcccgggccgtcgtcctcctcctccccttccccctccccctacatattccgtgttggcgcaggacatgtgataaagggacctgatgaagggatcttgtcgatgaaagttggaggattacgtcggttgtacatacccggtcaattagcattccctaagggccttacatcagctcccgggaggccaagagtggctccgagcagccccgtcgtatttgacgtcaacctattgttcgtacctggtcttgacgatgatgggtgaaagcatcatcttgcatctttacaggacgcaactgaagagagtgattttccttttgtgaattaccatgtgagtagagtgacaattgttttctgcagcataatatacaaaactatgatgatttgtattaagtgcatagcaacctttggttgtgaatgggataatgt

SEQ ID NO: 447931 - DNA, 431 bp, Triticum aestivum
aggggacctccgactgcatcgtcacaagttactgcgaaggaggtgacatggcgcagaggatcaagaaggcaagaggcgtcctcttctcggaagagagggtgtgccggtggttcacacagttgctcttggcccttgactacctgcactgcaaccgcgtgctccaccgtgacctcaagtgttccaatatcttgttaaccaaggataacaacatacgacttgctgatttcgggttagcaaaattactcatggaggatcttgcgtcgtcggtagtaggaaccccaaactacatgtgcccagaaatactcgcggacataccttatggttacaaatctgatatatggtcgcttggttgctgtatgttcgagattttagcacagcgctctgcattcaaagctacagacatggcaacattagtcaacaaaataaacaga

SEQ ID NO: 447932 - DNA, 297 bp, Triticum aestivum
ggtggccctgtagagctgaaaagggccgctgaagacaggattactatcagatggactttcaagaaattcaacgaaggcatcatgcgagacatactggacccgctgctggaagatcgcgtggacgaagacgtgttggaagaagcttcagactgtggggttccagtgcgaccctctcacacaggacgaccgtctcacggtaaccgaggtcctggagcagctgtgggacatcaggaaaggcgatcggatgcgcttcaggatcgcatccaatcatttgctcatttaatcacgaccagtgca

SEQ ID NO: 447933 - DNA, 282 bp, Triticum aestivum
acgagaacttcaaaagcggcgtaatgaggtggcaattaacgggtggctgcaccagtatttcgagtcaggtgtttccatgtacgaagacaagtttgagttaactggtcgaagccgaagattatgccaggacacagcaagtaatccgccccaaaaaactaaatgggttacaaaagcaattccaaaaccctgcaacaacaactcccatgcttgacgtttgcaaatacccattttccctcccacttacaaggacaaaggagctaagagctctgactgggtggcggt

SEQ ID NO: 447934 - DNA, 443 bp, Triticum aestivum
gccatcatcgaaaataaagaagaggattacgggatgttcgtctggccatgcagcgtcatcctcgcggaatacgtgtggcagcagaggccgcgcttctcctgctccagagttgtcgagcttggtgcaggaacctcgctgccaggtatagtagctgcaaaagttggagcaggtgttacgctgacagacattgcacataatacagaagtgctggacaacatcaagcaagtatgcggcctcaataatgtgaactgtattaggacttacttggggagattgggatgaacctgttcttgatttgcaccctgatattattctcggagccgatgtgctttatgattcagcaaaatttgatgatctcttcgcaatgggtaccttcctgctgggaaattctcctgtggcagtgttcatcaccacataacagaatcgcagtggtcatcacttga

SEQ ID NO: 447935 - DNA, 349 bp, Triticum aestivum
agcttattactcttgggtgcttggtacccttgagcttggtcctcttgggtgcttgggcgccctaaaacaggtgggggggttcggagctcaatcattgtggtgtaaaacttccggcaagcatcggggttttcaattaaggtggggagaacgccccgagccattttacgagtacccgttaccgcccccaaaggtttgcaaaatgtacaggttccgtgaccccccccaaaggttggcatttgtaccggttcggtgacccccctcaaaggtcccttagtggaatcacgacatctttcattgtgcgaaggcctgaagagattaccgtgggcctaatggcttcttggggagcatt

SEQ ID NO: 447936 - DNA, 113 bp, Triticum aestivum
  unsure (1)..(113): unsure at all n locations
agcttcaagatcgtgctttcctcattttaaaataaatgttggattgatcggactagtgtccctagagtatgcttaatgaccgntgaactatgtacttatgtaaactgcgtacc

SEQ ID NO: 447937 - DNA, 380 bp, Triticum aestivum
agcttaagtggattctcatggctgttcatgatctagctcaagacaacttggagtctgcctttttagttgaatttgtgagagcctgccaagaaaatccacttcctaccatgactggtggagattttaacatttgcgcaacagcagtgaaaagaacaataacagctataatgaccggtggctcttcctgttcaatgttgttattgatagctttgatcttagagagattgattagactagatgacaatttacctaggcaattttgctacctattcaaacctatgagaagttggatcgaattttgatgacaacaaaatgggaactaaagcaccctttcgtgactgtacaagcccttgatatattaggggtgtatcagatcacac

SEQ ID NO: 447938 - DNA, 433 bp, Triticum aestivum
  unsure (1)..(433): unsure at all n locations
agcttctcctccggacagtcgtaggacagccaccgacagtagcccggagtgggagggcagggtcaagcccctggctaaatcataagtatccaaacgcaataatgtatccggcctttttactataaattttttaacctgttaggtcatgcgcttgcagtccggctcggttaaacatcgagctgtcctcctcttcagaggggtcgctggacctgtcggcgatggacagtgggtcccttcagacggcctcctcacccaaggccgtggtcaacaccgaagtgttgtctcgaaggatcccgagccagggagaggctcangaggccgtcccgatggtgcccggnggtagaacctcgcccgccgaacatatgggggagcatgtccctgcaaagactgacggtgggagctataatcaatccggcccccaactgaatactat

SEQ ID NO: 447939 - DNA, 169 bp, Triticum aestivum
agcttgttgttcattgtggtgacaatggacttgtgaagatgtgtgagacgtccattttgcatcatgttttcctactgttatttatgatgtttttatgcataataatgctttttggagtaattctaataccttttctctcataatatgcaaggtacacacaaagagggag

SEQ ID NO: 447940 - DNA, 416 bp, Triticum aestivum
agcttccttgccctgttctgcactcaatctgcttagttgagatggcatgcgaaggccgattagttgctaaaatatcctgccacatatttattgtgacgtagattgccatggtctagtagccaatctgttaggtgaaatagctctacaccgttttatactcggtctttgttgctgcgatggctgtgtgctcggcctcattgactgctgaaacagtctgccagaatttggcactcaaatctgtttgctgaattagctttacatatatttcgttacttagatctgctcgtccaaatatcttggcatagctttagacatcgacctaggtatttttttctggacttcataaaaaagcatatatgtttttcctgtaatatctagtagaagaaactaattgtatgtctaacagatcgacatga

SEQ ID NO: 447941 - DNA, 172 bp, Triticum aestivum
agcttccatgaaaaattcgacattgtttccatgagcatagaaatgctcaagttcttgagagcacgctcaaacactaggttatgtcctcggtatcaattggaatgtgccttccatttgtcgagttgacttataactccagtttcctttccaaactgagtatgccattctttcg

SEQ ID NO: 447942 - DNA, 305 bp, Triticum aestivum
aagctttctaagggctcattttctttctataaagaatccatccaacagctcagttggcaaaactatacacctccagaattgtctccttgcacggcattccacaattgatttctttaaatcgtggaagcatcttcacttctaagttctgggactccttccagaaagccatgggcaccaacattacacagctttccatcctcaaactaagggccaagtcgagcgagtcaatcaaattcttgaagatatgctcagggcttgtgtcatttcctttggcatgaaatgggaagattgtctttcatatgccg

SEQ ID NO: 447943 - DNA, 348 bp, Triticum aestivum
  unsure (1)..(348): unsure at all n locations
cacctccacaattaactccttacacannattacacacctgacatctttagatcgtacaaacatcttcacttctaatttctaacactccttccaaaacgccataatcaccaacattacacagatttacatcctcaaacatactcccacacccaccgaatcaatcaaattctttaacatatactcagggctattttcattttcttcttcatcaaattcaaacattgtcttccatatacctaattcctccatcccaatttatccactaattctacacccacccacacctcgtaaaaactccaacttctaatccctttactaactcataattactaccttgacctaattatc

SEQ ID NO: 447944 - DNA, 138 bp, Triticum aestivum
agcttcaacctagcatagaaattgatgcatacgggattgaaaggggaccagtataggttaatgctatggttgggttttaccttaatgaacgttagtagttgcggatgcttgctaatagttccaatcataagtgcatag

SEQ ID NO: 447945 - DNA, 444 bp, Triticum aestivum
agcttaaagtaccagctcgacattggcttaacagcctgccagcagagtcagttagttgttgggaggacctggaatccgcattccttgacaacttccagggcacttatgtgcgaccaccagatgccgatgacctaagccacataatccagcagccagaggaatcggccagacaattctggacacggttcctaaccaagaaaaaccaaatagccgactgtccggacgccgaggcccttgcagccttcaggcacaacatccgagacgaatggcttgcccggcacctaggacaggaaaagcccaaatctatggcagccctcacgacactcatgacccgcttttgtgcgggagaagatagctagctagctcgtagcaataacataaccaagagccctggcaattcggataccaaggacaacaacggcaggtcacgtctcaacaagcata

SEQ ID NO: 447946 - DNA, 411 bp, Triticum aestivum
agcttagatgcttgagacttattgaaatattaattagggatgccttgggggtccccaagcttaccagcgggagatggatcgcgctgttggcggctcgcaagctccggcagggcccaactgccttggcacggttcagcagcgcggtgtagccatcgccagcctgtttggggctagccgtcccgtgtatgtcacgccagcggagaacatccgagccgcccaggcatcggcggatgagctggacaatttcgagggcgaagagcgccgcctcatgatggagcgagtccagcggctcctcgatgcggccgccgcgcagaacgaggccggctgccgcacggaggcaccgcagcggccaaacaacgacccgcaccaagatcaaggcgcgacgtctcggacgccgactggcggtacccg

SEQ ID NO: 447947 - DNA, 409 bp, Triticum aestivum
  unsure (1)..(409): unsure at all n locations
agcttgtcgctcaacgggccttgccgggacgcgccacgcatcgcggcaaggtccttgtgatgccttgattggccttcccggtaagctcctcttgccggggccttgtctccttggcttaaatactttgtccttgaatggctccaagggaaccaaggaggaccttggcggtcgcccggcaagccttgccgcggggtgctacaactgcccgtgcacaagttcgggatactagggtacccctactctagtacaccgactggagcccccgtgcctgggccacacacggcgccgagcactgttgggccaggcccaaagcagggcacgagcacgtgcggcctgngtcacgccgtatcttactccgtatccaccgcgccctccccgaacggcacgcgttgaatgcggcatcgtgggg

SEQ ID NO: 447948 - DNA, 206 bp, Triticum aestivum
agcttctgtcactctagcaacccatcatctacttattacttcccaatgccgtcccgtggggctaaacaatggggaaggaaatacgcccctcggcagtgtgaatgggtgctgggggtcgcgtttgaataattccaagagcattgcgtccaactccaagacagtgaagttgtagttgaggcccggccgcagcctcatgatgtccgccg

SEQ ID NO: 447949 - DNA, 376 bp, Triticum aestivum
gcttaatcgaagcaaacaatttttgggtgttggcctgccaaacggggagcttaagactctacatttttcgtaagtgatccaagatcaccgggagcccataagaaagctaggggatgagggtttgatcatgactcaattgcttagtgcttgaagatattgcttcaaaaaccctcaatcaacttcttaaaatcatatcggtccaaaccctaaaagtccaagtcagtcgcacagaaatattcacatctggaccgaccgagttgatcatagacagtgccaaagctaaactctagaacttcggtctcaccgagatgacgattggttccactgatttgcattgaccaagtttatgcaacccaattgattcattttagaatta

SEQ ID NO: 447950 - DNA, 454 bp, Triticum aestivum
agcttctggacatcgtgcacacgcacagggcgtttcattcggagaatggcaccaaggttctctgggttagcgtcgatccctcgttcggaaatgagaaaactgagtaattttccgcccagaactccgaatgtgcactttgatggattaagcttcgagagtaattatcaccagctcaaaagtagagcatggttgacaaagcagaggatacaatttaccaaaggcattatgtatccgagaaaagactcacaaagttattgaatatgaaggacgtcgtcggataaaatcccataaaggttctggtggtccacaagagacctgatgtgagcatcggtactcaaccagcagaagaaagaaagcaaggagatcggattatcaaaacaactgactaattcaaagctccaatgcaaaggaattatgagctccaaatcaaaggatcagaagcaaacactctgat

SEQ ID NO: 447951 - DNA, 51 bp, Triticum aestivum
agctttatgatgaatgggaaccaactattaaaattaaaattagagatcatg

SEQ ID NO: 447952 - DNA, 458 bp, Triticum aestivum
  unsure (1)..(458): unsure at all n locations
agcttctctaagatggaataacctaccttggttggtggtgttgaacatgtggttgagcttgtgtgggttgctcaaggttgatgtaactcatcaagagttgggagcaccacttggaatttgagtccatctacctacatgggttagttcttgcaaggaagagcacttgtgtatccaaaaatgacaatcatgaggctcaatatagaatttgtcaaaggatacgtttgaatggttccgagcttccttgtcttcaaccaccatagtgtagagacttggtgatgtagagattgctcaagatgtgagtagatttgtaacatcccaaatttccaatttggcatgttatacataggtcatacatgcatatcatattttattgctttttcatttgcaatcctcgaaatcctaagcaactcaaggaccttcggagagagttggggattttctaattntcatatttgaaa

SEQ ID NO: 447953 - DNA, 448 bp, Triticum aestivum
agctttttgagggaatattcacactatatagaatatcttgactctgaatgggtacatgcaagtctatataacatagaaaagcaggctgcccatgacgggtacgtgtggggtgaaccaaattctcattgaattttatttttccattcgaaggggatcgtacaaggtcggcagtaccccctgtgaatactccgccagtatgaaaaggtcttaatgttagttgagtccctggctccccaattgattgacctgcaataatacctacggcttctcccaattcgaccagatcactatgagtaggactccggccatagcataattgacagatccaagaagtgcttcggcaagtaaagggggttctaatatatattggttgtgctcgaaatggttgtgctcgaaaggcagttatgaatcgattgactaatccaattccaatatcttgatttcgcgc

SEQ ID NO: 447954 - DNA, 342 bp, Triticum aestivum
agctttattacaaaccttttacaaaccggagcctgtcgcaagaaccctcggggtttggatagagaaacatgtccccttatgggccaaacaataatcactccctcttctagcctcatattttcttctacaggcgacacggaacaagtagagattcgggctaaactttgaaattattcagggtttgtttgaccttttttattcattaattgagttttctaagcatttaatgtccatcattcaaatctaaactacaaatacatgctccagtggaccaaaatggctagaaaaacatacatgtttcccttgggtgcatgtttaggtcccatggaacgaatgagaatg

SEQ ID NO: 447955 - DNA, 290 bp, Triticum aestivum
agcttgcgcccggatgaaatggtcaccatcacaaaagtctgtttaaatgggggaccggttgcttccaagaggatcaagaacatatttttacatcagacggggttgtttataaagacaacgttccgatcagccttccagaacgggataagtacaaagaccctgcattttcttatttccaagattgactcaaagatgatcttttgacctcgctaaatacaaatttttggctctcacaattagaagacccttactacccatgtatttaactaaaggttaaggggttttctttt

SEQ ID NO: 447956 - DNA, 284 bp, Triticum aestivum
  unsure (1)..(284): unsure at all n locations
agcctctcaacatgggcaacgttttctttcaaacaggatcaggaccatacattcacatcantactccatttattaatacaaacacatttcctatcagcatccaagaacggaataaatacaaggaccattcattttcttatgaccatcataaactcaaaaattatcttttaacttctctaattacaaattttaacctataacaataacaccactcttactactactttatatatctaaagctcaattccttatcactcaacaagatatcccaactatccaataac

SEQ ID NO: 447957 - DNA, 259 bp, Triticum aestivum
agcttctggtcatgcttacataagctagtgctgaagacatgatactgtccactatggaactgtttcaggttgctctgataaccagactattgctgctattgactcccctgattacgctgctgattgtagccaccctggttgccatgattaccttgatttccttggaatccagagttagagccgtcaccggcacaacccagtccgtgagagccggaccctaaacctgcacctggcccatgattgtcttgaaaaagattgg

SEQ ID NO: 447958 - DNA, 441 bp, Triticum aestivum
agcttcattactttcttggtgtggaggttacttctcgtgctgctggcctggttatgacgcagaagaagtactctctggatttgttgcagcgagctgggatgcttaagtgcaaaccgacgactacacccatgtctaccactgataagctcaatgctgttgatggtgtgcttctttcttcttctgatgcgaccgagtaccggagtattgttggtgggctccagtacttgacgatcacgcgaccagacatttcctatgctgttaatcgagtctgccagtatctgcagtcaccccgtgacactcattggtctgctgttaagcggattttgcgctatattcgtttcatggtggctcatggtttgcatattcggccgtctgactctggttgtctttcagcatattctgatgcagactgggctggcaatccggatgacaggcgatcca

SEQ ID NO: 447959 - DNA, 263 bp, Triticum aestivum
agcttccttctgattttttcagggcgaaagacttcatatagcagaagatgggcactgaaggcctgccagggggcccaagagacagggggtgctaccaggggggtagggcgcgcccccccaccctcatggccagggtgtgggcccctctagttgattctttcgccagtattttttattaactccaaaatgtgcctccgtgaagtttcaggacttttggagttgttcagaataggtctctaatatttgctccttttccagcccag

SEQ ID NO: 447960 - DNA, 164 bp, Triticum aestivum
agctttgtttggagtttgtgtcgtacccttggttccattaacctggcgcgggatcatccctatcaacttgatgtcatcaccgatcgattacatcttcatgagatctctcgacaaatgcatcctgatcatcatgagcattctgagctctcccaggatatcaattg

SEQ ID NO: 447961 - DNA, 302 bp, Triticum aestivum
agcttggtgggctaatctttggcggccgtttagtcgcttggcggtgatggggaggcggacagcttcactttctgggtctccggaggcggaggttacggaggcagaactggagagggtcgaggcggaactaaagaaagtaaagattcagttctcggggctcatggccggtcatgaggaacgggcgccggcgatcatagattaggtgtattaattatacctccagagccggacgagcaccgcttggttgatgtaaatgtaatgaaatctgtcatgtttatatgaaatccggccgtgtttgaacg

SEQ ID NO: 447962 - DNA, 429 bp, Triticum aestivum
agcttccactactgttcacatgcagctgccagcccaaccagctgggcgggcgcctgcgtggcaacatgcagctcccaagccaactcatcgggcgcctgcgtggcggcatgcagatcttcgtgaaggctccaccaccgcgccacctcagctgcctgcctgcctacatggcgccgcacgcatcgctggccaaggcgcgtgttgaaacaaggaagagcagcgacggacgggacgggcctcgcccccgtccccgataaagcagggggacacctaagcaacgcagaaaatgcgtcttgtcctgtaatgcgagcgataagctcagggcactgtatgcctttccacctcatgtgtgccactgtggcagccccttccgactataaaaggaggcccatggcatactggagaaggattcggctctttcgaaccacgcac

SEQ ID NO: 447963 - DNA, 425 bp, Triticum aestivum
agcttttcttgacaacttccaaggtacttatgtccggccaccagatgccgatgacttaagtcatatagtccaacaacctggagaatcagccagaaaattctggactaggttcctaaccaaaaagaaccagatcattgactgtctggatgccaaagccctagcaaccttcaaacacaacatccgtgacgaatggctcgcccgccacctcggccaagaaaagccaaaatccatggcagccctcacagcactcatgacccgcttttgcgcgggtgaggacagctggttggctcatagaaaaaacacagccagcgaggcagccccctccgaggccaagaacagcaccggcaagctccagtgcaatagacacaaatgccgaaggaatggcgataacaccgatgaaaccacagtcaacgccggattcagcg

SEQ ID NO: 447964 - DNA, 451 bp, Triticum aestivum
  unsure (1)..(451): unsure at all n locations
agcttagccccggcgagcagcttgggcagaactgtcaagaaggtcagctggtgcacgtcgatgtcgccgggatccttgctgcttgtcacctccatttccaccttgacggcgtcggtcgtgcctttgggctccgccggcgggccgttcgcccatagcttggccacgtagtgcggcagtggggacgcccccgctctgatgcagacgaccaacacggtgataggcgcgccaatgtcgagcatgccgccgaccaagaaaaatgcacggcggtcctcctccgcgaacagcaagagccgtggctccgacagtggcacttgcagctagagcaccttgccgtactggatcctgtgcacgggcatgggatgcgcggtgctgatgtggtggtagagcgccggcagtgggccttcgtagccgcagacgggcacggngcatttgcagggcgcgagtggacaca

SEQ ID NO: 447965 - DNA, 359 bp, Triticum aestivum
agcttgattctgagttggagacgtttccggggttccaataatctttcgctgcaacactccttttgcttgatgcattttttgattgcttcttcgtggatcctctcgacaaaatttgccatgatcatcatcaacattttgactccttccagaatagcaatcaaattcataatgacaagtaccatccttgccctcgatgatttgtgttatcatcgaccactttattgccttccgttcaacacaaacatgttcgtgtttcgtgttataccttgagatccttgctatccagcatttgttatttaccttggagtattaccatcttttatgtcaagaatgttgtgagaatttcaccacctcttaag

SEQ ID NO: 447966 - DNA, 61 bp, Triticum aestivum
aagcttcgcctaagtttggaagacttaactattcagagccgacattggcagagttctgcag

SEQ ID NO: 447967 - DNA, 70 bp, Triticum aestivum
aagcttatcttggaccgtatctttgatgtctatgaagggcatcgaacccgtcgtggggcttggtatgagg

SEQ ID NO: 447968 - DNA, 420 bp, Triticum aestivum
  unsure (1)..(420): unsure at all n locations
agctttcttgggatgccttgagtggccttcccggcaagcttgnngatgctgatacgtctccaacgtatctataattgtttattgttccatgctgttttgttatcaatcttggatgttttataatcattttatatcatttttggtactaacctattgacatagtgccaagtgccaattgttgtttttccatgttttttacatcgcaggaaatcaatatcaaacggagtccaaatgccacgaaacttcacgatgattttttatgggccagaaggaaggcaatgggccctggttgcaccttggggtgtgtcccccgaagacananncactttagcgcnngaagcccangcccgccctggtcgttgtgcccacctcggggccccccggaccggctctttgctctataaataccccacaaatacc

SEQ ID NO: 447969 - DNA, 393 bp, Triticum aestivum
agcttggggaatctatgtttgatgaggatgaaatatatgagaatgtattggctgaaattaatgtttgtcccaagcttgatcaaccattaacaagcaatcctaatgtgggaggttttggtcagggggacgcagaaatcgtgcttcaggatccattacgtgtccaaggccttttgttcttcttcgcatccgttattttggcacaagtttttttggttctcaaaaagaaacagtttgaaaaggttcaattgtacgaaatgaatttctaggtctcgcgatttcttaccatcaagttggtaaaaagcctcgatttattggcaattgctagaattatctatgatctattttggaaatcctttttttgtttagactgttttttgtttatgagatgtctgg

SEQ ID NO: 447970 - DNA, 448 bp, Triticum aestivum
agctttttagttgattctttttgctattaaagaatattatagttgggtttgagttgatcattacaaaatattttaattgtttatttttagttcattctttttgctattagttcattcttttttctattagttcattctttgagctaagtgaccctgaaactgaaaaacactacaaatgaactctgaaaaggttcaaagttggcatggtatcatcatttcatccatatagcatgtgctagaaagttgagaggattatggcaaaaactggatgcactttgtgtacaaaacggacaatctctttcgaagtatcagggtttcggacgaaaactcgtttgttacaaagggaattcttcttgcatcctttacagactgtcatgtttacacagattgctgttatgtgtgtccatcataagtacaaattcttcttccatcctttatagactattat

SEQ ID NO: 447971 - DNA, 442 bp, Triticum aestivum
agcttggacctagaatggtacctcgtgttcttcgaggagcctcttagacgagcaactgccgttgtgatcccattcgcctccatcaaagtgcctgggtgattgtgtgcgccacagcttcattgttgtacttgggacctccctttcgatgtacgagctcatacttttgaggactaccttcagtccatcaaagatgccgagtggaggctcgattggttttcctcctcggtagaaaacaaggggagtttcttttgggaatttatccggaccccacctgataatgagaaacgcagtcatgactcataaccaaactacaaatatagttgccacaaaatagaaggaatgtataagagcaatacacattgccatgctagctaacacaggatttttatttcacaatggtaagtatacccagaaatttaaaacaaataacatttcaacactg

SEQ ID NO: 447972 - DNA, 441 bp, Triticum aestivum
agcttgggtattcccatggcacccccaagataatctaaggacacctaaaagccaagagctttccgtacagcccatgtttcagcaggagctatggctatgaagaagcgtgagtttcgtaacctatgccaaggaggacgcaccataggccagtatgtggaggatttcagtaagttagcacgttatgcaccagatgacgttgctacagatgcagccaagcaggagaagtttctcgaaggattgaatgatgagctgagcatgcagctaatggtagcaaccttcaacaactaccaggagttggtagatagagcactcatgattgaatggaagcagcagcagattgaaaaccgtaagaggaagtatgggcaagggaagtataattctggagctcagcagaagccacgttttaccccgaaacagggaggacagtttcagcatacccat

SEQ ID NO: 447973 - DNA, 271 bp, Triticum aestivum
caattggaaccgccccccctcgagcgaggtatcgaaagcttcttcttaatttccaagcaaaagaaccttataccacaaagggcggggaggcttcaagtggcccaccagcaaggggcgcccccaagggtaggccccccttaacctcgtgacagggcgggcccccttggtgcttcttacccgatattttaaatattcagaactgctttcgggatttcggacttttggagtgcccaaaaggactctaatatttgctccttttcacccaaatttc

SEQ ID NO: 447974 - DNA, 294 bp, Triticum aestivum
  unsure (1)..(294): unsure at all n locations
tgctttttatacctggggcattaagaattaaaaaaccctcctatgccggccggtaatgtatatgtgtatataacctgaaagatgggcagcttcggcttcagcccncacgcatataatgcggnggtgtttgcaaaaggcgcattttcacacttgatccaacgtcttggtcctataaaggaggtggtagcgcagcaaactaggcaactggactataatgctttatcactttcacttagccataggagtttgacagtggggctactatatagcccctaggggcactgcgcttacccg

SEQ ID NO: 447975 - DNA, 396 bp, Triticum aestivum
agcttcagtgacttaactgcaggtgcagttgcgtaactgacatgtggcctgttgggcccacgcgtcagtcagccaactgcaccagcagttaagtagaagcagcgttcttctccagcgcagctctccgactccacgtcgccgccaagaagctaaccgtccgtcaatggtcaacccgcctagcttggcttcaaccggagggtagcagcggtggccttacttggacccgagcgacggcgacctaccgtgttctactcttcctcgttttctgtgtggcgcgacctcggcggagccggcgacgtcctctgtcttgttgccggcgggcggcgcctcagcggagcggtggaaatcctcccccacggtgccggcagggtggggcctcggctgagcaggcgatgt

SEQ ID NO: 447976 - DNA, 409 bp, Triticum aestivum
agctttcttatcttactctttccactaacgttaggacttaagcgagctggtgaatactagacacttctttctcggccgtgcgtggtcttccctcggggatgggagaatatagaaggtgggtgggtggatctctattctccataaggatagggttgatttgattggcattcacgccttttagaaagagccactcaatgcaattctcttttaggcgaagagagtatgcccaactggagtggtttccgcctatattcctactaatgtaatctccaagatggacaaatcttcttatctgcggatctattccatgccggaattcttcacactttggatgcttgttcatgatttccatcttaacgagtttgccgaagatgacattgtttggaagcactccttggacgggatttac

SEQ ID NO: 447977 - DNA, 416 bp, Triticum aestivum
agctttgaagctctcaatatccggttcgaaattctggttaaaaataattcatctctgcgcagttcgagttctcagaaaaaattacaggtaccaaagagagtttggtgcacagcacaactcaaacataagcacccagcgagcacaactcagaaatatatcacttgggggcttttggtttattgagctaagctatgattaccctttgatccggcttatacgccatgtttacaaaaacacttgggggcttactacccaggttaaagggaccaaagagagtctgttgcaaaagcacaactcaaacataagcgcccattgagcacagctcaaaatattgcttgggggctcttttgttctaaagaacaaagagtctataaccttctaataggctataaaagccaggcttggaagccagctgt

SEQ ID NO: 447978 - DNA, 328 bp, Triticum aestivum
agcttcgagagtaattatcactagctcgaaagcataacatggttgagagggtagatgatacaatttcgcaaaggcattatctatcctaggaaaggctcacaaggttattgaatatgaaggacgtccgataaaatccaacaaaggatctggtggtccacaaaggatctgatgtgagtattcgcacacatccacaggaagaaacaattcaaagacatttgatcatataaacaactgactaacttatatcttatttgcaaattaattatgttcatgggatcagactcatacactctcttaaagtgatgcataaattgattaagcttagggg

SEQ ID NO: 447979 - DNA, 278 bp, Triticum aestivum
agcttatggctgatcctaaggatgataccccctccagcaacattgaaatggtaaagtttaatgtgtttcctaggtgtagtgagcctgtcaaatttgctgattgttatgttatctctgaaacttggcactctggttatgatttggctcttttgctattatgtgttatgggttgtgcggcactaggtgtcccgctgttcttaatatgctacctgtgttatcatatgaatcaaatgcccatgcgtagctagaatgtactttgttggaatgtacgtggactg

SEQ ID NO: 447980 - DNA, 330 bp, Triticum aestivum
agcttcgtgatgggcattgcaagtttctcgtccatccaacgacacttccctgtttgagggtccaaagttttcccaaccccgaaaaaccaagttcttgagcgctctggccagttcaatgtctctcgttcgacccctttagcaatcaggtcagtctcatctttgtcccacaacagccgggctttgaggtagttgcctgaccccgtgcgatggtgatacaacttctttccggcatttatcttgtttatgtctgacattttcttactcttgtccgatgtcttgtaggccacaaatgtgggctagtgatctcttatcttctcaaatcggccggtg

SEQ ID NO: 447981 - DNA, 353 bp, Triticum aestivum
agctttattttggctataagcgtgaggagaatttaacacggattgcaacagggaaagacaatctatccaagagcaattatcataattaaatccttggaatccaaaatagtgggttcattaatatctaatgttttgatctcttcaatcccaattttatcaattttagcatcaagatctaaaagctccgaatttctggaacgccttctaagtaaaggtggatcatattcagtcccttcattattaagattcatattgcaaaacaaagatttgataggggacacatcaataacctttagatcttcatctttgttttcataaaaaaatagaagaacacgcttttataaagcaatctt

SEQ ID NO: 447982 - DNA, 437 bp, Triticum aestivum
agcttcatcattccttgagcttgatcatgaatactttctaaagcctttcttgttggggaatttttggaacttcttcacaagcataacaagctcctttccaatgtcttcgggatcatcagaactgcagtcaaattcttcttcagatgaggagatagcttttactttcaaggcacaagttcgcccatagttgggaccgtagatgtctcttttctcagaaagctaaaactcatgtgtgttgagcctttcaagtatgtcagacggatcgagtgtcttgaagtcaggacgttcttgaatcatcaaggctagggtgtcaaacgatctatcaagtgatctcaggagtgtcttgacgacttcatgcttggtgatctcagtagcgccgagggcttgaagctcatttgtgatatcagtgagtcgatcaaacgtgagctggacattct

SEQ ID NO: 447983 - DNA, 63 bp, Triticum aestivum
atagcctcaccaataaaaagccttttaataaagggtgggaaatggtccatcctggtagagtgg

SEQ ID NO: 447984 - DNA, 75 bp, Triticum aestivum
agcttgttgacgtggtccaggtgatgctagtttgcctggttctccgttgcgagcgtcgagcctgtactttatggg

SEQ ID NO: 447985 - DNA, 80 bp, Triticum aestivum
  unsure (1)..(80): unsure at all n locations
gtnataagcttgttgacgttgtccatgtgatgctagtttgcctgnttctcgcttcgagcgtctaacctgtactttatgcg

SEQ ID NO: 447986 - DNA, 435 bp, Triticum aestivum
agctttgccatctgagtgtcaaacccatagaaagtcagcgtgtttttttcgttctgcgcaagcaagagtgatggccaaattattagttttctcgcagcaaaaacttgtctaactaagaaagttttgctttattaagaacgttattttgtcttacgacgggtgatagagctacacccggctacccactgtctcatggttctctgtttgcctcttggttttgacgtgggtgtttacctagctgacaaactggtgcaggttttgtctctcacttacaaagttcttcttgagcacatagttcatgctctcactccgttgtgtggacatcattttggcggaaaaaatttctttgaagtaagctgatatccatttctcgcgctcgttccacattgccaccattgtggcatcatcatggagattgtacttatccatgagtgc

SEQ ID NO: 447987 - DNA, 426 bp, Triticum aestivum
agctttcataacccactggttcgtcaaatgtttttgcttcacaatgctctgcgtgaagcctatccccctaactgcactgtagggtacgacaccagcatcttcaaaatggattattgatagtgggtgtacaaatcacatgactgacaaaagaagccttcttatggactcaaccttacgtccatccgacaagagccacatcacatttgctgacactggtaaaagtaaggtattgggtctaggtagagttgcaatctcaagggatcaacacatggataaagtcatgcttgttgaatcccttggcttcaacttaatgtctgtctcaatgctttgcgatttaaacatgatcgtaatatttggaaaatatcctttccttgttctaatggaatctaacaagtctatagtattttgagggtataaaaaagatga

SEQ ID NO: 447988 - DNA, 366 bp, Triticum aestivum
  unsure (1)..(366): unsure at all n locations
agcttgggggaggctttgcttgttacttaatgctttgcctaatcggcctcgtaagaaaaatgaaatacctaatatcttctataatggactaaccgatgcttctagggacttcctagatagttgtgcttgttgtgttttcaaggaacgaactattgctcaagctaaagaattattaaataacatattgaaaaattatgatgattggactattcctgaaccaccgcctaaacccactccgaagaagaggggtatattatatctcagtcatgaagatatgcaagaggcaaataatctatgaagganaaaggtattaaagctgaggatgttaaaaatttaccacctattgaagaaatacatgggcttgat

SEQ ID NO: 447989 - DNA, 183 bp, Triticum aestivum
tgggaccggcccccctcaggtcgaggtcgtcagtagctataagcttatgtgcctcgggtgctggtgcagcaacctattcatcctcggcctggtgcgtcatggaaaccgtcgcaatcactctggccatggtcttcttgaccctttacttacttttctttccttctgcagcaagctctttggttt

SEQ ID NO: 447990 - DNA, 309 bp, Triticum aestivum
cggcccccctcgagcacgttcatagcttgcatctgaggtaaaccataaagcagcggtttttcgttggcagcagagtgaggccaattttagttttcgcgcaaaactgttactaaaagtttgtttttaaacgtattttgtttacgacgggatgagctcacccgtaccatgctatggtcttgttgctttggtttgacggggttactactgacaaactgggcggtttgtcttacttacaaagtttttgagcacatagtatgcttcactcgtggtggcatatttggcgaaaatttttgagaagctgaatcattt

SEQ ID NO: 447991 - DNA, 103 bp, Triticum aestivum
agctttactccacgggctttgtatggctaaggaaatgaatttgaggcgggttagatgtctgggcgactcagacctggtggcacaacaagtttcgagaaagtgg

SEQ ID NO: 447992 - DNA, 329 bp, Triticum aestivum
agcttgccttccacgccaaggaaagtcccatccggacacgggacggaggggtcaatcttgtatcttcatagtcttggagtccggtcgatgatgatagtccggccgatgatagttcggctgatgatggtagtccggctatccggacaccccctaatccaggactccctcaccaggcgttcacaacgtcaacttctcctcctacagcaggccttgcaccaagcggtgcatcaaggacataattcttctgtgcaacaatgaggataatcctcaagttatggacccagtccgtgtagttgcttccatcatctttcaacttagctttctctagg

SEQ ID NO: 447993 - DNA, 313 bp, Triticum aestivum
agctttcattacaagaagagtagccaatctgaacaagaaatagagggagcggtatatacgaccaaacaggacgttccaacatcctctgtctatacaacatacatactcttcaactatgccattaacgcctatgacatggaacacacatatcccacgtgatacaatacttctaaagcgcgcaccaccttatccgagctacaccacttattgaattctgcgaggagtactgtttagcttggcaatttcaattgcatagctgtttcctgaataagataactatatgctcacacacgaacacagaatacgatcccga

SEQ ID NO: 447994 - DNA, 172 bp, Triticum aestivum
agcttgatcatgcccatttataccttttagataatccaaggacaccaaagagtcgttgcttccaaatttggcctaatggccaataacatagctgtcgatatgctctatatggccaagcgagttggcccgcattgcgaaaccgtcgaacacgaatatttgtccggtgagtaat

SEQ ID NO: 447995 - DNA, 73 bp, Triticum aestivum
agcttattaactttctcttgtttggcgcttaaatcctccagcacttgctgttgcaccagaaagtatgcatctg

SEQ ID NO: 447996 - DNA, 425 bp, Triticum aestivum
agcttggcatgaacagtgccatattaatccgttatgaccacatggagcgtggattattaccctcgactctcgcataacaccacacatatccaacgagtcggaattcacgataccacagcgatcctgttacgatcacataaatatcaacaaacttctttcatcatcgaactagggttgatattaagcacatcattattactgttaaccaacagtgtgaccaactacgaactgggcccatatcactgcggcactgctatcgatagatttaacacacacactctacataggttagcacactgtacccacaccacggaaccctggcctcgcactctcaatcaggtggaccaaggcattccgacaaaaccgtactactgccatgacactttcccggccactccgaccaactcccctatgggctaagtcct

SEQ ID NO: 447997 - DNA, 200 bp, Triticum aestivum
agcttcggtatacattagcccccaagtgtcaagtatctttgtttgcaaagtgcttgggacttaatattatttaccgtaatcttgactactatccggtgcaatgcaggccaccataagtcaatttgaatcggagattgctgacctaaagaaccgcctggcagcccaggagattgaaattcaaaaggctaactccaaatttg

SEQ ID NO: 447998 - DNA, 252 bp, Triticum aestivum
agcttaatcacacatggtttaaagagacccaacgaaaaagacgcgacgcttaatcttcccaaatgcttggccaacaaaaacgatagaaaccacatgcccatctgacggaaaaaccatcctaaccgaagatgacaccaagtcccgtcgcaccaccttacactatacccgataatagatgtcattagctacgaccttataataccctatctgcttcacattattcaaagatccatatacatggacaaagacttc

SEQ ID NO: 447999 - DNA, 318 bp, Triticum aestivum
agcttgtcttccactcaaatgagagtcccatccagacacgggacgaagtcttgagtcttgtatcttcacgctccaatagtccggacaaagtgtatagtccggctgtccggataccccctaatccaggactcccttagtagcccctgaaccaagcttggggatgtctaatgtgatgaatgtgatctctttagccccgctatgatgagaaaatttggtatgatgagaacatgcatcctatttgtgattattaaaatgatgatgatagtggatttggagaggtcatgactttaggtaacactgattccactttagagagtc

SEQ ID NO: 448000 - DNA, 270 bp, Triticum aestivum
agcttaatcataaaagggagagagagacccaatgggaaagaaagttctcttaatcttcccaaatgcttggtaaacaaagaggagagaagccacatgtcttttagaggggaaatacatgttagttgaagatatttctttgtgcctttgcactgctttgcactatttttgatttggttttcatttgctctgattttctattaccctatcttctcccattattcaatgtcagattcagggggagaaagacatcaaagggaagaaaatctttgg

SEQ ID NO: 448001 - DNA, 89 bp, Triticum aestivum
agcttgtcctccaagatattaaaatctatatatacttccagaacctggggatcacagtgtcacggagaaaatcctctgctctcttttcc

SEQ ID NO: 448002 - DNA, 70 bp, Triticum aestivum
agcttataagcttgctttcgtgtgccgctgaacttctacagggccaagtgttgctgcagacagtatgagt

SEQ ID NO: 448003 - DNA, 406 bp, Triticum aestivum
agcttagtatttttagtagacgaacttggagtgttttgaacggaagaaaaagtggttccctagttggtaatgataccctcaagtttatcaattcttatggaatctagatttattttctcattaactatgggttctttttctttaatatttttcaaagtcattcctaccttagatccatattgggtaatttgattgtggatctttttatcaagattttcaattgattcaatggtagcaactttattctcaatagtttcaagtctttgcataacatactataaagttaacatagttccattaatcaaaagaagtggtgagccaaataaatctattaaagcattataagaatcaaaagtatggctacccaagaaattccctccggtaatggtatcaaggatatatctat

SEQ ID NO: 448004 - DNA, 183 bp, Triticum aestivum
agcaattcatttgtatacattgctactaacgaaccgtgagccatctttatagaatcacaagcttacaatctatctacgtaaagatcgatcatttacaactaccacagcataaattccataggcaacaaccattatgtaatataattgattgctacacaaaccagtaaacactgctctaaacct

SEQ ID NO: 448005 - DNA, 73 bp, Triticum aestivum
agcttattaactttctcttgtatggcgcttaaatcctccagcacttgctgttgcaccagaaagtatgcatctg

SEQ ID NO: 448006 - DNA, 188 bp, Triticum aestivum
agcttagctaacacttctttcacttatagtgatggcaactcatcattcgcgttgcataaatatagacatgtcaagacttcaatgctatctaccaaatgatcgtgcatttacaactacaacgcactagtatacaatgtcaacaccaatgattaaatacaacctattgctacatcaaaccggtcaagata

SEQ ID NO: 448007 - DNA, 389 bp, Triticum aestivum
  unsure (1)..(389): unsure at all n locations
agctttgggcaatagcttcatctctggacctgggtacaaggttcttgtataagatgtctccccacggtcttttgatggcacttttctcagcatactcttgggttgtgaagcagtatttgaaccattgctctgcccaatagcgtcgaatccattggattcgggtcttgcgctgaccataattctcttcaggatctgttttatacatttctgccagttcatcaggcagatctttggatgttcctccacatcgctgtctgccccccttccttgctgttgcttctgaagccataaactttaacttgaaaggcttcaaaactttcaaaggcttcaaaggctttcttttgctggaccaacaagaactggcttcaggagaanttatgtgatgctgt

SEQ ID NO: 448008 - DNA, 413 bp, Triticum aestivum
agcttggagagctgcagcaaggtggggctgaaccccttatgcaaacgtaacccgccaccatatgtaagctcttaaactcatttacttttctcactgtatatataatctacatgccccttatcttcttgtgacttatgcaggctgaatctgctttttggaataagaagtacgaggagaaggagaaagctcccaagaaacccagggctaagaccaaggcccctaaaaaaagaagaaatcaaccgcctcagagttgtttgctttgaatgatgatgagtcggaggtagagcttgactcttttagctcctttttcaactatcttattgacactgattgctatcaggacgacgcataagtcatccatgcgggtgatgaagaggtaactattatttccttcgactcagagcctttgccaa

SEQ ID NO: 448009 - DNA, 62 bp, Triticum aestivum
agcttgatcctcaataaacagaagaaaactccctatacatcatctgtcaattttagaaattg

SEQ ID NO: 448010 - DNA, 67 bp, Triticum aestivum
agcttgatcctcaataatttgaatataactccctatacatcatctgtcggttggagaaattgaatat

SEQ ID NO: 448011 - DNA, 377 bp, Triticum aestivum
agcttatgggcatttatcttgccccaatgcacacttgcgcgggcgagggcacgactgtcacactcaatatatgcggagtgcttgatgactgaaacccaatggcacgcatccaccagccgccgtaccaggccgaagtagctcccatgcatggccttattaggccacagacgaactatgatgcccttcatggtctgtttggccgacttgtggagctcgaccagctgctttagctggtcgctaaggggcaccggatgtccggcctcagcatactgagaccagaagaccttctacgtcgagctcccctgcttggcccggtagaatgcgacagcataggacacgctgcaaggaagatctgcgaaagctcctggagagctcct

SEQ ID NO: 448012 - DNA, 422 bp, Triticum aestivum
agcttggcaccgtcgccaagggcacggcggcccagtgcggagcctgcgtggcagtgcggcatccgggtgccgggaatcgcttcccgtccgtcaccctgctgcagtcggccaaactgtggcagaagtcctacttctacgtcaagaatatacatccgacgagggactacatcaacttgccggtttacgtagccgacccgcctgttgagtcgcgcgccaactggcagtataagccaagctccctatcggtcgcctcctccgccaccctcgcccgacttcaggtgatgacggagtcggagggcctcaagggctcggacctgctggccgcctacgtggcactgagtgcttcccctccaagcccgaccccacatcattagcagcatgagcgggcatcgggacccttgccggttgagcaccaaggagct

SEQ ID NO: 448013 - DNA, 311 bp, Triticum aestivum
agcttgtggtttactttcttctttgatttgcacaaaattatggattggcctcaaggcaactaggctctcatgaccaccgaaatatttaacagagaactgataaatcatatcctggcgactacgcacacaaccagcatcaagataattaaaccaagcttcatcatcaccctttaatgataatgcgaaatatctcaaggatatactactagctgacttactcatcattagtgaacagggtagctatatcattcaaattattaagacttgccacaacactttcagattcataggctttaacaggatcagattca

SEQ ID NO: 448014 - DNA, 160 bp, Triticum aestivum
agcttggtaatgatcgttagtttgtttcaaaatgttgtgatttaagacatcagggcctctggacttaccttcctctctgatgctacttctttcagtctcctcactgttgactagcggatcgtgcgtcgggttgcattcggagctgaagtgtgcttgcgag

SEQ ID NO: 448015 - DNA, 229 bp, Triticum aestivum
agctttgttgatgcttttgtcgtcaatacacatcctccactagttggtcttcttccacactaggacctgatttgctaaccattctagaaaaaacacctccataatgaagtcggctgccaggagtcgggctatctcttccccaacaaatcttctcttctcttctaacaggcggcgcaagggctgcctgacgggtttcacttcagatcggacatgtaacttgtgctcggcg

SEQ ID NO: 448016 - DNA, 115 bp, Triticum aestivum
agctttcccagatatgtgctcaagaaaactactacctgtttttctaaatactagacgtttgggtacttcaaattgaactgcgaaaacgtcttatattaaggaacaaagggtgtag

SEQ ID NO: 448017 - DNA, 404 bp, Triticum aestivum
agcttgtgcccgacgtgctgcttgcggatggaaatatagtaaccatagagaaaccgtttgaattacaagcatgcatctctttctaatgtctttatgcgtacgtcagcataagacttcatttaaatcatcatcgcactggcatacgtgcacgcatgcatgctgctgcatggaccgactgatatggacacgaaccgtcaattacatgtggtatatattaattcaaaatgcccataaatggtcactcacctgtctaccggtatgaatgcactcacgcacctacaaacaatccttgcacatcatacaaggtatgtggatacgtattagcctcataacttagaactgtgggactgaaatgtactagcgtcacgcatgctgggattcttcttctagagcgacttatgtca

SEQ ID NO: 448018 - DNA, 396 bp, Triticum aestivum
agcttgtgcccgacgtgcttcttgcggatggaaatatagtaaccatagagaaaccgattgaattacaagcatgcatctctttctaatgtctatatgtgtccgtcagcataagacttcatttaaatcatcatcgtgacggcgtacgtgcacgcatgcatgctgctgcatggaccgaatgatatggacacgaaccgtcaattacatgtggtatatattaattaaaaatgcccataaattgtcctcacctgcctaccggtatgaatgcactgacgcacctacaaacaattccttcacatcatacaaggtgtttggatactgtttaatctcataacttaaaactgtgggactaaaatttactagcctcatccatgcttggattcaaatactaaagcgact

SEQ ID NO: 448019 - DNA, 120 bp, Triticum aestivum
agctaattccatctttatttaccattgcagagccaagcgcaaagatacgcctaattcgaaaactggacagcacaaaccacactaacacaaacaaagagactgctatacttcaaataaaac

SEQ ID NO: 448020 - DNA, 378 bp, Triticum aestivum
agcttgttgaaggagttttcatggcatgtagtgtttcccttgcgtgtgaataagaaacctgcccacctgttctgctgccgaaattttcggcgaattgccacgacttgtcaaaattttggccttgtttgtaagaaaaatgaaaactttagggggtttcatgcaagaaaattgaccttatttgtaagaagaagaaaataatagcgtgttcaatgcaaaaaaactttttccttgtcttgcctctaggactaattcaagtgttgttggtgatcatattttttgaattttaggatatcgttaagcataacgatcctaaaacaatattgagagtatgacgttgggcgtacctggatatttctacaaaattctaccgtgggattt

SEQ ID NO: 448021 - DNA, 261 bp, Triticum aestivum
tagcttgaagattagatttccaatctgaaagcttatctcgactggtccgtctagtcatgtcagccgtctgaataatgacacgatacatctgagtgacaaggctagtcaactgctaccgaagaagaactacctgcaggtctatctgaatgggcttgccaagaagttgttcatcatgcttgagcgtaatctctcccacccgacttacttcttatcttctactcagcgtagaactactgctatatcttcgacttgattttacaa

SEQ ID NO: 448022 - DNA, 300 bp, Triticum aestivum
agctttttcctactccttttaagtctcctggtatgagtcggccacgtgcagggggttttgtctgaaacggcgaacgaaacggcggcaactaggtggcttgttatctaagcttctttcccaaccggggaagagaagaaaaggaaggccttccaaactttgtatgcctcatggtccaagaagggaaggacccttccttcagactacttcaccaacaccaactattgcaaacatgagagatcctctagagccaaaccccttactagatcataattttcctgactctattataactcatgtttt

SEQ ID NO: 448023 - DNA, 425 bp, Triticum aestivum
agcttcatccgactcctgtcaagccgcctggtaggagtcggccacgtccagtcggatttgtctgaaacttcgaacgaaacggcggcaactaggtggcgtgttagctaagcttcttccccaacggtggaagagaagaaaaggaaggcctcccaaactggggaggccggagggtccaagacgggaaggacccttcctccagactactccaccaacgccgacgatggcatagaggagtggccctcgagggccaagcccctggcgagatcgtatgtgtccggactccataataactcatgatttctctattgtcgcatagtgtcttctaacgccgaatacaaccctgtagcccgcccaaggacgatctccccgcttcattgagcgggtccctgggttcgttggatgtgaatagtacttcacttccgacc

SEQ ID NO: 448024 - DNA, 406 bp, Triticum aestivum
agctgctctgtatatagaatttcccttgatgggccacagagttcggctggttatatgacagatcgttcggggcagatactccaggtcttcaaccaagaattcaaatgagcaaaacacaattagaaacttacattgttcgttcaaaccagcgcacacatatgtgtactatatacatatctgagtccgtaagatattcgactgatttagacatggccgaagtaaccatgcttagaattaaggtcatttaccctacctgtgtagctctttatagcacgttttcatgttaaatttcgaaaacctcaccacaggtacattttgtagtgactaatatggatccagacttaagacatcatgttgatgtataagacttgccgaaatcttgatacacattaggtttgactagaat

SEQ ID NO: 448025 - DNA, 281 bp, Triticum aestivum
agtcagacacgtggagtgaggttattataaaacgtccggcgcaactactggaactattcaacatataatctaaactatctacacaaaattagaaagaaacgaaaaggagaggtcaccaaaacacacaaggccgtatgtaccataaatgtaaagacccgttattcagactacttaaacaacgccgactataccatacttaaaagaaccgttatgtacaataccttggcaacaacgtatatcaccctactacataataactcatgacttcaccatagtctcat

SEQ ID NO: 448026 - DNA, 259 bp, Triticum aestivum
agcttgattagttcgaattttattttttcgaaatcatcgacacagtccgtctggataacaacgatatcatcctagacacatactacagaatccgatgcaccatcacatcattccatatttacgagttcaaaaccctactcgatcatatcaaccattattatgtttataaagcaaactgtgtctgctgcgcctatgtactgtactatatcatgacctaactccaatgaaccttttctactgtattctgcccttcctaatt

SEQ ID NO: 448027 - DNA, 412 bp, Triticum aestivum
agcttcggagttacactttcgtacgatatgttcctgttcatgctcaggttcacatcgtctaataacaccatctactccttctttataaagatgcgggtcatcccaaaagtaatgtctcaaatcattgaagaactttttcttttgctggtatgtgaaactaggtggtataaatttagcaacaatgtaattagcataatcagcataccatggagcagtatgacaatcatttatgacatttaattgttcatcgggaaagctgtcatcaataggtagtgggtcatcaagcacattttctaacctagacaagttgtctgcaacggtgttctcagctccctttccatcaacaatatgtaagtcaaattcttgtagcaagagaacccatctaataagtctaggtttagcatctttcttt

SEQ ID NO: 448028 - DNA, 156 bp, Triticum aestivum
ttaagctaatttagttttgattttgatttttcgacatagctgaaacccccggactgatagattactattacagcaggttcatgtcctaatgattcctctccagtatcactctctagctcaatttttatttctactagtacttttaacaatactatg

SEQ ID NO: 448029 - DNA, 158 bp, Triticum aestivum
agcttgtctgacttagttcgtgtcaagggatatcttttgtgtgtgtgtgtgtgtgttgaagaaagataatatcttcatcgattggtcctcgtgatcagttgttggaactattgtcttggccaaactttgatttgagtgtgggatattcttaaatcaat

SEQ ID NO: 448030 - DNA, 407 bp, Triticum aestivum
ttcttacatgtgatatggctaacatccggatcgcaatcttatgggcttggttattctacgagttcctacaggaaacagaccgacctggtcaggttgaacgagctgcggcatgctcaacaacctatccgagttggtcaagcgactgctaatgcgcgacgccctcacacgttcgtagtcagatcgtcaaagcacatttcgtgcagaacgatagcgcccatctcatcgaaggacacgacacctgagcctctatcaagtggtatacgacttccaggatgctcgagtggacactatagtgcctcatagtttagatcaagactgttcttcatacctacagtccacgaaaaagccaacaaattagggttagttcatcatatgcaaaccagcctgaacctttgcataagcttttt

SEQ ID NO: 448031 - DNA, 414 bp, Triticum aestivum
agcttttacagcattacctctacaacctggtaagcatgcgacgggagtgctccgttaatcggcacctacggccatcagtagatagccactacgagtagagcgggcagaacgtgcctgcacgtctgtacatacatagtcttgtgagtcacacgagcgactcatctgatcatagactgaactgctgtttatgtcgtttaccgtgagcccattaaagctgatgctaagaaacaactgtaaatgcgtcaagctatcatcgcatttaggatggtatgtaaaatgtaatggatcctgtacatatcatatggtatatcataactgttgccgaaacgtactactaaccaggatacaatactcagagcgtaacgctatcacttgcaatctaactcgaacgttcacatatttggtataaaacaa

SEQ ID NO: 448032 - DNA, 127 bp, Triticum aestivum
agctttaatttctccctacatggctttgaactaggctccaaagagtcgttagtgctcccagtatcaggttccatgatacaaacgggcatgatagagcccctgatcaactgtgtctaaagggtgcctg

SEQ ID NO: 448033 - DNA, 150 bp, Triticum aestivum
ttatatgaaccatggattaccaatactgccactactttacacataaataccaatccagaaactaacctaataacaacaggcccaacccatttatcttatatatcctatttcatcattctaaagaaaacgaatttcaaaaccacttcaaat

SEQ ID NO: 448034 - DNA, 189 bp, Triticum aestivum
agctttttaaacatatgaactttgttcaagtttatgtttttattgtgaattcctaaagttttgggtggaatgggaattgctattctttctacttctcgaggaataatgacagatcgagaagctcgactaaacagaattgggggagaagtcttatgttatatatggtaatcgccccgcctatagtgctcg

SEQ ID NO: 448035 - DNA, 203 bp, Triticum aestivum
gcgtcgataagcttgttaaacataggaactttgttcacgtatatgtaattattgtgaagtccgaaactattggatggcctgggaatggcgattatgggcactactcgaggcataatgaccgatcgagaagctcgactaaacagactaggcggagacggcatatgttctatatggcaatcgccccgtctatagtgctggaatat

SEQ ID NO: 448036 - DNA, 317 bp, Triticum aestivum
cacaagacccacgtcgagcgcgatgcttacctcatacgctcgcagagcaccacaaagatccaacgacgcacctgacacgacaccagcaacatgcctgtcacaaacacataaatatcgacctacgactgtcataatcgaactagggctagaatctaccacatcataattactgatgaccaacagtgtgaccaactacaaactgtgcccatatcacagtacacggcaatcgaacgatttaacacacacacttcacagatgttagcacactacacccacaccacataacccgtgcctcgtactcccaataacgtggacca

SEQ ID NO: 448037 - DNA, 345 bp, Triticum aestivum
ttaagctttgcttttcttgattcctttggtaatgggatcgctgagatcctcgagacgcacaatttactacaacaacaggtgcagttacaggtaatgcgatgttctgactcgagtgcgatgcttgcttgtttggagttcttctgcttcttcttatttgatcaaggtataggtttcggatctggtgagcttgagattatcaatgtggatgtcgttctttttttctgttgatttcatacttattcagatcctgctcttctatattatgatatgtatgtattgtattaaactgttttattaattatattaacttgtattcaattttaatctcattaattttgtattcta

SEQ ID NO: 448038 - DNA, 127 bp, Triticum aestivum
agcttagctcatcggttgaagtcatgctttgggaagaaagaccatgtggcacagtctagaaaattaggacgactatgttatagctgatcaagctaggattgatgtggtggagtctcattcctatggg

SEQ ID NO: 448039 - DNA, 199 bp, Triticum aestivum
agcttagctcatcggatgtagttatgccctgccaagaaagcccctgtgtcacgccctaaaacactaggacgactatgttatccctgatcaagctagcattgaacaggtgcaatcacaatcctatgctaacttctacagcccagccgatccacatcttctagagctcacctcaccgaatacgaacatcatctagagcaac

SEQ ID NO: 448040 - DNA, 382 bp, Triticum aestivum
agcttgatctcttgtgtctccttaattcctaaatcttaaaaacttcatccacacaaaactcgacaagaactcgtgagataagttagtataaatcaatgcaaaaaccttatcattctctattttagcaaatcactaaaattgttatttaacattgtgtactaaatgcctctgcatatttaatacttacatccccaaatagaatcattaaacaagcaaacatttgcaaacaatgccaacgtaacagcaatttgtctaaacagaatagtctgtaaagaatgcaagaggattcatacttctctaactccaaaaattctggaaaattaccacactgtagaaaatttgttttagattatggtgtaaaacattcatgattttatcatgt

SEQ ID NO: 448041 - DNA, 258 bp, Triticum aestivum
aacgggccattggtttttttctgaggctgatggcactgacaagtccgcctaattcagaactcaagacaaagcccacacagccaccgcaagggtggacatcatctcacggtattcgatacgtgtccacgcttatcatctgatgtacaacgatagactgagaagtctaatcaaatattagaggttgagaaggtccacgctacacagatcaactgcagttgctcacagcgtatagaaccctcgagtgtttcccggatttat

SEQ ID NO: 448042 - DNA, 450 bp, Triticum aestivum
gggcatcgggtttttttctgaggctgatggcactgacaagtcctggcacataccgaccttttacgcgctaagcactcccgcccgtagagcgtccgggatccaacaccacccattgcaactccgatcatcacttggcgtaacgtaggttattacaagctaacccgaactggagaccgtcgattcaaagaattgttcggtagtttaggagaccgaaacctaaaaggtcaatcttaaacccgaaccttcgtagtttgggggacttatcaacctcagagtggttgttattgtggcggagtcttagtccccgccattcccagcgaaggccaaccctgagtccggtgcaactacggctacagtcgtccttcgcgcgaaaccgtcacatgtctataaccttatataatacatgaattcgaagtacaaagcgccaagttcggcgcgttcaacgagcga

SEQ ID NO: 448043 - DNA, 133 bp, Triticum aestivum
agcttgacatatagattttaattttcaagcacatgacacgtatacaggagaggttgcttacactactatgcatgaaaagcattttgcccatatagagcgttatataacatgtatgcatggctagcattcactg

SEQ ID NO: 448044 - DNA, 380 bp, Triticum aestivum
ggtgaaccgggcattgggtttttttctgaggctgatggcactgacaagtcccagtcggtacactacgagggggacgccccaactgcgtcctaccgcggtcccagggacggacaaaaagggcggagtggacataacgcttagttttgtcgttggaggaattggttggattctcctcgatgaagacgtcggctttcgtattccataaggtgtttaagaaggaggttcttaagtaggctaagaagatttggagcggttcttaccgctgtgaggtcttggatattaggcttgaaggtcttagtgatgtcttcctcctcgaagataaagaggaggaggtagaggaggacgagttctgtctcgtacgtggaaaagagtgcgtagtc

SEQ ID NO: 448045 - DNA, 159 bp, Triticum aestivum
taccgtgatcgacgtcagtagtataggagaaggcttgtgacggttccaaagtcgataccaagtctgaatcctcagggtacgattccgtttacccggttatttccgcgaataaagttaccaaagctcaaatctggtcggaagaacattaaagactctata

SEQ ID NO: 448046 - DNA, 170 bp, Triticum aestivum
  unsure (1)..(170): unsure at all n locations
ctgagctgtggcactgacaagtccccctatacacgccctcgatagattctaccgaaatacgganctgcccacctccttcaaacgtccggctaataaatacgacagaacttataccctccccacagggcaaacataccccacccgaagatacccccccacgttctactatc

SEQ ID NO: 448047 - DNA, 455 bp, Triticum aestivum
gtgaaccgggcattgggtttttttctgaggctgatggcactgacaagtccttaaaacgtcacgggaatttgctctcttcctagtattgtcccttatttctagctaagcggctaagcggaatgtgctaattaaacctcagaagatacgtcctgagttcttgccactctccctgaaacggatcgggagaagcgttccttacccgttgaaccttcgtagtttgggggacttatcagcctcagagtggttgttattgtggcggagtcttagtccccgcctttcccagcgagggccaaccctgagtccggtgcaactacggctacagtcgcccttcgcgcgaaaccgccacttgtctataaccttatataatacatgagttggaagtacaaagcgcaaagttcggggcgttcaacgagcgagtcaatctataccaaccgtgccgtgtctatcgtttgtcc

SEQ ID NO: 448048 - DNA, 348 bp, Triticum aestivum
cgacccacgcgtccgattacacgtcctccctcacgttcgacttctctttacgcaaagacgctgacaagaccaggctgtgtccatacgcaaccgtgcatgtcattaccaatgcctatctaacatatactcattcaatcatactttgccaactactcacacaacctgtatcatactacattaaaccatgatttaccatcacactctaacgatcatagcaaaacatcatggatataatactatcggtatatctcatccacagtgaacagagttactctatcatacactttattatcatacagctacaacagtgataacactcatactcatgacctggatcatactcaacca

SEQ ID NO: 448049 - DNA, 427 bp, Triticum aestivum
ttctgagctgaggcactgacaagtcccgtcgacgacaccatgtccaatgtttacatcacgtttatgcggcggccagcgtcactaggttagaggttttctggactaaacacttaaactgcagcggaccaggaacgtgtggcaataagtagagatctatgaaagacgcgattttgccgttttgctctgagcatccgcggtaagggtcaagaacgtttggttatattccgcagccactctgtgggtattccttaggctaatttgatcttatactatctgtcaccaagtctgtgtgggcattttctagggctgatttgctcccagcaatacggtctagcgtaaagctacagcaattacagcaatcgcgcgctcaatattaaggagaaaatttgaggaactattttcggcgaaccttcgtactttgggggac

SEQ ID NO: 448050 - DNA, 91 bp, Triticum aestivum
cccttatgcgaacgtttccaaacaccatatgtcaagcccttaaactcatttactttactcactatatatataatctacataccccttatct

SEQ ID NO: 448051 - DNA, 343 bp, Triticum aestivum
gaccgttgcgaccggccaaaacacgttcgcattgcattagataatgacgctttaagcctatatctccatcatacccacttaaactcacatcactagctctactcaaatagtgtgcgcgtaccgcattttacaccagctcgctccgaacggccctcaagagtatgataacctccgacggccataaatagtaacgtctgcatgctaaaccttcttcgcccgcgtctaccctatatatacataatcaccacactttaaatcacaaaagcctcctaatcaatggttccacgcatatactaacgcttccttcgggccgtccaaggctccggatgagtatcgatactac

SEQ ID NO: 448052 - DNA, 453 bp, Triticum aestivum
gggcttgggtttttttctgagctgatggcactgacaagtccgacttctaacaaatcgaagcaaatctttcacatactactcgcgagaccccagaaaccgaaccttcgtagtttgggggacttatcagcctcagagtggttgttattgtggcggagtcttagtccccgcctttcccagcgagggccaaccctgagtccggtgcatctacggctacagtcgcccttcgcgcgaaaccgccacttgtctataaccttatataatacatgacttggaagtacaaagcgcaaagttcggggcgttcaacgagcgagtcaatctataccaaccgtgccgtgtctatcgattgtcccttagctgggaaattcgctgcgttagtcgtaccaacgaactgggtaatgtgtgccgagaggtggcccgtgcaccgggtgtctccatgtccgtcagtctatcgat

SEQ ID NO: 448053 - DNA, 461 bp, Triticum aestivum
gtgaaccgggcattgggtttttttctgaggctgatggcactgacaagtcccccacatccgcgttcctaagaaccaaaacattcttcgcgtggttaccaacgcacacgcgcacacaattcgaaagacggtagctcctggtcctagtttttatgtacacaacgtaggggcgcccgtaaaaggtatacccctatatccgacttaatgctccggcttcacaaaggaggcggcagtgtggcaaatcaggtgattggatcacaacgtcccactatccctatccagttacaggagcccgatagcggggtcatcacacagttttcaggggtattgtgtctattcgaaccttcgtagtttgggggacttatcagcctcagagtggttgttattgtggcggagtcttagtccccgcctttcccagcgagggccaaccctgagtccggtgcaactacgggtacagtcgccct

SEQ ID NO: 448054 - DNA, 346 bp, Triticum aestivum
gaaccgggcattgggtttttttctgaggctgatggcactgacaagtcctccttggcgactccttctattcccgaaacgaccgttccctccctccaaaggacgttcggctggaagtagataatgacgctttaagcatatatctcctccatacccacttaaacacacatccctagctctactcaaatagcgtgcgcgtaccgcattttccaccagctcgctccgaacggccatcaagagtaggataaccaccgacggccataaatagtaacgtctgcaggctaaaccttcttcggccgtgtctaccttatatatacataatccccacactttaaatcacaaaagcctc

SEQ ID NO: 448055 - DNA, 449 bp, Triticum aestivum
gggcattgggtttttttctgaggctgatggcactgacaagtccgttccttatgttaacgaaagctttacttgaatatgggataaagctcctaactccgtactcctacagctctggagcctagctgacgacgacagcttggttgacgacagcctggttgacgacggccgcttgctcacttggatatttttcaacttgcgatctttctatttcgtactatccatatgtttgttgccggtagcgttctgataccacttgagtctgacgttactatccgcaatcaagttctcaggttgacgatcctactcatccgttcccgatcaggtaccttcgatgttacatacgcccctgtagggcgtcgttgatgccttacatatctcgtcatatcccgcgggaggtgagccgactgacgctattaaaggtagaaccgcctaattcggtaattttgcgc

SEQ ID NO: 448056 - DNA, 453 bp, Triticum aestivum
gggcttgggtttttttctgagctgatggcactgacaagtcctttaagactcccgcctgtaaaactagtattaagagagtagataagagtactagtagtacatcgagaagagtcgataaggacaacactactgatacacattaaaagacatacagcgatcctcggtcctcgcagaagaaacaataaagcgctagtagcagatggtataaatttacgagtatgaagggtagaggtaaggtgggtacgttaggtatgaggagtccgtcctaaattacacagcgtcccggaaagatgatagacacagctaggatgactaggactagagaaattaggtggtcaccctacacaaattctccttcttaaaaacttacgcagaaaagtacctcgtatactaagccgatgaagcgattaattatgagaaataataacggagagaagaagttgaacagcggca

SEQ ID NO: 448057 - DNA, 264 bp, Triticum aestivum
attcctttacttaggtgttaattacgagctttgctttatgatgtttctagctggtttattgaccttatttgttattatgttttatatttttttctttttcaattctcttaatcttttatcttgtcttttcttttgtactaatttctttctttctttgtgttctttttttttgatttttttattttcgtttttttttacttattttttatttattttttttgtattttcttttattcttttcctgttttttttctttcttatttt

SEQ ID NO: 448058 - DNA, 466 bp, Triticum aestivum
aggtgaaccgggcattgggtttttttctgaggctgatggcactgacaagtccggtgttcaacagatatgttggatagttctcgcgtatgctccacgaaagttaggcatcatttcctgggataatcgccggacatgctgcctctaggtaatggcctcctagcgcggaagggcactccatacggctctgagtcgtcgaagagaggcgccacccggagggccggtaacggagtcgacatctgtatacggagagattttcggactttctggttgctgatgccctgtttcactatattcaagggcaaccgctggtcgaattgggcggtggaccccactgacgataatggcgtccggtgcgccgactgttcatgggaaccttcgtagtttgtgggacttatcagcctcagagtggttgctattgtggcggagtcttagtccccgcctttcccagcgagggccaaccctgagt

SEQ ID NO: 448059 - DNA, 159 bp, Triticum aestivum
tgggtttctttctgaggctgatggcactgacaagtccccctttgacgcgccctccgcccacggaaacacagcaattacaggtaaagcgccctaaccataagtacctactctacatcaaccgtcccacgtgcatgctaatacaagatcctacccaaacta

SEQ ID NO: 448060 - DNA, 291 bp, Triticum aestivum
tcataaagctttgcctgaccctcgaggggcttggaggcttcgggggccggggtattacgcttaacatagttgtacgggtcgcacggggtgtttcagttccaacggcttaggggtattagtttttttaaggtttacgtgtacgcgagaggggaaatttcaagggggagggttcgtatctgatccgtgaggtatcttcttaatccggatgatgttcttcatttcatacgagactcacgcgggtcgcactatctcctatgcagtcatatacagcggacgggcgtcagggtactt

SEQ ID NO: 448061 - DNA, 276 bp, Triticum aestivum
agcttttatcttccaattctcttagttgtagtctaacttaaccaactagctcggggatatccaacacagattcttggagaaggatggttcacaagaaaccaacttgatcacgagctcaacataacagtcaggggacaacctggtaatacttccgagaagatattccgaaaatcacgaaccaccggtatgttactaagctcgagaacaatctctctcttgagggcaagacgatatgatcaaataagtgaggacttgacatgatcctaactcatcaat

SEQ ID NO: 448062 - DNA, 151 bp, Triticum aestivum
acaaacgtatccaacagcctcgtttctattcaacacaggctcgtcaacaatgatacttcacaagaaaccaactgtatcactaactcaacataccagacatatgacaaccccttaatacttaccataacatatcacacacatcactaaccac

SEQ ID NO: 448063 - DNA, 460 bp, Triticum aestivum
gaaccgggcattgggtttttttctgaggctgatggcactgacaagtcctcagaaggccttgcacgaccttggaggggcttggaggctcggaaaccgccttattacgcttaacatagtagtacgggtcgcagggggtgtttcagttccaacggcttaggggtattagtttttttaaggtttacgtgtacgggagaggggaaatttcaagggggagggttcttatccgatccgggaggtatcttctttttccggttgttgcttttaatttcagacgagactcaggggcgtcgctttttctcttttgtattcataaacagcggaggggcgggagggtaattgtatttaagcctcggtgtattttcattttctcattaagcatcttcttctctttgtggcgtccggtgaagtttcgtaggaccgttatgtcttcttactattattatgttgccgcgtcgtcgtc

SEQ ID NO: 448064 - DNA, 457 bp, Triticum aestivum
cgggcattgggtttttttctgaggctgatggcactgacaagtcctacttgatcttcgctaagttgttcggcaggagctggttatgctgagctggacccgctcgaaatcctgaatgaaatggtgggaatcaggcggtgcgccagtcaagtcctccttttaatgggggaagagaagaaaaggaaggttctttaaatcggggaggttggagggcttaagaagggaaggatttccttcttagatcatcttattaatgttgatgacggtaaagaggagcggtttctgagggttaagttttcggtgagactgcaagcgcttggatcttacaacaatctacgaccctctccccgctgtacagcgctcctcaatgttgaacataatttcgcagtttgtttaaggatgactcttttgtcctaccgagtgggctttcgggcctgccggacgcgaacagcatcctatc

SEQ ID NO: 448065 - DNA, 315 bp, Triticum aestivum
agctttgttgtgagactatagggtcttcttaagaagagtttctttgatgaaaagggcgtagccatgacggcaagtcaacgtggggacctgtgaaggaaagccttgtgtatgtcagcatgattacgagagaaaggtaatgacctttgacaatagccttccgtagcacacactgcaatgacttcgaccaggagaccagcctgtccaataccccaagccatgaccttagaagttcataccccatgatattcaatgacacccatagacatttgatcattgataactcacattacgatttctttccttttttggactttg

SEQ ID NO: 448066 - DNA, 283 bp, Triticum aestivum
agcttattctctaaattatagattcgtaagaaacatgtacaaaataggatcagagtgctataaaattacatatattctcgtatatgcacacgcctcttagaatggagttgacactattgtcttggacaaactttgatttgtattatggatattctaaaattaatttaaaaccaaccgattttcgtaatgttgtcttactttaagtttatttcttggtcataccccattacatcctttggttttacccattctttcactttttttacattatttttgaatttct

SEQ ID NO: 448067 - DNA, 397 bp, Triticum aestivum
ctgaggctgatggcactgacaagtccgccggagcctgcgccactaccgattccatacctacgcatatacgcccgggcagctagcgcctatatccgcgtaccgcacgacttacgtccatacgcacctcaccttccctcctcagcgcgcccaaaaaatcccgggaaaattatccaaatcggccgtattcagcgcatcactcacgtacgtccagcagcagcaccacaaataaaaccttatcagacccttcagccgcctcgatgtccgacgagagtccgtatgcgcgaatcggaccaatctgaccacgtccgtataccccacccatatgccacagaatactccaactcgtatacacaccacaccgcgggctctccttacgcgctcctacgccaccacaact

SEQ ID NO: 448068 - DNA, 467 bp, Triticum aestivum
aggtgaaccgggcattgggtttttttctgaggctgatggcactgacaagtccaacctttgtctacttctgagccgggaaacgacaaaaatagaacccccgacgcggaacgtcattcaacacaacctctaacgcaacccctcccaccgtggtacgaacgcctacacttaaacgacctaaaacaaaagcctacaccgataaaagaaacagcaacatcccaagtacaccaacaaaaataactacgctcctctaaaacaatacggtcaaagaaagcctactttcataaaactacacagccaggtcacgtcctacccctgctatataaaaacgcctttaaacctcatatttctgacgataagttaagtagccgccctgcatccaaacaactctaaatccccctaatccctatgtaacatacgagtgcgagttacggacacagtatcacgggcggaacagaacacgacgacgg

SEQ ID NO: 448069 - DNA, 458 bp, Triticum aestivum
tgaaccgggcattgggtttttttctgaggctgatggcactgacaagtcccttaaaaaaagcacctatttagcttggacgtaaaagccttaagtgcccgaagctggcacgctcgcgcagcttgagcccgagcttagaacgcgggggacccgcctcgcaatcctctccgagttaaaagcgtgtaggaggatcccccggaaaatattcaactaccctaccccttccccgctcctatatgcgtcccgcataagcgcttaacaacctcgcaaccaggtacgaaacaaaaacagacgaagcatccccgcctcggacgaatctaacaaccaccgtacacccccaccagaaactattctataaaccaacacggatacacgcaacacccccggctgcacttacggcaattacgcttctactagtcgattccttaacgggtccggcgacggctcacggcggcaccata

SEQ ID NO: 448070 - DNA, 379 bp, Triticum aestivum
ggcattgggtttttttctgaggctgatggcactgacaagtccaacacagagtcgacccctaggtcgtgatactgcagacattgggcgggcgagggaatatgacaatcatctacgtaccgttctacatacctatcgatagtagtactgtcgtatacacgtataagtacgataagagtaagctaatactgttagtatagatgttagaagtcctagtatctgtagaaaattaactcatatctgccatagcattgcgttccaagcgggtacaatctcatgacggttcataagaatacgtcggagtgtattacgactaggcgggagaactatacgcgtgacattcggacagaacgaattaagtatgcgcgacttatcatcccca

SEQ ID NO: 448071 - DNA, 94 bp, Triticum aestivum
agctttgctgcaggatttagctttcgacaggccatagagttctcctgatgaggtaataaatggtgcgggcagataatctaggtcattaacaaag

SEQ ID NO: 448072 - DNA, 416 bp, Triticum aestivum
agctttgctagtcttgttacctatggtaatgggattgctgagtcctcgtggcgtcacaatttactacaacaacagttgcagttacaggtaatgcgatgttctgacgcgagtgcgatgcttgcttgtttggagttcttctgcttcttcttctttgatcaagggataggtttcgggtctggggagcttgggattagcagggtggatgtcgttcttcttttcgtttgatttcatacgtagtcagatcctgctcttctgtatgatgattgctatgtattgatgaactgttgtatgaatgatgtaacttgtggcgagtgtaagcctttatcttgtattctcgtctattcagtacatggtatgttgtaaagatatccaccttgctatgcgctctaaatgtggttgtgtcccaatcatgaatt

SEQ ID NO: 448073 - DNA, 344 bp, Triticum aestivum
agctttacgggatactttacattaagagctcgatgacacgtctaacgagttggtgaaaaccgactactgcaccagttgtagagccagctaaagcgatgttcagacgcaagtgcgatgcttgctagtttggagtacttctgatccttcttctttgatcaagggataggtttcgggtctggggagcttgggattagcagggtggatgtcgttcttcttttcgtgtgatttcatacgtagtcagatcctgctcttctgtatgatgattgctatgtattgatgaactgttgtatgaataatgtaacttgtgtcgagtgtaagcctttatcttgaattctcggctattt

SEQ ID NO: 448074 - DNA, 433 bp, Triticum aestivum
aaccgggcattgggtttttttctgaggctgatggcactgacaagtccttgtacgcgtcccgacccgcacgtcacgaccgccgggctacgagatttacgcccgcaacactctgtcttctggagttcaacgaacaaacatcccgagctgcagagccacgccgcgacgttacgccgcacccatatacactgagtacaccgcgcgcacgaccgaaacgtccgtcacgcgcgggacttgataactcagccgcccacttccggtagttctctccacggggaaacgcagctcagcgtccttacgagttacagcagcttatcatagtttggcctattggagcttcgtcagtttagtatcatcgtctaggatatccgatcggttggtacgcgccctatcctaccttcacgctcgctttcctggggaaacgctatgtggcgat

SEQ ID NO: 448075 - DNA, 324 bp, Triticum aestivum
acaagtcgcccggtacccgatcacatcactaccgcggagatacgtggtttaggtcaccgacacattgtcctgagcacttcaacgaacaaacatccagagctgaatagcaattatacgtcgttacgcagcacccatatacactgagtacactacgtacacgaccgaaacgtcagtcacgcgcgggacttgataactcacatgacacatccgctagttctctcaacagggaaacgcaactcagcgtccatacgacttacatcaagttatcataatttagcctaattgagcttcgtcagtttaatatcatcgtctaagatatcagat

SEQ ID NO: 448076 - DNA, 459 bp, Triticum aestivum
gtgaaccgggcattgggtttttttctgaggctgatggcactgacaagtcctcggctcactccatcacaagtcagcggcgaacatacggcaccgtttatcacctagtcgtcatgggccgtctcgactcttgaatcgtcgtcatcgaccatccgtggaccacatttcttccggccattaggacggtttcgattgcggaacttcttcttattcaagttggtatttgggttccggaaattgctcctattcaagttattattcgagctgcgattcttactaaatgtacccgaactccaaatgctcctacgactgcataactccctgataggcgggcggttggtcctctttcggcgttgagtcccggataaggtctacctaacaaccgtctaatggcgggattcgatttgattgattgacgggtcgatcgtttccgcgttaccgacccctgtttcgcgtaccggc

SEQ ID NO: 448077 - DNA, 432 bp, Triticum aestivum
ctgaggctgatggcactgacaagtcccctcttcacaccccccacatttggaccgtaactacagggctgggtataccttacgcgtcttcataggaaatagattcctaatggtaggcctagtgcatctgggtacggctaataattcgctgatgacgacggattgactgtcaaagtgtcatcttactcaatgctctgtgctggactggtaaattagacccatcctaaaatgacagttattactcaaccgaacgatatgatattcaagttcacattaagcgacacatgactaataggctgacaggcaagacgttacagccccctacagcgtagactaaggtataatgtctacattcataacctatgaaaaacttaattcaccatggttagtttactacacgtacattacctcgaattcgagtacagattccccaac

SEQ ID NO: 448078 - DNA, 95 bp, Triticum aestivum
agctttgctgcaggagaatgtcctttgacaggccatagagttctcctgatgatataataaatggtgcgggcagataatctaggtcattaacaaag

SEQ ID NO: 448079 - DNA, 456 bp, Triticum aestivum
accgggcattgggtttttttctgaggctgatggcactgacaagtcctagtcggttgtttcttttaattcggcaagtgcgtggttggagcagcttggcaactggtattcttgcttactcgcagacagttatcatgagcagagtgggtagaatgcgttcgtgtgctcgcatacatacagctccgcgagctatgtgagggaccgactcgacgacagatcgaatcgtcgcccacgctgctcatggcgcgtttaccaaagtcgacgtgaagaaataatcgcaaacgtgctgcgtccttcttgtactcgggacggcacgcaaaacgcaacggtcttcgcatacaatagccggcgcccgtgaagccccgttgtacggcgtcatgacttcggccataacctctagcgtggactgtccctttccggtacgcgatgtggttgggtattgtcgcggcactaaataat

SEQ ID NO: 448080 - DNA, 409 bp, Triticum aestivum
agcttctcatcatcattttagttatatataatcaacactgactaatgtgttcggaatacttaggacctactcctctctcctaggtaaaataccatataacagataaaccggtccttctccataatggagaatggacataaatctatatccaacttgtggcttgcgcacattcattttgtctccaattatttgtgtgtgcgcattcatcactttgctccattctttgattttgattcttccatcatttgaagaaatcgagtatgcagtatggtaagccttcgaaggtgttggtcgtaagctatccatatgcatttcaccttcggtaaaaagcatgtcaagcacaacctgctttgtgagccctttgtcaaaaatgtaatagttacatatatagttagcaatgtagtttact

SEQ ID NO: 448081 - DNA, 440 bp, Triticum aestivum
cgggcattgggtttttttctgaggctgatggcactgacaagtccggggacgtccgacatgctcttaatgcactcacaaccccccaccgtcctacgtcacaccacacctcgcccccgacgaccaacgggtcccgccacgtatccccacaccaccccccgggatcaattcaccaattggaggtttagtttaaaccgccgccccccccgttcaccctagcgccctgtagaaaaagaacactaaatggagcttaaatagaacaaaattcctgggaatgcgacctctggaataaatgcgacttaaaggatccggagcttacgcaaagtaactaatgaggagagtatgaggtcgggggtgtgttcatttgttaagtatgtctcatatttctgcggggtttatgccgtcttattaatgcatcctccttcttcacacacattcatgca

SEQ ID NO: 448082 - DNA, 453 bp, Triticum aestivum
ggcattgggtttttttctgaggctgatggcactgacaagtccttcagtcctcaccctcttatgatcaagcttcagtctgaggatactcgttgcgataaccttatgatagccggtgtttattgcggggtcagtgtatagcggacccgagcctccgaagggtagtcctgaagggtctaagggacatgtcgcgggttggacgattaagggctgctatggtaagtctcatactgatgacgtaaatcggggttttgatgttggtctaaccgagcatgggcattgggcttttcctggtggaaccttcgtagtttgggggacttatcagcctcagagtggttgttattgtcgcggagtcttagtccccgcctttcccagcgagggccaaccctgagtccggtgcaactacggctacaatcggccttcgcgcgaaaccgccacttgtctataaccttatat

SEQ ID NO: 448083 - DNA, 295 bp, Triticum aestivum
acctgaacgggcatatggtttgatgctgagctgatggcactgacaactcatccggtaactctaccaagtcaatggcgaacatacagcgtcatgggtcacacaatagtcgggtgccggcaatgatccataattgtcggcctagatcatccgaggaccacatatacgttgagcataatggcggtttcgcttgcagaacctcaccatacgcaagatggaatttcggttccggaaattactaccagtcgagtcattaaccgaacgcatataccgaaaatatgaatcagaaatataaatg

SEQ ID NO: 448084 - DNA, 424 bp, Triticum aestivum
ctgaggctgatggcactgacaagtccgaaacggtggtattacggtacggtgcttccggtggtagattctactggtggggctaaggggctgcgtctgcgtactaggtatataaggaggcagtcgttctggatgcgatccgtgcgggtatagatttaagtacggggaggtgtagtaggggcttgattgtccaaactggaggtgatgaagagagtcggggaggttggtgctaccttcacaatagagtaggggaaaagggcggcgaggaatagtagggaagaagaagaagaaagagagtatggaaggaggtacaggtggatggcgttgcggttctgacttacttcggactgggtgttggtcggtcgtgggagagactgagcgcggggggtcggtcatggacttacctgatagggggaggaagtcggac

SEQ ID NO: 448085 - DNA, 387 bp, Triticum aestivum
agctttggctgatactgtttcgtcgagtgcccatatctattctcgtgtggtggttagtgcgtaaaggccagaggccaactcggaacaaatacccaaacctgttagtgcattggggctctcggaaacgagcagagactcatgataatgtgaccctgtcgccctgtctcgtggacttacagcaagggcccagactgcccgaccatgccacgtggaaacctcgcgggtgctctccgggcccgaccaactttcacatcaactcgcgggtacccctcagggccgacccaacttcaacaatggtctcaagtaaagtcaaagtaaccatgtgttcaaacatcaaggggaaaacccgaggaatcacccttggtggattccactcgatgtaatcat

SEQ ID NO: 448086 - DNA, 390 bp, Triticum aestivum
agcttttatcattgagggtttttcaacgccgaggcaccctaaaagcctaagcttgtgggagactctcttcttcaatttgcacaaaattatatatatccctcaacgtagcttgtttcttatgagcagggaaatatttagcagagaagtaataaatcatatcctggggactacgcacacaaccagaatcaagagaattaaaccatatcttagcatcaccctttaatgagaacggaaatattttaaggatataaaagtagcgagttctctcatctttagtgaacagggtggcaatatcatttaatttagtaagatgtgctacaacagttttagattcatagccatgaaaaaggatcagattcaaccaaagtaattatatcaagatcaacagag

SEQ ID NO: 448087 - DNA, 421 bp, Triticum aestivum
  unsure (1)..(421): unsure at all n locations
agcttacgaccctgttaaccgccacggttattccggcaaataaagataagcatgacgcggaggtggcacgggtgcgcgaggaaatagctcgggccaaggaggccttggcagctgaggacaccaggttagccacagaacgggcggctttggatgcacgggcgcagcagctccaatcagaggctttccagcttacaatgaacctgaacgcatctaatgaggtgatgagaaggaggcaccagaaaactcaatcccgtttacctccgatttatgaccctcggaatcttttcgctacacccggaccggcccaagtaacctgccagatgcaaatcagtttatgacagccggaacaggaggaccggctcagcctcgggagatggcacctcttgatgggaacatggcaccgncccgttacgtgccggta

SEQ ID NO: 448088 - DNA, 151 bp, Triticum aestivum
agcttacctgggctccttcctgtgcagcccagccagctggccggcccagccagcagccggcccagcccacctccctcctctgtcgtcttcgtcccgacagagggagggaagtgtggccggcgcgcgtgcacggtcaacgcgccacgccacc

SEQ ID NO: 448089 - DNA, 189 bp, Triticum aestivum
attattcctaagtcatagggcttcactcggtggggacctgcgttctccaggaaatagctttggccaaagaggcctttgcagctgatgacaccatggtatcctcagaaccgtcggctttggattcactggcgcatcatcttcaatcagaggcttttcaacttaccatgaaccttaacgcatctaatgatg

SEQ ID NO: 448090 - DNA, 373 bp, Triticum aestivum
agcttgcatgcatgcacactgtatgctgtgtcatcctccactgcccacttgatgacttgtagaacaatatacatcgctaacgaacaatgctgatgacatgcaaatctacaaggacgcaatcaggactcgtttcatcgcaatgttgaggttttattttattataaccacttatagtgtcacacattcgcaatcaggactcgtttcatcgcaatgttgaggttttattttactataaccacttatagtgtcacacattgccagcacaacactctgttccaactcgtgaaaatcaatgaaactggctcttttctaaaactttaacacaaaatgaccccaatctgaaagatttttaaaactggcccgtcttcgcatg

SEQ ID NO: 448091 - DNA, 343 bp, Triticum aestivum
agcttaaactacacggcgaacgaccgcggagacttgatcttcaacggatctgagccactgccaagcgcgccgcactgtcacgatgggcacgatctagctctgccgccgaacagtgccctggaggccgcacctgtgtccgctccgacccttaactcggagccgaccacaccaatcgaggatgggtggttagacaccgccttgggggctgcaatctctacggcaattaagccgaacaccagccttgtcccctacgaagcccgtgatcccaaggcgccggactcctctccggactccgaacccttcgcgccactaccaatcgaagctgattgggcgccgatcatgg

SEQ ID NO: 448092 - DNA, 103 bp, Triticum aestivum
agctttggttcttatgaatatactgtcatgtctttcgggcttgtcaatgcccctccaacattctctcacatgatgaacttcatcttcaaccgctacaccaatg

SEQ ID NO: 448093 - DNA, 130 bp, Triticum aestivum
agctttcggccgctgtgttgctagggcctaggggtcgggagagagccgggaagaagggggaaacggtggcgtagctcagccgggttgcagtgggcgtcgaaacgggctcggagacgcgctggagacggcg

SEQ ID NO: 448094 - DNA, 287 bp, Triticum aestivum
agcttcagatttacatttttgtaggatttcctcctgttaaggcttatgtgcactacgcctaagaataccatctactcctttataaagatgtgggtcatcccaaaagtaatgtcttaaatcatagaaggtttttttcttttgttggtacctgaaactgggtggtatatatttagcaacaatataattagcatagttagcataccaaggtctgctgtgagaaacatttattgtgacaccctggtttttgcctttttcctttttctggattttattgcacttttgaattg

SEQ ID NO: 448095 - DNA, 210 bp, Triticum aestivum
agacttataggatgcttaacttatgctgagctattacgagtttcaacgaggtagtctcgtgtaatgctcagttagtatacaaccacgaacacatgagttttcatcttactgtgactaaacttctttagtagcacctgcagcttctccatattcaaatctatatctaatatagtgaggcgaacaaactatgtgtactttccttttcattag

SEQ ID NO: 448096 - DNA, 419 bp, Triticum aestivum
agcttacttatcagacatagagttttgaagaagaagaaggaggaagcacatgggatagcagtaccacgaccccgtacgtggattccaccaccaacagattactacaaactcaatgtggacgcggcgtgtcacgcccaggtacgtttggcgcagtggtgtggtttgcagggatgagagatgttgttcatgggagcgtcagctctcgtttagaggactgcacaacccccaagtgctagaagcactagctgttcgggaggcattagcactttcagaagatctctatatcaaccatttacttgttgcctccgattgcaaggtggtggtagatgcaatcagacagggaagctcaacagaatttggagccattggcgaagaaatcaagactagagcaactaccttattaaaaaattgcattaaag

SEQ ID NO: 448097 - DNA, 219 bp, Triticum aestivum
aaaaagggggagcgcatggatacaggccacgaccgtcgggattcacacaacagatactacaaactcatgtggacgcggcggtacgcccagtacttgcgcatggtgtggtttgagggatagagagtagtcatgggacgtagcttcgtttagaggatgacatcccaaggctaaacctactgtcgtgaggcatacactttaaaatctttataaccattactt

SEQ ID NO: 448098 - DNA, 409 bp, Triticum aestivum
agcttagatgcttgagacttattgaaatattatcttggggttccttgggcatccccaagcttatgagacggtttacatcattttcatgggcatgaacacaaagttcaaggtcgactcccacttctttaatgcatatcatttcattcacctctcactttgataaaactgtagtgttggacttttatctggtagaacaccggaagagtatgacttgtgaaaactttcgggttctcacagattaggggaaagcataggttcaacccatcgggcatcttagaacatataccatgaactttaggatcaattaacacgtgctcgaagcaaagcatggttgacaaaggcataggatataacttgccaaaggaagaagacataatttaccaaaggcattaagtatcaggggagaaac

SEQ ID NO: 448099 - DNA, 286 bp, Triticum aestivum
aaagcttccttgccctgttttgcactcaatctacttgccctgtggaacgcatgcgcaaggccagtttagttgcaaaaatatcctgccatatatatattgagacgtacattgccgaggtctaatagccaatcagctaggtgaaatagctacacactgttatatactctacctttggtgctgataaggccttccatacatagaaagttgtgtgctgggtctcaatgactgcagaaataatcagccataaattaacactcaaatctgcatgctgaattagctctacata

SEQ ID NO: 448100 - DNA, 112 bp, Triticum aestivum
agcttaaatgtctggatgtgtgttttcctttctctgtaagccgactctgtacaaccctaggcccctccggtgtctatataaaccggagggtttagtccgtagaggctattag

SEQ ID NO: 448101 - DNA, 53 bp, Triticum aestivum
agcttggcacttgggggataatgtgtgtttgctcaaaaagttgttgatatcgg

SEQ ID NO: 448102 - DNA, 414 bp, Triticum aestivum
agcttttcgccattttggcaatcgatgccaatgggggagaagtttcagagagttttgtggagaagtttagagggttgtctcttctagctttggtttgttcctacgcatacgcatctcctacacatgcattattagttgttgcatagcatggtgatgcataattccttatataaactctcttgaaagtgattgtcatcaattaccaaaatgggggagattgaaaggacatgcggtgcccccatgtgtggttttggtaattgatgacattctctatggactaatggttgcattgagttatatttgaaggatttgtccataggcatttcttgaagtccatgtgttggtttcaaggagtttatgtgttgaccaaggtgctattaaggaattatccaaatattggtcatgtgagtgttg

SEQ ID NO: 448103 - DNA, 54 bp, Triticum aestivum
agcttggcacttgggggataatgtgtgtttgctcaaaaagttgttgatgatcgg

SEQ ID NO: 448104 - DNA, 218 bp, Triticum aestivum
agctttgtatctccactcctgttgttctttgctcagttcatcccgtttttcatcaatggttgttggcatttttgtaacagaatgaaaaccaaggccactcttctctataatagatttgacaataaaataatctttcttcaaccgctgctctctaaattttagttgagaaacaataaaattagctctcggaaactggttattcaagcgtataaccatgg

SEQ ID NO: 448105 - DNA, 241 bp, Triticum aestivum
agcttttggatgctagttatatctttaacgtatctataatttttttagggttccatgctattatattacgcgttttggatgtttatgggcttactttacacttttatatcattattgggactaacctacttaccacaggcccagtccgaattgctgtctttttttgcctatttcgttgtttcgaaaaaaaggaatatcaaacggagttcaaactgaatgaaaccttttggagcgatctttt

SEQ ID NO: 448106 - DNA, 422 bp, Triticum aestivum
agcttattatgtcatttttgagctagctaagcatattgagtcattttggaggaaaaaatgctaagtatatgattatgtcgctagtatccatatggcagagaacccgggccgacatgactagtcatagaaccaaggtggcacaaatgtacagggacaggcatacatgacccagcaatgcacgtgtcggtcatcagcgagtgcaaccaagtcgtagcaagctacaaggacttcggtgatacaccgtgtgacatttccccgtagggacagacacaggagcaaagaaggacacatgccggtcaatccatgtgttccggagcagtagagaactaccatggctcagtgaaagcactaggaggcatttccctgtatggaaggctaccaaaagcacacgactaggtgtcgaatcccacacatacaatgca

SEQ ID NO: 448107 - DNA, 418 bp, Triticum aestivum
agcttgtattgttatgttcaattttcttttcgttttacaaatggatggataaatgcataatattctctaacatacatcattatcatcattttcatttacccatcaagatcaactcaagacgccgcaacaccaccaccatttcaattacacctcagcatagcattgatcgaggttcgaaacttaatatggttaagatagatccggacctctcatttggtacagacgggttggcacaagggaaaatacgttgtacccttttagaaaatgtggaccctgcagcagcgcatcgaccgttcggagagccccgctattctgaaggcggcgttgcagttggtcatacttgtcgaagggtaacaacggctcaaatcgaatcctctagttgaagtgcaattttcttcttcctaaatctagtttcaat

SEQ ID NO: 448108 - DNA, 353 bp, Triticum aestivum
agcttggattcatggagtgtaatattcttcttgtgcttccttgttgtttatcaaaacttgtttcgatatgtatttctatatggatatgtgttggaaacttgtttctggttatctatatatggatatgttggactttgttgaactatgttgttggatttgatgaaatatgttgctggacatgctgttggatatgttggatatgtatgcatgtatatctatgtttgaaaccatgtctaattaattggatttaaatgaaaataggggatgtatagcctctttgccgtctgctagcggacagcatagagctctgccgtccgctagcatacatcaaagaggacacttgccagtcacct

SEQ ID NO: 448109 - DNA, 242 bp, Triticum aestivum
agcttttgccatgaggcttattgcacttgattcatcatcacttgaagcatgatcgaaggggcttaaggatgcatatgatgcacaagcaatgatggtattgcctcaacctagatgtttgtaaaacacatcatcttcatctgattcggactttgatatttcttcttcgaagtccatggtcattccagcacaagcaccatccagttgagacattctcttcatgttggactcaattacaatgtttg

SEQ ID NO: 448110 - DNA, 416 bp, Triticum aestivum
agcttatccgaaaaagacaaggccaagtccttccccaaccagaacaacttcaccaagaagacacctcctaaggggttggtggcacaagaagagtacaatgaggatgatgatgatgatgatgagacggttgccatggcctccgttgccacttcaacaactcctcgggtgtctctcttcgactcacccaacgagaacgtcaccgccaagtgcctcatggccaaagccaccaacaaggtaacccccaacatcaaaaccaccatcactactactccctctttgacagattgcattaatgaaagtgaggggtcccatgaggaagaaaatgaatttgagtcttttatgagtaagatcaaaggtaaatccaagaagcacttttgtgctctcttggaacaacttggtgaagccaatgatatgat

SEQ ID NO: 448111 - DNA, 169 bp, Triticum aestivum
ctatagcgcaccaacgctagtcaaaaagttgactactgagtatgcattgatggtgcaagcaactgcatatggcactgaaactgcaatatggaattactagaattgggtctgcccaaatgcaccagatataaagtgcattatgatatgatgagcacctcatgcatctcat

SEQ ID NO: 448112 - DNA, 165 bp, Triticum aestivum
atgcatctatcgtgatcctgctgctgttaaaagttattctgggcttataccaggtagagtcctcaccattctattatggtaatattctcaatttcttattcttgataatgctctcaagaatgtcttatcccctgtcgctagcttatcttcaaactcgtttcgtgg

SEQ ID NO: 448113 - DNA, 319 bp, Triticum aestivum
tattgataagcttgttgtggactaatttataacattttcaaaattatgaggttatctggtgtccaggggcggtataatatgggaatatactgatattaacggataaatgcaaaactccactttagaagaaaaatgaataattagtttcacttcgagatgctagaagaaaagatatttgaacttcaccaacaaaatcttgatgaactcttgaagaatgtattaaaacttgaataacaatcgtgtagaactacggtaaacaaaagattgtcttgataaaattgaatgatttaagaataaggttaaagtcttgcgatgtatt

SEQ ID NO: 448114 - DNA, 424 bp, Triticum aestivum
agctttcattgtagcatcaacaatatgtttagtaaaagcttggaatcacaatttaaagcctaataagatgacatctgcctcctcctattggatgttggaagtatatgggatggcatgggtgtactctgaaaaactaaaatcatcttatttatgttttcatttcttgagcgaacacctgttttttctaaacatgatttattacaaaccattttttatgaaagttattacaagctacattttttaggggtatacagactaggtagttttctttaccccgcaaaaaaagcctagatagtttttttagaattacacaccagatacatgtgagagctcctccctagggccttacgccaactcgccacttagcgctcacgcgccccactcgctttggccggcccaatatacgggttgcacaatcgcacat

SEQ ID NO: 448115 - DNA, 401 bp, Triticum aestivum
agcttcttcctaactttgtctagtacaccagtgattcagcacttgtagaagatctaacaaatctctagcacaccaacgctagtgaaaaagttgactactgagtatgcagtgatggagcaagcaactgcagatggcactgaaactgcagtatggaatttctagaagagggtcgcccaattgcacctgaaataaagtgcaatatgagtgatgagcacctcatgcatctcatcagtagtagcaattcaacatcacatttgttcccagacgaaatgagaaagtagctcaccaacaggtgatgatatgcatgatactccctcagtctactactactaagcggccttgtaaaagacggagggattagagagtacatcagagcaatgtgtatcataatgatttatgga

SEQ ID NO: 448116 - DNA, 405 bp, Triticum aestivum
agctttttggggatggagcctggatgatcaagctggtgttggggaagacatacacgcgaagacactcctgggtgcctatgatgggcagattgacagattaaagaactttttttaatgcctttgggatcctgggaggatcttatttccagtcctgccatagttcgtcgttctgtgtagctataccgtctgcttatttttgtatgttcgtttagatggtttgaatgaactttgtgatggatgatttctttagcggaactcaatgaggggctcattcttaaaaaaaacttttatcaaaagagataaaatgaacctagctatggtcaaattatgattttctacctgttacgatgaggacaaagatcatcacataatgcgaatatgaaagcaaatccagcgatgaatttc

SEQ ID NO: 448117 - DNA, 415 bp, Triticum aestivum
agcttcatcttctaaactgggaagaaatggaacaggggtcctatttgctgcaattggggctctctctgggttaaaaagggatctggcaactggatttggtgtactctttgctggaatgggggttttgtgtcgtagagctggtgctatgtccattggcatcatcatactatttgctgcagttggggtctgctgagttggggcatcagaaatgaccagtgtagtagggctagagtctgctagagttggggtgttttgtgggtcaggtgatattgcaactacacctaatgggctatttgatttatcaggtgtcactaccttttcaaaatactttgctcgtgctccttcgcgatcagcaatcgccctcttccttttgaatatctaatacacaagaacaacatttgaatggataaatatt

SEQ ID NO: 448118 - DNA, 217 bp, Triticum aestivum
agctttttccaagtcctttcagctgtcgatagaattttcaggcaggctgtaaagacagtgccgagctggccctttgagctttagtgggaggtatttaatggcgtggaggtcatctcctcgagccatatggatatggagaatgaaatcctcgatccatactgcgggatcggttgtgccgtcgtatgattcgatattgatgggcttgaacccctcgggg

SEQ ID NO: 448119 - DNA, 386 bp, Triticum aestivum
agcttgagctccttaggaaagaatctcgatgaaaactttgagaagggaattaaatccttgatgaaccatcatgtagaacctccatgaagaacttcggtaaacaaaaggaatgaaaagaaagagaaattgaaaacacaaggtgaatccttgcaatgattcagatggatctccgtgataattagagcttggaactccgggaaaaagagaagatgaaacaaatgaaaccgagaattttaagggcctccgttataaagaattaatcacttggatgaacaagaataagaattatgttatgcttatccttcaccaattaaattgatgacaatcaacggatttggcatactacttattctcgtagaaagaattaaaagagatatatcaaaact

SEQ ID NO: 448120 - DNA, 419 bp, Triticum aestivum
agcttgtcccaaagtgcggtatcttcctcaggaaactggaacatgaagggcagaccatcgtgatgtggcatggcgtatggttagatcaggctagtcggaggtagatgacaggagaatcggagaggaaaagagaagattgtagtgataccgggtagtgcgggggtgattttaaactatggcgccggtaccattaagagtgggggcaattgagacgaaggtggcggtggagcctggtcaaagggctcacctccaggtgagcctgcgcagcggcctgctcgcatgcctcccggtcagccagtgcagcggtctgctcgcacgccttccatcgactcacacgcttgctcggacggcaccttccgatgagaagcgggactcgtggcggcatgtaaatgcccacagtttgaatagtgaaagtgttc

SEQ ID NO: 448121 - DNA, 408 bp, Triticum aestivum
agcttttgggttttttggtttctaacaggggcatcgaggctaacccggaaaagatcaaggcaatcacctctctggctaagccggtgtgcatcaatgatgttcagcgtttggcgggtcgtattgctgctctaagcaggtttataagccagttaggtgagaaggctataccactgtatcaaatgatgaagaaaacagataactttgtttggagtgatgctgctaatgctgcctttgaagatttgaagagacaactagctgagccaccggtcctttctgctcccattgataaggagccattattattatatgtggctgctaacacgcgggctgttagtgtcgccattatggtggagcgcaaggaggctggcaaagagcattcggttcaacaagccggttattatatcaatg

SEQ ID NO: 448122 - DNA, 407 bp, Triticum aestivum
agcttgagcaaggaaaagcctacactcaaaaaatgtttttgtgctacttctattactttggacccaggccactgacctactagctcaactcccaggcccatggacaaatgcacagctcaaacgcgcagagattaataatgatggcgttcaagagagtccatcactgatagctaagttgcccggtacctcactgcttgtcatatagtaggagaaactaatcgtatttcacgttactgcgtgtgcttagtggacaatatatataacatgtagagtaaaaaagagatgcaacaagtgtacaacctctttggcgaagccatgtcgatctcagcgcgattgggttggtcggtaaggatgatccggctgacttggctgtaagaggaggggaagaagatataagtgtctggaga

SEQ ID NO: 448123 - DNA, 274 bp, Triticum aestivum
agcttttactggcttaattatctgcattgacattcgctttgcctggagggtattagagactcggattgaactcttgagtcatttcgacccatcgagtctgtctgaagttgacgttgcgttgagtgaatatatactagagactcttgtgatcagtgaaaatgtctcactagtctttccaacatgagatgcctccacgtaatcaatgcatggacaactgccggcaactcaagatcgatagtggtgtaggtattctcgttttgctttaaattccaag

SEQ ID NO: 448124 - DNA, 300 bp, Triticum aestivum
agcttgatgagaataactgtcaatgattcttcgtattgacgccatgtttgatcaagccaatgattcgctgtttcccattgcctgaatgcacgatcgatctcatgacgggtatcatgcaccataatgacgtactttctgctagactcaaatttatcgtgcactaagacgcgagtaccctcgtgttttagcgccctgttactaatgggacaactgcttgagcattggaacttgccatccttatcctattcaggattcagatatctttcgaaacactaataccattcgccatattacctgctt

SEQ ID NO: 448125 - DNA, 152 bp, Triticum aestivum
agcttgagattatgagtttcctttaatcttctcagatcacggttatcgtgagggtaataagcatattgggcgtgtatgggaagacaaatgatacataggattcacggctggaccagcaacttttgaaagacccagatgaccgtctttcgtaa

SEQ ID NO: 448126 - DNA, 341 bp, Triticum aestivum
agctttaactacactgtttacgaacgttgtaacttgcatcttaacggaggttaaccggtgccaatcgcgcggcactgtgaccatgggcacgaatctagctgtgtcgccgaacagtgccctgtgagccgcacctgtgtacgcttcgacccttaactcggagccgaccacagcaatccaggataggtagttagactccagcttgggggctggaatctgtactgcaattaatgcgaacaccagtcttggcccatactaagcccgtgatcccaatgggcctgactgctttccggacttcgaacccttcgggtcactaccaatcgaaactgattgggcgccgatca

SEQ ID NO: 448127 - DNA, 425 bp, Triticum aestivum
agctttctttttcaccgccaaacacacagtctccactcgtctttcactttgtctttatctctatgggattctctcacacaccttatatgtctctacatatgactcataccactaaaattactctctctatctctcctgtagacacaacatttgttgcggtctccttttcgtctccatcccagactgacattattcatttgtttaccgatcagacaaccccgactaccgtctcctctctctctcagacacacacacacaactcctgcttccacgccccttcccgactaccgtctctctctcacacacacaaaactctcgctttcgcaccccgactcgtatttctctcacaaacatttatcgactagctagcctctagataggtttatacacccgcacactcgtgcttccaccatcgcatacatgtc

SEQ ID NO: 448128 - DNA, 346 bp, Triticum aestivum
agcttccagacgcgacaagacgacagccgcggcaaggagcttgccgcgggaaacccccacttcgtgcccgcgctctagcttacctgctaacgtgtcgctctggggctctcccaagcacacgtggcgggaggccgtgcagctaggggtacgtggtggcaagcggagatgaagagaagcccatcgtggcaaacggtggcactcctaacggtcaccttttgcactgtttaggagactcagataggcatttaatgcctttgtcccctgccatcggagttaggtagggcgcactgtattcacagtagcggtagctgcacctaccgcatctttttccatttttacccttctt

SEQ ID NO: 448129 - DNA, 367 bp, Triticum aestivum
agcttgcctcccaggggtggcaatatgagtcgggtgatcagattggtcgaaggtgatgggtgtttgggaccatttcagataatttgcttttgctggggcaaccatgttcacctcatggttaataactttcaatcgactcttgctctccacatctgcaaagatcatcagagtagagttgatatgaggatatccttcctcactgtcctccttgtcttcggccttgtccgactccttctccttgttattagactgttttccctgaaactgctggatcaggagttgacattggcgagtggtgtgcttcgggtagatgatattcccctcttcgtctttcttcgtgtggatgtgacatggcatattcatcacg

SEQ ID NO: 448130 - DNA, 127 bp, Triticum aestivum
cctgctaacgatctccatcttttgctctctcaagcgcacgttaatttagaccttgcagctatcattgccatatctcattcctagatgaaaagaagatcatcttaccaaaccatgccacattacaacc

SEQ ID NO: 448131 - DNA, 199 bp, Triticum aestivum
agctttaatcagacatgttacaagcatatgcctgaaacagaggtctacggggatgtcaatgcgatgtataataagcatgccagagtacacccttgttaaatcatgcgaagggttacaaggatcctgatcctatgcataacagctgatattactaatggaaataccatgctagcccatgagtcacttcttgcaaacagta

SEQ ID NO: 448132 - DNA, 164 bp, Triticum aestivum
agctttaagatgctagattcattttccgacgtatcaataattttatatgggacgattctataatatattcggctatgtatttataatgttctatattatacacaataatattattattggtactaacctattaaccgtaggcccaatctaaatattaatttatt

SEQ ID NO: 448133 - DNA, 341 bp, Triticum aestivum
agcttcgctgaaaggggagaagggtcgtcgtcgacgtagtcgatcacaggtgcatcagcagcggtctcggggtctaccggagagaagagggggaaaacacagtaaatacagagcaaacaagtggaatactaaacatgacaagccaacaagcagcgctaggggtgttctaacgcggagttacacggtaccggcgacgggggataacgtccgaaaagttttcccggagttaggcattttcggacagatgaaacgaaggggaaaggttgcatgttcgctatgctagggatgtgtgacagatgaacggactgcgtattcggactcgtcacatttttcagagcaac

SEQ ID NO: 448134 - DNA, 403 bp, Triticum aestivum
agcttgaagagatgcagcgactggaccacgtcgacccgagggcggtcttatgcacgggagaagaaggaggaccggaaggctcgtgagcgcatcgtggaacaggccgctgacgagacgtacatggcggagctccaccgacactacccaaagcaagtcaaggttgcgcaccgattatactagcagctagcggcaggagggacgaatgtcatcataatgtctagcaacgaccaagatggctgcagcaacgatgacatccacgactacttgatgagcggccaaggccccaacaccatgatcggggtgctaaccaaaggtgaatggaagaaactcgccgaagagactaatatttggtaattaatttagtacgcttcattgacaagttgtagagcaataccaataaagc

SEQ ID NO: 448135 - DNA, 99 bp, Triticum aestivum
agctttaaacagacaggtctattagcacatgcatgcaacacatgtctacaggggtgtcaatgcaatctgtagaagcattccagagtgacaacctagata

SEQ ID NO: 448136 - DNA, 54 bp, Triticum aestivum
tcagaccttcagattttagtccctctagtgcgtcttaacttgtatcttgtcttt

SEQ ID NO: 448137 - DNA, 123 bp, Triticum aestivum
agcttgagctgcttgttcaccagggactagatgcatttttgcagtccggtcaactcttcttcgtcgccccatgacaagctcatctccttccaggacgtgagcctcgtagggggtccggatcgg

SEQ ID NO: 448138 - DNA, 396 bp, Triticum aestivum
agcttcggtcataccctttacatgaggattcttccgcggaagaacaactcatattcgccttgtcacagggcgccgagcacaacctgatgacctatgaggcgtatgatattaacggctacacattctacaccaagaacaaggacatgaagagcgatggttatcagaactccggggtaatgatggaatcctaaaccggtaatgacaaggacagatactacggaaggatcgaggagatctgggagctgagctacgctggagagaaggtcccgatgttccgtgtcagatgggccaagagcgtcctaaaagaagaccggtatttcaccaccatggttatacccgaagccaaattcaaaaccgggggcgcaaaagtcaccgcgaaaaatgagccatgggtac

SEQ ID NO: 448139 - DNA, 410 bp, Triticum aestivum
agcttatcgctcgtattacaggacaagacgcatttaatgcgctgctgaggtgtccacttgctttattggggacgggaacgaggcccgtcccatccgtcgccgctcccccttgcttcgacacacgccctggccagcgacgcatgcagcgccatgtaggcaggcaggcaactgaggtggcgcggtggtagggtcttcaccaagatctgcatgtcgccatgcaggcgtgtgttgagttggcccggaagcttcttgtcctgttatttacaaggctaaattacacagtatggtaggaattgatatatagataaaataaagttaacggtacaacaaagaatactattttcgtagatgttttcaataatggaaaatatatccctcggccataagtttactaatgtcattttttcaaa

SEQ ID NO: 448140 - DNA, 429 bp, Triticum aestivum
aaatttaaaaaagataaaaaaaaagaagaaagggaaagaaaagaggaaaaaggagaaagaaaaaaaaaaaaaagaaaaaaaaaagaaaaaaaagagagaaaaaaaaagaaaaaaaagaaaaagagaaaaagaaaaaaaagaaaaagaagaaaaaaaaaaagaaaaaaagaaaaaaaaaggaaaaaaaagaagaaaaaaaaagaaaagaaaaagatataagaaaaaaaaaaaaaaagaagaaaaaaaaagaaaaaaaagaaaaaaaaaaaaaaaaaaaaaaataagaagaaaaaaagaaaataaaaaaaaaaaaaaagataaaaaagaataaaaaaaaaaaaaaagaataagaaaaaaaaaaaaagaaaaaaagaagaaaaaagaagaaaaaaaaaaaaagatagaaaaaaagaagaaaaaaaagaaaaa

SEQ ID NO: 448141 - DNA, 365 bp, Triticum aestivum
agcttctgctgactagctaattgatgcattcattgttttggtatgtacacatattaattaagtctttgttcttttttctagccctctggatcgagcacaacttcggtaaagagacgaggcccgaagaaaaagttgagctcggatgaaaagtttgagatcatagcaatcgcgctcgacggccaaccgattgaacccctccggacaaagagcgcatttgttgctcattgcggggttttggttagggacaagatcccgatcagcatccagcaatggtttaagccggctacagaagaccctgaggtgtcttatgtcaatgatatgcagaaaaatgatctttggactgaagtgaaatcaaatttcaccct

SEQ ID NO: 448142 - DNA, 200 bp, Triticum aestivum
ctataaacttttacctccacatatcataaccataatcactctcatcattaatggtatgtatatcaccaatagtagggcaattatcatcattacaattagtaatatgatcaacatcttatatttattataccttttcaccattacttctatgtcattatatattctttttcacattatatttttttttaaccctttttttt

SEQ ID NO: 448143 - DNA, 332 bp, Triticum aestivum
agcttcgtgatgggtgatgcacgttgctcgtccgtccatcatcacttacctgtttcagggtccaacgtttcatgaacctctaacaaccaagtactcgaacggggtggccagtgaaatgtctatggttcgacctctttagcagtcaggtcctgctcagacttgtacaccaatggccgggctttgaggtagccacctgacgacatgcggaccagtgatactgcttctttgctgcatttatcttgttaatcactgacatgttcttactcctctactatgtcttgatggccacaaatgcatgccagtgatctcttatcctctcaaatcggtcgctt

SEQ ID NO: 448144 - DNA, 97 bp, Triticum aestivum
ctatccacttccaaggctatataaacccattacatccaaccactatgaaccacatcaccattacaatctttccattaaaacctatctaccagtcatt

SEQ ID NO: 448145 - DNA, 224 bp, Triticum aestivum
agcttgtccaggagaactttactaaggccaacgaagatgcaaaacgtggtgaggggtgtcaatctatacgactggccttacttatttttgtccattctacattatgaccttgatgatactttttacgaaaactgttgcaggctctgaagaataaggaactttaacttgccgaggctcaaataatggcttcataatatacctaacctgcaaattaaaatttgact

SEQ ID NO: 448146 - DNA, 372 bp, Triticum aestivum
agctttgtcaacttatagcatgtcgtgcttcttcttcaatctcggatattcttgcttcagccgcccaaaccaccgccggtggtactgcgtgctactgcctcccgtggccagctgtgctgccgcgcaggactcaccggcccaccctactcccattgccgtccaggccattcctctaatcaccggcacctcctgttattctccggcaatgccagcctcacaccgcagccgaaccagcgaaccctcgtactcccctacgcatgggcatccacctgcctcgtcttccctggctccgcgtcattcccttcctaggcctcgtcgtcatccaccggctgggtgctgtccgtgcgacgtggtcaacgaacgacagtcatt

SEQ ID NO: 448147 - DNA, 387 bp, Triticum aestivum
agctggtcctttcaacttgaggggaagatatttaatggcatggagatcatgtccgtgagccatgtggatatggaggataaagtcctcaatccagaccccagggtctgttgttccgtagtatgcctctatattcactggtttaaatccctctggaaattcatgatccaacacttaatcggtgaagaatagggggtgtggaacacccctgtaattggctgtgttgtcacctgctgtcgatggttgttgtgttcggggttgattccgagctggtattcgatcaatgtgatcgattcggtggatatgatcttgcgccggatcacgtcttctggatccatacatggacctggtcgcatcggcctttttatccaggagctcacgtaaatcatg

SEQ ID NO: 448148 - DNA, 86 bp, Triticum aestivum
cgctcgcccgaatccacttccctgctggctcgcaggcaccgaaaaccccaatggcagaaccgactgacacacagagccgcaattgg

SEQ ID NO: 448149 - DNA, 316 bp, Triticum aestivum
agcttgttgccgaaccttcctatctcttgtttgacttggatcctttaaatgattaactagaggaactctccaatcactcaattctaatttatttggatctgcagtacattgtacaactagttgctcaactgtactaggcccaagtgcaccccgttgcaaagtatctattattatagactcagcatgcatcggcttgtctattataaaaaacattcctttactaatgtgataaccggatgcttgctgtgctaaacaattagctctagaattcaccgccgtggatatctttcagcactcgcccgtcggcggcattttg

SEQ ID NO: 448150 - DNA, 215 bp, Triticum aestivum
agcttgtctgacttagttcatgttaagggatatctttttgtgtgtgagtgtgtgtgtgtgttgaataaagatcatttcttcatcgattggtccttctgatcagctgttgcatctattgccttgttataactttgacttgagtatggtctatcgtcaagtcaaatgataaccacctatgttcttaattttatcctacttgtggatgatccctttta

SEQ ID NO: 448151 - DNA, 379 bp, Triticum aestivum
agcttttatcttccaactctccaagttgttgtttagcttaaccaacttgcttagggtatccgtcacagattcttggagaaagggtggtttcgaaaaccaacttgatcacgaactcaacatagtggccaggtgacaacctggtgatacttccgagaagaaattcggaaaatcacgaaccacctgtatgttactaatcccgagaacaatcttgcttttgagggcaagatggtatgatcaaatgagcgaggacttgacaagatcctaactcatcaatcgaagtgtgcaccatgaaaatggactatgtggcacaatcaaccttatggtgatgattcaataattaacacactaagaatgagaatattggtcattaacttccaag

SEQ ID NO: 448152 - DNA, 139 bp, Triticum aestivum
agcttgggggagttgatacgtccattttgcatcttgttttcctactattatttatgttgttttattgcataataatgccttttggagttattctaatgccttttctctcataatatgcaagatgcacacaaagggggag

SEQ ID NO: 448153 - DNA, 245 bp, Triticum aestivum
agctttggcttttgggtgtccttagattatcttgggggtgacatgggaatccccaagcttttgagtgtgtgataggacctggtgcttcaatgtcatcaatgatattcttgatttgcacttcatttgcaatacgaggatgagcgggttgtcttcgaggaatttgatccgcattttcttcaggagcattttcctcagcaccattttcttcaggtgcgccagctcgacgttcatcacgttctggaatg

SEQ ID NO: 448154 - DNA, 386 bp, Triticum aestivum
agctttgcattgcaaagatgcataatatgcctgaattgatctctggataggcaggaacagatgatatccttcgccatgaagtcaagtcgagtgtatttgcgaatatcatctgcgttcaccgacttgcatagatcagtaagaccaatctcagtgacggtccacagctcgctgtcccttgccatgaggcgcttcctcatcatggcctttcacttgggataatcatgaccgtcaaagatagggcatgtcactttcttcatacctacggtcgacataactaaaactccatgcggttaaaccaaaatcacacagaacaaggggagaccttgctctgataccaatttgaaagtgcgttatgtcgactagagaaggggtgaataggcgatttt

SEQ ID NO: 448155 - DNA, 390 bp, Triticum aestivum
agcttctccggctcatgaagcacaatagaagataccagtggatcaacctcgataataggctctagtgcttgattcagcctcagtgcctaaaggaaaggaacctgctcagttgcctgctgcctctgcagctccctctgttgtgccaccagcttcatctctacttcagttatccatcgacacaacgacgagattgccaaatattggtcccttcgaacaaaaatcggcttctgctcgacggactaacttcgttgtttatggtgatgaatttatcacctgaagaagagctcaaatattcattccctcgtgaagaactaccttcgctctcgaaaggagctggcgccaaaggtcctcttttcaaatggaatgcgcacccccaattcttttaagata

SEQ ID NO: 448156 - DNA, 241 bp, Triticum aestivum
cagaggaaaaccctagctattattctcagtcgcttttgagagaataaatggcagattttctcattcttcgtggaaccatgcgcgcccacaccgacttcttgactgcgattgccactcccatctacaactcctacatgatcgtgacggcgtctgcgctacaaatccatcattctctggcacctcaccaaggaggacaagacctacggtgtcccccaccgacgtcttaccggacattctcact

SEQ ID NO: 448157 - DNA, 416 bp, Triticum aestivum
agcttaaaccttggcttgtgctcaagcaattcacttgataaactgaaagtgaaaaagcataaaatttatgagctcttttgctcttgattgcataaataaactgaaacaacactaggctttgagccaagattataactaaccatgtcgacaataactcttaaaagttatattaactcatatcaatgacataattagctagcgagcaataataagatatctcaaacagcaacacgttgtcaaaataaccatgatataatataacaatagtggtatcttgctagcactttctgagaccgcataacataaatgcagagcacctccaaagttcaggcagtgactaaacatcgtactttatggtagaaaagatccagtcatgatgcacccaacattagcttcacacaatgcataaacatgac

SEQ ID NO: 448158 - DNA, 217 bp, Triticum aestivum
gattttcagccacattcttcttattcccgaatatacacccaaattccactttcctatcctagggtcaccatcaccatgagagccattttgctcgtgttcccattacgtggcatgaactggtgcttattcataaccatctatcattctcttagtatagccttcccatgatatactcagaatcatgcccttcaaccctcaaaggcttatggaccaacat

SEQ ID NO: 448159 - DNA, 76 bp, Triticum aestivum
agctttcagcatgggctccttaatctgattgactggctcggtctgtccatctgtctgtggatgaaaagctgtactg

SEQ ID NO: 448160 - DNA, 174 bp, Triticum aestivum
agcttagagcctgtatggcttatggtttgacatgagttgattttgctcattgctggataactcggagtattttaccgttaagccgtcaccctggtttaatgtgtcagtacacatgggacttttgagatccttaacgacatattgatattcatctaacagaggctgaagttactg

SEQ ID NO: 448161 - DNA, 68 bp, Triticum aestivum
agcttcaaacaagagaaagttaataagcttgtggctttgcatatcattagcaccatgggtattcaaag

SEQ ID NO: 448162 - DNA, 106 bp, Triticum aestivum
ctcggggtcttttccaaccaggccagggcacatactaacggttctcccgtgctgaaaaaccaaccactaccatccctacttcatagccacaccttatcatacctga

SEQ ID NO: 448163 - DNA, 224 bp, Triticum aestivum
cttttccaaccagggaaggaatcatattatcgtacctcctggtgttaaaaagcttctaaaagtttctctacttgatattcacacatcaacatacctgaaagcagacaagatcgctgtaatcaacacatccacagagaaaggatgagctatagcccaaagggagatacacgaaagaagcttctaccttctattcatacaatagatgactggcccaaatatgagac

SEQ ID NO: 448164 - DNA, 379 bp, Triticum aestivum
aggaattataagcttgttggctgtgatgattgaatagattcttaggattcctacgacactgggtatagatattgtgcttggtcactcccctccatcttacaatggttttatcatgaaatatgatacgtcttcgagacgtatatataattttttattgatccatgacattatattatctgtcttggatgtttaatgggctttaatatgctctcttatattacctgctgggactaacctattaaaccggaggcccagagccagcttatgttttctatgcctacttttagagcattgtcataaaggaatatgaaaccgagtccaaaccgaatggaacctttgagatgatccttcttggactggaagaaaaccagaatacttg

SEQ ID NO: 448165 - DNA, 151 bp, Triticum aestivum
agctttcaaaacatgtacttacaggatattttcttccgtgatgcaggttctagaacagacccagcaacaagtgagttaaaagtttccaactatttttgtcaaatatgctacttgcttcatctgtttttggacttgaagtaggtgaactggg

SEQ ID NO: 448166 - DNA, 425 bp, Triticum aestivum
tagtgacgagcgccatcagcacgactgcgtggtgacgatgatgatgtgctaccggcgcagggcttcgcctaaactccgcgacgatatgaccgaggtggaatatggtggaggggagcaccgcacacggctaaggaacgatccgtagatcaacttgtgtgtcatggggtgcccccctgcccccgtatataaaggagcaagggggaggaggccggccctaggagggggtgcgccaagtgtggagtcctactaggactctctagtcctagtaggattccacctcccttgttggagtaggagaaggggaaagagggggagaggaagatagaaaggggggtttattttatttatataatgtttattttaatgaagtttatattattctttttctttttatttatttcatttatttaatttttttttttaat

SEQ ID NO: 448167 - DNA, 199 bp, Triticum aestivum
agcttgaagcgctcctacttgagagggtcctcacgcatgatgaagtcttcattgccaaggcttgtctcctcctcggagggtggacggtaactatcatcctctttgatcaagaagaaataatgcgttttcaatctcttgactatgttgctttcaatgaaaatcttagaaaaagggttcctaccaatgttctagttgatag

SEQ ID NO: 448168 - DNA, 439 bp, Triticum aestivum
  unsure (1)..(439): unsure at all n locations
agctttgcaagatcagctttaataatggtcagatccttctgatagcttccatctaccaaacgcatgactcatggaaaaaaacaccatgatatcagtctgttctcaggatccagtgcattaatcagttggtttgcataagaacttatgctagccgtaaagacaacaagctcaaacatatgagctgcctcttcaaggaaggcgtccacatgtggtctcttcttcacgtagatagtgtactcttcttctccacatcgcatacggaatgaaaagtccgcgccgtggtcataccttcatgaatggataagggtgcctatgcaacagaaaatgagcatgtcaataatcttaagtgcttgaaaacaaacctacaggagaaaaaagcgtttaacaacttaccatcaagatcatgtgcaagagtgacattcttnctaggtagtaacat

SEQ ID NO: 448169 - DNA, 433 bp, Triticum aestivum
  unsure (1)..(433): unsure at all n locations
agcttgatgcactcagtacaagactcacaaaaatacatgggaagcacccctgtaaagatggcatatcatagttcaaaactcatgtaggactcatgctcataggatgcacacatcaaatgcaacaaaaatgacaaatcatcaagttataacagtttcagcagattaacatcatatagcactcttgcaacgatgattcaggcatcaagatgaactcaaatgaacatggtgcaatggaatgaaatgtagagcatctcacaatgaacattttgatatatcatatgcacaaatcggagcaacggatgcagagttatgatgcgatgaacagggcaacatgatgcaaaaatatctcgggacttagtggaaattcaaccttcgaaactggacgggacgaagcgggacgaggagatccagggcggngaggcgcgtttggaag

SEQ ID NO: 448170 - DNA, 410 bp, Triticum aestivum
  unsure (1)..(410): unsure at all n locations
agcttcctgtcatccgccccacgaggcttggcccctcgcgagggtcttgagcttgggctgatgaagctgggctgcactgggcccccacttgagccacgccgcaggccgcagacaggcaagtctggggacccccgttcccagaacaccgacagtagcccccgggcccaaggcgcgcccgtacttggcttagcagagaagcgaaggggcaagtgagaagcgccgcgggccccaatagcctgtggccttgggcgccgtgtggcgattgattggacgtgggcgtctccgcttcccaacaacgcctcggcaaccgcacgacttgacaagtccctgcatgcaaaaatgggtcatgattacctgcgatcgtggaagccgacggttggcctnctncggctatatgtacggaacatcgt

SEQ ID NO: 448171 - DNA, 60 bp, Triticum aestivum
agcttcgggatgccccgaaaggcatcccctcttttttcaacaagtatcgggatgttttcg

SEQ ID NO: 448172 - DNA, 404 bp, Triticum aestivum
agcttaggtatcagtatgaattgcatattgtgattgccatacttattgtgtactcatgcattagattaaaatgtgcttatattttcaacattgacttggtaccaaaaaccctaaaccctaaaccacaaaccctaaaagtgaggataactaccactgatggtaggaaacatttgtcctacatgattgcgcttttaaaggagaaatacggaaaccgtttgaccgtgtgagtcactagatgggcggatagatccagagggagcacaactggccatgcgccttttatgtgctatgattggtgtaaagttaatttttcgtaatggtaccagcttgtacgttactatatgtggggtcttattggtatcacacaaacgcggtgcacgacacatagctagcacacgagtcat

SEQ ID NO: 448173 - DNA, 105 bp, Triticum aestivum
agcttatacatacgctttctcaccccttaactctaggctcaaggtcctggtcacatttacggagcgaatgtcatcctcaacgtttcaacaacacgacaacgggac

SEQ ID NO: 448174 - DNA, 233 bp, Triticum aestivum
agcttgattaggatacattctcatgtcgccatgattgctgcgggctgggggttatgagagccatactacaacatgctgaggtacacatcatgcgactgctcagattcctgcgctattgtcgactcagactcgtaattacgttacttctgccaacagacaatatttacttagactgccttcgctagtcaattcgacatctgtctcatcagtacctgatccttcttcattggcag

SEQ ID NO: 448175 - DNA, 278 bp, Triticum aestivum
agcttggctgttccttaatatcgatcttgaagaaatgattacgcttaagttgcacaatcataaaacttcggacgtatcttaacatctatgctaacacttcaaggacgagatcacctcatataggtagagccatcgtgacagaacaagcaatccagcacacgagcaaacactactcatgcgaccaacatgctaactgtaaagagagcgcgactaaaacggctacgttgaagtggaggacaggaaaacgagaggcaacaggcagataatgtaatgcctga

SEQ ID NO: 448176 - DNA, 416 bp, Triticum aestivum
agcttccttagcatcttcctgagaatcaccggataagaacattgaaggaaaggaatgaagagtcttcacatgaataaaattgatacttgattaagaaatccgagtcgtcgaagaaaaagggtgggagggcgggaaaacaaaggcaacttggaaacggatgaaaccaacagcattaaggaaaaactgagattggatcttgcgaatgggaaaaatgatatgatcatcttcaagggaatcacaccggttggaaataattgacatgacaacctcgatgatcaaaaaggattagtactcacagagaagtatgagaacaccagttaggaaaggtatggaatcaacatttgacttcgaagcaacttgaataccacaaaccaaaacaaaacaaaggattggcttgcaaaaaaagccagaacaaa

SEQ ID NO: 448177 - DNA, 219 bp, Triticum aestivum
agcttgcaaatagagatactatttcaccgcttgggattgttagagattttgaattattgtgtggtaagatcaaataccctacagattttcttgttcttggatctctacaagatgatttttgtcccattgtttttggtagacgttttccgaatacagttaatgctaagattgattgaactagggaaaggatcagtgttaattttggtgaggtgtctcatg

SEQ ID NO: 448178 - DNA, 226 bp, Triticum aestivum
agcttgactagtatagatacccatggctatgtgattgctcagtcctgggggttaagagatcactactacaacacttgcacgtacagatcatgcgacgatcatgatcctagagctattcttgcttgagttccgttcttactatgcttctaccatcagggaatatgtactacggcagccttctgggtcagtacggcatatgtaacatgagtacctgcacgttcttcat

SEQ ID NO: 448179 - DNA, 384 bp, Triticum aestivum
agcttgattaggttatagactcatattgcattgggacatgtgatgttacagtaactagccacataagaaaatttgctgagttggactcgatgttactgctgaagttactcccacggtggctagtcttactagtatttggttttcgtaagataacttataatactcacctagacggagggagtatttgatttgacagcgggcggcgcagttcccgatacgcctttaatgcagacgagggagggagtagcggttcctgatatgttgaacggccaatgcatcctccttcaattaatgcatgagggaagtaatgggaggaggtccgagaaaataggctacacgatgtgaatgcaactcggttttccctcattgccctcatataaaggc

SEQ ID NO: 448180 - DNA, 226 bp, Triticum aestivum
agcttgattaggatatattctcatattgcaatggttcctgagatgtgacggttacgagacacatactacaactctctgaatttcactccatgtgactgcttacattactgacgattgtcgcttctcatactacgtaatgctattcgaatgagaactaacaatacatacctagaccgccgtagtggattattcgacagctgtctgatcagtttcatgaactccttca

SEQ ID NO: 448181 - DNA, 134 bp, Triticum aestivum
agcttgagcttcttgtcctctatactcagaatgcatgctagcagtccgggcagatccactgaatcaacagatgtgcaggcggagtcttactagatggtactgctgaagttgctcccacagcagatagtctgact

SEQ ID NO: 448182 - DNA, 148 bp, Triticum aestivum
agcttttggctctattaaatgtgatccacattggacattgttaatccgtgatccggactagaacccaattgacttcctgggttttcccaaatagttaactaatggtcaacggctgtttcaactttaaccatttatggataggtatttg

SEQ ID NO: 448183 - DNA, 135 bp, Triticum aestivum
agcttcttatttactactttcaggatgtggaacaaaccctgggtgctggcaatcaaacccttgaggaatgaaacaacgacctacagcatcttgccagcctagcatccatctgcttgttcaatctgtcacaataca

SEQ ID NO: 448184 - DNA, 318 bp, Triticum aestivum
gcgaacgggtaccggtccagggtacagtctacataatctattagcttactacttgtctttcaatatgacgtggaataccatggtttgggactcaaacacattgggcttcctgcatggtcccagagcgtcaacacactctaacgatctgattcatgttcagacattcatggactaggtttgaatctctgctacctggtcgattcactagtactagatcggtcgtcagctgcgtggatcttctatcattagtccgctttagccatgagtaatttcgaactcgtcgtaatcatggactatagcttatggctgggtgcaatt

SEQ ID NO: 448185 - DNA, 132 bp, Triticum aestivum
agcttggagtagaagaactcccgccagagctggatggtggggagaacaccgaggaagccttcgcacaaggcgacgaaggcagacagcagcaccatcgcgttgggggtgaggtggcgcggctggagaccatag

SEQ ID NO: 448186 - DNA, 383 bp, Triticum aestivum
agcttgtacaaataattttagactagagttgaactagctctataagccagttcaaataattttacactagagttgacttgctctatagtctagtaccaataattttacactagagttcaactagctccataagcttgtttggctctttctcttttgagatctttctcatgcaaaacttcacgaaccaagatagcaattgtgtatacactgattgtctttcagatttcgacataattcgtaagttcatggctttcttaatatgtagagatcactggatattggtattcattgttccaaacaagaacacagtttactacatggattctctcagagagtcaataaacgctcacgatctgagcatcttcagcaattcatgggtaggt

SEQ ID NO: 448187 - DNA, 212 bp, Triticum aestivum
agcttacctttacacttacatgagctgttctagccatcgtgtcatggaaacctactcttgcggatttgatcatcgatcttcaagatcttgacacccgaatatccatcgtctagtagatactgtctcgcgccagatcgtcgtgtgtctctacctacgattatggcgccgatgtcttcgcgaatcggctactgtttgccttgaaccatatactg

SEQ ID NO: 448188 - DNA, 374 bp, Triticum aestivum
agcttatgtaacgtgttttacaagatcgcttcgaaagtgctagcaaatcgcctcaagctaattcttctagagatcatatcggaggagctgtcggtgtttgtaccggggaggcttctaacggataatataatctcagcttacgaatgcttacatcttatgaagaggaacatgtcaaagaataacaattttgcagctttgaaacttgatatgatgaaggcatacgatcgtgtggagtggacctatctgagatcgatcatggagaagttgggttttgtggcatcatgggtgtccgttgtgatgaatatggtgagcttagtatcgttttcattaatgtttaatggtgtgaagtcagaagtttttcatcctacaagggg

SEQ ID NO: 448189 - DNA, 163 bp, Triticum aestivum
agcttctgttaaagaagttcccaggtataatgagcgcggatagcgcgtcaagtgtgtgtgaacaaagcgcgaacaagccttcaaaggctgtaagagaaaaggggggagaaggggagaaatataagacaactactgtataaaatatagacggaggaaggagacg

SEQ ID NO: 448190 - DNA, 400 bp, Triticum aestivum
agcttaaccttcacattgtacctcaaggttttcttgccaccttggtagcaaaacctactcttacggatcaaatcatcgctgcccaaaagcgagataagggaatatctaaaatcaaagagatcattgctagcggaggtgctagttgtttctctacaaatgatcatggtgttgtgtactttgagaaccgtctagtggttcccaagaaccagcatctacggcagttgatccttaaagaagctcatgaatctcctctcactattcatcccggtagtactaaaatgtatcaggacctacgccagaggttctggtggactaggatgaagagagaaattgctcagtttattgcaaattgcgacgtctgtcgccgtgtaaaagcagagcatcaacggcctgctggcac

SEQ ID NO: 448191 - DNA, 237 bp, Triticum aestivum
gctagcttgctcttttttgcctcaccctgctcagcacgttatcgcgggccgacagttggcatcggaatcgttgctggtcctgatttactacggcctgatccacattattatagtcagggttgcacgcctaccctatttcaaaactgaagtacctttcgaagcacatatcaccgtgctagcatgctcttgacatgtcctggtcaggtcaatgctgtctctaacataaccttgtactca

SEQ ID NO: 448192 - DNA, 381 bp, Triticum aestivum
agcttagtcgaaagatgattgacgaaactatgcaaactatggccgtacgttaaggatcatacgcattgctgctcatacgaattacctcctggatgcaccgcaaggtgaaccacccgcgctagcacctgccgacattgagaacgcctgtcccacgcgtattgcagactacttgatagcatagtgtgccatgcttcacaactgaacaatgcgacccaaatgagatcctagagctatctgaagctctggaacatgaacaaaccaccttcaaatctatacaggatactacagcactataattacatagatcgagacagtctcatgatacaactcttgatgtcatctatgacctcaaaacttactattctaagcttcagtgactta

SEQ ID NO: 448193 - DNA, 154 bp, Triticum aestivum
agcttgatggagtcgattcttccattttgcatcattccttgagatctatattcattgcatcatggtctgttattacacattatgtcacattacttatgcctttttaatcttatttcacaaggtttacatgattagggagcatgccttcagctgg

SEQ ID NO: 448194 - DNA, 372 bp, Triticum aestivum
agcttctcgtcctctccctccctccctctcgcaccgcccatgaaggcacctcgccgtatccgtgctccatctaaccctgtcatccaaacacctctttcgctagatttacttcagggctagttcaggattagaatctaactctaacctttaactgagttagagtatccaaacagggccaggcggtatgaccaaggtgatgccccccttccgtttcacactctaatctggtgcatgacacgtattacgtcgacccggatgctgctggctgtcccacatgtcggcgaagtagtacatagtagtaagaagaagcaaagaatcatgcggtataagtctttctagagattccaacaagtgactagactagaccgcgtg

SEQ ID NO: 448195 - DNA, 408 bp, Triticum aestivum
agcttgcgaggctggccacagtcctcgaccgcatgggcccgctcgacccatctacgtactcctcccactccgactcggacgcggactcgcgccgtgcgactcacgggcgtcgccccttcaacgccttctcctccaacaacgacctgcctcgtgcaccaccaccatcccccacctttgccgcacccaacaatgctccaaaacaggccgccaaccacgcagacatgcctctccacacctcatccggcgatgacgcccccgccaacctccccaaccccgtcatcaacatctcatccgacagcgactcagcgccgacatcgcagaaggcgtccccccgttgggcgttctcttcatcaacaatcattggctcctcctcaacaccggccgtcaccaaccgtcccacgccacgcc

SEQ ID NO: 448196 - DNA, 209 bp, Triticum aestivum
ggcttgcgagaaacactttggtagtacacgaccttgaatgtttgcgtgcatctaggaactagaccgactattagttgggcgcaaacttgcagccgggtagttaacggcatgatcagtgcaacgcttactctcgacatcacgatactactcccaggcgataggcactacctataatggtagcggatactactgattgcgagcaggcctaa

SEQ ID NO: 448197 - DNA, 198 bp, Triticum aestivum
agcttaagcttttctatttttgttcagaatcctcttatttcatgacagggaaatccttatacagtatgatcacttcgaacaccatagatgacttaattgcatgccgcatgatattacacatagctttaaagcagttaaccacttatttatacaactgttcgcatcttcacatcctgtcgctgttattttaactttatt

SEQ ID NO: 448198 - DNA, 279 bp, Triticum aestivum
agcttgaacattacaattccaatcgagagactgctcatggggtgagcggccatgagtgcaaacgacgtatcacatctaaaactgccgttgcttgccgtgtaagatgagagatgttacatgtctatgataggggaacgacatctacatattcgaccgagagcatgtgctttatgcgttgctgtgaacctctatgctctatctacattcactattccaagcaagatatacggccataatgacatctaagggaacgaaattgttgaatttctgcaaacattt

SEQ ID NO: 448199 - DNA, 416 bp, Triticum aestivum
agcttgaagaaggtcaacaatgggggaagaacacgagcttaaatgataaagttcattggggaagaagaccgccttttataggtggggaaaaatccaaccgttatgctcacagcccgtacagagcagtactaccgctcgacctcacggtactaccgcaaggggtagggtactacctcaaagggtagcggtactactgcttgcgagcggtactaaaaaatacatccgtgcctaccaccgctggacttgtgacgagtttttggtccggagcggtactaccgctgtagtagccgcggtagtactgctctggagcggtagtaaaaaaatacatccgctcctgtccgcggtagtaccattgcagcctttttagaacaccaaaactgccacaacttctgcaaatggactccgaattcctgcag

SEQ ID NO: 448200 - DNA, 146 bp, Triticum aestivum
agcttctttagctattttaacttgcaaacatagatacgcacttaacaggttattagctaaatggaatcagcaatcactaaatgctagagtgaaacctgactctgcttttgctacttcacctatctgtgttaccgataaggattatg

SEQ ID NO: 448201 - DNA, 347 bp, Triticum aestivum
agcttgaactatgtcgctgatatccgcggagacttgatcttcgatggattcgagcccacggcagccgctccctgccacctcgatgaacatgacttaaatctgtcatcggaccacacccaggagatagtgcatgtaactgctctggccctagccggagcagatcgcgccatccaaggacgggaagtttaaccccgccacggaagctacagactcagcggcgttggagccgcacacagatccaacctcgggtggaatctgcgccaccggaacctcggcctcgtttccggctacaggttcggaaccacctgcgaccgcgtacgtcgagcttgatcggacttcgatcgtcg

SEQ ID NO: 448202 - DNA, 358 bp, Triticum aestivum
tagcttggcttcataaaattaattagtgacgcatatgcactctctaaacgggtatagcataagattactcaatataagctgcaggcaaagataatcatttgctcagaatggatacgggactgatcaacattcatacaaaatgtgatgaaaaataagcatgttcaaaccatacacaaaatgtaatgctgccttcagcatatatatcatgcaactttctgagatgaggccaatgcctatctatataaagatctacatgaaaacagataaatagaaactttgaacaagacatttacttaactgcagtcaaagaaatacacatcacatagcggaatttgtttgccttaagaattaatacaaa

SEQ ID NO: 448203 - DNA, 210 bp, Triticum aestivum
agcttaatcatttttatttgtagagagagaatactcatgatgagagaggtctacaatgagatagaagtatcatatcaaagaccccggaatgcttggtgttcaagatgagagaacttacatttctttaatagttgatagacgtgcacatatttaattgtttggattggctcatgttgtttctctgtatttaatgtccctatctttttccat

SEQ ID NO: 448204 - DNA, 399 bp, Triticum aestivum
agcttggaatcagaaaatgaattagtgatgcatatgttttttctaagcaactatagcatctgatttctcaataaagggtgcaggcaaagattttaatttgcacagaatggagatgggtatgtccaacattcatacaaaatatgaaaaaaaataagatgttaaaaccccatctaaaatgtaatgatgcctttagtatatatatcatgcaattttctgagatgaggccattgcctatctatataaagatatacatgaaaacagaaaattagaaactttgaacaggacatttagtaaactgcagtcaaagaaatacacatcacataggggtatttgtttgcctcaagaattaatacaaaaggccaaactgaactttcaaatatttgaagcaaaaggcaaaac

SEQ ID NO: 448205 - DNA, 271 bp, Triticum aestivum
tagcttggcatcacaaatttcattatgagatcgtatgtgaattatactcgggtatagcgtctgctgctcaaatcatcggcgcttacgttgatcttgcctggcgtatattgaatactcgtatggtactcttgcgtcctttctacccatcgagtttgcctgatgttgacgttgggctaagtgatgatgcacttgagactcttgtgatccgagaatctgaccacttgactttgcatcacgagatgtctgcatgcattgaatgaatggacatact

SEQ ID NO: 448206 - DNA, 423 bp, Triticum aestivum
cgtaccgggcctcgagtcaactctatcgattagcttagctataggcatgccatgtatatctaaatcgaatcctcaatcaggtaggggcaaagcgattggctcatgctcagatgctaaggaatctacattcaatatagcagcgatcctggttctcatgaggctcactaatagaagcccagactatcaaggcatccagtggttagcgtgtggcttcatgtgcttaggggcttgctcctatgcatctcatctacgttgggatattcacatcttagctagatcctggtcctagctgtatcctacgtgtacttgctatccggtgacaattagactcaacatacattacggaatcataaaccgtagagcctggggtgtacacagagtgatctaagtctcatttatagcgttgtgcttactgtcagcttt

SEQ ID NO: 448207 - DNA, 386 bp, Triticum aestivum
agcttgtttctttcctctgttcatgtttgatagattaatatgtgtccttgtcatggtatgttcatgtcctttcacttctcttgtcattgatgtatactcgtattagtatttgaacttctcaagcattacgaaaataccaaaaagacaatgagtaaaatctgaatctccctgtgctctttgcattttctttgtcgacgatatttgagaatgaccttgttagtttaggttttattttctgcattcgtctcttaaatttaaatttgtgttacctagatttagctgagcatagtcgtcgtcttctagtccctgtggggaatacgatactcacagttcgggcgtgaaaaacccacgtataatataaaaaaattggtttgtgcatttaacac

SEQ ID NO: 448208 - DNA, 302 bp, Triticum aestivum
agcttgacaagaacagtatgcctaacaaaccaaagagtagctttgaaagggtggtatgtatagagtgagctgtctctgcaagtctattcagaattatatgatataggtatggccatactacaccgttggactcttgcattgtgaaaagatgcctagcattgtgttgtcaatcttcgcaatgtatcttacttagagcatatacatatgccaccatgcacgaggttgcatagggagcgatcatatgatgtctagtatcggatgacgtatcagtattgccatgaatctatgccttatacatacat

SEQ ID NO: 448209 - DNA, 248 bp, Triticum aestivum
agcttgaccagaacagtatgccttacagacgaatgagtaacctacgctgggtttctatccaatgactgcgtggggtattacacgtctcatcggaatgctgactttgaagtctagccatcttataattgttccagctgccatagtacacctgcttatgttccaccatagagctgcggtgtcccttcataaagaacgaagcaaaatttgcgtcactggctggatctacactatcagacatcatcttatat

SEQ ID NO: 448210 - DNA, 248 bp, Triticum aestivum
agcttactaaaaactacatgggtatgtcgaatcatattctacttctatggttggtatccatattcatagggctgatgaattaaattcactgtacggcactgatcatcgcaaaaatgatcaatattgtaggcatgaacctctatagttaccaacaattactatacgtttaatgagagcatttagtagcgcattataacatatgtagcatgatcatgctcgtcatatctacccttatgaaggttccaaaa

SEQ ID NO: 448211 - DNA, 190 bp, Triticum aestivum
agcttaaacatactctttctgaccccttaactcaaggctaaagaggggggacacagtcacggagtgaatgtcgctcttaacgttttaacatcacgacaacgatgcgcttcttaagcattggttggacagtttgaggtattacaagaaacctggaggtctatttgtgatagtatgactaactatgtgaatg

SEQ ID NO: 448212 - DNA, 74 bp, Triticum aestivum
aattcgcgtacccggcctccacgtcaactctatcgattagctaagctgtaccttaatatcgttcatccaccaat

SEQ ID NO: 448213 - DNA, 214 bp, Triticum aestivum
agcttggggggagtttgaattgttttggatttttcacaaaagcaaatggcattttaataggctgttttggctctattaaaagcattaggcccacttagagttgatgatgatgttgtgttccttaacaacaattagttttggattatttgctaaaaggtgaacatttttccaacaagttttgatcaacttcattttgcactttgactttgaatgg

SEQ ID NO: 448214 - DNA, 382 bp, Triticum aestivum
gcagcccgatgttccagtccacgatgtccgtaagcttaaattatccactttcttgatccacatagaatacgtgcatatcgggctggaacgcaccatctgcggtacaaggatcaactcacaggaactctatcatgccggcatgaatatcatcattaagacttccacatagtgcgtcatagttaaggagatgctataggatcatttcatccacgtggtaatgcccggaacaagcacttcaatgggtacttacacactatgacaactgacattgaagctcaggccacttattatatcatcccttagaaacatccaatgagcaaatgagcttgactacataataacctatcactgaaattatcacgatgacccacactaatacggg

SEQ ID NO: 448215 - DNA, 430 bp, Triticum aestivum
agcttaaatagtcttgatctcgcgggtgtgagattgttgattcctcgtgactcacagatacttccaaacagttgcagctgccgatgataccagtgtacgtggcgcaaccgatctcaagtgggagctcgatgaagatcttgatcgttgttttgtgtcttttccagttgatcagtagtggagcccagttgggatgatcggggatctagcatttggggtatatcttccttttctgttggtttgaccgtagtcggtctatgagtgtatttggatgttgtatgaattatttatgtattgtgtgaagtggcgatggtaagccaactctttatccctttcttatttagtacatgggattgtgtgaagattacccctcttacgacaaaactaccatgtggctatgcctctaaattgtgccccgacatgtgggagatat

SEQ ID NO: 448216 - DNA, 338 bp, Triticum aestivum
agcttggaccattcgattccttcatcgaacatcatgcttttatggtagggtcacttgtataaagggcggggattctacacaatgtcacactaccaatgggtcatctctattatctttcaggcttcatcatatgacggcgaacgccatccatactaatgtctcaagtcatgcacaccctctagactgagaccggccccctcctgaatgcacacacaccttgacttccattaatgaagcagtagttctgtatcttaccatcttattgatacatataatgagctattcagcaagcattccatctacacttttcacttaagatactataattgcataataca

SEQ ID NO: 448217 - DNA, 334 bp, Triticum aestivum
gggcccgacttcgcatgcttccgtccgtcatggccgtgtcattagcattgtatcttctcttattattggactcgacaggatgaatgggaaggttctaacttcaattgccattgcagaacaactagtttcagcttgtctcggtcttgtgagacatgaatgccatcaagccatacaggacctgatctttaaagagcatccagtcaatagtgtataagaatgcacatttaagctgcaaaatgatagcatatttttgatcagacaagctctattcatgataaactatacttaagcacttattgtaccgcctgtattatcaacactacatttgttaaat

SEQ ID NO: 448218 - DNA, 429 bp, Triticum aestivum
  unsure (1)..(429): unsure at all n locations
agcttactcagaggcagcctcatcaggcaggctcgcgaggaggctgagagatcaaggcaggggtacctcacgaggaacccgtgacgcaagctatgacgatcaaggccaggcgggcgccggcctgcgcagtgtccttgtttcccctttggtgcaaagggggcaagcacaggccaaggtattaggcaaaggttgccattccggtgcaacaagaccaagaccagcagagcggcaggacggaggtcaccgtggagcccaagacggcgtcatcacaagtgcttttggcagccgaagaccacctttggtcaggataacttgtactatatgttccccttcaaaatggccaagtgttggcgcccttcccgctcattatttggggagaaggcccaggcctctataaatagagctagcctncacaaggagaaagggggg

SEQ ID NO: 448219 - DNA, 213 bp, Triticum aestivum
cacgacgtggtatgctcccggacggcatggccattagattgtggcattgctcagtagaccgctgagaaacaaaatgaggctggggatctaatctagggctgatcactgattatgttgcccggaaaacatcaacgtacaaggtgacctatattgcgaattattaggacaattagagctagctaatgcaggtagcccttatggcagacctggtat

SEQ ID NO: 448220 - DNA, 161 bp, Triticum aestivum
agatgcgtcacaccaggcagggatctacgtcagcattggtagggtcatcttgaagagttccagcatgccacacgccatacttacaaagctccatgacttgcctacatctactcccgaccaagaaaacgagccctgcgctgaaatctaaacgtaatccttct

SEQ ID NO: 448221 - DNA, 349 bp, Triticum aestivum
agcgtggtcgcggccgaggtgcaaaagagccagaactattttctcatatttctgatagattctttactgaggagactcaagaaatactcacgaatgatgttgaggacttagagaattgggttcgatcagaggctgaaaaatacagtattgcagttgatcagaggcatcatatggagcttgatgcttttgctgaacaattgagactcaaagatgagaagttagaagctttccgttggcgcctgctcagtatggaactggaatcaaagaggttacagtcgcatattgaagtgctggatcatgatctagttcagctccggcaagaaaatattaaagtagatggattgctatt

SEQ ID NO: 448222 - DNA, 204 bp, Triticum aestivum
agcgttgtcgcggccgaagggccgggggtgttcaaggcattgcttgggcttttggtggtatgattcttgcccttgtctactgcactgctggcatctcaggtggacacattaacccttctgtgacatttagcctgccaatggcatggaaattgtccctaaccagggcagtattctacattgtgatgcaatgccttggtgcaatct

SEQ ID NO: 448223 - DNA, 143 bp, Triticum aestivum
gtgattctccttataatctcgaaactttatctcagccctatgatggatacgagattgataatagcgatttcaacactattgtacgtgggcttgcgagagcgtcaactttagatcccacatattctgagaatgatcaatcttat

SEQ ID NO: 448224 - DNA, 324 bp, Triticum aestivum
gcgaatgggtaccagcccatgttgagtccacgatgtccataacttctcatacacattcatttggctcaaccaatgttacatccaggataggtgtcttgcatatagtatacgcgctatcactgatacaccagtgggttcaaataattcaaatggtggctaagctgaaccataccacataatatcagttactccgaacggtgctctctaaacaagctctataccaccgtgcagcacacgctccatattgaccatacggaatcacaatatagaatatgactactgactcacacaaccttctaattaataaactactatactacatac

SEQ ID NO: 448225 - DNA, 427 bp, Triticum aestivum
agcttgccttccacgccaaggagagtcccatccgaacacgggcgcagtcttcggtcttcgtatcttcacagcccaccagtccggcacatggccaataggccgaacgctcgaggaccccgtagtccaggacttcctcagtagcccctgaacgcgtagtgatgtcttcggcattgcaaggcgggttcctcctttcaacctccaaaatagtcttcggacaaattgatcgtgtccagacctgtaacacacaccacacacaaccgtagagagaatataataatacacgagtccaatccgctgacaaattttacaacatgacatcacgtccatccggtcataatttcgaaccattttttgcctgccgctctatgtttggagacgcggttgtcattggcacgtcttgtcaaagcagagatcgtgttcccttatt

SEQ ID NO: 448226 - DNA, 431 bp, Triticum aestivum
agcttgcagaaacttcccaaaacctgcaaataaactaccgtggaaacctcccaatgggccggcccacgcaacatcgatcgagcgaggggggtttgcgtctcgcgattatgtcgttaaccggagcagtggtgccaaataggaatcgccctgaactgagatctcggagggagctcttaagccccgtgcaccactcgctcttcgggcagccaagcgtttacacattttaaaatatgtttataaatttgaaaaacatttaaaagtttaaaaaataatcatacattgaaaaatgtccaataatcctaaaaatatttgtagttccattttttcatgaatttaaagaatgttaacgaatttcagaaaatattcatgaatccaaaaatgtttaataacttaaaagagtcgatgattttttaatccataaattggaaaaa

SEQ ID NO: 448227 - DNA, 274 bp, Triticum aestivum
agcttcgggtaatttggcaaagaaaaaactagtaggataaagaacagaattaaaacagatacaggttaaactaagtatattaggcataacaagcatttcattcttgtagagtaaataattggatttttcttgagttatttttttaagggaaagaaggaaaaggcagattcaaaatcttttttcttcggactttcccaaacacaaaatacctccttgtattcgcactctcaaatgagagtggaataaattcgactttcatataatatcttaatag

SEQ ID NO: 448228 - DNA, 342 bp, Triticum aestivum
  unsure (1)..(342): unsure at all n locations
agcttaaaatgccatctgtatgcaggctgaagtgaaaatcaaggaggaccagattgccgatttgcaggaggccctaaagacccagcaggctgaaacagataaggcaaagcaagaattgaccagcgctttgagcactgctgaacggctgaaagaaggcttcaagaaagagcaggctgactgggccactgagaaggccggtttaaccaaaagagcagaaaacgctgaagcgacccttaaaccggtggtggatgaactgacgaccgtacagcggcaaatacactctatgactgctgcaatncttggtaagctccttgcaacttctgtgataaaattgaatctgct

SEQ ID NO: 448229 - DNA, 241 bp, Triticum aestivum
tccatgagcatgctatgatttatgaaagagaaatctagtaacgcataccaagcagagtttagccaaattctggtgaagataacatgcttacgcttatcaagcatatcattcttgaagagtgaattggaagagtgttactgagatgatgtaatgatgccactattgtggaggctgatgcatcatattgtgacaattgtcaatgccgaacacaaaatgccttcacgtaatctaactatgaaat

SEQ ID NO: 448230 - DNA, 96 bp, Triticum aestivum
agcttgctggctttgttttaggtacgtaaaaatgacataccgtgtgacggttatacacataatgcgcgccctgtatatataggatctcctaagact

SEQ ID NO: 448231 - DNA, 430 bp, Triticum aestivum
  unsure (1)..(430): unsure at all n locations
agcttcacgacatccgattcaatggcatacaactcctaccccttgttgttggtgctgctggcactctcggccccgctggccgtctttgccggcgacccagacatcctggccgacttcgtaatcccagcaagcaccaacccgacgaacatcaccggtgactacttcacttacaccggcttccgcgacataagcacgccggcgtacggtttcaccttgaccaaggccactatgatggagttcccagccctgaacggccagagcgtgtcctacgccatgctcacgttccccccgggctccgtcaaccccacacacacacacccgcgcgcctncgagctgctgatcgtcgcccatggcacgctctccgttgggttcatcgacaccgncaacaggctctacacccaggacctgggcccgggcgacatgttcgtgt

SEQ ID NO: 448232 - DNA, 255 bp, Triticum aestivum
agcgtggtcgcggccgacgtgctggggaaaagcgtgcataaactggttctgatttctcgatttttgtaggagatttggcttctgatgttactgatacaatgttgcgtgacacatttgctagtagatattcatctcttaaaggtgcaaaagttgtagtagatgcatacacaggccactcaaaaggctatggctttgtaaggtttggtgatgaaagcgagaggtctctggccatgactgagatgaatggcgtatatt

SEQ ID NO: 448233 - DNA, 214 bp, Triticum aestivum
gccattctaataccactcactttatgccagcgctgtcgctgcctaagggcaggcgtgcctagctcgcatgtgagggagacacgtctgatcaatcgtactgtctgggctcgcactaactacttccctttggctctgaaatcatcatactgtcaaacagccactctttgagcatcgaataaaccagagtcttcacacttatgcatattatactaac

SEQ ID NO: 448234 - DNA, 245 bp, Triticum aestivum
gtaaaacatataacatgcagaaaacaagaaccgacattgtgtaccgagttaatacgttagttcccaaaatgatatcaaattgcttatacagtatctaaaattgataatatattagcatgaaacaatataaaattatagataccattgagacttatcaacatgctcaagcttggggatgccccttaaggcattatcttttctgatattgccatttttaacttttactattctctattcttttattt

SEQ ID NO: 448235 - DNA, 300 bp, Triticum aestivum
atacggcgtcgaatagctattgggctgactctagctgctgctgacatatatgactgggaggcatctgcatccggaggtcggacatacctccctcgaaaactctcccggaaagcgtctacctgctctgtccaatgctccaatggagcttgcagggaggctcataatccagtgccgagctggcccttcgagcatgcggtgtacatacttaatggtgtgcagatcatctactccatccatattgatattgaggatatagtcctcactccagactccagggtttgatgaactgttatatgtctt

SEQ ID NO: 448236 - DNA, 358 bp, Triticum aestivum
agcttcaaactccttatctcagctgcgaccccgcgatgacgatgacgctgttttgctgcaaccgtagtagatttttgctaccaccggcagttgaatttgctacaaccggtttcgtcaaaaaaatcgccgtggggtgtagtctgccatggctccggcgaagtaggcagagctccgatgcatgcgaggtaggcgtcgccgtggtagcaccccatcgcccccggttgcagcatctcccgtggtcaccgcccctcggtcgccggcgagatggaatggtcaccgtgcagatccatggcagcttcgagcgctgagggaaggcgcggtgctgcaaccaggggcggtgtggggggggggaaggatt

SEQ ID NO: 448237 - DNA, 426 bp, Triticum aestivum
agcttacgttgatgacattgtggtaaagtctcgggaggccaggaccttgatacaagacctggaggaaaccttcgcgagcctcaacgcagtgaacctacggctcaacccagagaaatgtgtgttcggagtcccctcgggcaagctcttgggtttcctcgtgtcccaccgaggcatcgaggctaacccagagaaggtcaaggcggtggaagacatgagcccgccaaagaccctcagagaaatgcagaagctcacggggcgcatgaccgcgctagggcgcttcatctccaagttgggggaacgagcactgcccttcttccagctaatgaagaaaaaggggccctttgagtggactgaagaggctgacaaggcattccaggatctcaagagatacctgaccagcccaccggtcatggtggatccgcgccc

SEQ ID NO: 448238 - DNA, 433 bp, Triticum aestivum
agcttctcaacttgtaacttccacgtatcacgtggagaactcaaactgatgcaccaaatgcaatggcaagggcacacggagtgcccaagtccttctctcccaaatcccaccaaagcaactaatgctagggaggaaaatgagaggaaaaacgaaagaagaacacgaagaactccaagatctagatccaaggggttcccctcacttagaggagaaagtgattggtggaaatgtggatctagatctcctctctcttttccctcaagaactagcaagaatcattggagggattgagagttagcaagctcgaagaaggtcaagaatggaggaagaacacgagctcaaaggattaggttcattggggaagaagatccacttttataggacctcccgaatccaaccgttatgtgctcaggtcgtgcttaagcggtactac

SEQ ID NO: 448239 - DNA, 410 bp, Triticum aestivum
agctttagcatacgaactacacgatctttgtgctaggcttaggattgggtcttgtccatcacatcattctcctaatgatgtgatcccattatcaacgacatccaatgtccatggtcaggaaaccgtaaccatctattgatcaacgagccagtcaactagaggcttactagggacatggtgttgtctatgtatccacacatgtatctgagtttcctatcaatacaattctagcatggataataaacaattatcatgaacaaggaaatataataataactaatttattattgcctctagggcatatttccaacatgaagctaatgatgatgatcatgtaacttcagatcaagttgctaccgaacctcgtaggtaaaccagagtgagatccgaaccagagtggtacagtaatc

SEQ ID NO: 448240 - DNA, 226 bp, Triticum aestivum
acgccgcatcgctccctggcggcatgccctctcgattagcgtgcgctggtgcgtactgctacgtcagaaactaaaccagcgtgggcgctcaagacaaactgcacctgcccgggcggtccgtcacaactcaactaggcgcgtcccctgcacgccggccctatggcagagctgccaaagcgttggatgcataccatgagtctcatatcgcgtcacctaaatagctcga

SEQ ID NO: 448241 - DNA, 56 bp, Triticum aestivum
agctttcaagaagagaagttgttgaagagcataataaacataatcttgagggcaag

SEQ ID NO: 448242 - DNA, 180 bp, Triticum aestivum
atgttgacgtccaccgtgtccataagcttataattatagactttaatgcccagcatcgtagacatagcactgggggacagataattacttcattctttctagatacacttatatctataacgcattcctccgaccatcatcatcagctttctgttcctgcattctacgtcaccattcagc

SEQ ID NO: 448243 - DNA, 88 bp, Triticum aestivum
agcttggattgctggacgttgtccaacgagtctggtccgatgcctgactttaagttcagtgcttgatcgaagtccgtccctccacggg

SEQ ID NO: 448244 - DNA, 56 bp, Triticum aestivum
agctttcactaatagaaattgttgcaaagcatagtatacataaccttgggggcggg

SEQ ID NO: 448245 - DNA, 350 bp, Triticum aestivum
cgccgcgtgctcccttgcggtatgccctgtcgattagcttggggatgcccattgcacctctaggtaatatttaagcaggacgaagcatatgaccttcagaaaatggccgggaactcttttgaaccgattgtacctgactatttacgctggtctgtgcaacctattctgtggagtagagaggatcacccactccgggatgataatgcaggtcacttggccctggtggtagcccctcaagttgggggatacaaggttaccaatgtactcatggacgggggaagtagtatcaacactgtatattatgatacattctgccgcatggggatgacagataagaatcttaaaccgtt

SEQ ID NO: 448246 - DNA, 340 bp, Triticum aestivum
cgtcgcatgttgaggtccaccgtatccataagcttgccggtcgggttcaggttctcgtgcttggcgtgctggcagaggtcgcactgacgaacgaagtcttccatggcgcgcttgaggccgggccaggcaaagagctagcgtactctgtggtaagtggctgtggctcccgagtggcccccgaccgcgctgtgatgaagcgcggcgatgagcttggtctggagcacggagttggcgccgatccatatgctgtcgcgctgacgtattacttcattctgcaatgcccgaccttgatcgttcttttccacaactgccagctttgtagagcagttcttgtgactca

SEQ ID NO: 448247 - DNA, 354 bp, Triticum aestivum
agcttgtacagtttgggaaggggttttttgagagaaaagaagaatctacttcaaccgatatgcccttaggcacggccatgcataacatagaaatcacacgtggaaggggtgggcaattagctagagcagcaggtgctgtagcgaaactcattgcaaaagagggtaaatcggccactttaagattaccatctggggaggtccgtttagtatcccaaaactgcttagcaacagtcggacaagtgggtaatgttggggtgaaccaaaaaagtttgggtagagccggatctaagtgttggctatgtaaacgctaccttaaattgaagcatgtgtgatcaaatatttgattacccccat

SEQ ID NO: 448248 - DNA, 429 bp, Triticum aestivum
  unsure (1)..(429): unsure at all n locations
agcttgattatcacaggggtgtgcatgggggcggtgcgggtcgggtcaatccactgggaagacccgatatgcatggaacccgggagaggaggcgcggctactacgtacgtaggcagagggaggaatggagggaaaagggccgatctgactactatgataggaaggactatgatagcaggaagagacgcccgacccaagtgtggatacccaagggagatcatgacaagcatttcagagaacaatgtttcatcggcggaccctggggcccagggctgccaggaccaatgaacctattggcctggaactgtcgaggcttgaggttggactcgacagttggcgaactccgtgacctgattaggtcctacaacccagtggtggtatttctatgtgaaacanagaagagggcaagagctatggagaagatcaaat

SEQ ID NO: 448249 - DNA, 273 bp, Triticum aestivum
agcttgagcatcacacgttggtgcatgtagacgtgatatggtcatgggggtccggtcttgatacccactgggcctggaattcgtctgaggtgacgcatctacgtcatacgtatgcacatggcagaatcctcaggcgctggctcaattctcttgtgaaaaccgggggtcgtttaaaatcttacccgacgacattgggaattgagtgcacaacacaatgaatatgccaatggtgtgatacaacaatggaaccattggggtgcttaactccaaatg

SEQ ID NO: 448250 - DNA, 426 bp, Triticum aestivum
  unsure (1)..(426): unsure at all n locations
agctttcctacaaaaaatcttaaacgagagttgtatagtaatacataatgacctacattaaactcacgctttggtatccttttgtcatgccatcttttaaccttttctttaaacaatttggcattctcataggcttgggttctccattcatcaactgagctaatgtcaaataacctcttctcactggcaagtttgaaatcataattgagctctttaatagcccaataatccttatgttctcgttcaagaggtaagtgacatgcttttccataaaccattttatacggagacatacccataggatttttatatgcagttttataggcccataatgcataatcaattttcttggaccaattctttctagatctattaacagtcttttgcaaaataacttaagctctctgntgctcaattctacttgac

SEQ ID NO: 448251 - DNA, 399 bp, Triticum aestivum
agcttagaccttgcttgtccttaagcgaaagtcgatatcgaaaaatatgtccacatgtttagagatagaggtgtcgatacaataaaatacggacatgagggcatcatgatcatctttaggacaacaacatataatgtcatatgatttcttatgctaaagtaacaattcattcacaaggtaaagtatgaatcagaaacttcattgaagactaacaaactatgatttcaatcattgaagcaattgcaatttatcataacatcggaaagattcaattcatgagcttttcagcaagtccacatactcaactatgatttagtcttccacaattgctaacactcacacaatacttatgggtacaaagtttcaatcggacatagagaaagataggggcttatagtc

SEQ ID NO: 448252 - DNA, 220 bp, Triticum aestivum
agcttgaacttcatttaatttggagctgagggagtgctaccattcagtggtgaacccttacagtatgatttaagttttgaggtatggtattataatgaaatggaatagatccaggctttgggaaaactggtattgatgatagtcgatatctattgtacatctcaaaaatggcaaggggttcctcgtcacgaacgtcggaatggatggttcatttgtaaaa

SEQ ID NO: 448253 - DNA, 145 bp, Triticum aestivum
agcttgcggatcgctattaagggacgcacattgtgactgtccgaaccgcggtcttatccattacatacaggacgtctagtacgtactctattagacttggaacgctaaccaaagcttatacattcaacggttcatgaacacatat

SEQ ID NO: 448254 - DNA, 107 bp, Triticum aestivum
agcttgcgaataactataaattgacacagcatgagagattgcgaccatggggatcatgcattaaatggaggccataccatacctgctgcctgaaactggtaacgcta

SEQ ID NO: 448255 - DNA, 385 bp, Triticum aestivum
agcttaggggagttgatacgttgttctcacttccagaaaatctttctcatgcttttcctcttgttttggactctaatttgcatgatttggatgaaactaaccccgggctgacgctgttttcagcagaactaccatggtgttgtttttgtgcagacataaaagttctcggaatggaacgaaactttgcgaggaatttttatatcaataataagagtttctggagccaagacccaccagagagatgccccctgggtgggcacaacccaccatttagcgcccccctctcctggcgcgcccaggtccgttgtaccaacctgggggcccggttgacgactccttaatcctttaaatcaacttatttccagaaaaaaattcagggggaagg

SEQ ID NO: 448256 - DNA, 242 bp, Triticum aestivum
agctttcacgaagccaccaaagaaataacataagaaagacaaggtggacgtgaaagaaaggatatcaactagagatgtaatttctcaagtgtataaggttctatgtagacgaaatcatgatgatatatatatatatctacaaagaaggatgtacacccaaaatagttacaccacgaaggaaaaacatatccacaaggaagtcataaatataccaataagatatttgcttgaaagcatagcac

SEQ ID NO: 448257 - DNA, 147 bp, Triticum aestivum
agcttatggtacaataatatgtgaccaacattgaacatggtagaacagagatgcaaacatgagcacaatggactacatggattcgctcagagagtcaacaaacgctcacgatctgatgcaagttgaactattcatggataggtattg

SEQ ID NO: 448258 - DNA, 238 bp, Triticum aestivum
agcttatgcttcaattatatgagaccttcattgcatgttcttaaaccgggttgcaaacatgaacacactggtgttcaagcattctctcagaacgacgacagacgctaaccatctgaagcacgttaaacttgctatccgtaggattcgatcgacctagacctgtccgatccattaatgctcgaccggtgctcaccgctttagagatgagttcatatccagcattgcgaaagcatttaca

SEQ ID NO: 448259 - DNA, 82 bp, Triticum aestivum
agcttatgccacaataatatttattcttcattgaacattctaaaaccgggttccattcatgaacccattggactacattcat

SEQ ID NO: 448260 - DNA, 402 bp, Triticum aestivum
agcttcgcgtcccaatagtgcttgatagcaacttttaaatggggcgatgtggaagactaacttttcgcgacgggagttgttggatgagccgaacacaacttctagtggtagagagcccgttcaatgggcatatgggcatggcatcactcctttgaaggaagtgttgctatggcgtattttggttgggtctatccccattctgcggattgtatcctgatatagtaaggttagatcactgccgccgtccattaggactggtgtaaatggtattccgtcaatattaggacctaatttcgaaccattcaatcttgcgttccgattccttccgaataaatcttgatggccaaaagtaatgggttttacattcaatggtcggaattcccttgggttgaaccttccggg

SEQ ID NO: 448261 - DNA, 366 bp, Triticum aestivum
agcttcacaaagatccggttgggaaggcttgaggattaagctgttgcaataagcttgtgattcaacatatacctctgcgacgtgctactaaggctgtgttcaaatggtgtagttatttgcagctttggtggccgcttagccgcccctaggaccgaaacgccatcaactccatcattgcccatcttcgcccgatggcgctccgactggcaccgtcgcttccccctccaccagcagagccagactagatcttctccgtctgcgccgtcgcctgtgctgtgtttttattttctttgtgcttgttgagctgtgccctcagcagaaccttcttactgggtgttgtgctactttgcgtgtggcgtgtgcgta

SEQ ID NO: 448262 - DNA, 396 bp, Triticum aestivum
agcttacggttggccatgaacaccccatatcccagcttctgccaatgtggatatctcttcttggcctcaataagcacttcattgatatagtaaatcggtcgttgaatcggatattccttgcctgcttccttctgttccaccacaatagctacattgatagcccaggcgttagcatgatttaactaataaaatacgaatgcatgtcgccaaagattatatagttggattcgtatttgaacatagtttccaattatataattttaataccattatttaccatttggtgggtaaaattgaaggccaaatattggaccaaattttaaaggggcctttgacccagaccggaggtattacccaacggcggtctttaattaacgacccaacttgttgcccgct

SEQ ID NO: 448263 - DNA, 64 bp, Triticum aestivum
agcttatggaacaattcgtcggagtcattgactgacaaagagcctggcttgagatggcatgatc

SEQ ID NO: 448264 - DNA, 369 bp, Triticum aestivum
agcttggatctgcacatttacctccaattggtcttgtggtaaagagtggtaaattgcaattccagtagcaacagatccttgagtcaagcctagaatttttttgcatctaaatgttgcatcagagtatacttctggtcatgtaacttgaagatcagacttaatcgttttcccctgcataggaatctgattagtaagaggttaaacaccgaccatctcattggatttgagctgagaagaaatatgtataaaatcatcgagttcattacatatggctattgctgcaatgttcatatgattaggaagagattttttcctactaaattaataatcatacctatgctttcaaagacacctcataaagttgagaat

SEQ ID NO: 448265 - DNA, 348 bp, Triticum aestivum
agcttgaactacatcgtggatatccatggagacttgatcttcaacggattcgagaccacggcagccgctccctgccactacgatgaacacgacgtaaatctgtcatctgaacatacccaggagatagcacatgtagctgcctcggctttagatccggagaaaatagcgccatctgaggatgggaagttcaaccctgccacagaagcagcagactcagcggcgttggagccgcaacagacttaacttcaagagacatctatgtcacccgaaccatggactcgcctccggttgcaggttccgaaccttgtgcgttcacgtacgtcgagcttgaccggtcatcgatcgtcg

SEQ ID NO: 448266 - DNA, 388 bp, Triticum aestivum
agcttttacctcactttttacattatggttaaagctattctaactcagggggtaggttaaggattatgctcattggtgctcccaagaactacatcctggtagcaccgctaggtgtaccacccgcgctagcaaactgagacatctttaatgcctatctgacgcttcttgatgactacttcttagtgcagcttgcccttctttactactcaaaattgttactcacatgagatcacagagctatttcaagctctttgacatgaacaaaccacctacaaatgtcttgaggagactttttctttataatacatctatagttaacgaatattttgtcttaacccttaaagttgtcaattattttctaaacttcaaaatttaaactttatttact

SEQ ID NO: 448267 - DNA, 207 bp, Triticum aestivum
agcttcttcctttgaagctctaggtattgcttcatttgctcgtccttgctttgccgcttcttctcgtccctcacatccttttgagacatcatgccatgcaaagtctcatgtaaggccatggatgaggcatcatgtatgtcgtccaccttggagttggtcttgcccctctgcctcttcaacgactcgccatctccacctccggcgaac

SEQ ID NO: 448268 - DNA, 162 bp, Triticum aestivum
agcttggaggacgcttaattccatgatgtattcataccccagtcatgagctctcaagataaattattatgctgaatttgtatgcccggctttttcataatgatcaatccatgctcggtacttcttgtactggatctgtcatgaaaaaagactatcgactatg

SEQ ID NO: 448269 - DNA, 113 bp, Triticum aestivum
agctttattttgactataagccttagggggattaacaaaaggttgccaccagggaattccaccttcttaaggaccagtattattatccaaatccctggaatcccagattaggg

SEQ ID NO: 448270 - DNA, 236 bp, Triticum aestivum
agcttggccttctctcaatggcatgcacgatcaaaggctagtaatatgtctgtaggattaagatctaatgaccgagctgtcagggcaacacctatagttaggtacttacgggacacctgatattaggtacttaatcggtctcgggaagcctatgcaccgatgccacccacaccagatctcaaaggctcttcaaccttgctaggctgttgccttggactaacgcctcagatacgatt

SEQ ID NO: 448271 - DNA, 151 bp, Triticum aestivum
agcttgtataacgaccgctatacccgaagagcacgtgcctcaatgaaggcttttatcgagatggcatacggactactattggtggacaaatatctatccggcatgctctcagaccgtccatagcagtgctaccatttgagcttacgcatct

SEQ ID NO: 448272 - DNA, 217 bp, Triticum aestivum
agcttgtataatgaactctataccttaacagcataagcctcactaaagggtattagcaagattgaatacggactactataggtgaacaaatatctatccagcaagctctcagaccgcgcatagctatactaccatttaagcataagcatctacctatacattatagtcgctacaagaaaacatacttctcaccgcatctactactattacttcacac

SEQ ID NO: 448273 - DNA, 236 bp, Triticum aestivum
agcttgcgcgagaacctgcgaggttgcgcgggaacgggctcaccgatgattcattggcgccaccgtttggccaaaagaacactcccgcgcgctaagcaagcttccaagttcggaaacttcttggcccttgagttttatattggatggggttccaaatttaattccacccggccacccaaacacaagcgatctatcacaaatccggcaagagcccgcagaaacagtacaccattact

SEQ ID NO: 448274 - DNA, 386 bp, Triticum aestivum
agcttttatcttccaactctccaagttgttgtttagcttaacccactagctcggggtatccgacacggattcttggagaaggggtggttacagaaaaccaacttgctcacaaactcaacatagcggtcagttgacaacctggtgatacttccgagaagataatcaaaaaatcacgaaccaccgatatgctattaagctcgagaacaatcttgcatttcagggcaagacgagatgatcaaataagcaagggattgaataatcctaacttattggtccgaaaatgcacccgaaattaaggcttggtagcaccagccggcttagaatggtgatttaaggaccaacacgcttagaatggaattattggcccttaacttccaagccacaca

SEQ ID NO: 448275 - DNA, 295 bp, Triticum aestivum
agcttatatgatgaaggctagacccggagagcatatgtttcactagaggcgtctatcaagatggcatacggattaccgtaggtgaacaaattactatccagcaagcgatctgaaccgcgcataattatgagatcatttaagcatgagcatgtatataggcatcacgtccgtgacaagttgaccgactcctgcccgcatctactagctattactacacacatcgaccggtatccaacatgcatctagagtcttaagttcataagaacagagtaacgcattaagaaagatgacatga

SEQ ID NO: 448276 - DNA, 64 bp, Triticum aestivum
agctttgacactgatatcttctattttaaatcgcaaacctcatacatggggactggcaactgat

SEQ ID NO: 448277 - DNA, 295 bp, Triticum aestivum
agctttgacactgatccttacgattctaaatcgcaaaccggatacatggttactggcaacggatgagctgacactagatgcagttctaaacaaaacgtcgtaccgagatctacatgtgaagcgaagcacatatgcgaatttgaagcatttaacgaaggagtttggatgaaggagttcatattctacctacgtgttatacctaatgcattgtgcccaatgaaaatcatctgctactatactggcgctattgacttggcaactgaattcaaatgttacaaaataaccatacacatta

SEQ ID NO: 448278 - DNA, 61 bp, Triticum aestivum
ccgagccccccctcaagactacggcatctataagctctgttttgattataagcatggggag

SEQ ID NO: 448279 - DNA, 131 bp, Triticum aestivum
agctttacaagatacgtttactgatctatcgttaatctatccatgaacgggttggagctatcattgagcaagcgccttcattagactcagtatatacttcttaatgattcacttttgcaccttgtactaat

SEQ ID NO: 448280 - DNA, 118 bp, Triticum aestivum
  unsure (1)..(118): unsure at all n locations
agctttgaaactgtcaagtatacctggaaagtgatcttcattctctntaatatattcccaattaacccatatcatatcacagacaattggcttctagtcaagaagattggtctcatag

SEQ ID NO: 448281 - DNA, 115 bp, Triticum aestivum
agctcgttaagaggttggttcaggcttcattcatcccgctttccgcagaccgaatcttctcaatcaccgcacccataagggctctgtgttcttcaaccatggaagcattctttga

SEQ ID NO: 448282 - DNA, 320 bp, Triticum aestivum
agcttataccgaactttgttcctattaagccaatttttttaccacaacatggtaggtccatgacatgacatgcatgccaagtttcatgatattcagacgtgaatcgtatccacatgaattttaaaactcaagcttctgaatgttctctgtcgatccacgatgcccagacgttttaattttatttctacttcatgcatgggacctagcaatgtacccgacacacatgtgatgtttcaaccaactatggagcacgagagcacgtgcttgtagcctaaaaatgacttaagcacctttaatgaccattaacttaacttatgtat

SEQ ID NO: 448283 - DNA, 79 bp, Triticum aestivum
agcttatacagaccacattaagactttcgactcttctactaaccacaggagctagggacatatccatagggctcactaa

SEQ ID NO: 448284 - DNA, 79 bp, Triticum aestivum
agcttatacaggccacaatatgactctcaagtctcctactaactacatgggttcgctacatatccttagtgctcactaa

SEQ ID NO: 448285 - DNA, 241 bp, Triticum aestivum
agctttgccttcgctatccgctcctgttcaaaggatagctctgttaaagggccattttatgatgaaaatacggatggcatgtccaaatacggggctacttacttgagcatccgggcaattgcagctcagacctgcgttctcggacgagtccggacaccttgcttgtgatccgaagaacaatttttacatcttcacgggcgtcgcgcccataaaatgttggaggactcgcggtcccttcgga

SEQ ID NO: 448286 - DNA, 147 bp, Triticum aestivum
ccggcccccctcaggcacggatcgataagcttagggagcgatacgctgtctactaaagaaaactttctatgcgctgcactagtaaaactcggtgtgatgacaacatgaatctaccccgggctgacgctgcttcacagaacaaccatg

SEQ ID NO: 448287 - DNA, 124 bp, Triticum aestivum
agggcgaacattgaacctcagcgttagcaccgtcaaatgtgggtcctgttcgagcttgacgtaatcatagacatacacacaacatgcgagccagagacataaagtgacaagtccacactgcata

SEQ ID NO: 448288 - DNA, 284 bp, Triticum aestivum
agctttgcgccgctaccatatccggataggtcatgccagaagctttagcttgcaggtatatgaggtgttaccaccttagaacgatgtctggaaggcgcgtatgctacaactctagcagtctgtcacataactatgagcttgaccaaccatttgcatggctcaagatctattctatcattacaacgttgaatacgctcatgctctgtagagaatcttcatagggtcatgaatcctgaatgcctgattctttatatgagcattgaaagctctccattcattatcaa

SEQ ID NO: 448289 - DNA, 247 bp, Triticum aestivum
agcttaaatagctgatcggaggtgcgagattgccgagtccctgggctcacagattactataactccagatgcaggtccaggtgattccgtcaggtgacgagtctagctaagtgggagttcgacgaggactctagcgttactacgtttcctttccgatgatagaatggtgccattgggggtgatgggaccgttgcggagttgggtttctttatttggcccgtaatcggccatgaatgtttggatgatg

SEQ ID NO: 448290 - DNA, 287 bp, Triticum aestivum
agcttgtttagcttgatgggtggagcagtgctattatgacacgaagcacgtatgctgatcatataataatcataaaagggggaaaccctaagcatgatcaattaaaccctattatgacggtgccatggtagatttgaagctgcaaaccacataaatgctatttagcaaccatttgttgcttcaaactaagaactaaaatctaagagctgaaaagaaagtagagtaccaagttacgatctattttctgtttgaggtcaaaatgtttagcagatatgaggtagtaccac

SEQ ID NO: 448291 - DNA, 178 bp, Triticum aestivum
agctttgcgcggctaccatatccggaaagttcatgccagaagcttttgcttgcaggtatatataagtgttaccaccttaggacgatgctggtaggcgcgtttgctacaactctagccgtctctcacataactagtgcttgaccaaccattttcatggcgtctgatctaacctatcatt

SEQ ID NO: 448292 - DNA, 119 bp, Triticum aestivum
agcttatcgccattagcttattgagatattgaatacatgcttggccgggggataggagcactgtcgataccgagcttagaactgatgaaattggatttcttacaaaactcaagatcttt

SEQ ID NO: 448293 - DNA, 280 bp, Triticum aestivum
agctttaaggctaaaggaaaaaacgaatagagagaaaaggtgaaggaggcaacagggggaaggggacgaacaaagagttcggctctaggcgtagaaccttcggagtctggccgcgttccaggggttcggctccaggcgattgtctgacgcattacacaggcggtacactcctccggtgagaacttcgtctatgatgtatggacccttccacttgggcttgagtttctactttttcttctccggcaggcatagaacaagtgttccaacgttataagtcttg

SEQ ID NO: 448294 - DNA, 291 bp, Triticum aestivum
agcttcaatcctttccgttcccaaaaaacactctagccatgtctcggatctggagcgcaaggcaagtggatggcctcctccgtcacagaggggaacatcaaggagctccgggaagcggggtacctagccaaggaaatcacccaccggcttcctgccaaaaagcagatcgtccccactctggagcccaatgagagggtagttttcatcccccatttccttagcggattatggtttccccttcatcctttcgtccatggtctcatgttttactacgggctagatttccatgat

SEQ ID NO: 448295 - DNA, 105 bp, Triticum aestivum
agcttaggctcttggttattcatgaatattaccttggggttcctaggggcaacccaaggctgggttttcggctttgcctaaaaatagtatgaattttggaaacaa

SEQ ID NO: 448296 - DNA, 184 bp, Triticum aestivum
agcttatgcgcttgagtcttcctatgaatattaccttggggagcctcgggcatcctccaagctttgcctgccaggccggcaatccaagttgatcacatgggccacagatcatatctctgcggcagtccattttaattatcggtagctgctgatcattctaccccggcagttgcacgtatagtct

SEQ ID NO: 448297 - DNA, 325 bp, Triticum aestivum
agcttaggctcttggttatccttgaatattaccttggggtgccttgggcaaccccaagcttggttttcgtctttgcctaaaaatagtattgattcttggaacaaatgcaaagatgcttttatctctaagtattttcctcccgctaagatcatctctcttagaaacgacattatgaattttaagaaacttgatcatgaacatgttgcacaatcttgggagagaattaaattaatgatacataattgccctactcatggtttaaaatttgtggatgattttacaaaacatttatgccgggattgaattttgcttctagatatctttt

SEQ ID NO: 448298 - DNA, 311 bp, Triticum aestivum
agcttctccttgttctatgagttgatgcgacacatcatagcactggccccacatgcttgcctctaaacttggctgaaagacctgcaatgtacaatatatttgctgcaacctctaacatttacccaccacaaattaaaatatatgtggacgtatgcatcgttctgatgcagaggccggggagtccccccttttaaaacaaaacaaattaaaatatatattcctgtcttgaccagatgagcgtgcaaactacaatcaccagggtgacaggtagggctagaagactattttaatttaaaaaaaaaccttcaaga

SEQ ID NO: 448299 - DNA, 242 bp, Triticum aestivum
agcttaggagctcgccactacgtgtgctatagtccatcgaatccatacccagaactggaaaacttcacagcacacaacttaacaagaaactcgtaagctgcagttgcatgagaaacataatcaccactataagtttcttgaccgaactcattatttatatagatagtggttaaacatactgtataccaacagctctttacgttataaactgtcctaacagccatagatatataaaaatacgt

SEQ ID NO: 448300 - DNA, 433 bp, Triticum aestivum
  unsure (1)..(433): unsure at all n locations
agctttcttgtttgacaataaaattatcaaactcatctaagcattggctagcagacttataacgaggaatatcaccttcatcaaatctatngagagaatnntaccttactacctgtgtcgggttatcaagaccatgtatntcttcaacaggcgggcatattagaccatgtatttcttcaataggaggtaaattcttaacatcttcagctntaataccntttttcttcatagatttctttgtctctggcatatcttcaggactgagaaatagaataccccttttcttcagagttggcttaggagttggttcaagaagtgtccaattattttcattagtcaacatattattcaatagcaattcagcttgatcaactgttctttccctgaaaacacaaccagcacaactatccaggtggtctatggaagcatcggt

SEQ ID NO: 448301 - DNA, 382 bp, Triticum aestivum
  unsure (1)..(382): unsure at all n locations
agcttgtcatttgcctcttgagttagaacataaagtatattggacaatcaaagaactcaactatgacttcagactttccggtgaaaataggttatttgatattagctcattagatgaatggagagcccaagcttccgaactggacggctccggcgagtaagggcactccgtctnctcctccggcgagtgatcagggcactcaacctccttatccggcgcgtggcggcactcctgctccttctccgccagcgccggcgcgccagagcagacagccttctccttctccgcctcgtcagcaagggcggaagagaccctgcggcgctgcggctgctccggcgcgtcgtaagtcttcttcttcggctcgtaagcaaggaaagaagac

SEQ ID NO: 448302 - DNA, 97 bp, Triticum aestivum
agcttgtcatttgcctcttgtgttaggacgtaaagtagtattggacaggcaaagaactcaactatgacttcagactttccggtgaaaataggatatt

SEQ ID NO: 448303 - DNA, 323 bp, Triticum aestivum
agcttgccttccacaccaaggagaatcgcatgcagacacgggtgcagtcttcggtcttcgtgtcttcatagcccatcagtccggcccatggctaacaggtcggacgcccggggaccccttagtccaggacttccttatcatcctgccggagggggattcgatcactgagggcttctacatcaacaccattgcctctacgattaagcgtgagtagtttaccacagacctatgggtccaaagctagtagctagatgactggttctctctctgtgattctgaataccatggtctcctcgatgttcttggaaatctattcggggtca

SEQ ID NO: 448304 - DNA, 260 bp, Triticum aestivum
agcttgtccgactcagttcattccaagggatatccttgtgtgtgtgtgtgtgttgaagaaagatgatatcttcattgattgatcctcgtgtcaattgttggatctattgtcttacccaaatctttgatttgcgtttgggctatcatcaaatcaagtcagaaccaactatattcataatgttgtcttactcgtggttgatctctcgggcatacaccattacatcctttggtcttaccagtgctatcaccttgtttatataa

SEQ ID NO: 448305 - DNA, 87 bp, Triticum aestivum
agcttatgctcttggttttccgtgaatattaccttgggtggccatgagcatccccaagctgattaacgttctcttgtttggcgctta

SEQ ID NO: 448306 - DNA, 125 bp, Triticum aestivum
gcttaggctcttggtgtccttgaatttaccttgggtgccatgagcatccccaagcttattaactttctcttgtttggcgcttaaatcctccagcgcttgctgttgcacaagaaagtacgcatctg

SEQ ID NO: 448307 - DNA, 390 bp, Triticum aestivum
agcttcaatcgttccttgtggagaagaagctagccaatggcacgcggccttgggtactcaaccctttccttggttgtatgcaacggaatcttccggaacaattctcttttggcccattgatgaccagggttaagtgcctgcctaatctatggatattatgcctctttgtgaggaggcgcattgtcaaggtacccaaccactggacatctctcatatcatgtgggttgagctccagtttgcggtctaaagtcggaaagttcccctctatggtccatacctgcacctcttgatctcgaagacttgggagaagctcttttcggatgaagacttttctggtcaaactgggttcgccacgagcctatcaagctgcgttagaagaacaagttggac

SEQ ID NO: 448308 - DNA, 295 bp, Triticum aestivum
agcttggtatcagagccaggctgactgtaggaagccactaggtgcgatcgctaatcggttattagcatttttactgctctttcagcatttttgcaaaggtagccattttctgttggtcatcataaatttatgatttgactactcagaatttttgcctacttttgtagatggctggcagtgactgcgagactcgggtgttcacgaatgtgcccgaggggtttgtcaaactcctcgtctcataaccaagctcgcgatcaggccagcgactcgtccggagttcacgctttaccagcac

SEQ ID NO: 448309 - DNA, 384 bp, Triticum aestivum
agcttctcacaaatcagagcttctcacgacaagcattatggttttgatagggaacgtaccacctttggggacgagacgatatctgttgcctcttattgctttcaaaaaatttctagtgtcaacatagaacaacaggagtgttgtgttcaatcttggaatttttcggggttcatttggccttttttatacattaactgggttttctaggcattttatgtgcataattcaaatttgaactacaagcacatgctccaatgcaccaaagttggttgaaaaatcacatgtgtgtccttgggtgaattctttgaaatttgtgtgaatctcaagtttgtgattaaaatttactagtgccattagttttcaaattagaataattaaaatttg

SEQ ID NO: 448310 - DNA, 55 bp, Triticum aestivum
agctttgttctcaagtttgagagtacttcaactatccagagtagagcattggcag

SEQ ID NO: 448311 - DNA, 60 bp, Triticum aestivum
ttataagctttggtctcaagttttagagtacttcaactatccagagtagagcattggcag

SEQ ID NO: 448312 - DNA, 260 bp, Triticum aestivum
agcttgcccatgattttttccagggtaaaagtgatgatatagcagaagatggacgccggaggcccaccagggggcccaggagatagggggagcgccctataggggggtgcgccccttgtctcctggacagggtgtgggccccctgccctatttctttcgctcagaaattcttattaaatccaaaaagttgtttcgtggagttttaggacttttggagctgtgcagaataagtttccaacgtttgctccttttccagccag

SEQ ID NO: 448313 - DNA, 230 bp, Triticum aestivum
agcttttcggcactagttttaagacctttcgaatacatccccggacggtgtataggaacacttacatggccgagcttagaattgatccaattggatttcttacaaaacccatgatctttctattcgtagtgttcttacaaaacccagcatcttactattcgcatgtggaatacaaacacccatatgcctattgttgtgatacatggcggattgacatttagggtttatag

SEQ ID NO: 448314 - DNA, 420 bp, Triticum aestivum
agcttgtatggacgcttgcaaacgggttccgtgccaggctctagatcaataacgaactcaactggccggtgaggaggcatacccggaagctcttctggaaagacatcttgagactcacaaacaactggaatctgagagatggcattcaactcgcccttctcattgagagaaaataaccgaatggtttcatcacgagcggcatagatgataacatcctcagaagagtgtgtcaattgaatttccctggcagcacaatcaagttgagccttgtgcttagaaagccagtccatcccgagaataagatcaatatccgagtgaccaagaacaattggagaagacagaaatttatagtttcccatcttgatggaaacatccagaaccatggagcttgcgttcatgaatttacccggagagacaact

SEQ ID NO: 448315 - DNA, 84 bp, Triticum aestivum
agcttatattgaataaatccgaaatgatggccttcggagaatcaagctgaaaagacttcagaattgctctgaataggtcaaaag

SEQ ID NO: 448316 - DNA, 228 bp, Triticum aestivum
agcttttattgaatatttttaaactgctgctctatcacggtatatagggatgcttacatcatgcttgctctcattaggatccaagaattctagaactgccaagacaacacttgatcttcaacggtcgatacctttcgagagatcctacttttggcctaattaattcagactaattacttgcttctattgaaaactatcatagctgttacatgtatgatattattatac

SEQ ID NO: 448317 - DNA, 66 bp, Triticum aestivum
agcttattcttttggtgacgaatatctcaacaactccgttctatcttttctctaaggatgctatcg

SEQ ID NO: 448318 - DNA, 297 bp, Triticum aestivum
agcttgtgggagtcgtttcgagtacatgtgctatactcttccagacggtgtagacgggggttgggactctaactggcatgatttgaatgggactaacacggactgacgctgttgtcagcgtaattggcatggggttacttttgtgcagacctaaaagctatcggaatgacctgaaaagcatcggtgattattgttggaatatataaaacagactggaagacgaattcacgtcaagagacccacatcctgtgcacgaggtggggggcgctatccctgagtcatgggccccctgacgct

SEQ ID NO: 448319 - DNA, 62 bp, Triticum aestivum
agctttgttagggccagtcctaccacgcgatgtatggctgctatccggcacctctctccgtg

SEQ ID NO: 448320 - DNA, 65 bp, Triticum aestivum
agctttatttcgtacagtttcagacacgcaaatccaaggggttatctgacaggaattaccgcaaa

SEQ ID NO: 448321 - DNA, 423 bp, Triticum aestivum
agcttgtctgacttagttcatgtcaagggatatcttttgtgtgtgtgtgttgaagaaagatgatatcttcatcgattggtcctcatgatcagttgttggatctattgtcttgtccaaactttgatttgaatgtgggatatcctcaaatcaaatcaaaaccaatgatgtttgtaatgttgtcttactcgaggttgattcctcgggcatacaccattacatcctttggtctgaccaataccatcacattgttcacattggtggaagtccagtgatatggaaattctgatgagttgttgttaagcccatcagcagcattttgtctcctccatgattcgtgctgaacatccagctagtgttggaaacttgtgtaagcattttcttcatgccccgttcatggagtatatgtttggatgaaactagtga

SEQ ID NO: 448322 - DNA, 233 bp, Triticum aestivum
agcttttctgacttagtttatgtcacatttatatcttaagtgtgtgtgggttgatgagagacgatatcggcatcgatgggtcctcatgatcagatgctggatctattgtcttgatcaaactttaatttcaatgatggatatcctcaaatcaaatcaaaaccaatgatgtatgtaatatatccttactcgacgatgattcctttaacttacactatatcatccttttatctgac

SEQ ID NO: 448323 - DNA, 291 bp, Triticum aestivum
ataagcttttacttcaattttttcaaggcttttgtcaactaatgagcacagggatagcaggaaacaacgacggttatttttagattatagtggccaaatgcaggccaacatttgtgaaatatacttatcttaccttaatgggatattgcgaagcacatacagattggaagtcttgtctacatttgtgcaattccctaaatcaagcaacattatcgttcaagtagcacaacatatgaaagcacaccatacaattatgttaatgaaggctattactgacctttcatgacttgt

SEQ ID NO: 448324 - DNA, 429 bp, Triticum aestivum
agcttctgttaaagaagcccccaggtataatgagtgctaggagcacatcaagtgtgtgcgaacaatgcgcaaatcagcctataaaatgtattgaaaagaaaaaaagtgggaagaaggagggggacaagagacagtgaaaatgtaaaaaaggtggacagaggagtgagacgaactctgagtccggtgttaggcgtagaatcttcggagatgggctgcgttccatgggttcggctcgagtcggttgtcagatgtgttacgcagacggtatgctccaccggtcaggacttggtcgatgatgaaggggccttcccacttgggcttaagtttgtcctttttcttgtccggcaggcgtagaacaagttcgccaacattgtaagttttggcctgtacttctctgctttgatatcttcgagcctgctgctagtaaaa

SEQ ID NO: 448325 - DNA, 256 bp, Triticum aestivum
agcttgtgcgatactgtttttaagatcttttaccattgtaaccgactgtgtgtaaccgtacccctctaaagtgtctatataaactgtacgatcttagatcataagactaacaacactcataccataagctatcttgttagccttaaccttcttgatctcgaggtaaatctactattgtactacccatatcatcaatattaatctagcactattatggatttacctacatctagagggcccgaacctgggtaaaaac

SEQ ID NO: 448326 - DNA, 332 bp, Triticum aestivum
agctttattctcaccttttcttgcctgcacgcgaggcgcgtttcgggaagttccttagaaatgcctaggatggccataccagcaagctactcttgacgggctctcgtatcctaggcttcaatactttgctcttgaatggctctaaagacaccacggatgaccctgactttcacccgacaagcaccttgccgatgagagctgtaactgaacactcacaaattctgactactatggaacccctactatagaacacctacaggagccctcggacatgaataacacacagagcctagcattgttggaccaggcccaaaacacggcacgttcacaca

SEQ ID NO: 448327 - DNA, 258 bp, Triticum aestivum
agcttgatcgatatgtatattagacagtcatgtaaacaacgattcactagaacggtacaacaagaaactcattcaatgatgtgagatattgcgtgtcagtttaaagattaggttttgttaactactttacatgctgccattttaaaattcagtagacttctgacattcggctgaattttttttcaaaaatgacgttaaccccgacctctgcatacagcgttgcacacagtcatcataattcatctaatcatgcttaag

SEQ ID NO: 448328 - DNA, 434 bp, Triticum aestivum
  unsure (1)..(434): unsure at all n locations
agcttcgggagagggccaaaagacgaaggaggtggccacgatccaccagggcgcgcccaggggtgggcgtgccctggtgcctcatgggcccaccttcgctccatttgatctaattccgcctctaaaattctctaaaatcgggaaaccaagagagagacacccaaaatactttttccatccccgcaagttcctgtaccatgagatcccatctggaggacttctccagtaccctgccagagggggaatcaagcacgaaggggctctacatcaaccttgttgccccttccgatgatgtgtgagtagtttaccacagacctacgagtccatagttactagttagatggcttcttctctctgtttgatcttcaatataatgttctcctcgatgttcttggagttctatttaatgtaatcactttntgtagtgtgtttgt

SEQ ID NO: 448329 - DNA, 173 bp, Triticum aestivum
agctttaccggagggttttaaaaccattgacgtattcaccaatcacggggtcctgtgcagcaattcgcatattcaggggcctaaatctctgaccgtctcttcaaatgatctaattagttctctacactacattcagcttttcttaccatgagagaaactcctaactttctgtt

SEQ ID NO: 448330 - DNA, 390 bp, Triticum aestivum
agctttcatcatttaggttctcatcgacaccgaggcatccggggcaaccaagttaagttttcatcatttagggtttatcgatgccgaggcaccctaggttgggcctaatcttggctctattgccacctatgttgggtttatcatctagggtttatcgatgctaaggataattctaagttgggcctaatcacttggctctattgccacctatgatttaatgcagcaagaatggcagggcagttgatcctacttaactaagtactaagatagcccggcccatgcattagtcgcaagtaccccatatgtcctatttttagcaaagtcatgctaaaattcacggaaaatttcaacatgacctttgctgaaaataggacatatggagtacccaaa

SEQ ID NO: 448331 - DNA, 394 bp, Triticum aestivum
agcttattttctggcctttcctccgtatgctcatatggagaccttagggatcattgaacactgcatcctcacataactttaacagcaaacttagttagagccgcttgtatgatcaagcacatcagtactataagtattgttgcataccaacatatattttatttttgtactgtgttcactgccatacaaattttccatggcttaatccactgatcgaaattggctgattcgtacaaacacgtatactatgcatatgctacataatcttgacacaataggctcgtttgatgcacatctgaacattcaccatccttctggtgccccaaacatagtaattataaacattttgtatctaaagacagtgcataaagaattagaaccgactgaaattcta

SEQ ID NO: 448332 - DNA, 155 bp, Triticum aestivum
agcttacgcgtcgatggtttgtacagcaacttcctaaaggcttccaggctagttatctagagcttcaagatctcaagagatctacttgaagaacgtggctcggcgtgtacgactggttactaacctgcagcttcaccaaccatttagtacaccct

SEQ ID NO: 448333 - DNA, 179 bp, Triticum aestivum
agcttacccaaaacagcttttttacccagagccaaaccagatctcagatcgttgtctcaagtccacgatcatggggaaaccctaattcttgatcagactgcgccacctgggaccttctgcttcatatccctcctaagcacgttaaataacagcattctcttaccatggtcctagtcttg

SEQ ID NO: 448334 - DNA, 53 bp, Triticum aestivum
agcttgtaaggacgtttgcacaccgttccatgccaggctcaagatcgatgacg

SEQ ID NO: 448335 - DNA, 205 bp, Triticum aestivum
agcttcctatggaaccaggaacttttgttctccgtctctatcaaccctgcgtatcgccaaccacaatggacggaaaaggagaaagtcggactatggtaagcctctcccgatcaagccgtccgctctcggcagagaccctgccgaaaacaactcctaacaaactaccggaccaccccttctagccaggccaatggaccccgcgatg

SEQ ID NO: 448336 - DNA, 407 bp, Triticum aestivum
agcttgccttccgcgccaaggaaaatcccttcgggacacaggacggagtcttcaatcttgtatcttcatagtccaggagtccggctgaaggtataattcggctatctgaacaccccctaatctaggactccctcaggtgcccccctgcccctgtatataaaggagcaagggggtgtggcctgccaagggagagggggcgccaggaggagttctacttttactatgatttttgacttttttttttctatttttattatgactttgatggtttttgtttttttatgtttttttattggtttgttttttttattgtatattttttttgtttttttttttatttattttttgttttgtttattgttttttttttttttttgttgtttatatttattttgtttttttttttt

SEQ ID NO: 448337 - DNA, 261 bp, Triticum aestivum
agcttgatgataccaatggcctgcctaattgatataataagatgagtcaagcatctaagcttaaatgatccagatactgaatgcacatcaagtactcacacattcacatgcattgtatcaacatgatgcgtaaggatcagctagaaattgatcatacataccgtgatggatgccaaaggggccattaatactgagaccaatatgtggtcactaatctaagtcatctactgatttcccttgaagataccaagtattggccgc

SEQ ID NO: 448338 - DNA, 405 bp, Triticum aestivum
agcttcgagcacaagccatccagtctttctcagcatgataccccggtggcttccaacgcaagctgcccagtcttcttcagtacggcactggtacaagatattaaacagtgagttgtcagcatatgacagtgtttccaagtgtcagatttgcaacagtgagtaggatgtcaacttcatgcaagtccttcgcacacggaaaaattcatggtacgcatccgacaacctcaccggttatgcaagagaaagaaagtcggtgagtgatgcaagaatcaagaagtcttgaagaaagacaacattgaggcaactatcttggcagtgggtatcaagatcagtcccgcacacacgacaaggtgatgttattaatccggtcactgtttggcataagcaagaatagtattgagatct

SEQ ID NO: 448339 - DNA, 73 bp, Triticum aestivum
agcttactaactttctcttgtttggcgcttaagtcctccagcgcctgctgttgcaccagaatgtatgcatctg

SEQ ID NO: 448340 - DNA, 209 bp, Triticum aestivum
agcttgatgaagataccgtcgtcggccttcaagtaggcgccgggctggggctcatgggagcctggctccgcggcggcggcggagggatcggtggtcggcgcagcgcctggcgctcctgcggtctcagggccgtcagtacgatagcccgacccctcgccagcctctgcggcggcagccttggcggcctcttcgccggcgggatcatcagc

SEQ ID NO: 448341 - DNA, 411 bp, Triticum aestivum
agcttgggacaaacattaatttcagcaaatatattctcaaaaacatcatcgggttcagacatagcatccccaagctttccaagtaccaaatgcaaatgctccttatgctcctcttcgttcttcgagtagaccagaatatcatcaatgaacaccacgacgaacttatctagaaactccataaacaccttgttcatcatgttcatgaaataggcaggtgcgttagtcataccaaatgacataatggtatactcatatagcccgtaagctgtcttaggtatatcctgctctcgaatcttcagctggtggtatcctgatcgcagatcgatcttggaaaatactttagctcttgcaactagtcaaacaaatcattgatcatcggcagtggggacttgttcttgaatggcactttat

SEQ ID NO: 448342 - DNA, 414 bp, Triticum aestivum
agcttaatttctgctcgtcctcgagtaggtaaatggtaaaaacagaattttttatgtggaatgatgcctaacatgttcatcacatattcttttctcttttagcatggacatatggactttagatggttcaaagcaatagtctatatttgacatgaagacttcaatactcaagcatatccacaagcaaccatgtctttcaaaatatcaacactaaagaaagttatccctagcccatcatgctcaatcattgatccactcacgaaacacactcaaatattagctacatccaatgcacaagtttgatcatagtgctccctagttggtgctttataagggaagatggagactcaaataaaaatttgcataaactaaatagataggcccttcgcagagggaagcagagatttgtagagg

SEQ ID NO: 448343 - DNA, 348 bp, Triticum aestivum
agcttaatttctgctcgtcctttagtaagtaaatggtttaaacagaactgtgtgatgttgaatgatgcctaagaggttcatcacatattcttttctcttttagcatgttcatatatactttaaattgttcaaagcaattttctatatttgacatgttgacttctatactcaatcatatccactagcaaccatgtctttcaaaatatcaacacttaataaagttatccctatcccatcattctctatcattgatccactcacgaatcacactctaatattatttacatccaatgcacatgtttgatcatttttctgcctattttgtgctttataatgtaatttttatac

SEQ ID NO: 448344 - DNA, 200 bp, Triticum aestivum
agcttgtgctaaataatttataaggtataattagcgctgttagcgtgggtagtgagtgtgaacaaagtgggaacaatcttttaaaggctgtattagataagtggggtagaagggtataaatatatagtcaactacgtgtttaaatatatattgtatgatggagactaattctctgcattcttggtggatccatttattct

SEQ ID NO: 448345 - DNA, 63 bp, Triticum aestivum
agcttggcaaagacaggagagcactggatcacgttcatgtcattgtgagtgcctagcatacca

SEQ ID NO: 448346 - DNA, 305 bp, Triticum aestivum
agcttcgaccacctttccgagcgcgatggagcgacctcctcctcctcctcctcatcatcatcatcgtcatcttcggcagcatccgagtcccactcctcttggctttcgcctccactcgcttctccctcctcagacggagtctgcgctccattgggcatcgagtacagttcggtgagggcctgtcagacatcaagacaaaggtaaatcgaccaaattgcggtgaaaacggaataagcatggtaagaatacaattggaggtaaagtgggcataccttgtctggaatgctggaatggtcgagtggagg

SEQ ID NO: 448347 - DNA, 341 bp, Triticum aestivum
agcttgaatgtaccttacttgtgcaaaacaagtaccttctattcccttcgtgccatttcttcaacaagtattttcagacggagggagtagtattttaatttcgatgaatttgatgcttgaactgctacttacacacatattggagtacagccttagttttcactcttgcaacctttttgtttgtttcatatcagtacccattttcttttgctaaacttctgatagtgtgctggtccttgcactccagcttggtttggaagatatgttctttaacagtttcttaatatttgcagttgcaaatatcttgttcgttgaattcaccggttggtgttggttattca

SEQ ID NO: 448348 - DNA, 372 bp, Triticum aestivum
agcttgtgttggcgggacggcagtaaagtggccaacgattatacaagcgattgagggcaaggatggtattcctcatcatgaatcgctgcagactggtgtagccactagtcttagatcggttgtcactgctgagacagcttctgtgctgcatcgcgcatcgagggcagatcgctaacgggctgtcagacatgacgtcgctggttaatgggccaaattgcggtgcaatcacaataagcctggtcagaatacccttggaggtaaagtgggcataccttgtctggaatgctggaatgcgtcgcttggaggaatcctgctggctccactagggttatccttgttcccagtgaccgcgggcatccacctttctagcat

SEQ ID NO: 448349 - DNA, 241 bp, Triticum aestivum
agcttggatagagcgattaccaggcagagtcaaacgcacgacgtagatgtatgtggagcttaggaagccttataatatggtagcaaaaagtgttagcaataatcattttagagatgcaaagttgaataattgctcaatggcggtactgtgctggtcctaggctagattgtactagagacgcgagcctagatcacatacaaattcactgcgcgacacgtaaacaagggaggagcactctctg

SEQ ID NO: 448350 - DNA, 103 bp, Triticum aestivum
agctttggttcttatgaatatactgtcgtgtctttcggccttgtcaatgctcctccggtgttctctcggatgatgaatttcatcttcaacccctataccaatg

SEQ ID NO: 448351 - DNA, 275 bp, Triticum aestivum
agcttactcaaaatttaatgtgaatcaagtgcatagctagatggcgggggcttaccttccctcgtaggtgaggcataaatcttggtccttggatctttcaagttcttcatagtgataaactaatattaattccaagtgactcaaagaatatatctattcttcccggcaactgctctagaaaatgctcttgattacccattcttctaggtcattgcaacacttttttgatggtagagttttcaacccgaattttattgattcaacacaaggggagc

SEQ ID NO: 448352 - DNA, 358 bp, Triticum aestivum
agcttggtgtcataggactatgactgcgcacaacctgtacatgctatgggtattatgttgattttgaacacagagtacatgatggttggacagcatacggctcacatgtttgacgtaggatgagccagtatgcatatattgataggacgcatgtcatgcactttacctgaggtttactcacgaacggtcaatccaccacttttgttttcgaatattcatcaatgtgcatatcatactatatagatcgggtcacagtgtcatacaaacttcgaactctacatcttatattgcaaagcctagagcctctaattagtgtgctaactaaacttaattagttcagactaattacatgtttttc

SEQ ID NO: 448353 - DNA, 267 bp, Triticum aestivum
  unsure (1)..(267): unsure at all n locations
acccgggacgaccgacgcgggcggaacaacccccaagaaccaggacgcngagaggacaaggctaacatggcgcaacaaagcgacagaagggggcccacaaaccccagacaaagggacaggaggaacaaaaaaagcgaccaaaaccccgcacagagaaaaaacgcaccgactaataaaaatacaacatatcatgctaagccataatcagcatcaggcccacataccatagggtgtacacctggtaataagccttcttcatactcacaa

SEQ ID NO: 448354 - DNA, 248 bp, Triticum aestivum
agcttgttgtcttatgtttatgcctgggcgccttccgcacatgctatggggcgtatgttgattttgatcacagagaacatgatggtttgacagtatacggctcacttttgttacactggatgtgtctgtgttcatgtatctatacgaaggttgtgatgcattttacagtatgttcactctactaacggtcagaccaccagctttttttttttcaatattcatagactgttcatatcatactttatata

SEQ ID NO: 448355 - DNA, 60 bp, Triticum aestivum
agcttgtggctttgcatatcattatcatcattggtattcaaagaattggtggggccctct

SEQ ID NO: 448356 - DNA, 362 bp, Triticum aestivum
agcttagagcctttatggcaaacggtttaacaggtgttgattttgctcgttgctggaacggctggagcgttctacccttaagccggcgccccgacttgatgtgtgaatacacagggagtttgaccgaccctcaacggcacattaatattcaactgacagaggctgaaattactgaggctgtcaagaaaatgttgaatgaaccggaggccgtctgcggccagaccggactaagtcctttctgcaccttcaacaaaccgccatctgtaagaattatagaacctccttgccgtaagttgcttctttcaaaatattctctgaaagtttgtctattttgacagggtgatgatccgttctggaataaa

SEQ ID NO: 448357 - DNA, 72 bp, Triticum aestivum
agctcgtagcgtcatatttacacaatctccatgccaaactcatcgtggagtacgaatgattgactagcggta

SEQ ID NO: 448358 - DNA, 51 bp, Triticum aestivum
agcttatggaacatttcattctacctacggaatacatcaaagtcgatgaag

SEQ ID NO: 448359 - DNA, 52 bp, Triticum aestivum
tgcttatggaacatttcattttaccttcggaattcaacatattcgggtaagg

SEQ ID NO: 448360 - DNA, 51 bp, Triticum aestivum
agcttatggaacatttcattctacctccggaatacaacaaagtcgatgaag

SEQ ID NO: 448361 - DNA, 267 bp, Triticum aestivum
agcttggggatgctcgattcgtcttcaacgtatctatactttttgattgttccatgctattatattacccctttcggatgtttatgggctttattttacacattgatatcatttttgggactaacctactaaccggaggcccaacccatattgctgtgcaaattttgcctattctgagtatttcaaagtaacggaatatctaacggcgtccaaacggaatgcaaccttcgggagcgtgatttttggaacgaacgtgatccataggac

SEQ ID NO: 448362 - DNA, 294 bp, Triticum aestivum
agctttagcatgatcctttattctaacagggaacggtggtttctggaagtacgtagtatgaacaatgtgatcaacattataagtcataatttcttattcaactttaataggtgttactactttaaattcaatggtgcgatgatatttaaaccacttctccttacgttgatcaacatgagtagcaaaagattctcataaagaagctactatcttatgataccttccatatctagtacttaaatcatgaatagcatctttatccatataatatttaacactatttaacttaaggtt

SEQ ID NO: 448363 - DNA, 405 bp, Triticum aestivum
agctttcgttgagacaaagcatgcaaaaaaaagttcgagaacagggtaacgggcgtttggaaccaagagatctgatagttcttcaagtgagaagctgagaagggatgacacccatttgacctagaagaccgatgatcaagtgtcaaattctaagccaagagatggcaatgggactataggagcacggtactaaaccatcataccataccggtgacttcaccaaccgaaaccaactcaaataagttcatggaggaaaagaagacggtcatgatagattggtgaatgaggaaggaaaagaaagcctaaactatccaagtaagatagcgaaagagaaagctgtctttaaagcctgttttgaccaagctagcaagctggagcacctttcacgctagcttcccatcgctc

SEQ ID NO: 448364 - DNA, 411 bp, Triticum aestivum
agcttaacaaaagtcccttagtgaccttgagccaaaagggatcacaaaatatactaacaagcacacgaacatagcaaaaacataatcagttttcagactgtgaaaactgggacatgctgaaacataactcacgaaggcatgtttacgagctcgatgcactcaccacggtgcaagtcatggcaagacaagcattcatcctttaagaaggcacaaaatacaagctagaaatggcaagaacaatggcatagcatgcacggaccaactacaataacataggcaaaatcgcaaacaagttgacgacctgcccagattcacaaagtagcaaaagtagagctcgattgactcaagctagggtgatccataattgcaagcaaagacatggatggatagagaactacaatattaacaaaa

SEQ ID NO: 448365 - DNA, 380 bp, Triticum aestivum
acctttcgggacgatacttcgccgtctcgaggcggaacctgggcagagccaatctagagctccgggggggcttttatgccggggaaccttccttccggaagggggaaatcgaagccttcatcttaaccaacgatcctttaatcaaaagggggtcattctccatggacatcttcactagcaccatctcttttaaaaccttagttcatcttttgtatccaatctttgtctcaaaacctcatattggtacatgtggcttgctagtagtgtttataactccttgtaattgatgctagttggttttttcagtgaaagatcatatgttcagatccttaatgataattaatattcctttgattatgaacatgaatatgctttgtgag

SEQ ID NO: 448366 - DNA, 324 bp, Triticum aestivum
ggttgatttggccaccggtcaagagattctcgctactggtattaaggtagatcatctttctacctctttgctatatccacaggtcacatgtgttgtttttcatgttctgagctcttttcctattaggttgttgatctccttgctccttaccaaagaggaggaaagatcgggcttttttggcggtgctggtgttgggaaaacagtgcctcatatggaactgattaacaatgttgccaaagctcatggtatgtactttccgggtagtttaaagtagtgtgcacagtggtgttccagtttttttttaactttggtgcttcttctgat

SEQ ID NO: 448367 - DNA, 401 bp, Triticum aestivum
aaaagaggctaaaaccaacaaaaagttacttagaagcagccaatagttttttttgagtttctaaggtcaaaatgtgccagaattcaatgcatttgactaattagaagagttaaagatgaattacgagttgttagacaacactgctacccattttgtccctaaaacgctaaaaacaaccgaaaattgcttagaagtagtaaacagctttgttagtattttcatggtcaaaatgtgtcataatctaattcatttaaccaattcataagagttagagatggagtatgagtgtttagacaacacttttacccattttattcaaaaagaggctaaaaccaacgaaaaattgcttagaagcagtaaatagctttgttagtgttttcaaaatcaaattttgtcacaat

SEQ ID NO: 448368 - DNA, 453 bp, Triticum aestivum
atcgaatccaattcctactctctgttttacaataccttattgcatttgttcccagactagcaataaaatgagcgatgagttggatcttttgagggaacagaaaaagatattatctgaagaggcggcactgcaattaagttctttaaaacggatgtcagatgaagctgcaaagtcccctcaaaatgaggagattaatgtaatataatcaccctgttcatgatatctatatctagttgttttactctagcaaaatattgaccttctcggttctcgttgttgcttaggaggaaattaaagtactcaatgacgacatcaaagcaaagaatgaccagattgctacgttggagagacagataatggattttgttatgacatctcatgaggcattggataaatctgatatcatgcaggtaggttccaattgtcaagtattatgcactgactttttttgtc

SEQ ID NO: 448369 - DNA, 517 bp, Triticum aestivum
catatggtataaaggcgttgaactaattactgatcccgtcatgtatagtggagtgtgatttgtttgttttacttcataggataatagaaaaacaaacaatatatacaaaattaactgtggattacaaataattgtgttcatatatcttatccacttatataaactagataccatgatacttgagcttaaataattgatcacatccgccgaacacaaatcatggtcacatccacatgaattctttcattacttttgtttgagatttaagtcccaacgggtaaattggaatcttgcactactttaattgtatatagtttattgcctaaacagccaataatcagtttcacaaacaaataaaatataactaaaaacactccaataatcagaaagaaaccaatagaactgcaaggaaaacaaacttttttgagtaaccaatgaatttttaaactttgcaaatacaaaagaagattctgattacacaattttaaattatgatccgggcaaatagaatctcttt

SEQ ID NO: 448370 - DNA, 489 bp, Triticum aestivum
ataagggtttgtacatatagatatcgaagaaaatagaaaaaaatattaaaagttccctttttgcttcaatccgtcaactaaaaaaagggtataaaaggaaggtaacattagttgatactatggtatttaatagacaagtatttaatacacgcaaaaaagaaaaaaaaagttctttattctttatctgaataatgagtcatccgacaattcatgatttagattcaactacttatacttattaataaactaatagcaaggaagaaacaaattgagttgatccgtttacctaagtaaggaccaataaaatcaaaaattttgatcttcgaaaccaattaaatgaaattctaagggttccattttatggggcagtgcgcgagaaattaaatcataaacaaatgatagaatttgagcgccctgaaaatgccataatatataacatcaaaatctattacattaatggggttcggaaatggttgaagtagatgaata

SEQ ID NO: 448371 - DNA, 469 bp, Triticum aestivum
cctttctagaagtttcaaatggtcatctgaccatgggctgagcccagtccacaatattatggacattccatggtttttccgtaatgaaaacgggctgtatggtctaaagaccaattttgtccatggccttaatgggctagcccacacggtttatggttggcccatcaattttttcaacacatcaatttttcttctcttctctctctctcggcaacgacgctctctctcccggcgacaaagctctctctcggcgacgaccaagctcgacctctctctcaactcctactccggttagttctactagcttgtgggtttgtccaaatttcaattgttagtgtttctgaaagaatcttagctttttggatatgaggagagctagctagcaaatgggcacttttcagattttgtttatggctcgccatttcgaatttcattatgaattgaagcacatcaatatgtagagaccctt

SEQ ID NO: 448372 - DNA, 291 bp, Triticum aestivum
ccatgtttcacatgaaagtctctttggtttgccctttgtcttgtttgttggggtttggtcttttaataaaaaagagctcgaagaacatgcgtcggactctttctcttccttgaattcattcaattggccacggcgacaaaacagggagccgatacagcgaaactgatacatcttcttttattttctggattcttagggttctttttcggggaatttaggtaattatgtctgtccattttggtggggcttgggagatataaaatttgcttttctttgcgtcggattctcaaa

SEQ ID NO: 448373 - DNA, 437 bp, Triticum aestivum
atacaacagaccaatttccaatcctaaaactaaatggaatacacacttttttttttctttatggaataggaaatttctgtgcgtctttaggttcctttcttttatgaaaaggaaactcttaagacttctagaattggaaatatttgatttgattgaacacaaacgacttcttgaagtcttctccaaaaacctacatatgtttcataagtgctggtcctttttggagaaaaaaatgctaatgggggacaggcgaatttgatgcataaaacaaagaccgcatgctttcaagcaagaaaaagtcgcatagacataagtacaacaaggattaaaagcaatactaaaataaggaaaatatattttaaaagatttgaaatccgcaagtagtctatagaaaccaacttaagatctgtactagcactcgttgacttcttcgcacg

SEQ ID NO: 448374 - DNA, 498 bp, Triticum aestivum
ggaggaaattacgaaaggaagaggtacaaaatcgattctcttaaattccagcggacaaaacacaaagccttaaaagtatctagtggaccttagtaaaagcccaaatgatggagcgtgcttgattgaggcatagtacatatgtcatcataagatgaagattttgaaatcaccaagcagagtcaaaatctaaggcaatgacaaaacgtaagcagcaggatacaaaagaaaacctaaccctaaccgtatttgaatccaataaacgatgttcaaactctggaggagaatactttgatcgaatccctgcagatttggtcatcaaaatcttatcgaaattgtctgcaaagtctatggccaagtgtcgttgtgtatgtaagctcttgtcgtcgataattcgacaaccaaattataaccagttgttcccgatcaagtatcccgatccaccgaggttcatcttcaccttcttaggtggaggaatgttattttcctacacttcaacac

SEQ ID NO: 448375 - DNA, 473 bp, Triticum aestivum
tatgtacctagtctctcaagcatgaaacatcgccgggtagagatttaagctaagtaaccttattatattttataatgaagtttcatacgattggttttgagttgaattttataggtttttgattaattgaaaactgattgtcaaggactagattaattttcaattttggtgtaaatttctaatgtctcctcgaagaaagactcttatcatttaatctcgatatctcactcaaacctatattaaacttatttagataaaataattaagcttcatgaatttccaattcagaatcatttcaaaattatttgcaataagttgacttcgacatgcatattatgtttagttccttcaaactcccaaaatgattccgatcatatgtattggtttttttttttctctttatttggtcaattataatatgtttagaaaaaccccatgtgtttttgcatgttcatggattggtcattttcatt

SEQ ID NO: 448376 - DNA, 430 bp, Triticum aestivum
gaatcgactatgagtccttttaatatttagtatagaatgtttacagcaaaaataaatattttaaagtctctttcagagaaaactaataacaataaaaaaaaaaaaaatcgtcaggtaatgcgcctacactgcgtagatgcattatgtatataatggatcaaacaactttgtcatttcaaataagactagcatgtaccgacacatgatagcatatcatctcaattaatgaagcttcgctttttagttcaatttaatatcagtttaacatctagcatttgtttttcatacttattctattaattccacgtacgatccgcattcttcatacttattctattattttgtccgacctgatttttcagtatcaatttgtttcgctgtttctaaattctttgtgaatccactcatatattatcttatcaaaatcata

SEQ ID NO: 448377 - DNA, 484 bp, Triticum aestivum
gatgatgatcactataaattaattgccggccagttggaaggtttcctactttgttcagatttccaacttaaataataaatatgtgatgatggctcaaccctgcataaaatcacgtacaagcaatcatatgacatttatgaccaatccaatataaagattagcgcccatctaagtgttcaaatgttaaccatgagtattggtcgaggataaattatgagcatatgacttatacgtacaaatacaatagtagtattttaaaacatttttactttacttaatagttggtggtagtacaaaacaattgatagttcagatactctttattctttaacatctttgttttattcgtgtgcatgctaaggtatttgcgttatcttatataagatttcttggctatctcatcaagacaagaaattagggatcttatatctatatattcaaatttacgtaatgcatgtttttatttgaagtacatcgtatacac

SEQ ID NO: 448378 - DNA, 389 bp, Triticum aestivum
ataaacaaaattcaataaataattttttagtaattattatgttatttattaattcacctttctggttaccatttaccataatcattttgttcaattcctatgttcctcttggttcctacttatggccattttctttttttcttgttcctttttgttatttttcattcatattcctatcgtttcttttgtttatcaccaatcagagtcttaaaagtaattaccaatcacaaaagttttaccaaaagcatcattcttagtctttattttcaaagttaattttcaccgcctttaactattccgatattgcttataccttcttttacctataacaaacttgtatggttttgtatcaccaatggtattaatgtatatttgaggggggggggggg

SEQ ID NO: 448379 - DNA, 505 bp, Triticum aestivum
tgtagatgaaatacaataaattagtttccacaaccagaggaatacaaaaaggaaccttcgtttataactcaaaaacaaagaaagaattattaactaaaagaacaagcaacataccttgtgccttgatctacagaatttattgaattctttgggtcttttcctcttagatactggctttgttcctcagagtactcctgagagtcactgtcaccacctccctgtatgaaccatataaggttttagtcttccacaaacgtttcacaaaatcaactgcattttgcaatggtatatttctcatagtataagcatccagtgagactatgctatggacagtttaccaagctccatcgtaagtactaagatatcaatcctaactgcatcaaaaggaaaaaaatctgtaacaacaactacaaacctcttggagggaagctgctttggctctgaaagatgcctctaaaaattcagcctctttcttgagcttccttatcttttctaggtcagagca

SEQ ID NO: 448380 - DNA, 409 bp, Triticum aestivum
taggaaaatataaaattaatcaagaaaaatagacatgaaaaacatactactccatatgtttttgtttggccaataaagagactaactaagctaatatctaactaaaaaagagtttatttattatcaattttataactgagcaaattactaatctattatgcaaaaagatattcctaattaataagatggattctactaattttgataatagatatttgattcatatatagtgaaaaataaaaatgacctttagcaatcattaaatttttggtcacaaaatactaacatttttcttttctggcatagcataaattaactttagatagtttgcaataatcttaaggatcaaaagataatagatacaatttatgaaaaaattgttcttgcaatgtaacaaagatcacctaaa

SEQ ID NO: 448381 - DNA, 258 bp, Triticum aestivum
cctgcaaatatagggtttgtgtattcagacgtgagaacttacacagtctataatgaaaaagggggcgtgttgtgcgaaagattaaataacatctatacacaaaatagaaaaatgttagctaacacttcgccaactatgatggataggtctaaataaactatgaatgcttgggatagatcatagcggtaataatactagcatatgcctatgtgaaccaaaacatatattattaattaaaaaatatagatatgttaatgg

SEQ ID NO: 448382 - DNA, 509 bp, Triticum aestivum
agaagtttatcttctgttctgttatgattttcattgatacttaacgaacgtttaagcagttttaacgatcttttccctgaattttcaccgattttctcttaatttcccgcaaaatttacataagaacgacatgtttagtctgttcttttcttttgaatctcccgaggcaggtacaactctaaatattcaagttatgtcactgaagaagatccaaacgacataaatcatacgtcaaaacataaaagaaccaacgcgtttcttatgaattctgcttcagctcatggtaaaacctagctcctctgtttcctctgtttctatgtttgctctgttttctcttgtcctctgtattcttattcattgcttgtacaccaaaaaacctagcttctttcaacgttttctctcccttctcctcccagatctaagattactagaggtagataaagagaagcaagaccccaaatcaccaagaggagccctcgaagcctgcttaactcgttgctcaatctctt

SEQ ID NO: 448383 - DNA, 404 bp, Triticum aestivum
gggctatgttacggacccaaaattacttgctcaagcattgatttcgaattttttcatgcattatagctcgtttagactagatggggtatccctacatagcgggtgggacccacggcgaatggttcatcaagtcttcaaaaaagaatatatacgattgcattgcatattctaacggatgctatcataccatcactaatgcaccggatcccatcataactccgcagttaagcgtgcttgggcgagagtagtactaggatgggtgacctcccgggaagtcctcgtgttgcatccctcttttatgtttaacctttttttttttggttaaaactttatgactccataacttttaaaccgtgaggccaaacttggcatgtgatacctttttggaaagcccaaagacagcc

SEQ ID NO: 448384 - DNA, 499 bp, Triticum aestivum
agaaatcattcaaaacaataatcgtcaataaaagaaatattatatacaaaacaaattagctcagtagatataaaactctttctaagaagttatttatagttttttatgtcactataattaaaaaatatattaacatagcgtcactattctatagctttttaatttattgctttgttgaacacattacatataaaatctattgcagaatagatataaagaacatataagatgctttacaatgatattacatgaaacatgttattataaaaaattaaagtttttaatttgtcccaaacatacatgttatgtcttctctctctcaagatgtatacatagatgataattagataacaatttaagcaatgtaaaggacaaaaaagaatccaagtagaaaattgataccagcgcttctatttttgtacatgaagttcttagaatgttatttgtgcattttgtcttgtactatgttccttttgggctgctgcaatacactcatgtg

SEQ ID NO: 448385 - DNA, 466 bp, Triticum aestivum
ctccctcctatgtttctctcatcagctacgctggaggcgactatatttattacatcgactaaaatcgtccttccgctgtaagaaaaaaaacattaatcttagatgtcaaggctaattaattcagttgtatcaaacatcattacaccaagttctctgcctttacatgtgaaagaacacttttgtttgtttgttattagaaaaaaatcataacgccaaatgtatatatacttttattttgggtgattatttgattcttatcttcattaaaatttgcatgcagggcttaaaagcactagtagagaaagtcgtggataatttacgcgttaatatgatagtattgggtggcctgctatttaagaagatagcagtaacatcgctgcagccgatcggatgccttccttcttacacctctgcatcctcgttcaagagttgcaacgagtcacaaagtgcattggtggaactacac

SEQ ID NO: 448386 - DNA, 435 bp, Triticum aestivum
atcgcaccctggaaaccccgcgatcgtttagtttgattggacgactagtgggacacctaggagatctgcaagaatcagtgagaagactaaggctacgccgataccaaataaagagccacccaagaagcgaggtagaaccaaatctgcagtgtcaaagaaagatgcagaaggtgagaaatcagagggaggaggagaggaaaactctcatgtgaaagatactgaaatgaatcctccagagggaatcgcccagaatgaaaatgtgaccgataagaatggctccggtgaaactgagagggtgaatgatgcaaaagaaaacattgttgctgaggaaactccaaatgctgctccagttcaagaagagggtgagtcgatgaaggagaaagctctggattctgttgatgataagagtaaggagactgacaaagaaaaagatac

SEQ ID NO: 448387 - DNA, 436 bp, Triticum aestivum
aatttaattgcggttctagttggtatactcactcatacacatgacatctagtcttatttcgctccaaaacactaaccaagcttcttcttgcttctaaaagcttggatggtttagtcgaattccgtatgagtctttgtctatgtatcttctaacaaggatacaatatttaggcttttaagatccgttgcggttctagtttttatactcactcatacacatgacatcaagtcatattcgactccaaaacactaaccaactgcttcttgcttctcaaagctttgatggtttagccgaagtccatatgagtcttcgtcattgtatcttctaacaatgatacaatacttatgcttttaagatctgttgcggttctagtttttatacggagtcatacacatgacatcaagtcatattcgaatccaaaacactaaccaagctt

SEQ ID NO: 448388 - DNA, 472 bp, Triticum aestivum
gtgtctgcatatacgtcacactcttgctcatctctgatgttattttttttttatgtgcagttagagaactatagcaaagaagagtcccagctccaaacgacgtcgttacacagttcctcctctgtttctggaatcagaagaccatcgtcctctagtagctcaagatcaacgagtagacctcccacgccaaccagaaagtctaaaactccagccaaaaggccatcaacgccgacctcacgtgccacctcaacaactacacgtgcggcattaacctcgtcctctactactagctcaacaagatcatggagaagaccttcctctagctccggaactggaacctcacgtgttaccttaaccgctgcacgtgcaaccagtcccaccacctcaacagaccaacatactaccggttcagccacctctactcgatccaataacaggccgatgtcggctcctaattcaaaaccgggatcga

SEQ ID NO: 448389 - DNA, 460 bp, Triticum aestivum
atatacaattcttgttcaatgagacaaatcatatgtacctgaaacctgaaccataatcttataaaacccgcaggattgaccggattggtctctctgaacgtctcaaactctcgagtatcaagctcaggactacgtcacctgaagccattgaagaacttgagatctctgaccttggagtcctgcaagctctctgctaatgacatcaggaagcttcaggcgactgatctgccaaacttggtcaacttccgtcctgaataaaataatatgttcaaaggcaaattcacgaactctgtaaatagatcgatctcctctggtctcagactaagacactgctcttagatatatcgtcaaaagctatgctcttcttcggattatttgctgaagaaactgtaaataaagcttctttcaagctatggccggacgaaagagtcctccatggctcttctacgtggtcagcttt

SEQ ID NO: 448390 - DNA, 357 bp, Triticum aestivum
aatacatatgacagtgaatataatatatatgtcaaatacagaaatttatacaatttataatatctatataaaatacagtttttttgaatccttttttttttatgaagaggcctgttttgagtttgggctgggctgaattgtttttacccaccacatcattcctaaggataattatacagtaaccctagaaaggtttcctccaccttcctttttccctcctatataaaaaaaatcgacatcgtttttgctcactcttctctcttaggttttttttcccttctcccaatctcatcttcttcgaaaacctttcttctttcaaatttctgtgaaaacatgtttgacgacgagcaccacttt

SEQ ID NO: 448391 - DNA, 139 bp, Triticum aestivum
ggctggcgattgggtccctctaatgccgtgaagtcctgtgcttccctcggtcttagacattgcctgtgccatgttctcctgtgtgacgtccttacttgatgtgaatatttttataggccttatctgttggaatatatcc

SEQ ID NO: 448392 - DNA, 459 bp, Triticum aestivum
ctatcctattctaagagaagagcaaacccaacaaattgttgaaaagacatttaggtaaatactctctcaatgtatataaagccatggagccaaacactaagcttatcgttcttaccttggttcttgcctttacactcacggcagcaaccggacagatcttctgcggtatgacttctacttgtctgaactcttgcaagccctatgtgtaggctaggaacccaatgaccaccggaattgatcccttgggcccttgctgcaatgccctgtccaaggccgatttccagtgcctctgtaagcataaagacagtatcaatgtccgtgatatcgagctttgacctcgctgagaaactcccggagaagtgtggattagctgctgcaacttgctagtaggttttctttcggaaggtttcgctttgtggtttggttttcatggttttcttatactgatttatattgatg

SEQ ID NO: 448393 - DNA, 515 bp, Triticum aestivum
aacgtgtatcccctgttgattgcatttaggtttcttaattttgtcacctgttggttctactcgacccaatgatcgtgtagggcttttaagttcttatttttacttgtttgaatcctgacctaggattgttactagaaacccaccatcattataatctggcttgactttgttgtttttgtgcacatcttgattgctagcaatacagtggactggattgacaccctgtataactgcatcgacatgtttgtgttttaggggaattgaactgaatcacacattcaccataagcagacctgaaaaacctgtttatcaatttggcgccattgccaattcattgttgcattgttacattcaagatatcagaaacttttaagatcaagttcttttacatttatcaagttactaactcatattttcgtctgcttgtttttgtggtataggtactaatctttgtgcatgcaaactcgatccaaaggttctgcacacctactaccattcaaagacagaattgacag

SEQ ID NO: 448394 - DNA, 478 bp, Triticum aestivum
cttttaggtatattctcttgtactaacggatatttgttgtttctagtattttttttcctcagatgaatctgaattcttgatttgtatgttctgtacatgttgtgaagtttaaactagaaaaagtgggaggatagtaacttgaagcatatgagccaaaagtcaaactatttaaaaatacaccaaaggagcttgagattgattaggtaatttaagttagttattctcacgttctttaactatatagtagtgcttatttccttcctagcattaagttgcagaaaaaacagagaagtagagattttttctcttctcttcaaatttcatagttcattaaaatttgtgtgttgaatgaggcaatctcatgtttaagattgttcttaaattgtcctctgagtgattctagttggttttgtcttttgactttctgttgtcttgatctctctattcaggtttttttggtcacgtgagaagaagcttt

SEQ ID NO: 448395 - DNA, 433 bp, Triticum aestivum
gtgacgtttgtttacccctgacatatttatacaaagaaatcgttatagcctatatcatgtaaatacacaccccacatgtagtgggattaacaataacacgttttataaattttaaaacaaatggatttagtattagttaacgttttacccattcccgtcgacttttctcaaaaatgttctctcatgtcaaaacaaaataagaaagaaagatggtcaaaccatgcatttcacacactaagtatttgggtaaacattcatgcaccatttgaatttcaactctagtggggatcttcataatatctctcccataacccctcccatacgaattctccagacgcctatctatctatctattattatttaattcgatctctatgactaaaaataatcacacattaatatgggagtttctctaataatctctagtatcaaa

SEQ ID NO: 448396 - DNA, 155 bp, Triticum aestivum
tgtctgtgactgccactcagatctgatggttctctttgcttaatggaagctctcaacagatcttctcactcgaatcaccatcaaggtcagtagtagtgatgttggagtttttagttttcttggtgttgatgttgctgtgtcttgtttgatgggaa

SEQ ID NO: 448397 - DNA, 317 bp, Triticum aestivum
gaacttaaaccgcaatcttatcctaaaagcctaagttttgtttttttgttcgaagatacaaagacagagactcatattgacttcagctaaaccatcaatgctttgagaagcaagaagaagcttggttagtgtttcggagtccaatataaattgatgtcatgtgtatgattgagtataagaacttaaaccgcaaccatagcctaatagcctaagtagtgtttccttgttagaagatacaaagataaagactcatatggactttggctaaaccatcaaagctttgagaagcaagaagaagcttggttagtgcttttgga

SEQ ID NO: 448398 - DNA, 494 bp, Triticum aestivum
tttattatgtttctttactatgtgtgaaaactctaaaattatattattcagaaacatagtttgtatgtttcagtgaacaaagttgaagataaatactttttaaaagtactatactgaaatgctatatttattatatattgttaacaatatttaattaaaaatccgaatgtaattattttctataaatttttagatttaatttattagaaatattctcttatttctatatcgattatagtaaaaaaacttcacaaattctcttatataaaatacacttttaggtgtaataagttaaaccagtgtgttatacaaaaacttaaagcttaatagtgtctacagaaaaaataattatgcaataacataatttcttatcttatctcatattaaaacttctgaactaattatcccgtgcattaacacggatcattaccaaggtttgtaatcaaaattaccttgttttaattaaattataattttagatttaaaataaatag

SEQ ID NO: 448399 - DNA, 382 bp, Triticum aestivum
atgggcgacccgcagggaggttttcacgaaagttgacctggagcatttttttcagcaaactgccaaagagcaggatgatgataaccaggagctcaattaagaactgtttgaaaacgcattgagcctgcccatggtcaagatcaggcaatgcctggtgcccaggaccgaaatagaagggcttgatatcagcacacccatcgaagagctgaagcagcagtttatcactacccaactcagtaagctgatcgtgtatgatgataatatcgattccatacaagggtatgtgcaccagcttgacctgttcaggaaacccggttccatcagggagatcctgcaccccatcatggctgtttcggaaagcatgagcgctaccgacctgatc

SEQ ID NO: 448400 - DNA, 397 bp, Triticum aestivum
gagagtctagggcatagttccaaggaaagacatggccacctaaaggagagatgttccgattacagaagagagccccctcggaaaggtctaattttaggggaaccggaagtatgaaagaagtaaaggagaaggaggtattttaaagaagaagtggttggaaactatggacctcaactgatctgttctctcttgtggttttgctacatatcctgcattcgagactattcggtaaccctaaatactttaactccaccacataaaaaccaaattcccctttcataccaagctccgtctaccctgacaccttcaaaagagaaagaccacgccaaacatttcaaagaatgtaaagagttgactaacgtgaattcaaagttctgtaggatcaaagcggatggac

SEQ ID NO: 448401 - DNA, 485 bp, Triticum aestivum
gagaaaacttttagaaaatattctttttaaaaaatttaggagttagatagatgatttaattcttgatttacagtaatagaatttgcggcgaatttttgttttaaaaaaaccatgattatttttttgtcattttttttcatcgttggatatgtgaaacaatttattttcactttactgtagccttttgctatttaaagttacgtcatagagctcttttagtaatttataaataggtgatatagtatatttggaagaaatataaatattgaccggctttttttattagtctaattgggttaattaattcacatacaaacaaaataaaataataataaacctcgattttggaagaaatgtaatttggattcctaattgtaacttgtaagtagtaggtccaaatttttattagtacatgatgtgattaaatccttgaaatcattgtcatattcatatagaagaaaagctgagatttattatttattata

SEQ ID NO: 448402 - DNA, 84 bp, Triticum aestivum
gactagtctgtttatgaccccctatttcatggttatatgtttcactgcttcttgctatcgaatgctgcgttccgggtatttaca

SEQ ID NO: 448403 - DNA, 109 bp, Triticum aestivum
aaaataaaaatttaaaaaaaaaaaaaaaaaaaaaaaaaaaaaaaaaaaaaaaaaaaaaaaaaaaaaaaaaaaaaaaaaaaaaaaaaaaaaaaaaaaaaaaaaaaaaagg

SEQ ID NO: 448404 - DNA, 362 bp, Triticum aestivum
cccacgcgtcctcggacgcgtgggctcgcgcttctcgctgctgccaaccgctggccgccggccttgccaacttccgctgccatccgtagcgagggccctccaggacgccacgacgggtgtggggtgtctgctgatgtttgctgcttcttctccttccctcactaccttctccgctcgtgttgcctgctgccgccgactgataaactaatcggtgaactgttgttgaagggccgaaggagcaagactgctgcaagaggaaggtaacactggcgaaacagcaaaccatggtccaggaaagcatatatgtagttattgaaggaaatatgccctagaggcaataataaagttattatttatttcct

SEQ ID NO: 448405 - DNA, 62 bp, Triticum aestivum
gtctagatcgcgaacggacgcataatattatacaatatgtcgactatatacgttttaatggt

SEQ ID NO: 448406 - DNA, 221 bp, Triticum aestivum
cggacgcgtggggtcgtgtcttggtcgatcctgtccggttttcttgtagtacaacgtacgcatgcacggtgatgttcagacttcagagcagttcgtctggattgttgaagcacgccaatattcgatatgtgaatgaatgtagtataaactaaaggtttcaactttttgttcatgtttgttctcacgaacgagaaatggaatgaaacgggtcaacaccaccc

SEQ ID NO: 448407 - DNA, 346 bp, Triticum aestivum
agagggaggaggttcggcagtggcccaaggcccaagtcaactgggaggccggagaaggggatggagaattggggagctcctctccctggcaaagcgaggcggcgacaggaagatggaggggatcgagggagagaagagcgagggagatggggcgctgggtctggcctttggcggcgcgaggggagaggatgagggagagaacgaggggatgggggtctcctggcactaggttacaggaggaggaggcccggcctggtgggctgagaggaaaagaatgggccggcctcgttcggcttcctcttctcccactggattttttttcagcaaaaaaaaagaattagagaga

SEQ ID NO: 448408 - DNA, 247 bp, Triticum aestivum
cccactcgtcctgtggggacgacttgagatccatttgtgaatcgattaatttgggcgctgttgatgagccaggcagctagcgctactactagctttgtatggaatccgctttgtatgtacatgtaccaccattgatcattaattgcttgagtttgacatgtcaaaaaaaaaaaaaaaaaaaaaaaaaaaaaaaaaaaaaaaaaaaaaaaaaaaaaaaaaaaaaaaaaaaaaaaaaaaaggctcatct

SEQ ID NO: 448409 - DNA, 365 bp, Triticum aestivum
gtttttggtgctatgacggatgaggaattcttttcagcttgcactgagaatgatactgagagtgaggggttcgatgatgtactgactgacgaggagaagaggcagctggaatctgcgcttaagatggattcttcagatgctgttggtgacagccagtccgacacctttgtaggtcctaagcatagttgctttgagccaagggagagggaaataccaattgaggatttgagcatctctggaaatggggagagtaagcatgataagaaaggctgctttagtaattggggaaagaggggtcaaactggcattagtaaactagagatgacacagaagatggcacctccaagaagttcgctctgtgtaga

SEQ ID NO: 448410 - DNA, 125 bp, Triticum aestivum
cacacgcgggcagtcacacagagcaaaactagcacgtcaggggcgggcgcaaatgatcagacacggacatgagttcaataccattgccattgataatgattcatacttgggcatggaccaccctt

SEQ ID NO: 448411 - DNA, 155 bp, Triticum aestivum
ggcggatctcattctccagattcaagcccacttcgaggcaaacataaccaatttggctcagctatgaggtgttgccatgcaagttgacaaaactcggggatctaaatttggttaagagctcagcgggctgaatatgcactgtgactagtagtatg

SEQ ID NO: 448412 - DNA, 142 bp, Triticum aestivum
cggattcgtgggtggacgcgtgggctgaaataatagagtgattgtgtgaggaaaaagcccgggtacgtttgggtaagtgaccgcagaacaagatataaagatgaatgtattcttactttgggcctttggctcgctaacacat

SEQ ID NO: 448413 - DNA, 114 bp, Triticum aestivum
gcagttagaaactcaccaaatctttatcccctgccctcagcagtgccgacctgagcgccggagatctgcggcgagcgagatgaaagtggaggagcagacggtggtgggaggagg

SEQ ID NO: 448414 - DNA, 338 bp, Triticum aestivum
ggcgttctcaaagatcggggagcacatgtctggtggtggtgcggctggaggcggcgcggctggcggtggttcccaggaaggaggctcgcagggcggaggcgaccaggccccagaggccgagtacgaggaggtgaagaagtgaagctgccccagcagcccaacccagttattagctagtcttgaggaacactagggatcttgttggctgtaataaaattttgctccactgaggcatgtgaaacatgctaaatgctcttagcgcgcacggtactgccttattgtatgacttggttgaactagcgtgttcttcgctttgagttacgttgatgttgtggttc

SEQ ID NO: 448415 - DNA, 344 bp, Triticum aestivum
cccactcgtccttggacgcgtgggctacgacaacgtcatccccgacaactacaccatcggcaccacctatacacctcaagggtagcgcgtccttccattgacgtagatccgcaaaagtatgttcaatcggtcttccctgggttttggtagttttttagagagatatcatgtatgaataatagaaaaagttgtcgacgccactcttgactggttgtttatgtatgtaactgtgtcggtgctagggttatggagtgtgtgttgatatgggctagtgtgtccctgtgtgggtaagcatatgcgtttgtaccgtgtttctaaaaaaactatatttgcttaagattgag

SEQ ID NO: 448416 - DNA, 135 bp, Triticum aestivum
cacctaatcattttactgagctcgcaggcagccccagccaccattgaaatggccttgtcggcgctgcaccagacgaccagcttcctcggcaccgccccgcgccgtgatgacctcgtccgcagcgtcggcgacttc

SEQ ID NO: 448417 - DNA, 192 bp, Triticum aestivum
cttgttactgcccactgcgatcaatctgtacacatgcgtagtagtacaagtataacatacaaatgaattctcaaacgaaaaaaaaaaaaaaaaaaaaaaaaaaaaaaaaaaaaaaaaaaaaaaaaaaaaaaaaaaaaaaaaaaaaaaaaaaaaaaaaaaaaaaaaaaaaaaaaaaaaaaaaaaagggggggg

SEQ ID NO: 448418 - DNA, 151 bp, Triticum aestivum
ccctctcgtccggggtcatcctcctcgatctggcggtcgaccgcaccaggccccgcagcctgcgcgtctccttcggcggcgccggcgtcgccgccatcgtcatcgcctacgccatggccatgctcttcctccgcatcaagatacccacacc

SEQ ID NO: 448419 - DNA, 203 bp, Triticum aestivum
tcgcccactcgtccggtaagtattttccctacttcacagcttgcttgatgtgctgcatgcatcatcaacggaataaataaaggatttgtcggaaaaaaaaaaaaaaaaaaaaaaaaaaaaaaaaaaaaaaaaaaaaaaaaaaaaaaaaaaaaaaaaaaaaaaaaaaaaaaaaaaaaaaaaaaaaaaagggggggccgttttaa

SEQ ID NO: 448420 - DNA, 294 bp, Triticum aestivum
ccctctcgtccggtcatcatcgtaaattgcagcagtttttctttcatcacatcttgccaattttgggcagcatatgttattgaacgagctcaatagactgccaggtcttccccatggcaagtgttctggactggctactgtgtttatgtgcttgctatgctctggcacagaattgggccattgcttgtcttacattccctctgttgtaaaacttcaaactgaatatacctcttgtatggtgtatgcagatatcttcggctagagataatatgttcagtataaatactttctctc

SEQ ID NO: 448421 - DNA, 147 bp, Triticum aestivum
ctgttatgcaaatcctgtaaagattgactgactacataaccaatttgtcatagaacaatgaggcaagatgcattctttggatgtactatctgaaattttacaaagtaactacagaacagatgacgcaatgaagtacatctactaatc

SEQ ID NO: 448422 - DNA, 388 bp, Triticum aestivum
tcgtgattatggtttatggtagcattttcaacaaaaagacatgtgtttgcatgcctttgttgtggacgagcggatctatggccaggaatgcgggatgacccttggttgacgtctgacaagcgttgtgcgtcccttgatgggtgtggtgctggctgtagagtagcatagtgttctctgagacatgcttgtaaaattaaacttttttggatccttttttttgctcctgtagagatgtattttcagttctgtatgtcatgcttgtaaaattaatcttttttggatcctttttttgctcctgtacagatgtattttctggtgtatatgtaattttctgtttttaatgacacaagcatatattttctgttaaattattattggcttaaaattt

SEQ ID NO: 448423 - DNA, 376 bp, Triticum aestivum
tcggctggaaacaatcgtgcaggtattgataggaggcaggatggcccaacatttccgccgggaagacggcagcgtttgagatacacgcaaagaagccagcatgatccatgatcggccgaagcaacactacctgtgcagtatttagttattacaaacagccaagccatccttgtaaaatagctagtggtggttaagaataaatatcttggcctatttactattcgtgtattatatctgttagaaacgttctagtgcagatgcagaacttcccttctaaatgtctctattcaatgccttgttcttggtagtctttgtcttttttttctgtgtgaggtggttctgtgattaagttgaaatgagatataactgcattttc

SEQ ID NO: 448424 - DNA, 290 bp, Triticum aestivum
tcgatttacgcagctacctgtatcattcggatcataagatgtactagggtcggctgcactatgtgaatcataagatgtggtaggatggtgctatgcgaagcgtgtcgagctgaagtacctagtggactacagtcatgaggacggtcatgtggacatcgtcgcttcttagttcattagcagatttcaaactatttcctgtattgcagcacattattagtattgctgtattagcaattttcatggcttgttgatgattgatcaaagaaaaaaaaaagcctaaacttaacact

SEQ ID NO: 448425 - DNA, 55 bp, Triticum aestivum
aaatttaaaaaaaaaaaaaaaaaaaaaaaaaaagggcggacaatataaaaagaaa

SEQ ID NO: 448426 - DNA, 84 bp, Triticum aestivum
ttgctgttctcagaaaagattatgttaagcactttgtatgagaacatttatgaaactaataaagccttctcctcaaattgtgta

SEQ ID NO: 448427 - DNA, 158 bp, Triticum aestivum
tcgcttttggctgtcggttctaaaattaaacttatgtgtgtcggttttgcttggttagtgaccaccgagcagaagtgaactcttgaggctgcttcgttttttgtgaaccaaacgtatcttgtttatcgatttgacaagcctggttctgagttatttta

SEQ ID NO: 448428 - DNA, 266 bp, Triticum aestivum
tcggggtcttgcggcatcgtttactgacttgcgcctcattgaacgggatggaaggagcagccctatcttgaaggactttcctactgttatatccaacaataaatgttattctatcactcctattgttaattccgggtgcttctatggcgggccaggaggttgtgtgtaatactaagctgtactttgaacgtggtggtgtaataatggttcccttgagtttgtcttcccaaactcatactggcctaataagacactatgtgtttccg

SEQ ID NO: 448429 - DNA, 331 bp, Triticum aestivum
tcgcccactcgtccgcggcgagcgaaatgggagcagcctaaaccgtgaaaacggggttgggggagaagctcgaccgcatcgtccagcagaagctccatggttccgggctcgtgttttgagcaagagtcatttgtcatgtgttctgtgctcctttgcactctgctgcttctggttggtgagaggagagccctatgttgattgtgtttattattattattattatcattattgtttggattgcttaccacatgtgtcaccgtggtatgttgattgtggtttaattttgagaataataataaaacaacatctggcctcatagggtgggatacgc

SEQ ID NO: 448430 - DNA, 309 bp, Triticum aestivum
tcggtctttagccatctttttttttggacaaacaaagtgtttagccaaaaaaaaaaaaaaggaaaaaaaaaaaaaaaaaaaaaaaaaaaaaaaaaaaaaaaaaaaaaaaaaaaaaaaaaaaaaaaaaaaaaaaaaaaaaaaaaaaaaaaaaaaaaaaaaaaaaaaaaaaaaaaaaaaaaaaaaaaaaagggggggggggtttaaagggaaaaaatttttgtaccgggggttgggaagaaaaaattttttttttgggggcacaaaaataaaataaggggggggggttttaaaaaggggggggggggaaaa

SEQ ID NO: 448431 - DNA, 170 bp, Triticum aestivum
tcggatgtttgtttacttctgaagctacttcgccctttccaaattacttacagcgtgctcggcagtatgagggaaagggaatggaaggttacaagagggagtatgtctagatattagacttgagaattactagaattttagtctcaatctccattttgatgtgtggtcgg

SEQ ID NO: 448432 - DNA, 193 bp, Triticum aestivum
gggagttagcaactaatccgaggagtgtgctaccacggggaagaagatcgctggtggaacttgatttttttctttcctgggaagtagaccgtggatgatggtatgtaattgtggagcaatgcatgcttgttggatgtgtacttgtaccctggtgttgtagccgatgtaaaaaatgaatacccttttgaacatt

SEQ ID NO: 448433 - DNA, 384 bp, Triticum aestivum
ggaaaacaatgtagccacggtgtgatcaccaagggagcctcttggcaaagcttgtgtgttcttccttggtgcatgtgtgcgtgtgtgtgtgtggagtttctccttgagtgaggcaagaggtagaagaagggcgttgcggcgaggaggcggcgccaacatttggtattcagagccacaaggttcgaggggcggccgtggtgcgcggtggcgtccgcggcggacggggcgtgcgcggccgacatggaggcatcggctgcggcgcatggcgagcgcgtggtgacggcgacgcgtggcgggtccgcggcggtgcggtgtgatgtcgtgcgcgcgaagagcacggtggtcgcggagacgaggaggtcgcggaggacctgcgtggtggcg

SEQ ID NO: 448434 - DNA, 238 bp, Triticum aestivum
cccacgcgtccggctgcatgtggtttgtcttcagcttcgtactactgtctactagtgcttgtaactttattttcttggctcggtatgctcgctgcatgctagcgagtgatgggtgtatgtgtgtgctctgtgtaagctccatgcgtgtgtaaattctctcgtgtgtgtggtgtggtcttctcaatgtttaaccacctatggtaaagacaataacagcctcagagcaagttttccttaa

SEQ ID NO: 448435 - DNA, 115 bp, Triticum aestivum
aaatttaaaaattttataaaaaaaaaaaaaaaaaaaaaaaaaaaaaaaaaaaaaaaaaaaaaaaaaagaaaaataaaaaaaaaaaaaaaaaaaataaaaaatggggggcggcctt

SEQ ID NO: 448436 - DNA, 455 bp, Triticum aestivum
gccctcggccggtgccgtcgccgtcgccgtcgccgctgagccaaccaccgaagcgcctcgaactcctcgtcctcctccccgtgcctgccgtcctccaccggatcggcccggatcggaggctcccgcgaagcgattcctcccgtcaggcagtcgagatgtcggagtacaagaacgtcgttggggggaagctcaaactgaaggggaaaccgctggatgtcaaggagggcggagtcaagaagaagaataagaagaagcaccgccgcgaggagtcgtctcaaggcgagcacagcgagctccgcgaaggtggaagctctgaattaccaggcgaccctgacaatgaattcagtgaagctgacaagctgggagaggaagggagtgcgcaagccgattatgaccacctcactccagccgagaggcgttacattgaacagaagcagaaatcgatcagcatcgac

SEQ ID NO: 448437 - DNA, 193 bp, Triticum aestivum
agaacctgaatttaacagcaaaactagctttctgacgccgtcagttttgttttattattatagaaagacgatgccggtttgtcgaaaaaaaaaaaaaaaaaaaaaaaaaaaaaaaaaaaaaaaataaaaaaaaaaaaaaaaaaaaaaaaaaaaaaaaaaaaaaaaaaaaaaaaaaaaaaaaaaaagggggggc

SEQ ID NO: 448438 - DNA, 62 bp, Triticum aestivum
aaaattaaaaattttaaaaaaaaaaaaaaaaaaaaaaaaaaaaaaaaaaaaaaaaaaaaggg

SEQ ID NO: 448439 - DNA, 435 bp, Triticum aestivum
cttgctgcatccagtccacaccttgtaaagggggtcacgttgcttaatgcaacgccattttggggtttccttcctaatcctgcaagatctcctcgtttgtcaaagatttttccatgggctgggacatttcctcttccatcagttgtgaggaaacttactgaaacagtgtggcagaagataagcgacccaagaagtatacagaagatactcaggcaagtatatgctgatcactcaacaaatgttgacaaggtgttctcacgtattatagagacaacagaacacccagcagctgctgcatcatttgcctccattatgtttgctccaatgggccagatatcctttcaggaggcactatctaggtgccaaaagcaggacattcccatttcccttatgtatgggaaagaagatccttgggttacaccttattggggtatc

SEQ ID NO: 448440 - DNA, 62 bp, Triticum aestivum
aaatataaaaaattttaaaaaaaaaaaaaaaaaaaaaaaaaaaaaaaaaaaaaaaaaaaaaa

SEQ ID NO: 448441 - DNA, 106 bp, Triticum aestivum
cacagaccaaacgcagtcttttagcttgtatagggcacacgacggtcggatcacagtagggaccaagaaccataggtggacgacaaggcgccgaagcccaaaacaa

SEQ ID NO: 448442 - DNA, 181 bp, Triticum aestivum
cccacgcgtccgcgagcatcatcatcacaccaggctagctagcccactcggtgtctactgttgctgctctctgcgtgtattcgttgttgttttctgcatgtgttccacctccatctgttgtccttgttacagatcgagcagattactgatcgaatcatcaataaaataatgtgttgagcgg

SEQ ID NO: 448443 - DNA, 270 bp, Triticum aestivum
cccaagcacaaatattggaattatttgagtccatgtcaagctagaccatcagttgcacaaatattcgagtacacgtaaaactagacccttcctgagcacacatatttgtcaatctggcgcatccacaagagacatacatccatatgaagggatccataagttgacatgatcatttctagggcatgaccagtaagaatgagtgcgaaggacttaaggatcacaactgaacaagcattgctttaaaaaattgggttcagctttgctatcctg

SEQ ID NO: 448444 - DNA, 242 bp, Triticum aestivum
cccattcgtccgcccacgcgtccgcccacgcgtccggtccttctcctcctcctcattcctaccttagcgctgcatgctgcatgcatgcaacgatagacgtgggctgatcatctcctgtggaatagctcaacatctaaccgtatcatcaagaggagagacaagggagaggagatctcacatgaattattgttatttaattagccaggcataaataaaaactaccaaccgatttgttgtttgtt

SEQ ID NO: 448445 - DNA, 155 bp, Triticum aestivum
cccacgcgtccgccatagcctacccagtgttgcctagttagttggatcttgtatgtagtgtggtggcccctttcatcagatctcgatgagcaaggccggcattgtgtatctgtgatttctgtggtaatggttaaagatgcaatcctttcaatctt

SEQ ID NO: 448446 - DNA, 104 bp, Triticum aestivum
attctctcttcgagctcatgtatgattactttcatttgtatgcatagtgtatgtacgtatggtgtcgatttacatatggccccgtgattgcttcttcatcgatc

SEQ ID NO: 448447 - DNA, 252 bp, Triticum aestivum
gtgtttggccgcttgtgggtttatatataaaggcagacaggcgccgcagagcgggcgcgtgcgagcgagacgaagatcgatcgagccatcgagggaacatgtcctctgcacgttttgaacctttgcagcgttttggatgccggtcgtggaccgaacgtttattgttttgttttcagttgtatcccgtttaaacctgatgcccgagggctttattattaatttaaagccggacgtttctagcgtctccgttcc

SEQ ID NO: 448448 - DNA, 196 bp, Triticum aestivum
cagctaatgcgcatgtgtctttttaggcgcggaaaaggcccctgctgtatgtagcgctgcagacctacattcgttgtacagcgaacctaatatgattaattaattagattatgagaatttggttttgcgaactgtcttatcttctgtactggaatattgacataaatatagatcatggtaattttcttttcctgtt

SEQ ID NO: 448449 - DNA, 131 bp, Triticum aestivum
cccacgcgtccgctgaatgcttgactacaacatgtcgtaggttgcttggatctgtataatatacatatgtgatggaaatttgtagaatgtgtgttctgagatatttccgtaatattcagctaattcgtggt

SEQ ID NO: 448450 - DNA, 132 bp, Triticum aestivum
cccatctcgtccgcccacgcgtccgcccacgcgtccgcccacgcgtccggtacgatgttacgaaataagttgcttcaataacttatcagaatgtacccaggattgcaatgatttgtcaaactagtttagagg

SEQ ID NO: 448451 - DNA, 400 bp, Triticum aestivum
cccacgcgtccgcccacgcgtccgttttttccctcctactaaaataatgatcagtaaaatcaaaataaatacttggtaaataaatttatttggcaacaaacattgttgaatgttctgtgtaccttcattttttcctgaagaaaaacttagtaaaaacaaaattttaaattatatttactttttttatattattgttcatggcctgcatttgacccgcgcaacagaaacttcacgcccgcaaaagcgccaaagtggtgatactacattgactggataaaaattctttgtgttgtgtccctcttctttttttgagaacctgcgttgtgtcatcctaaacaatcactcacttcaagttttcaactgctactatgaaagaaaaaatgcgcacccccagaccaaa

SEQ ID NO: 448452 - DNA, 323 bp, Triticum aestivum
aaaaaggaacaaccccccaaaaaaattaaaaaacacgggggggggaacaccaaactgtttcatcccccaaagaaggaacaaagccccacaaaaaaaaaaaaaccccgggcggggaaccccggcaccccaaaaacacggttaaaaaaaaaaaaaaacaccccccacggggggggccccactgtcctaaaggggaccccgggggcccccaaaactgccacaagaaaagggcgccaccacccgggggggggggggtatataatgaaccccccccacccccgggatgacaacaacccgccggaaactcctgggcccccccccccccc

SEQ ID NO: 448453 - DNA, 477 bp, Triticum aestivum
tttcggccttgctccacgccgccagcaccagccgcggctccctctccggcggcagggccgcatcgtccaggaacgagtgggtgctgtgcagggtgttcaagaagagccttgtaggcggcgtagtgtcgtcggcgccggcgtcgtcagcagcaaagaaaagcggcgtggagatgatcgaggagatagggtcgtccgtggccgccgtcaccccgctccctgcgctcctggacatgtccggctccggcgccttcttcgacccggcggcgcacgtgacctgcttctccaacaacgcgctggaggcgggccagttcttcaacccgacggtgacgggcggctgcgccacggacacggacaaccacggcctagcctcgtcatactccccgttggcaagcttcacgcagtacggtgggcagctgcaccacggcgtgagcctgagcctggtgcagctcctggagagcagcgggtaccaccgtggtc

SEQ ID NO: 448454 - DNA, 220 bp, Triticum aestivum
tcgaaattaaaaaaaaaaaaaaaaaaaaaaaaaaaaaaaaaaaaaaaaaaaaaaaaaaaaaaaaaaaaaggaaaaaaaaaaaaaaaaaaaaaaaaaaaaaaaaaaaaaaaaaaaaaaaaaaaaataaaataaaaaaaaataaaaaagggggggggcctttttaagggtcccaagtttcctcccccgggctggcaaggtattatttttttttttgggcccc

SEQ ID NO: 448455 - DNA, 292 bp, Triticum aestivum
tgcataacttagtccattcaatccaatacataaagatataaggtctgtccccatcagacgacacaagataacttcaaacgaacaacacgccaccaacaatacttttggaaccaagctcgcatcgtcgattcttcttcctacgagaagcacggggaacactacggcgacatatactaatactgataggtataggtatgacttgctgcagagtcaggcggtaggaaaaggagcgaaggggaacggggcactcagatctgacgggcaaagccgtctagttggtcttgttggggca

SEQ ID NO: 448456 - DNA, 187 bp, Triticum aestivum
cccacgcgtccgcaaaaatggtggaccacatatgattattagattaggttagaagtagccagattgaggggtggggttttttcagattcttattagattagtagtggaatttctgcaattctttaggtgtttggagtcaaatatatacttctgcttgatgattaattaaatggatgcttagttctaa

SEQ ID NO: 448457 - DNA, 281 bp, Triticum aestivum
cccacgcgtccgcccacgcgtccgaggaaacttgtgggtccttagatgaatctacaaagttactcccaaagttcactgtgaaacacattctgttgtcctctaacctttgtacgttatgctgtataagatctgattatcaatttatctgttgggaatctacccgcctatgggtttcctaggagtacagacagaccaggtgaatacctactgggaaattgtttgtaccatggatctttgtttgcgctgatgcagtttaacgggaatagtgggctttcaacttg

SEQ ID NO: 448458 - DNA, 366 bp, Triticum aestivum
gggatggtggcgccgggttcgtcggtctccgccggcgtggttggctcctgcttcacaacggagttgagccactgctcctcctcttcgttcggcgtcacctcccactccatcatggcgggcacagggccatagcctggaggggcgaagtgctcctcgtcttcgtcggcgggcgtcggcgttgggaggtccgggtaggcgagtggctcgtcgatgacctccggtttcggtggtggagtggccggcggtggagggcacggcccgtacccgtgcacggggcagaaatcgcgggcagggcaaggtccgtatctgtgcaccggacagaaggccacgcctgcatccatgccgttgccgaagaagatccctggc

SEQ ID NO: 448459 - DNA, 477 bp, Triticum aestivum
tttcgcgatcgttcactagctacacacacatcacgtagctaagctaagcaagaaagaagcactcgcccctcggcgagcatggcggcggccggatcagctgctgctggtcgtcacaagttgggggaggagaagctgatcatccggccggagaaggtgcggttcatcgacatcctgtccctgctgatcctgcgccggcccatcaccagctacgccttcatcgacgccggcgaccagacgacccacgacgtcggcgtcacgccgggcgacatcttcgtcgtgctcacccagatcatccagaaggccctcgctgctgcctactacccggcaaagataatcggggccatcgtcgagctcctcctcaacttcttcgccctcaacggaggcctgctcggcatcgtatggaacatcatcagatttaagctggtgatcccgcgccgggaggcggccaactaccggacgatgatcgggatgatcgac

SEQ ID NO: 448460 - DNA, 357 bp, Triticum aestivum
tcgccctctcgtccgcacgtggtcgtgcgcgggggcgggggctgcgacgtgcgcttcgcccggtgcggcttcgcggcggccgaggcctgcggcgccgtgtcgttccacaggtgcgacgcggtgcgcgtcgacggggccggggaagtctccgtgcggcggtgcatgtccgcggacgtggagcgcgcggtcacggtgagcatccggaggtgcaagggggccgcgcgcgtgcacggcgccgtggagctgcgcctcgggcggtgccgggaggcggacgtgggcatctgctcggacgtggcgctggggcggtgtcgcgaatcgcgcgcctactggtgcggctcgctcggcgtctcgcggtgc

SEQ ID NO: 448461 - DNA, 53 bp, Triticum aestivum; identical to SEQ ID NO: 55650

SEQ ID NO: 448462 - DNA, 217 bp, Triticum aestivum
gccgcacactagtttagaccatgggcgccgccacctccaccgtctcctgcctcgccggcgccgcgcttggccgccggacagtcttgtgtaccaactacacgagtggcggccggatgtcgtgcaggaacccgctgatgactaggaacctggagaggaacggcaggatcacctgcatgacgctcccgcgggactggctgcagagggacctgaacgagat

SEQ ID NO: 448463 - DNA, 116 bp, Triticum aestivum
acgatagatacttttgataaagaagataaaactaaagataaagaagagaaggtataaataaaaaagaaacgaataaataaaaaaaaaaactgggtggctcttttttggggacccag

SEQ ID NO: 448464 - DNA, 428 bp, Triticum aestivum
agcggcctcatttgccacggcagaggtagcattcatcctgcaatcagcccagggccgtgcccttcagtttaccatcgctccagactccccaaccaccccacagcatgagccacagcagcagcagcagcaacagcaatagctaaacgacccagtagttccacaagtactggcataatgcgtgcttgaagatgtaggtctgggtgcctattttgctgttggtgctggctcctcaggaatgctaggaagccttcctgtggccacgtaaaaacctcgtatggtgtcagagtcttatttgtctcgagcaatgtgactaaacctgtgtgtctgaatgtaatttaagcattgatttaatgtaaatttaacatctattacctttactattttggtgcaacccgagtcttgtgctctaagcgcaatgatttgatggg

SEQ ID NO: 448465 - DNA, 456 bp, Triticum aestivum
cgctgggtatccgcaatatcctcctacgacccaccctccagctggttatcccgctcaagggccaccaatgcaggttcctccttatggtcaagctcctatgtacgggggaggcagccatggcgtagcaggcggtatgattgccggcggcgcggcagcggcagccgcagcatatggagctcacaaggtgtcacacggcggcgcccacggaatgtacggccacgggcaccaccacggcaagttcaagcatggcaagttcaagcacggcaagtttggcaagcacaagaagatgtacgggcgcaagtggaagtgaagaggggaaaagatacggctactcggatgtacgtacgtactacgtagacaacatgtagacccgtataattcgccatcttgctctctcacatctcaccaatgactcctcgcttgtgccgctcagaaggggaaaaaatgtgatcacct

SEQ ID NO: 448466 - DNA, 194 bp, Triticum aestivum
gagcaatttgttttcctgaacatggctgtagctgtgcgtcaagctcaaaccatttgtttatcttagttttgaacaaaagaaatcttattgtcttatgtaaattctgtttaccgatgtagttggatgctaccaaatggatctttgaatgttgaaatactgatgttttgagtcattatgtgtttgagatccggtac

SEQ ID NO: 448467 - DNA, 509 bp, Triticum aestivum
caggcaccaacacagctagcattagcgccaccaccaccacccatctgccccatcaccacctctcaatcactactgccagtagctagcttaagcttgcagctgctgcttgcgctccgacttcaagcttttgattcgccggcatactcaagctaagcttctcatggcgccggcgtcgaaggtcatgagtcacatcgtccaagacggcggcattgccacctacgccgtttacgccgcgccgtgtgatgcctggtgcagcgggcggcataggaaggccgagacggacggcgacgacgacgatgacgactatgactgcgcgcctgccgcctgaagtgtacgtacgttcgtacctggtcgccggcgaaacgaatctgggacctgcccgccaagagctagtatatatactgcgaactgatcgctgctgctgtgtatgctaatacgatgtcaagtacgtaggtacgtatatgcgtctgtttacagctacttatgaatgtatcccccctagtatatga

SEQ ID NO: 448468 - DNA, 157 bp, Triticum aestivum
tatcccttacttggtcttgtgttgttaaagagagccgcactattttgtatcgatgagtcttgctgttaatgacctatttgtcgtgatactgggaactatgttttgagatgtctggtgatgtaacggatgttttacttagattatgtatctgttgtcc

SEQ ID NO: 448469 - DNA, 475 bp, Triticum aestivum
catgtattaaaacgatatgtgtagttgtacatataggccacgcttggtttgatgtgggccccacaattatattttcatttcgaacgaaggaaatcgtagaagtaacttgagcctgcataggttctatctgtaactcaccaatccggaattaagtttgttaagaagccacgttgctaagaatactaactagctcactgcctttgaactccttgtatttctgcaggtaggatagaagacactttttccaggtggttccaacagttgggggacagcagattttgtgtggtgctgcgagtgaaataaactactgtacactgtaaaggcaaagacagaagttacaaatgtgttcccttttccatttcattcttttggagggggtgcgtccgtgcgtggccaggtggcgcatgataacttggatagtaaggatatattatctccacaggaagtcctcaatacgatacacatagaaattcat

SEQ ID NO: 448470 - DNA, 474 bp, Triticum aestivum
ctagagccacagctacagcaatggaagctctcgcctcgtcgccgcgggctctcttcgcccgcaccgcctctccgacgacggcgctggtcacgccagcaagatggacgccgtcatcgagcaggcgtgtcaaggccgccgccgccgccgagccggccggcgaggcgaagccggctgccgcagcggcgccgtcggcacccaagaagatcctcaagaagaagcccgtatactccatgaagaaagggcagatcgtgcgcgtcgagaaagaaaagtatctgaacagcatcaattacctatcagtggggcacccacccttctacaaggggctagactacatatatgaagaccgcggcgaggttttggacatcagaatctttgaagagaccggagagtatgctctgatcgcgtgggtggggattccaaccccgccggcatggctcccaacttatatgctcatcaagtcagacaaactcgact

SEQ ID NO: 448471 - DNA, 92 bp, Triticum aestivum
gatcttgttctcgatggttctgaaattatgcgcgcaactcggagatggagtcctgaactagccgcagcttgtgatgtgtggaaggtgatcaa

SEQ ID NO: 448472 - DNA, 331 bp, Triticum aestivum
ggacctttctgacaagcccatggggctcggcgtgcggtcccgccgctacgtgctcctggcagacgacggcgtcgtcaaggtgctcaacctggaggagggcggcgccttcaccaccagcagcgccgaggagatgctcaaggcgctctgagccgcgcctgctctgctccttgcctgagtcgtgtctagtgctccggagtagtgaataataatccgacgaactgttgctcgtgtgagtgtccttcgatgcgtcgacatcgtggagaggattttgttttgttttgttgagaattgcgtgctgtccatgtgctcgatgaaatgacttgaatttttc

SEQ ID NO: 448473 - DNA, 244 bp, Triticum aestivum
agtttatacagatgcaataatatggcacacaaaaaagaaggaagtagcagctatttacaagagcctcgcagtgtgcaatatagctacgagatcctattgtctgttggaatttcactttagaacggttggttttattcttcaaacagttagcctagaagaagatacacttgtaaggcacatacataaatacaagttcaatatgtggtctgatcaaatacatatagcctacctgatactttcgatc

SEQ ID NO: 448474 - DNA, 440 bp, Triticum aestivum
gaagaagttctgttttattctgatgaagcgcgcgccaaacggcgcgaggaattcaatcgcactgaagcaagttttgagcagagcatgaaggatatacagaaagatttggattttttgaaagaacttcacagtcgtgaatggcctgatcctgaagaaaatttccgcaaggagcttcgcaaatttgagaagaaatgtgatattgctcttcttgtactcgtgcctacaactgctgtgctctttatgagtataccatattacctttagcgggttataagaaacacactatcttagttttagctatcctggttgtagtgatcgaggctttaggcattattaagtacgtagctatgtattatcctggtttgactcgtgtaatctgaatgcacctacttacactaaacagtggatgctactcgtcgaattcccatggctgtatactc

SEQ ID NO: 448475 - DNA, 134 bp, Triticum aestivum
cccacgttttcgaaaaaaaaaaaaaaaaaaaaaaaaaaaaaaaaaaaaaaaaaaaaaaaaaaaaaaaaaaaaaaaaaaaaaaaaaaaaaaaaaaaaaaaaaaaaaaaaaagggggggccgttttaaaggatcca

SEQ ID NO: 448476 - DNA, 97 bp, Triticum aestivum
gtcagttccttgctgtactccagtctagccgagatgtgtacgtgtgatgtgcctgacctacttgttcaggcaattaatgaatagtaattattttcct

SEQ ID NO: 448477 - DNA, 85 bp, Triticum aestivum
atttagtttacttcatggattgatcacttacctttatgtagctaacacaaatatatgtatgtgccagctcagagccacttgatcc

SEQ ID NO: 448478 - DNA, 314 bp, Triticum aestivum
cggtctctttgggtgtcggacgatgactccgacgactccgacagcccgccagggcccgccagctcgccagactcagactcgccagctgactcgcctgaccccgccgcagacgacgaggagagcggcagcgtcggcgtgaggagtggcgtggtggcttccgtcgtggccgtggccacctcagcctccgtcgtgcttttattttagaacatcgtagcgatgtcaaatgtactacttaggttgtagacataaacttttttggcaatctgtactcagttttgggtgaaatttcaggcgcgggtgagtaattatgtggc

SEQ ID NO: 448479 - DNA, 312 bp, Triticum aestivum
ttctttttctttcagtgatttgaaggtcactggaattcatcctctgaaggaaggcaaccctccaaagtattcacagagggtccgtttggttgctgcgaactatcaaatagtctaaagccataattaaagcagttactgctgtttcttgttagtggcacaaggagtataattttgcatcaaatttgtttaaatatgtgtgatttggcctgtcccatacctagcgtgtcgcaccattgagaaataaaagcatgaattctcctgtaccctgtttgtagtattccttgtgagattgttgtttctgtttcgtacatg

SEQ ID NO: 448480 - DNA, 387 bp, Triticum aestivum
tcggttattttattactatttcttaatgacacagtgaggccacgtacagacgaacagacggtccttatgaaggttttttttttaagaaatagtaataaaataaccttgataatgaccagcgagggcacgtacagacgaacagacggcccttacactgaacaacacaacggatgggtgcagcacacgcactgcatgtgcacatccaaattacatacacaaacaaaagtcgcgatacttaatcaaacgcagcagcatacgcgcgcgcgcgcgcatgcaggagctccgggcggccgggcgatgcgatcgatcctgcccgcccaccgcaggagccatgcacgcgtgcatgtaagcacggggtaaccggaggatattatttaattagtactc

SEQ ID NO: 448481 - DNA, 252 bp, Triticum aestivum
gttgtgttgcaatttccccatcttttgtgctgaaccttagttcgtggatggcagctttgccccattaggcatttagactaggtgagttagttgtcttttttttattttctcccttttatgcaaccttggatattttgtgacgaaggtgttcagcgaacctcatgtttcgatgcacgaacccaatgtctacccccaggaaattcaatttgtatgaggtagcgaatcatgaatcaggcaactatgctcataatc

SEQ ID NO: 448482 - DNA, 125 bp, Triticum aestivum
gtggctcatgtagggaatatgtctctgtaaatacggtatactgctgcttgtaaatatctgaacttggaagcacaaggtgcactggctatgagcaccaaggaggaaggaaataatcagaatggatt

SEQ ID NO: 448483 - DNA, 391 bp, Triticum aestivum
ctctttttctggatgatcgccggcatcggcgtcttcaacttcgtctacttcatgatctgcgccaggtggtacaggttcaaggggaccagggatgcttgatgcaatttggatgatcaaaagaagggggtagaataaggtcaggtgattaattcacgtgtcttataccacagtagctatttcccttttgcgttcttataattttttggttctgctgttatgaaatcgatcaatcaatctatagatgaagtgggcggggaaagagaggaagaaatgtactgtagacaacagtggggtggttaattccttgtaagttgttaaaaatgaaagaaacaacaatggggtggttgatttcttgtaagttgttcaaatgaaagataaacgatttcactgt

SEQ ID NO: 448484 - DNA, 334 bp, Triticum aestivum
gcttcgtctgcgattgcacctggaccggcccctggagagcccgtaatggacagcggcaccgcagtagtggcctcgtcacatgggcgcgccttgatgttggtggtttctagcacaacacttgcattgatggggacgattcgggcctgaatgcgtgtgtgagacacaatgcggcgtggcattgtaggtcgtctagttcagattctttagcatggttaatttcttagttgcagatcgagccgtacggtatgatagttagagaatgtgtgcagtttgagtttcttattggtgaacacaataaatatttttcaagacaattattgcttgctccagagta

SEQ ID NO: 448485 - DNA, 408 bp, Triticum aestivum
ccctcgcgtccgcccacgcgtccgggaagatgttttgatacagtgttgtaagagtctgtccctgcttccttgtgacactattatattcttgtctttatgttattccgctgcagtactactctatcactagatgcaaaaattagctggatgtatggaatttggggaggcagcccaaacacaagacatttatctttagctgtgctattctccataagatgcggtgtcttttgcatttaacttgtgattgcccttttggttgtcgaatgcagctgaaccttactatctatgcaattatgtcaaacattacagtttacagcttctctgtatgccttcctgttgtttgtactttgttctggagcgttttattgtaccagcctgcaagctaaagtgaaaggagtaacacttggt

SEQ ID NO: 448486 - DNA, 189 bp, Triticum aestivum
cggtcgcgtgggggatagtgaaggtggacgtggtgttcttggctcatgggagcccgagaaaacctactatgtctcaacctaccgttacttacacgatcgggatgtatgtagtaaaaacgcgccaaatattttcccagggacatacgtggttgatatacaattgatattacagacgtttatttaaagttg

SEQ ID NO: 448487 - DNA, 334 bp, Triticum aestivum
ctcctagttccaggcctggccccgtgtcgccgggccgccggtcatcatgaaccccatcagccgccagaacttcatggtcaagaacccctgaatgggcgccgcggcggcgcaagctcgaccagggttatgctcccaccatgcagacaaagattcctttgtagggttttgaactagttcctaataaaagggactttaaagggcgggtatactattttgttttacgaatttcagtttccgggagcaactttggggggctttaccgatcgctcgctcgcctttcgatgaactatgttcctcggtgaaatttcccacgaggcaggaaaataactgcatt

SEQ ID NO: 448488 - DNA, 425 bp, Triticum aestivum
ccctctcgtccgagctctcgaggccgacaaggagttcataaagcagtgcgtgtggtccttgaacaaaggaggcaagggttttgttcttcttcaggagatcttgcagcatcttcgggacctcagaaggatcgagcagcgtgcacggaacaactctggagaagtctcgccccactacgtgcatccttacacggattgaagataagcgccgccgagccccgcgatcgtgctcgtcagcgccaccgcatcattcaagatgaagacaccaacactctgaaaaaggaaagtttgcgcaccaccaacagcaacaacaacagcgagtgaagagagaggagtttgccgactagctagcggcatagtcaggccagaagctgggaagctgggctctgtcatcccgggaggagaaggagctcccccttgggtaggtc

SEQ ID NO: 448489 - DNA, 103 bp, Triticum aestivum
aattttattaaaaaaaaaaaaaaataaaaaaaaaaaaaaaaaaaaaaaaaaaaaaaaaaaaaaaaaaaaaaaaaataaaaaaaaaaaaaaaaaaaggggcggc

SEQ ID NO: 448490 - DNA, 422 bp, Triticum aestivum
caccttcctcccctcgccaccacccaccaaggaaaggaggatgtcttgctgcggcggcaactgcggatgcggcgccggctgcaagtgcggcaacggctgcggcgggtgcaagatgttccccgacgttgaggccaccgccggcgccgccgtcatggtcatgcccaccgcctcccacaaggggagctccggcgggttcgagacggccggcggggagaccggcggctgcgactgcaccacctgcaagtgcggcacggcctgcggctgctcctgctgcagctgcaactgagccggcgcccaggaggccggccggcgaggcgagcacgaggatgaggaggacaactggacaagcaaccaccaccaccaccaccaccatcactagccgctgcatgcgcccgcccgcgcgcgcgctgaataaaataaaa

SEQ ID NO: 448491 - DNA, 415 bp, Triticum aestivum
cgctctttgcccggttcggcgtcggcgtgcgcgccgcgcgggtggtgacgcggatggaggagtcgtggaccatcgacgacgtggcgttcgacgtgccggggctgggccccgacgccttcatcccgccggaggaggtccggcggagccgcttttacgacgccatggccgccggcggcggcaagtgaacgtactactcgatcgtacgcaggagtgtaacacgtagtagtccagtagcattttgtttagtttcgtcggtgtgtcgattattgtttgtgattgtggcaccaagaaaatgcaagcgcgtgtacatacatatgtgtaccctgggtttttacctaaaaagaaagaaaaactcacagtttctaagtagctgcctgtaaaaactgaaaccttcttgagatgaactccttgattt

SEQ ID NO: 448492 - DNA, 291 bp, Triticum aestivum
ctgcagctgctcacctgcaacagcggcaaggtcagcacgctcgccacctacaacgtcgtcaagaaggactacagcttcgacgtggagaaggacggcgagaccgcggagctcgacaccaaggtgaactccgcgtcggtcacctacaccatgaaggacgacgacccgctcgccgtctacgccatctccaagttgctgcagaccaaggtgctgttcaagatcgccaaggacatggcccccgcgccggcgcctgagggccccaagaagtagaagaccaccaagaagaagccctcc

SEQ ID NO: 448493 - DNA, 138 bp, Triticum aestivum
cccacgcgtcctaaaaaaaaaaaaaaaaaaaaaaaaaaaaaaaaaaaaaaaaaaaaaaaaaaaaaaaaaaaaaaaaaaaaaaaaaaaaaaaaaaaaaaaaaaaaaaaaaaaaaaaaaaagggggggccgttttaaagg

SEQ ID NO: 448494 - DNA, 349 bp, Triticum aestivum
ggcggttcggctgctgcagaagggtcacttgccaactagtcggtattgtatttgaggagaaaactcccgaggagcttcagaaccatgctaccgttaagccctcagtggtggaactactactggaaatatccaaatactgtgatttttatttgatggaaactgtacttgatgataagagtgaggagaatgctcttatggccctggagaaagccgggcttttcaataccggtggcttgatgaaagaaaaggtactcttttgcagcagtgaagtaggccgaacttcgtttgttcgacagttggagtcagatttccacatcgacgcaagccttgagataatttcccaactatc

SEQ ID NO: 448495 - DNA, 82 bp, Triticum aestivum
cccacgcgtccgacctgtactgtgctactctgtgacctgcattgtctccatttttctgcgatctaatcaatgggctcaccta

SEQ ID NO: 448496 - DNA, 81 bp, Triticum aestivum
attagtttatatgctatatgaaactgacatccttcttggataaacatttacttacacgcaaaaaaaaaaaaataaaccaag

SEQ ID NO: 448497 - DNA, 110 bp, Triticum aestivum
cccacgctactttaaaaaaaaaaaaaaaaaaaaaaaaaaaaaaaaaaaaaaaaaaaaaaacaaaaaaacaaaacagacaaaaacaaaaaaaaaaaaaaaaaaaaataaag

SEQ ID NO: 448498 - DNA, 78 bp, Triticum aestivum
caaatttatttgaaatttctctgcaactaacatctaccaggtcatcaaatttacagctactgtagcttttgtgaaaaa

SEQ ID NO: 448499 - DNA, 105 bp, Triticum aestivum
ctcgcgtttctcatgtcaaacctgattgagtgatcctcatgagggaccaacaagaacagacgccacttttgtcattgtgttgtgaaggccttatctgattctagt

SEQ ID NO: 448500 - DNA, 447 bp, Triticum aestivum
cccactcttccggcctcatccaaaacccggaactcaaagagagcgcagcaaccgtcagagcccgactagtcgaaggccacagccatggccgcccctaccggcacttccatgctgagcgccctgctccagcttcccctggccccgttctcgcggaagagctccgcgccttcggcggtccacatgaccgcccgccgcgcgccgacgtccgtgctggccgccaagggctacaacgtgcagatcgtggtggacgagaacgagggggaggactccatcttccggcggttccggcgggaggtgatgaaggccggcctgctccaggagatcaagcgccgccggcggcatgagaacaccaaggacaagaagatccgcaaggcccgcgaggccggccgccgcaaccgccgcaggcgtatgatggatgatcgtaggttcccagaagatgagggagac

SEQ ID NO: 448501 - DNA, 59 bp, Triticum aestivum
cttatgctgatatgctatatgaactgccatccttcttggataaacatttacttacacgc

SEQ ID NO: 448502 - DNA, 436 bp, Triticum aestivum
gttcatttagaccaacccgctgctcaacaaggtggacggcccggctccgtccacgggcggcaccgcctccaggaaggccggcggcaccacctccggcaagaagcccgcggccggcagcgagggcggcggcgggttcaacctcggcggcctcttcgccaagaaaggctgaactacataagcacgtgcgcgcgcttgggtgcgtgcttcgatctcatagctcgatttattgctgtaactccatggaaaacatcgcagagatctgcatatatgtacacgcggtgtaactactcaaatgattcttgctgtgatgccttatagatttgtattcttcttcacacaacttctggagtaatttctctcaaaggctcagtatgtcatatacccatgttaagctttgctttgctaagatcccaataccgacaacctttatatctct

SEQ ID NO: 448503 - DNA, 106 bp, Triticum aestivum
ggtcgttgtagcggtgaaaaaataaagtgacatgcagtatcatgtaagaacccgaactatactagttcaaacatgggaataaaagacaaacacatgtcttgtctac

SEQ ID NO: 448504 - DNA, 135 bp, Triticum aestivum
tcccactccacacagagacctccctgctctcgtctttatctcctgtcacacacagagaagagaacgaacgagaaaaatgccgcgccacctgctgcagcagtccgtcgaccgcctcgccgcgctggccgcgcctcc

SEQ ID NO: 448505 - DNA, 119 bp, Triticum aestivum
gtccatgttcactccccccccctcccaagtatgatggacttggggtgctcaacattgataaatttgcgcaaaaaaaaaaaaaaaaaaataaaaacaaaaaaaaaatacaaacaaacaaa

SEQ ID NO: 448506 - DNA, 194 bp, Triticum aestivum
gctttttggctcggccaggccggcgtcgagatcggcacgtccgtcggcggggccgtgcagcacgccgtgcgccagctgcccgtgcccttccggggcgcccagatccgtcgtcgcaagctgcacccgcccccttctgcggacggggccgtcggcctcctctcctcggagagggccgtcgatagatgccctctcga

SEQ ID NO: 448507 - DNA, 419 bp, Triticum aestivum
atctgatcagagaacagagcggagcggataaactcgagttcgatcatcaccaaccatgtcgtgctgcggaggcaactgcgggtgcggatccggctgcaagtgcggcaacggctgcggagggtgcaagatgtaccctgacatggacgagggagtgaacaccgcctcccagaccctcatcatgggcgtggccccctccaagggcaccccgtcgttcgaggccgccgtcgagaacggagggtgcaagtgcggccccaactgcacctgcaacccgtgcacctgcaagtgatccatgaggcctcaatcaaatcagatcaaggagatggcatggatggacctgatgaaggagcgagtagtagttatgcatgaatcgcaagcgtgtgtttcgttttaaattgccacccagaataagacgagatcta

SEQ ID NO: 448508 - DNA, 321 bp, Triticum aestivum
aagagatcagatcagatctcatctcagtctcctctgctcggctcaggtcgccggcgatggcgatggcgccgtccctccgcaccaccgtcctgctcctcctcttcctcctcgccgcctcttctcaggcggaggcggcacaagcggcggaggacggcatccgtgtcctctccgccgagaaaaggatcgacctcaccggccccattgtcaaggtcttcctcaccctcaaggtccagaacgccgccaccggcgccgacgcctcacacgtcctcatcgccttcacgcctgccgaggccgaccacctcgccatcgtcaaggccaccc

SEQ ID NO: 448509 - DNA, 193 bp, Triticum aestivum
cccacgcgtccgcccacgcgtccgatctgctcgagcgttcacttgctagcatggccgatatgatagtattgcgagctagtaagtgtatgatcatttgtgaatgcatgacatatgctgacttttagatatggtggcaacggtcatgcgtacatatgtatttgaacaatatccataaatggacctatttccagtt

SEQ ID NO: 448510 - DNA, 204 bp, Triticum aestivum
cccactcttccgcgcaaatcttgtactacctccttcccaagatataaggtgtgctttgacttttaaaaaaaaaaaaaaaaaaaaaaaaaaaaaaaaaaaaaaaaaaaaaaaaaaaaaaaaaaaaaaaaaaaaaaaaaaaaaaaaaaaaaaaaaaaaataaaaaagaaatcaaaaagataaaaaaaaaaaaaaaaaaaaaacaaa

SEQ ID NO: 448511 - DNA, 321 bp, Triticum aestivum
acgccaccgactcctcctccagcgaggacgagtcggcgccgccgccgttggccccgatgccgacgaccaaggaggagcgccggagggagcgcaagaagcgccgccgcgtcatggaggccgggaggagggacgactcggggccgccgcagccgcaggcaaccggggcgcgcacgccctcggtgcggtaccgcggcgtgcgccagcgccgctggggcaagttcgcctcggagatccgcgacccgatccagggccgccgcctctggctcggcaccttcgacaccgccgaggaggccgcagcagcctacgacgccgtcaagatcc

SEQ ID NO: 448512 - DNA, 302 bp, Triticum aestivum
atcaccatgggtttaggatcaaagatgtggcttgctatacaggccagagcatacaatgtgcaattttcagggtgcaggtctgtatgccttgccggtactcgaagattgactgtagtgctgtttgtatgctgtattgtactccctccgtcccaaaatataagaacgtttttgacattatgctagtgtgaaaaacattcttatattttgggatggagggagtattatttttcctgtataccggttgatttattgatcttgcagtgcaaccatcatttcgcaggagaatatagcatcccttgctt

SEQ ID NO: 448513 - DNA, 58 bp, Triticum aestivum
gcattatatcagtatttgttgccgagcatgaaataatgctcagttcaatgttcaattc

SEQ ID NO: 448514 - DNA, 80 bp, Triticum aestivum
cagaactccgaagttaagcgattgctgggcatgttttgttaatataaaaagatattgagtatacctatttggtaaagaca

SEQ ID NO: 448515 - DNA, 159 bp, Triticum aestivum
aattttcaaagtatatatgcattaaggagggtggagtcaggctagatctatactataatatccttaatgtctataagtggagtcctcttttatgcgggtttccactttaagcaatgattttagaatccgattcaatagaaaatgagaaaatatgcaaac

SEQ ID NO: 448516 - DNA, 391 bp, Triticum aestivum
ggagagcagagctgagcacaacccttggacacctcttcttcttcttccatagtaacccaacccaccctttgcgaagatgtataacgctccgtcggggcaggagatgtcctacacggagcacgtgcagaagcgccacgaggagaagggctgcatctacgcatgcgtgttcacagcgctgtgctgcttctgctgctacgagacatgcgagtgctgcctcgactgcctctgctgctgctgcaactaaaccggacatggccgccatggacggaggccgcaaggcgcagaggagatccaccggcctccgccgcctttcataataagcatatgtgtctagtgtcttagctcgatgagaactgtatcacaactttgctataatactatctgtccttgt

SEQ ID NO: 448517 - DNA, 83 bp, Triticum aestivum
ctcactctcttttgcatgtgaccacacaacaaataaaccacaaccggaaacgcaccctcatttggtactgtactggatctggg

SEQ ID NO: 448518 - DNA, 298 bp, Triticum aestivum
gtgccgaaaaatctgacggcgctgggcctgcagctcactcagttagagaagataatcagggacaccgagaagagcctgcgcagcagagggtgcaatcgactgatggcgggagcatgatcaggtgtactggctacctgcggctatgttgctggatcatgaccaaaccttgctcaagagatgtgctgtggactgtgcccagccctgcgctagaccttatagttgcctgtatgatttgtgcaataacggctggttgatctgctggtacactgtaatggttcttttgctagactgttccgac

SEQ ID NO: 448519 - DNA, 257 bp, Triticum aestivum
cccacgcgtccgcgatagccaatttattggctaattcgaattcgtctgtacaattcgtaaaattctttcttatttcttattgttgaaatccaaaattaaagtctcttggctctcttcacgctttctcacaaacagattaaaaaatagatttttatttttgaagtttggataaaccattgcttcgtctggtgtctacaatacatataactcattatagtactaatttcatttttaccagatcgaaaaattttatgttg

SEQ ID NO: 448520 - DNA, 152 bp, Triticum aestivum
gtatcctcaaaatcttggagtgctccggtactctgtctgcaaataccacttcaaaagtggtaaaaaattcaagaaaaatggaagacagagacacaacatgtgtcaactatgtcatgtgttgaaatccaaattccaatctcaaatctagaaac

SEQ ID NO: 448521 - DNA, 384 bp, Triticum aestivum
cggacgcgtgggcggacgcgtgggagtctcccctccctctcccaaatcgaagcgagaaattccccaaaaagctaccccatttccgtcccagccgaggcaccggcgccgcagccgcgcccgcgcccgcgcgatgccgaacgcgatcccggccttcttccgcgcctcgccggccgcggcgtcgggctccggcgccggggcggggcccagcctcgccacctccgtctacgagacccgcctcggcctggcggcgctctcctggtcgcgcgccgcgttcggcctcagcctccgggccgtgctccgcgtcggggcgctcgcctcctcctcctcggcctccgactacggctgctacgacgacggcccggagttcgacgaggagaccaccat

SEQ ID NO: 448522 - DNA, 386 bp, Triticum aestivum
agaactgaaggctagaagagcccaaagatttcttggagactcttctccaatccccctttcccctccatggccacgctccagcacgctctcctcactccgtccccgctctgctgctgctcgcacgctctcctccacccaagggccaggaagatatctccgaggtacccagatggggccttctccatggcgaagccattcttgcggcgcgagctcccggagaggggcggcaccttggcgcggagaatggcgggcgggcggcgccttggcgtggccggggccgggaaaggccccttctttggcggcgggcggcggcagggggggaccggccgcggccgggtcgtggcgaacctcgccttcgtcgccctcgtggcctacctcgtggtgag

SEQ ID NO: 448523 - DNA, 299 bp, Triticum aestivum
cctcgttgtgattaagactgcaaattatgaggtcaggaagtatacaccatcttcagcagctgaagcaaaaggtgaaaaactaacaggatcatcaggtcataacactgttactgggtctatatttggcacgaatgcttcatctgagaagactgcactgactacacctgtattgactcaggcttctgatgacgaactctaagacgcatccatacagatagctctgccaatgaacaaagacttgaacagtttaccagctccaaatacagaagcggttaccttgcgaaaggctgaaggaggca

SEQ ID NO: 448524 - DNA, 226 bp, Triticum aestivum
cgctgttcactcttccgcacacataaagcagtggtgcaatacaacgattggacctagcaagaaactagctagtttttgttgtagagaaacttagctagttaacgccgtggacgacgaatatggtgggtagcgctagggtgctgctcgtagccgccgtggtagggtttttggcaaccacggcgtgcgaagccgtccagtcggactacgccaccgcgctcaccaagtc

SEQ ID NO: 448525 - DNA, 104 bp, Triticum aestivum
cacaaacatgtgcacaactggtacttgtaataatggatgatgccaataagattgtgaaccttaattcatcaggagtgtgactgaatttgcaagtctgcttcatc

SEQ ID NO: 448526 - DNA, 55 bp, Triticum aestivum
gtcagtctggactacccgctgagtttaagcatataagtaaccaggaggtggaagc

SEQ ID NO: 448527 - DNA, 145 bp, Triticum aestivum
cttgtagtggttatcatttgttcaatactattggtactgaaatggtatttgcatgtgtgtctgcgcaaatagagaatagtgatgaaccctttaggttattcagtgtacaaggggattcgagcttctatgtgattatattgtaata

SEQ ID NO: 448528 - DNA, 480 bp, Triticum aestivum
aattgtttcaagactcagatccagatgcaactattgtggaagtaaccttgggtgaccgtcttggggatctccttgatactatgagtgccttgaggaatttagggctaaatgttgtgaaagctagtgtttgcctcgattcttctggcaaacacaataagttcgctataacaaagtcgtcaactggtcgcaaaattgatgacccagagttgttagaagcagtaagactgacaattataaacaacatgcttgagtatcatcctgaagctagcagtcaattggccatgggtgcaacttttgggctagagccccctacagaagtggttgatgtggacatagcaactcacatagagatctatgacgatggtcctgaaagaagtttacttgttgtggaatcagctgaccgtccagggttgttggttgatctagttaagatcattgctgacatcaatatcactgtccaatctggagaatttgacactg

SEQ ID NO: 448529 - DNA, 340 bp, Triticum aestivum
cgacctcagagctggaggcgaagctcgacgagggccgccgccgcgtggaggcagagctcgtggaggcgctcgcgagcctcgaggggcagaaggaggaggccatcaaggcgctggacgcgcagatcgtgtcgctcagcgacgagatcgtcaagaaggtgctcccatccgcgtgaaaactagtagatcacgcagcgcgcagcagccggcgcaatcccccgtttcatagtaaagatttctagttcttgatgtgtaatgtatacgcccactgggctgcctcccctaagaatgtaactgaatcaaacattctgtgatcgggtataaatgaatgatccttttgtac

SEQ ID NO: 448530 - DNA, 109 bp, Triticum aestivum
gaacttactcccatagcggagcggcagtctccgcattgtggaatgtttaataagaggttgagttggagtgggttcagtggatgtcgtaataactaattttagctttttt

SEQ ID NO: 448531 - DNA, 278 bp, Triticum aestivum
ccttatctgaaattaggacttcttgcatatcgagtgctctttctagacccccaccccccctcccccccttaatattggctcctaagtttcagttaggtctaggaatctatatttgtggctccatcataacattgaaggcacagagatgagagcatgctaattgaaccatattggttgtattgtatgagctggtcacttattgaatgacctatgctggcgctgagttcatatttgacagaactggagaggaaaaagcagaacatgtggtctgttactag

SEQ ID NO: 448532 - DNA, 88 bp, Triticum aestivum
cccacgcgtccgcccacgcgtccgcccacgcgtccgcccacgcgtccgcccacgcgtccgcccacgcgtccgcccacgcgtccggcga

SEQ ID NO: 448533 - DNA, 344 bp, Triticum aestivum
gggtaatagaactatatagtgttggggggggggggggtccaaggtttaaattttggggcacatgaatatttcagaccccaacctaaattattagagcaaaatttatcatattttttaccaagaaaatgtttttagtatgaatttaatttgaatctagctagtccaaattgcatatagaaaagtatattttatttcctatgggaggtgccgatgaaactatttatatgtgtatggaatctatctcaagaaacttggaactcttgattatcagctattcttgctactcctaagtgtaggcttacaccacatagggcaaatttagcaggtttgaaaagcaattcaca

SEQ ID NO: 448534 - DNA, 468 bp, Triticum aestivum
aagtctataaggctgctgagactgatcgtatctatcgcatgaagctgcatgagtatctgcaaaagatcaatgaagggaagatatttgggcctgttatctctgttatccacgacatcgaatttttaaaaaaagggctaccgcatgcccgggtccttgtttggcagaagaaaaaacataacaaagtggtcatcccagctttcatgaaaacctttgcttcagccactgttgggatctgaacttactgatactattggcgatgttcctgggtatggtcagatgcctaagctagaaagagatgagccggctgttgcagcgtatgattcatcaggcacattagagtcgagctgaacccaactttcaaatgagcataagaaagcgatgattttgtgcatggagtcttgctgccttgatcattggtacctcggccctcgctatcttcaccccacgacaagtaacaattaccttttg

SEQ ID NO: 448535 - DNA, 66 bp, Triticum aestivum
cgcgttcgttagtgtgatcataaattctcttcgaattacattcaaatatattgagatcttcgctag

SEQ ID NO: 448536 - DNA, 325 bp, Triticum aestivum
gctgccccgatgtatctcccgccttagagcttagctgcggttttttaatgctatactaaagtcaaacattaaggaaatcagctttgtcatgttcgagaagaagagggtgtttagctgtgaatcctgtgcctcttcagccatgatcttcttcaagcttgtctcccagatcgtggaggaaacgccatcactttttgcttttctgtccgggttggaaaaggacgggggttggacccgttaagttcctatttgacctgtgcggcttgtttaaaagtgggacaggaaaatggacatacagggtacaagggacagtgaacagttgtcacaa

SEQ ID NO: 448537 - DNA, 284 bp, Triticum aestivum
tgatgtgctgatcaatgctgccatgggctcatccaacagctatgccatcaagaagaaggacgagattgagcgtgttgccaaggctaaccggtaagatggatgtgcatctgagggtctcgcttttggctggagattttgaagtgaatgtgttctacaagatatctagaactgttttagctatgcgttaagttttatggaatgaacatttcgatgtagtggcaagaacgtgcctgatgcttgtctttgtgaaacctattcctgttcagacatatttggatatgttg

SEQ ID NO: 448538 - DNA, 402 bp, Triticum aestivum
tcaattaacctcaaaacaatgaggaaatcaaggtgaaggccaagattgaagcacagaaggtcagagagattgcagaggagagtgcggggtcaaaagctcggatgaatatttaccttgcactgacggcgatactcggtcttacaatcgcaaatgccgtctttgcaacgccagaggtggaatggaggaaggttgctgctctgggtctaattttcattggcctggttgctcaggtaatctatgagcaagatatatccccaccggtagctgacaaggatgaaaaaagagaagaatgaaagagctgtgcaccctgagtgaaacatcaaaaagcagcaagagcttcatcgatatagacgtagactgtataaattcaagatatagattgtgtaatcttagttatcattt

SEQ ID NO: 448539 - DNA, 435 bp, Triticum aestivum
gcgcatgcggaggcggacgtacccgcaacctcgctcttcggtgcggaccgccgcctctgctcagccgacgtgctctcgcccctcgaggttcgggcaaggatcgaggtggcggtgctcaatttcctcgccacgctctcgtctccctcttctccggccatccctgtcctccccctgatctcacgcaagtccaccaattgcagcctgcgcagcggcttgctgagtgatgtttcatcggtgtatctgtcctacgccttttgcaagaggtcactaatgagagaaaatgatgccaaggcattcgtcagagtatggaaagtcatggagatgtgctacaagatcttgggcgaagggaagcttgtcacccagcgggagttgttctacaaactactatcggactcacccaagtacttcagctgtcagcgccatgtcaatcaaacc

SEQ ID NO: 448540 - DNA, 134 bp, Triticum aestivum
cggacgcgtgggcggacgcgtgggtggtactggatgatgaatgtacctgagttatttgtttgccagatatttatccgaatgaggctcaacctcttaacttttttgctctgtgggttaaaagatctcttttatca

SEQ ID NO: 448541 - DNA, 269 bp, Triticum aestivum
ctcctaatacgttgtaaaatgtactacagcaaccaaactttccagcagaatgttagcagtgctttgtaacttaaaaaaaaaaaaaaaaaaaaaaaaaaaaaaaaaaaaaaaaaaaaaaaaaaaaaaacaaaaaaaaaaaaaaaaaaaaaaaaaaaaaaaaaaaaaaaaaaaaaaaaaaaaaaaaaaaaaaaaaaaaaaaaaaaaaaagggggggccctttaaaaaaaaaaaaaataaacacccggtgcatggaaaaaaaaatttttttt

SEQ ID NO: 448542 - DNA, 79 bp, Triticum aestivum
cccacgcgtccgctgctactttcagcgttgttgagttgtaattgatgctgttttgcgtgaacatgggtaccttatggtc

SEQ ID NO: 448543 - DNA, 297 bp, Triticum aestivum
cccacgcgtccgggagctgcagatattcaacaagaggtggaaggaggcggtggcggaggacatgtgctggacggacccctacccgcagccgccgacgccgacgcccaagggatgacccacggtgcccgccgccggcgatgtcctttgcggttgagtagatgacatagaagatacatcaaaatttacaggtctagagagcttcagataacatgtcatgtacagatctctttctccccggtcaataagataggttcaaagacgatgtaattatcataattttcggtaaaaagatggatt

SEQ ID NO: 448544 - DNA, 183 bp, Triticum aestivum
cccacgcgtcctggaatgtgaggctattttggcttgttgatgttgctggtgtgtgtttttctaaaaaaaaaaaaaaaaaaaaaaaaaaaaaaaaaaaaaaaaaaaaaaaaaaaaaaaaaaaaaataacaaaactaaataaaataaaaaaaaaaaaaaaaaaaaaaaaaaaaaaaaacgggggc

SEQ ID NO: 448545 - DNA, 225 bp, Triticum aestivum
cccacgcgtccgcccacgcgtccgctctgcatgctttaccatgcggagctaaaattacgctgggcgcctattagtagaatttggcattggttttgtgtcgatgccggggttcagagctaaaattttattctcacgccaagactcgtatcaagagttgttttttagaggctgtataccgaactactgtcgatcatatcaatatgaatagaaatgattttttgtttc

SEQ ID NO: 448546 - DNA, 76 bp, Triticum aestivum
gtagtaaagtaattaatatcatatgtcaactgtctctgtgtgatctttagcatttgctaattgattcgattaaaaa

SEQ ID NO: 448547 - DNA, 298 bp, Triticum aestivum
tcgcgcctcgcctcgcctcggctcggctcgtgcttgtgtaccatggatctgatggattcccctctatctatgcttctgttgatacttgatcgttgtacttcgtatcagtaattggaaagatgctgcatgcatgatgcatgcaattactgtaaaaaaaaaaaaaaaaaaaaaaaaaaaaaaaaaaaaaaaaaaaaaaaaaaaaaaaaaaaaaaaaaaaaaaaaaaataaaaaaaaaaaaaaaaaaaaaaatatagaaaaaaaataaaaaaaaaaaaaaataaaaaaagggggggccttt

SEQ ID NO: 448548 - DNA, 221 bp, Triticum aestivum
ggagtaagcaagggaatccagcattggttagaataacaggaaggaaatgagtattgtctattgtgtgtacaaagtattgttaggtcatgtccaaggttaagtctgtctctatgtcgttgtagattctcgtctacattcatgatctgtgtgttgttatctgttcaaatcaagtcatcaagtaagctgtcatgtaaactcatgtattagtgttatttgtaaaa

SEQ ID NO: 448549 - DNA, 225 bp, Triticum aestivum
gttctaactgaaaatgaagggtgactaccacaggtaccttgcggagttcaaggcgggtgctgagaggaaaggaaacattgctggctttggctctaaaaaaaaaaaaaaaaaaaaaaaaaaaaaaaaaaaaaaaaaaaaaaaaaaaaaaaacaaaaaaaaaaaaaaaaaaaaaaaaaaaaaaaaaaaaaaaaaaaaaaaaaaaagggcgcaaatggggggggttct

SEQ ID NO: 448550 - DNA, 413 bp, Triticum aestivum
atgagcatcgccgaccgcctcctccgccagaacctcctcctggactgccaggtggacgtggccaaggcgagcttcgacgtgcggcagccggacaaagagttctggaagaaggtgtgcagggggttcctcaagggcaggctccagccgcagcagcagaagcagcaacataagctgcagctataggagtcggaggagtcggagccggcggcgagtccgagaagaaggccggtgccgccggaggaggaggaggaggaggacatagtagcgttactgagctgggggggttgcgattgcgagcctagaattaatccttatttttctgcttcggagtttgacatcgtcgtcgtcatcatcatcatcttgtacagaaaccgcctatttaatcgaagcattaataaagagcgatcggtgct

SEQ ID NO: 448551 - DNA, 399 bp, Triticum aestivum
cccacgcgtccgcccacgcgtccgcccacgcgtccggtgtgtgtactacgtgagcgtgagcagctcggcacggacgtccgtacgcgcgtgggggtcacccaccggggcacgcaggcagccgctgacgagggccaggccggcacggtggaccagcggcgagcgggcgcgccactgtgcgtgacacgcgtgcacatgcatggcgttcgtcgtggggcgctccccaacgggcagaagctgccgtgctgtggatctgtgttcgtgttggtgttcgtctcgtgatgtgtttgtttggttgtgttcggcgcgtggtgtttcttctcttgtcatgagactcggagcgtgtgtatggctctgttcgtttcatcttctctgctgtaatatatgagcgtttcatgtgca

SEQ ID NO: 448552 - DNA, 83 bp, Triticum aestivum
tcgccctttcgttcgctcctagcatgctatatacctacatagtacagccatggcccccaccgtgatggcctcgtcgtccacct

SEQ ID NO: 448553 - DNA, 290 bp, Triticum aestivum
ctccgagtacgaaaagattgttcatgatgctccgccaccgcattcgcatcgaataactgatatattcagcttcaggaggtcgagacctttatatggttcattcaaaggtggtgctggtcagatgaagctataggacaactttgtttcgagtcatatttacatgtcacacttgaattgttcctatagaaaataatgtgtgggacaaatgttcgcacttttggctaggctgaatattccataccaaatctagtagtatcagtttgaaattttacatgttgtattcttctcta

SEQ ID NO: 448554 - DNA, 463 bp, Triticum aestivum
ggaacatctcgtcttcgccgtgaatcgcgtggtggccgaaactctagtagccaacttctccagacttctccagtcatcgtctgcggcaattgcagatcgccggagtggcctcctctggccatagagaggccttgccgtttgccgccgctgtcgtcggcagtcatgtggcggattgaagcgccggagggcgccgcttcgacgcgcctacagaggagggcgttgtcaaccatggggtgcctctggtgctgcgccgctggagcgctgtcgaggccgagggtcctcgtgtccttggggccggagggagggtcagggacggtggagccgtcgagttcttggcctaattgctctctggaagaggcgtgcgtgataacgtgttggagagaatcgagagagaggagcgaatggaaaacagatatatgaatgaacagttattctattgatcgaagattggggtatttatacc

SEQ ID NO: 448555 - DNA, 327 bp, Triticum aestivum
  unsure (1)..(327): unsure at all n locations
cccactcgtccgaccggaagagacaatgactggcatctgcaagcaagcaattgaatgcattatggcggcatcataaatcaggatacagttcagaagtagtttgagatctacaaacaagaaactggctgncgcataaatgagagcatagtggcattaggttcacatcacatggttgattagtttcttcagaagttatttgaacaaagacacatatattgttatcgtaaaggaacctgtactgttgtaatgtgacaaacagaagatttattaccatgcaaaccggtatgtccgtagcctgttacaagcacggaattgcaatgatcaana

SEQ ID NO: 448556 - DNA, 418 bp, Triticum aestivum
cggacgcgtgggcggacgcgtgggcggacgcgtgggcgccaactacggctactccccaaactacgtcactgacctgagctacaacgcgcagaagctgggccaagcggcggcagcggcgccaggcgcgggcgggtcctacatgcagccgcaggggcacttctcgtacccggcggcggcggcgcagggaggcatgctcgcgcccaacggcatgatgcccgtgtacccctactaccactatcatcactaccaccacggctcgcaggggctgggcgtcccggccgcgcgcttcttcccgccggtctccgccgccgtgcccaccgttcccgccatcatctccaagcccaccgtcatggtgcctcccaaagtggagcaggtggctgggtgcagctgaaggcacggtgacggtgcgaggaattag

SEQ ID NO: 448557 - DNA, 81 bp, Triticum aestivum
ctgttaattgtttgtgtacgggtgatttaagtaacctgtgcacttgtgcttataattaatcagttgaagcattgcatgaat

SEQ ID NO: 448558 - DNA, 490 bp, Triticum aestivum
gggagattagaggagttcgttctaaaattggcaacaacgagtgtcttctgtgctgtgttgattttttctttcatattgtggagacgcttgttcgtttcttcaacaaatatgcatatgtacagatagctgtcaacggacagagtttcaatcgttcagctagggatgcttgggagctgttccagtcgactggcattgaagcacttattgcttatgattgttctggtgctgttcttttgatgagcacaatattaggtgggttaattacaggaacttgtactggtgtttggacatatttcacacaacgtgataaagcaattatggttggctcgacctctatgctgattggcatgatactggttgggctagctgtcgtggttgttgaaagcgcagttacatcaatatacatatgctatgctgaggaccctcttctaattcagagatgggatcctgaattttttgagcaaatgtcagaagcactgcaccagcgact

SEQ ID NO: 448559 - DNA, 296 bp, Triticum aestivum
gcttcatcggccagcgcccacacgagcagctccccaccgccgactactgaaaatatcaatccgaatcccatccatcagtcatcgccatgagagactgaaattgcttcaagaatcaagcaggtgttatcgtgtcatcagcaagcccgtttagtttcatcgtctctctctcttgtctttgagaaattcagggtaaacagtgagtcagtcagtcagtcaggaataatctcttgtcttggtgtacgtacgtcctcaattatgaatgcttctattccatggtcatgattgatgtttgtcca

SEQ ID NO: 448560 - DNA, 283 bp, Triticum aestivum
  unsure (1)..(283): unsure at all n locations
ccatccttcctatgcttatgtgccgagcctgcgaggagctatgtccaagtgaaaacaggctgatgctggtattgtatgtgtacacaagaataaacacggtgctgtcacgaggtcctggaacctggagttgctgctgagctgctctgtagtttacctggtatattctggtgcattggcgaccaggctgcagtgatctcagattggaatatccgtctctatgaaggaacatactttgtaaacatatgttgtcgaacctttgctttgtttgccggacaagtnttgt

SEQ ID NO: 448561 - DNA, 63 bp, Triticum aestivum
aaatataaaaaaaaaaaaaaaaaaaaaaaaaaaaaaaaaaaaaagggaggacgaatctaaaga

SEQ ID NO: 448562 - DNA, 74 bp, Triticum aestivum
gagtttagcaatgttgggctcatcttccgtgagcacaacgcatctcctgggtactacgatggcctctctccctc

SEQ ID NO: 448563 - DNA, 441 bp, Triticum aestivum
cagttgccgccgccgcctcctcttcccccaatgcagtggaggacaatgagacaaacaacttccctagatgaagaaagagactctacagctaaagacatgcttaagaatgcctcaagtctaccacctgtacacactcctgtgcaggaacaatatcttccgccgtgtgcaccaccatttccacaaggaaatgttaaggaagtgaaccatcagaaagttgatgtgatcaaagaagggagtaatcttcctaatatatttgagatcaaatcaagcttgcttcagcaaatcagggataagccagatctgcacaagctgaatggacatgaaaagcccaaagcagtatttaatgatgttaacagtttggacgaaaggggggagttgcttcagcaaatcaggagcaagacattcaacttaagacgaacaaatggatctaagacaaacacc

SEQ ID NO: 448564 - DNA, 76 bp, Triticum aestivum
tttcgcccacgcgtccgcccacgcgtccggaaataactttgaaatcgcggtaatagaaaccagaacgttcccatgg

SEQ ID NO: 448565 - DNA, 249 bp, Triticum aestivum
ggagcttttggatggtgattgacaaaggcaccaacaaggaagatcagagagttgcatttccttagtagcagttctaactgtctcttctataccttgtagaccataatgaaataattaggacgctacggaactggagttctaccactatatgtatctttactgtctgcgaccaagatgtgtgttttctcccgtttgtatatttatttgtatcgtgtgatccacttgcgtagtgatgacatgcttgctcta

SEQ ID NO: 448566 - DNA, 449 bp, Triticum aestivum
atctagcgggtgggatggacaacgtgagcgacaacgggcgcgagggcgggtgggggcggctgccgtctctgtgggcgccggcgcgcgacggcgagcagaggcagcacctgccccgtgccggcgcggcggcggggagggagctggggcggcgcgcggaggacggcgtcggccacggcaacggcaagacggccaaggtgatgcacctgctgctctgggggcccaagtgagatgagatcggccaggtttcccgccggccggcttcccgcgtgcccgtgggcggtggcggaccggccggactgtacactagttgctgcatgctccttcagtttgccgcgttctttcttcaccgcttttgtttgtaatggccagtttgctgctgtgtatgcgaagtttgtactgtacatagcgaaatatatatggatgcgatctgtgtcgttagaccatgtaat

SEQ ID NO: 448567 - DNA, 367 bp, Triticum aestivum
cccacgcgtccgaaaagagttgctaatccgccatggcaattctcaagagaaacacaagggttgtatgcttggtggtgcttgtggtcatggcgacgaccttattgcccttctcaactacacatggggcgtgcttagtggcaccggaatgctcgggtccctacccgaatgtaatatgtggtgagttatgcgctcgttatggttacagcaaaaatggatagtgcaaagattcaagaaattgttgttgtagtggcaaaaaattaaaagagtcggtccaggtggatcctacaacaaatccataggagagaaactctagaagctgctgcgccacaatatgtaattgtgagatgaataaattcgaaatgaaata

SEQ ID NO: 448568 - DNA, 78 bp, Triticum aestivum
tgtcctcatattatattttatatcctctcactagttggttccgttccttttgatgaatgacgaagtgtggttggcagt

SEQ ID NO: 448569 - DNA, 459 bp, Triticum aestivum
cgtatatatatgtggccgtatggaccatcaactgatgaacatgaactcatcaaggaccaattaaaaactgggactagatcgggagaagaagatgtggtgcttgaggtatttgttcatgtttctcttggagagatgcatgcatgcatggggagatctcgcctgacgggtttggtgcatatatatggcctatgggtgttgctgcctggccggttgaagctgcagctttgttgtagccatgaacctgttttttttgtttctctccagaaaatctgtaccaagagcctgtgaaaagctatgtgtgtatgagagactatgagctagcaaaaagttcttcctccttcccatgccatgtttatccggttgttccttgccttgttggtttctcctgtgcatccaaaataaccgtggtgttaattcctgcaatacgcagaggaagaaccagccatggtgcttaattct

SEQ ID NO: 448570 - DNA, 491 bp, Triticum aestivum
gtccaggcccgggatgaagaccagcgtcaagctcatccacgccaggcttcacgctcaggccctcactctggctgccttgggttgttctgcgcttgtggagtactatgatcaccagtcaggttcaggatcaaaggttcacgactatgcaaagcagttccttccatcggacagaaacgccaaaaaggactccgtgtagaagaggcagcaagttataatataggcttccattagctgatatggaatttgttgatgttattttctgagcaaacaatctggcatttcacatgccgttatccaagttctgcaggcttcctgttctctgtataagctaccgaaccagcatttagatgcagccgtatgcaaatccgtggggatggaaatatgtgctttcctgaaccgtgcatgaatgtaatgaatgaaatgtttctctcttacagtactactgatgaagtaaaccgacaaggcgagttcgtgcgcagaagcttctgctc

SEQ ID NO: 448571 - DNA, 264 bp, Triticum aestivum
ctttttgagccttcaccaccatcaccacgctccgggcccggtgtcgagccaccaccaccattaccaccctccggccccgtcgtcgagccaccacatcgacgcggatgagctggacacttttacagacacggagtgggtccgcggccatcactctgaggcgccgtcgctgtaccacctcgacgccgacgagctacacaaggtaccaagcccgcaccaccacggccaccacgctacagcaccggtgccggttcaccaccaccacca

SEQ ID NO: 448572 - DNA, 198 bp, Triticum aestivum
ctactcgtggtcgagagccgctggcggggctacccggacgcgccctccgagggcagctccccctggggcgtcgccatggtcgtcctcctcctcctcgtactcaccagctttcactccaccttccaggacatgtggaaggcttgatggaacgaacggttctccgatccatacctcgtacgtatgtgagtatgtatgtga

SEQ ID NO: 448573 - DNA, 311 bp, Triticum aestivum
acctgacctccatggcgagggcaacgacaactggtggctctgtggcggcgcgctcagcacgtcactctctctcatccgtcagcctcacgggccccggcgggccgccacagggacgcactggaacctcgtcccaaaggaccgtgggcaactggcatcttcccaacgagaaggtcgcggcggtggtggcggaagaccacgagtgcgagatgagggccggcgagaagcagcgggatgagtgcatggcgaggaggacgctcgcggcgcacaccgactacatctacacccaagatatcaaatggtttgttggcccc

SEQ ID NO: 448574 - DNA, 160 bp, Triticum aestivum
cggtcgcgtgggggttggctcatggttgtgtgtcaagcaacactatcgtctatgctatagcgctgatgatgtttgaactgtcgatagttggtaatggtgcatgcttgctatatttgctatgccgacctcaaatatatcgtttatggaggttcctgttaaa

SEQ ID NO: 448575 - DNA, 245 bp, Triticum aestivum
ccctcgcgtccgggaggtcgctgatggagcaatgctgggcgacagaaccgtcggaacggccaagcttcacccagatcgccgtcaggctgcgcgccatggccgcgtcccagaaggtgcaatcctagtagcgccagcagtggtcttgagaaaacttctggggccatccatccgtcttggacaagttcgtcttcgcatattgcgtattttaagaaaatccggtgctgatatatataaatattatattt

SEQ ID NO: 448576 - DNA, 365 bp, Triticum aestivum
cccacgcgtccgcccacgcgtccgcggcgttctcccggatctgcctgtctaacattaagctccatggcagcgcaccagtccgcccatggaaatgcgcggctgtgagtggtggtgcactcgacgtgcagccctccccgtgcacagaattgactagcacgtccgggatgagcttctgtacaaattccctctgatgctgaatcaagtcttgcacttcagtttcggtgtgtcaatgcccttgattcctccaatgagatgacatcaaagggtaggccaaacaatttttgttttgtttattacgtattatatcactggaatctagtagttcaacaagtgaaatgttatccggtggttcaatgcttgtccac

SEQ ID NO: 448577 - DNA, 482 bp, Triticum aestivum
ccctcgcgtccgaagcagtgaaagagaagaggctaatcaagctcaacagccttcttttccagagagtgtgctgtgtacgtagcagagcgaagagttagagccatggctggggtggtcggcgtctggttcgccaagttcggccgggaggcggcgccggcggtagaggcagaggccgaggtcgtcggacggcgacaccagggcgacggcctgctcgaggtggaggccgtgaagacggtgcagatccaggagaggaggaggaggaacagcgccgtcctcgccaactccgaggacacggtgtgcatgctcatggaccgcttcgccccggcctgatgcgccggtgaaccggcggtgtccgtacgtacgtgtaaattccagggcacgtacgtaggggcgcgggcacaagggaggagccataccttgatgtgcgggttcctcttgtacataagctctttttcatcgctaatcgagtgatagtagtagta

SEQ ID NO: 448578 - DNA, 87 bp, Triticum aestivum
ggttatgtcgcttgagttatagattgtgttatctggattatgtgccgtgctggcatttggatcttaatcttaatcctttagtctggc

SEQ ID NO: 448579 - DNA, 414 bp, Triticum aestivum
cccacgcgtccggatcccccgtgggattccattcctgatagagcttactgctgctgttggtgttcctggtgccaagtgtgcagtcaagactccaaacagggagtttgtgcctctattctttgaagccatggagtctcttatcaagtaagtgacggaaacttgaggatcggtattccatcaaagttattcagttatgagcatacactggtgtgctgttccatggaagtgtgaattgtattgtgttgttattgtatcactattagatcaccgtatttaaactgttagtttcttggtttcagaattttcctctagggatacacaacctggacattttgtgccgcataaattgtatatcggcctgaacattttttcttgccatgtcacagcacatgaaaatacgtcttgtttcttttt

SEQ ID NO: 448580 - DNA, 416 bp, Triticum aestivum
gcacaattgtcgccaggcaagacaaggggaaggtctctgacagctagcaagagagcaaggcgatgtcaatggcggacgagcagaacgacgctggcccgcccggcgcgccgcacttgctgctgctggcggtggtggtggggctgctggttgcgtggccgcttttcctgggtggcagccgcgaggcggtcatcgataccatcgccaaagccatcgccgagctgctcggccccgtgggcctgctcctcctcccgctggggctcctcctcctcatccacctcctctcctgcgacggcggctcgcccgacgccgtgtaccatgtcggtggatcccccatcggcgtggcgctcatgctggtcctcatcctcgccctcctctactaccggtcggcactcttcggcagcggcggaggcgacgac

SEQ ID NO: 448581 - DNA, 395 bp, Triticum aestivum
gctgttgattaaccaagctctgcaaggactgaatgaaacttgggagaagaagtttctgtccttggagcaaaacatgcgtagcgtgccctcggcacgtgctgttcgtgttggtgctaaaaagatcagcggtggctgttgcaaggggcaagcgatgtcaaatttcacggcaggacacatttgattcggcggagggagaagaagatcaagacgacggcgaggagcatgatgatgagcgttggagttagacccaacgcgggcctcctgttgtggctcagattttgtctataggaggacggtgcatctgcacgggagcaatcagccccgcgtgcgtgcagctcagggtgtaaatcatgtgcaaatccctttgaccagatagatcatgtgcatatgttttc

SEQ ID NO: 448582 - DNA, 177 bp, Triticum aestivum
gtccttgccctgcaccgcctagttgtttttatcttagtgtcgacgttggatggttttggcacgttttagctgtatcggttttgtcttttggctggccaaacattaagcgcggttagctgtttgtggtactcgtggaacagttcgttattgttggttctacaatatgtgttagttatt

SEQ ID NO: 448583 - DNA, 114 bp, Triticum aestivum
cccacgcgtccggatttattatgttatgctgtttgagactaagtatctgtgcaatgagtactgcaaaacctccttgggatggtcttgttagaatgaaaatggttctacattaaa

SEQ ID NO: 448584 - DNA, 431 bp, Triticum aestivum
cccacgcgtccgaaaaaaaagctgtcaaaaaaaaaacctcccggtcgccgcgcgcagctagcttccggcgctcccccagctccaccggtccgtccggcgatcgcgcggcgcggggtttcgcgggtggatcgccggcagattcgggcctccgggcatggagcgccgcgggttgctcaaggcggctctactggcgtcgtgcttgctcgtggtttgctccgggagagtacctacggttatacagcagccatccactaccatatacaactcaacccttgccaagacactagtggaatatgctgctgccatatatactgctgatttgacacaattgttcacctggacatgtgatagatgcggtgacctgatcgaggggtttgagatgatggacatcatcgtagatgtggagaactgcttagaggcatatgttggtt

SEQ ID NO: 448585 - DNA, 69 bp, Triticum aestivum
ctttccaaatgatccattccattaccatatagtattttataatttaaggaaactgagtccaagcatcca

SEQ ID NO: 448586 - DNA, 244 bp, Triticum aestivum
cgaaacggttcatcaatgacaccatcagaagtgatttccaccgcaagtttctgcataggtacatgaaatgatgctgctgtatgctttatgttgtctggacagtatgcatgctgaaagagcctgtgatgtttctgtattctgaagatcgatttgtatgacataactgtaacagctacgttatcttaatggtgatatgtttaccctgttcctaagagtaaagaaaagaacccactgcttgtgtatt

SEQ ID NO: 448587 - DNA, 282 bp, Triticum aestivum
tcgagattaaccgctcgttatcgtttcccccgtgaaaccacccgacccccttggccgtctccccgccggtcgccggaggcatccaatccaagcgccgcccgcgcgcccctgctccgacccgatggcgtggggcgcgcccgcgcgggcgcagtcgttgcgggtgcaggccctctacgacctctgcaggcgcacctttctcttccccttctccgccgaccctcccccggccagcgccgtccgcgccatatcctccctcatggatactatcagccccgcggacgt

SEQ ID NO: 448588 - DNA, 217 bp, Triticum aestivum
ggagttagctgcactgtaatgctgaagcatgcgctgtaattttttgtgagacggtggcctgggcatggtgaactgaagcatggaggtagttgagactcgttgtactcgctggatcatttgggccatgtcgtctatcattcttcttgcttcgagaaaatctctgtctaatactgtgtggttaaaaaaaaaaaattaatttaataaaataaaaatatag

SEQ ID NO: 448589 - DNA, 64 bp, Triticum aestivum
acgaccacgcgtccgaagcggtgctgcaaggagagatggcgccaacatgttctgtttgttcacg

SEQ ID NO: 448590 - DNA, 132 bp, Triticum aestivum
cccacgcgtccggtgaaattgtatcagtttctggaagtcttctattgttttctatatcaatgtgttcatatgggaaacgtgatctgtcgaattgactttatatgaataaaatgaaactcatattgtattgta

SEQ ID NO: 448591 - DNA, 300 bp, Triticum aestivum
gggagaggcggttgcagacggacatcaacatggcgcgccgcgcgctgcgcgaggcgctcaccacgctcgacgacatcaagccgcagcagcccgacgtggccgacggcgtcaatggggctgccgcagccggcgccgacagcggcagcccggcggcctcgagctcgtcggccgcgttgctgtcccagtgctcgccctccgcggtcgggccgtacgtgctcaccaccgcgaacatctcggggatgctcgacgggtgggccagcaagggccgcagcgccggcgccgcggcggacagcccctccg

SEQ ID NO: 448592 - DNA, 77 bp, Triticum aestivum
gtcatccagtgttagtggagtggaatgatactttttactaggtgtggagtgggagtgctatgcgcggtgtcgcgtga

SEQ ID NO: 448593 - DNA, 75 bp, Triticum aestivum
tcgcccacgcgtccttccacgcgtccgcccacgcgtccggggagctccggcgggttcgtgacggacggggagacc

SEQ ID NO: 448594 - DNA, 91 bp, Triticum aestivum
tgattatccctttttcgacgacctcccccatgagatccagcagcctgcgtggcgcagagaatcggttcttttttcaggttggacacgaccg

SEQ ID NO: 448595 - DNA, 331 bp, Triticum aestivum
cttattttgagcacttggccatggcgttcaacggcgcccagatgctcgctgccttcaccctgggcattctcctcatggccttctgtgcggaggctcgggtatgcatgtcccctagcaagtggtacaaaggggacccttgcaagaacctgcgttgcaccaaggcttgtcacaaagaacacttcaagggtgggttttgctccagtaaaaagtcgatcgttgatgacgagctcaatgaagacaatggcgacaacagctttggcaaacggcctaagaaaaaatcgaaaaaattgtgcatgtgtacattcccatgcggtcaaaccccaccaccacc

SEQ ID NO: 448596 - DNA, 387 bp, Triticum aestivum
gctgtacgcacgccatggccgccaccgcgtccctgtctgccgtcgcggcgcccctgtccgtcgccgggctcaagaaggccacgtcgttccggcccctgccggtggtcagggcccggaggcccgcggcgaggatgacggtcgtccgggcgtccttcgcgtccgtgcaggagaagctcacggccgggctgaccgcggcggccgtggcggcggcgctggtgctgcccgaggtcgcggaggccgcgtccccggggctgtccccgtcgctcaagaacttcctgctcagcatcgtgtccggcggggtcgtcttcgccggcatcgccggggcagtcgtcgccgtcttcaacttcgaccccgtcaagaggacctgatcgcctcgccggattctca

SEQ ID NO: 448597 - DNA, 87 bp, Triticum aestivum
tcgcccacgcgtgcgcccacgcgtccgcccacgcgtccgcccacgcgtccgcccacgcgttcgcccacgcgtccgcccacgcgtccg

SEQ ID NO: 448598 - DNA, 276 bp, Triticum aestivum
gcgatacatccatatctatcgccgccaagaatcgccgagaaatccaggagagccagtagctagcaatggcgtctgtggggttcggcagcagcgtggcggccgtggcgccggcgtcgtctacggcggggaggacgagccttcgcccgcagcggacgctgctggcggtgccggcggcgacgaggggcacgccggctccggccaagaaggagaagagcatcctggacttcatcgtcagcgccatcgtcaaggacgagcaggagttcatcgagaccaacc

SEQ ID NO: 448599 - DNA, 83 bp, Triticum aestivum
aaattaaaaaaaaaaaaaaaaaaaaaaaaaaaaaaaaaaaaaaaaaaaaaaaaaaaaaaaaaaaaaaaaaaaaaaaaggggcg

SEQ ID NO: 448600 - DNA, 109 bp, Triticum aestivum
tcggcgacttacatttatgaacggagggagtattaaatatggagctgccaaccccatcaagcagaagatttgcttttttggggctggcacctacaacaagcataaaaat

SEQ ID NO: 448601 - DNA, 282 bp, Triticum aestivum
cggacgcgtgggcccacgcgttcggtcaccgtccggcccaacactgaaatttcatcaccgggttcagtgagtgatcgaggtcgttgctttggtcttctgccattcgctgccccgttttagtttctgcactgcagagctgagagttcagaataaactttgtgaggaacacatgcatggattagtgtgcttcgattgcttttttatgattgtaatttcggtgtgtgctttgtataagaagttattgtggatcaagtaatttaatcaagtccatttgtgttagtg

SEQ ID NO: 448602 - DNA, 324 bp, Triticum aestivum
tcggtgaatacagatgtggattcggtggcttcagacttcatcaagcgtaagcacatgtcttgggcactccagaagagcacaactatgtatccatcttcttaagagaaccaaggttccttagtcatggtattatctgttcatgcttcgtccagcatgaaagttcaaataagaggtgctgcttggaggtgctctagatatcctgaggttatgctactatggtgttcttatttgtaacatgaataagagtgatgtgaaataggctgtactgttattcactgctgtatgatattcttatatatgaaatgaaagtgtggttattacaaa

SEQ ID NO: 448603 - DNA, 350 bp, Triticum aestivum
cccacgcgtccgggctggggaagagcggagtggaggaagtgatggggctgggcgagctgtcggccttggagaaggaggggctggagagcctcaagggcgagctgctgtcttccatcgagaagggtgtcaagttcgcgcaggagagctaggtgtcaagttcgaacggttcacacttgaactcatgcaatttttgttcggccgcttttttgttgcctccaaacccggttgtgctgcggggcatcgtggcgtcgtcgtgctccacaataaaatgtactggctttgatgtcgccagactgaactgaacctgtagtatcagaaaatgcagacaccggtgcctatgtgtttacagc

SEQ ID NO: 448604 - DNA, 209 bp, Triticum aestivum
ggagatgtcaagtgtcctcaggaagatgaggtctggtggtggtggtgccgcggacaagaagaaatagattttgcatgttggtgaaattctatttatctcaacgctttgccccgtattttcatattatgccaagtttgtagcctgtggcaattggatacgaatgtagcacattgcacttcaagttcagagtaaaactatgaatttttgac

SEQ ID NO: 448605 - DNA, 309 bp, Triticum aestivum
tcgggtctatgtcatccctgcaaatgatgccaatgttgattgatactgttaatgcttttgtgttggtgatagtgctttcatttgttgttggttagtgaatcgttggtgagggcagtagtgatgttgtgttagttagtgaattgtctgtgaagttttctgcttttcttacaaggataactgattccttgttaattagttgactactacttaactcgcataatgaggaatgatgcatacttttgatgcaagactgaataaataatgtaattgtgttgtgtcgaatttatgttcattggattttggactcct

SEQ ID NO: 448606 - DNA, 304 bp, Triticum aestivum
tcggattatatggacacatctgctggaattgaggaggagtatcaccacaaaaataatcgtgtttattgctggaaaggtttacggtttcaagccagacaagatctggaaggattttcttgattttgtgactacgggatcgaaggtgttgtacctcccgagctgttgccacccgacgtccgcgccaaattcaattctaagccaggcgagaaggccaaacggtctaaacgggaagacacaagaggcacttcagctcaccccaaggagccacaggttgccgcggccacgcccgagacagacggcggcg

SEQ ID NO: 448607 - DNA, 414 bp, Triticum aestivum
aggtgaagagcatagtgaagcctgggtgctcgcaggatgttctcaaggcggcgctgagtgccatgtcttccgtgacggagacactggctatcatgacttcctcttccactggccagcccccactctgagggccaagcaccacttcagtgggttacgaatctactacgcgttttctgattctcttttgctccatctgactgttgggattcgagacagtgatcttgtcatcccatgggttattcttttcctagctttttggagagttttattatcatttttggctctgatagcgtatgcgggtgtgctgttggcgagattcagcttgaataattttgatcaaactgtcggctgtgatctattaataatctaaattttgagagggtccatctctagcgctctctttgattcatagga

SEQ ID NO: 448608 - DNA, 202 bp, Triticum aestivum
gccgaggcttttttttggaggacagatggtgatgagtgttcagtcaagcctgcgccgtatgctaagcctgtggttactgaattaagctagagatttccgtccattttcttgttccgagggtggatctggatctcattacccgtatgctattactttgtgtttgacggtttgacctgagtacttggttatattacagttttgg

SEQ ID NO: 448609 - DNA, 369 bp, Triticum aestivum
agcgtgataaaatactgattctttttctagaagattaataaacaaatttctcaggttgtcctaatttttcaaaaaaattggagttgcagaagtattcgagagttacagattactacagactgttttgtttttgacagattctgttttcgatgcatagtttgtttgtcttatagtttatatggcttatattgcttaatataaattgtagaattgatagggtacagtaggcatcatgtgcgaaaaattatgaatcttatcttgacagtacctaagtggtgatttgctttattatactaacggagcttacgagttttctgttaagttttgtgttgtgaagtttcaagttttgggtaaagttttgatggacta

SEQ ID NO: 448610 - DNA, 390 bp, Triticum aestivum
gctacgcaaatacctgaggcatgagcagaggaagagcctgagaagattcatctcattcgtccatggcaaggatccaccaaagaacgacgagaggcggtccatgagcctgcttggaagctcgacgccggcaacgccgatgagcagccttactacccttgagatagaaaggccggccatggaagtcagaaacaccagcgttattgaaatggaaagctagttcatgtgtacaaagctagttcgtgctttatctcccaaagcagcggggcaactgttttgtgtgaagcaacaatgcggccgactaacctaggtcccggtaacctaggttggaaagccaaacaccagggatgtatagagggggttcaaatacttcttaaaggaagggttgataat

SEQ ID NO: 448611 - DNA, 75 bp, Triticum aestivum
gaaaaaaaaaaaaaaaaaaaaaaaaaaaaaaaaaaaaaaaaaaaaaaaaaaaaaaaaaaaaaaaaaaaggggcgg

SEQ ID NO: 448612 - DNA, 274 bp, Triticum aestivum
attgggtagttcgtcttcttttgccatctgaggatctgctagactctgatgctgccttcatcataccgcatcattcgtttcgttccacaattttgagagctcagttcgttaatagcttagcaaggttttgttcgcaaattttgttcttgccagatacggtttatatcctttttatgtcttgtcttaatacacctgcatcgttcaggtgtccctagtagagatgatcagaggacgacttgtgtccatctcattcattacgaatatttgcccttcc

SEQ ID NO: 448613 - DNA, 79 bp, Triticum aestivum
ctgggattggctttgggcctttcctgcgcagcttaggtggaaggcgaagaaggcccccttccgggggggcccgagccat

SEQ ID NO: 448614 - DNA, 431 bp, Triticum aestivum
cggtttgatcaaggcacgaggaagaatattcaaatgatcatgggcccaaatgttttctgctggctttgccccaccgcgacaggacatcttaaggatggcaccgagttccagaatacgaacaactgatcagagacgaagaacagcattgctgcataaacacaacatgtagacgtgggaatttatctgctgaccagattgatcatttctgccattgcgttgttgtcacccaggcagaggtgaagagctcgggcagtttcacaatcttgtaaatcatgtaaacctcacctgaaattatatgtgtgtgtatgctgtaaagtagtttgggttttgagtactgttgtgtactgactgagtcattcaattgcaaatgtaaccagaatatgtttgtcaccatttgaggtgtgaaaaagggaatggaaattggatatatg

SEQ ID NO: 448615 - DNA, 238 bp, Triticum aestivum
tcggttcaagggtgcatacaaccagttgaggaagcacgctagggaggatcatcctgctgtccgaccaatggaggtggaccccaatcgacagcgagactggcataggatggagcagcagcgtgatcttggggatttgttcagcatgctgcgttcggggatcagtggcagagaagatggggttggagtcagagaaagtgaccagggcgtgagtgagagatccttgcacgccacgtccata

SEQ ID NO: 448616 - DNA, 78 bp, Triticum aestivum
cccacgcgtccgtccacgcgtccgctttgtacaatgaaagcataattggccatcggtctcagttgtagtttgtcgatc

SEQ ID NO: 448617 - DNA, 156 bp, Triticum aestivum
tgcgggcagaaggggaactgcgtgggcgacgtcgtcggcggcgtcgtcccagggacggggcagggcggcacgcactgcgggcccgtgcacaggcacaccgtgccgttgccgccgtccgccagcgcgccggcggccgacaggaacagccacagccac

SEQ ID NO: 448618 - DNA, 74 bp, Triticum aestivum
ggcaatgtaacttccctgttgataatatgtcaacaagcactaagtatgattctatattgagtctttcacaggtg

SEQ ID NO: 448619 - DNA, 440 bp, Triticum aestivum
cggacgcgtgggcggacgcgtgggcgcggcgggcgcgagggaccaccaccaccaccaacaggacgaggacggggccggcggcgggtactctctgttcgcgccggggccgtacgggcagttcggcaccgaccagtcgttcgcgttcgccggggccgggcagcacggcggcgtctcgctcacgctcggcctcccccacggcgccggcgaccagacggcgttcctcatgggaggcggcagcagcaacggcgccgacagcggtggcagcggcgccgccggctacgacatgaacatgcagaccaccaagtccttcgcggctcagctcatgagagacttcgtggcatagtatgaatatcaccactattacatagcgcaatccattaatcaaatcccaaaaaaaaatcggttaatcaatcaatttagggcttgtatagaaaataaaa

SEQ ID NO: 448620 - DNA, 434 bp, Triticum aestivum
gcattaccaataaggcatgacaaagcggccatcgttgattgttgcaaataaaatagatgaagtgggagctgacgagatgtatgaagaactgaagaggagagtgcaaggtgttccgatatttccagtgtgcgccatcttgcaagagggagtacctgatctgagagttggcctgagagaccttatggatgcctcggatccgcaaggtgtcgatttgagcaaagttattgtagactaaaaggctttgcccctcgttggagaagaattgttctccaattttttccccttgagcactgtctgcttacagatgcactgtagacccgtgttgcaaaaattgctctaattttctgtgttgcagaatagatcatccattgtattagaaaattcagtgtaataataactaagggtaaccagtatgtatgctttggtctttgata

SEQ ID NO: 448621 - DNA, 214 bp, Triticum aestivum
cccacgcgtccggccccacttagtcccaactagtaggatagtttatggaggattagatttccttgcggactgtaccccaacaaggttaggaaatggacagaatgttgtgtaaattgtgcttgacatgtactgtaggtaggtaggtaggtacatacgtactataaggcttgttgtatcgaccttccttgtttagcttgaagagtctttccttttc

SEQ ID NO: 448622 - DNA, 139 bp, Triticum aestivum
cccacgcgtccgtggacgcgtggggtgaaacaaagcaagcggtactgcagcttttttttcacctgtacgattattcatccgatgaggtcatgtaacagtatttgattggtttatcgaacaagaatgatggtaaacttcc

SEQ ID NO: 448623 - DNA, 431 bp, Triticum aestivum
cccacgcgtccggccacgcgtgcggctcccatcgagagaactgaggcgtctcttgcttcagaatctcataatcaagtgcaagctgctccatttgcatctcaagatcctcacggtctttcttgtacagctcgatctcatcactcagttcaagaatcttctcttgtagttcagaactagcgacgccatcactcttcttcaccaatgcatccaacataagctcgtcttctttctcttggtacgagcttgtttcagacatgtccatcttgtgtccagcactgtgcacatttgacagtgcatgctcatattctgcctcctggggatcctctactgtttcttcttgcaaaatggacatatctctattcttctgctcgagcatttcatcaagatccttcacagccagaagcagctcagagttggactcctgcattttc

SEQ ID NO: 448624 - DNA, 63 bp, Triticum aestivum
aaatttaaaaatttaaaaaaaaaaaaaaaaaaaaaaaaaaaaaaaaaaaaaaaaaaaaaaaaa

SEQ ID NO: 448625 - DNA, 157 bp, Triticum aestivum
atcgtgggatatgtttccctggtttggagaatataggcgcaaatttgtttgtaacattttcttcgcctgaatggttggataattgaatagtttgttgtactacgatctgtggactcctttcgtccgaagtattgaatcatatgcttaaaaaataaaa

SEQ ID NO: 448626 - DNA, 246 bp, Triticum aestivum
  unsure (1)..(246): unsure at all n locations
cccacgcgtgcgctaaggcattcctatggttttgttctatgagatgtttattcctatggtcctttacataggcaattggatgattagtactgtcagcattgtttagcttgccttgctcctccagcgaaacgccacacattgtttttttttccccgcaaagaaagggaactaggacaacctgtgttgctaaactgaagaattgcgtgaaactggctggttgatgcttgtgcaatctttgctttcgng

SEQ ID NO: 448627 - DNA, 183 bp, Triticum aestivum
gccagatcatgcttttactagttggatttagcagcgtctgtgttcagtaaacgaatttttactatgagtatgttctagactgaaatgtaatgttggaacctgcgaggattctgtgttatttcacttgctggagaatggagatatgttaccttatatattctataatttgattggattgtgcac

SEQ ID NO: 448628 - DNA, 284 bp, Triticum aestivum
catttctgaagatgggaagaactgaaggcaatgaacatctattttctcggaaaagtgcaggcgcatgaaatgaagaagattgcctgcattagctgcttttacactcgggctctatgaatttacttaatcctcttgtaactgctttgatgacaactggcgagagaacttgtattatgtctgctctcacgaatgctccttcatgtttgtcttaagtgagtacatgttgcaaattcatttgtacactttatgtctgttgaaggtgaaattgaacacattgacagctt

SEQ ID NO: 448629 - DNA, 464 bp, Triticum aestivum
gacggtgcaggtgaccgacaagggcgccgacggcggcggcgcggtggtgaactggaccatggacttcgacaaggccagcgacgaggtgcccgagccggacgtcatcaaggagaccgccgccaagaccctccacgaccttgacgactaccttctcaagaactagagtagcttttactagctgcctcgtcgctggccgccgcgtccgtcgtccgtccatccatccatccatgtctactgtcatcgttacttgctgtctgccgtgttcccccatctagcttactctcacgaaaacgaccgtgtgtaccatgtacgtgtgcatctgcctgcgctgggacggacgcgtgagtagtagtggactgataataaagtcccaactttatggtcacgtatacgtacgaatggtgttagatttgtgtgacttggtttgattcgatctgcaagaaaaatttagtatgttgtggcgg

SEQ ID NO: 448630 - DNA, 188 bp, Triticum aestivum
agcacatatcctgtcgataccagttttagcccttcgttgtgttgtcacttgttttgattgacgagctatctagttttgtgacgtgagttcacactttgtagagcttgagacagtagcacatatcctgtcgataccagttttagcccttcgttgtgttgttcggatgcttaatgctatggttttggacc

SEQ ID NO: 448631 - DNA, 412 bp, Triticum aestivum
cccacgcgtccgcccacgcgtccgcccacgcgtccgaccggcgaggccgcgtcgccgaagaatacacggaggaggtggcccgggtcggcgtcggcgccatccggtgcaggccacgggcctgcttccaagtgcgtctgcgcgccggccacccatgccgggtccttcaagtgccgtttccaccgcaccaactcccagggccacggccacggccagggaagccgtccttcttcgcctccttcaccggtcgcggccaacgcggtgccgcggcacccggcctcgccgtcctcgtcctccggcaccgtcacgacccagtgacgcaactcaagcatcggcttcgagaatcaagaacgctcgacaatgaaaagggaaaggaagatcatatacatatcataagaaagggagtttatttact

SEQ ID NO: 448632 - DNA, 179 bp, Triticum aestivum
tcgcggacgcgtgggcggacgcgtgggatacggtctactgctatgcttggcctgcactcggtttcataagcacgtacatattctgcaatgctgtgaacatatattatccgtgcttccagtgatggatatgctagttttatcagcaataataaatatataatgatccgtgttgtcctctg

SEQ ID NO: 448633 - DNA, 195 bp, Triticum aestivum
ttttctcctcccaataaagatgaggatcgacatcatccaaaaaaaaaaaaaaaaaaaaaaaaaaaaaaaaaaaaaaaaaaaaaaaaaaaaaaaaaaaaaaaaaaaaacacaagaacaccagagccgatgacaacgaacaaaaaaaaaaaaaaaaaaaaaaaaaaaaaaaaaaaaacaaagggggggggggtttta

SEQ ID NO: 448634 - DNA, 215 bp, Triticum aestivum
cgcgaaggcgctgatgaagaggcgcacataccttctggagatgaatggcttctaggagttcttcctgggtatctgcttgctggtgcaagcaaagggtcgtttggctgctttaaacttttggtctgtgtaatagtctgtgcttgttgtctggtgtgttagctctttgtacagtggtgacatttggttagctatatgaaaaacatatcaagttggtc

SEQ ID NO: 448635 - DNA, 86 bp, Triticum aestivum
gcgcccacgcgtccgcggacgcgtgggcaagaatagattggatctatccggctgcactttataatattttttagtatttttcggat

SEQ ID NO: 448636 - DNA, 387 bp, Triticum aestivum
gtttggagccataaacatgagagtctgggcatcatctcttgcttccgtgtctcttggtgggcaatcttctccccgagctgctagattggattgatgatttggattttaacgtcgggcgggagagcatgcgggctgtctgaattgcgctggatgtggaagctcttgtaactcacatgaacatgtagtggaacatcttgtttgtagcatgtaaatcttagggatactgttgagcctgtgtagacacactgtaacattaatcatgagcaccaattgtcatagtttttgagcaactgggcacacatcataagcccttgtactatttttcacatgtaatctgcaattgcagtatgttcatctgtcttgtactaataagtgaaagacatttcg

SEQ ID NO: 448637 - DNA, 280 bp, Triticum aestivum
cccacgcgtccgattgtgttggcctcgtcgaataaaacgtgtcaagcctccagtcttcagggtgttgctgttgcatcactgtttcgcaatcagatagatctttttcgtcagctttggagaccaactgaaagctcaggtcaacgtgtaatcgtactgttaagtgcttgctgtttgttggaagttgttgggtccagatcagatcgatcgggatcagggagtacagctctgtgcagaagtggtttctgacgtgctaaaaactatacaagaaagagagctaaat

SEQ ID NO: 448638 - DNA, 379 bp, Triticum aestivum
gcgcggcggtggcggcggcgactccggcggccagtggaggaactgagcctcgaatctcccagttatcgatctatctaccgtgtcgtcgtcgtcgtcgtcgtcttcgtcagcaagttatcttcggtgtcgtcgtgttcctgtgtcagtctgagtcgtcgtgtgtgtggtgtttttgatcgcgagctcgagtgtcgctctgtccggggttaattagagctggttacgcgaggaagaaacaacatgtgttactatctttcagtcggtcggtcggtcggtcagtcggtgatgcagcaatccccttctgtcatggattgggatgtgatgttggaatatcctatgtttgaacaagtttaaatggattaagaaaatgcaagtcata

SEQ ID NO: 448639 - DNA, 119 bp, Triticum aestivum
gcctctcaaagctgcatgtgctactgtatgttgatgtacatagagaagattacatctaaaaaaaaaaaaaaaaaaaaaaaaaaaaaaaaaaaaaaaaaaaaaaaaaaaaaaaataaaaa

SEQ ID NO: 448640 - DNA, 323 bp, Triticum aestivum
tcttcacccaggatatgcagggggaggaggacatggagcggccactgccaagggaacggccgctctatttacccttattgtcggtttcacttgcctagcctagtttgaagagtttcccgggggtggcgaggagtaccggcatatcgagtccctggtgttttcctctacgagctggggagggcgtgtggttctctcctcgattggaacgaaaagaagaaactacagcgtcacataactgcagcaaagaaggtactgcatgagatgtaacagggtcgtattatggaagaacagaatccctgctgttgcacggagtgagtacagtt

SEQ ID NO: 448641 - DNA, 271 bp, Triticum aestivum
tcgcttttttgctcgagtgacggttaatgcgcaacccggtttgacctgttgcagatttgttcattggccgtctaatattaggtgggtgattagcagtagtcattagtgccacattactcttgcttgtataatacagtacagtatatggtgattgtcaccgtgtggtcaaactcctatctggtttgctggtgtaccgtatgtacgtgttgtagctatgggtattgtatttgtagggcagatttcatttgttcattctcaggtggtttttggt

SEQ ID NO: 448642 - DNA, 172 bp, Triticum aestivum
ctaatacttgtcgtgtgtagtaatatgtcagtgccgtactctgtgccatactatgttggtagagctggatcatttgttcgttggtcgtcctaaatcatccacctggtgggtgcttatctgaaccttgcattttatgtctgagaattagtgattgtgtgaaccattattaaca

SEQ ID NO: 448643 - DNA, 327 bp, Triticum aestivum
gccgcaactgcgtgctgctgctgaacgcgccgcccaacgccacgggcctcatcgacggcgccgacatggccaggctgcgcgagttcggcgccgccgtgaggcgcatcttcggcacggacctggccgagggcagcagggcgcgggccagcagcgagcgcggcggcggattcgaggcggggaaggtgctggacgggcgcgaggagacgtactgggcgccgacggcggaggacgggtggcggaacgggtactggatcgagctgcggcggccggcgggggcgcgggcgttcaacgtggtgcgggtgcaggagcacgtggcgctggggcagc

SEQ ID NO: 448644 - DNA, 263 bp, Triticum aestivum
gcgcccacgcgtgcggctcctccttccactcctacttcgccgtttccgggagattcttggattggtttttcggcaaagatggtttcgcccgtcgtgatcgcgtcggcggggctcgggatgctggcgggcgtggcgatggcgagccggggatcgggcgacgggctgccggcggcgtccaggtgggacgcgcggccccgttgctccacgtgcagcggcaccggccgggaggagtgcctctgcagccgttggtccgacggcgacgt

SEQ ID NO: 448645 - DNA, 385 bp, Triticum aestivum
ctttaaactgtattcgccatggtagatgggttgatgcagcccacttgaaggagtcttgtggttcactacattcaacaaggaaaaagcaaaagagtgtagtcttgtgatgcagcccacttgtttcatttttgtgtgtattttgaagatggggtgcaggaagacagtgatttttgtgtgtattttgctcagggttgacattttttccgctttacagattttggctgccatcccatgggtgcacaggtgcagtgctgtggggactggacatgcagtgtgctggcaccgacttgcatttcacaaacaaaactgtggatttattttttaagtccctcgtcactgtaaattgtgtgtgtttgtattgtagattaaaaagaggaacattgta

SEQ ID NO: 448646 - DNA, 72 bp, Triticum aestivum
ctccacgacgcgcgcgagcgagccatggccgccctccgcctcgcctcctccgtcaccctctgcccggcggcc

SEQ ID NO: 448647 - DNA, 397 bp, Triticum aestivum
cccacgcgtccgatttcctactggatccttacactcgactaccaatatgagagggagcagcctagtgcaggcgaccatgatattcttcattggatgccttgtgctttgtgcacagtgtgctgtcgataataagcaaacgatggtcaaccaagatgatcatgcagcgaacacaaataccaacgctaccatcgtcaactcaacatctgtaggcgagagcaagaaaaccgagctattttgcagcctctatctcgtatgttatttcaactttgagctccgtgctaagtgctactgttgccagaataagaatggcgaatgttacaagacgaagagtgagtgcctgcagaagtgccattcctacaacggttaatgcccaccttcatcggggtctctgggatag

SEQ ID NO: 448648 - DNA, 249 bp, Triticum aestivum
tcgcggacgcgtgggcggacgcgtgggcggacgcgtgggcggacgcgtgggtcgtgttcggtagtagaatttggctacagttttgaattatgatacccccctgtgtttgttatccaagacttcgttgaagtagatcgcatgctattctggtacaatggttattgtctgagcttttaaattatctgcccgcctgggagaatcttatgcttgtgagttcttgtcataaagatggattttactccttgcgtg

SEQ ID NO: 448649 - DNA, 202 bp, Triticum aestivum
cccacgcgtccgcctcatcctccatgtggagatggctgcacctaggcctacttagttacttgcctactaagcatccagatttcctacaagtgtcgtatcattatggtctccgaaataccagtacttttgtgtcgtgagcttgtgtctgtgttttgccttgttgagaataactacactctgttggtgaaaaagtgaatttcgt

SEQ ID NO: 448650 - DNA, 264 bp, Triticum aestivum
cggacgcgtgggcagcgcagtctagctagtcaacagtgcgatccaagatagggagccaggacgcgacgaggcggccactgatggcggcaccggcgccgaggagcgtgggcgtggcggagcgggcgctgcgcggggtggcggacctgatcaagctactgccgagcggcacggtcttcatgttccagttcctcagcccgctcgtcaccaacaacggccactgcgccgtctacaacaaggtgctctccggggcgctcctcgcgctct

SEQ ID NO: 448651 - DNA, 135 bp, Triticum aestivum
tttggttcataagcagtgaagggtgatgcgataggggcagaaatttccgaaaaaaaaaaaaaaaaaaaaaaaaaaaaaaaaaaaaaaaaaaaaaaaaaaaaaaaaaaaaaaaaaaaaaaaaaaaaaaaggggggg

SEQ ID NO: 448652 - DNA, 364 bp, Triticum aestivum
ctctcacgtcatcctcgattccttccgctccctcgcgacccccgccgccgcctcctctcccgctaccgccgcgccagggcctcgcctcgccctcactggccaccggcgacctccaacccttgttctccgcctcgtcgccatagccaccttgagctcgagcagaggagcggctcggcaggagggggcaacagccagccgcgcctcgtccgtgtcgcgtggtggcccagatgcggtcgtcccgtgctctgcctccacgagcgcggcctcgatccaaactcggcaggaggaggggagcagcagctggccatgctgtgttggccgtggaggaggaaggagctcatgtggctagggattggctaccctc

SEQ ID NO: 448653 - DNA, 337 bp, Triticum aestivum
gcgtcccgagccctgaccagtgccatacaggccactcaaccaaaacgaggtcagatttctcaatttccactcggaaatccgaaccgtggtcatctccgtcgccgccgcctgccgcctgccgccgccatcgccatggcttccgctctacgggcccttcaccaccgcctcccccgctctctccaccactccaatcccctttccacctccgcctcacctcacgacctccgcgagctcctccgcatccaacgcatcctcggtgaccccgcagcaaccacccagcccacgcaaacgcaacaacgcccacgagccgccgccaccgcagacctgcaccgacttc

SEQ ID NO: 448654 - DNA, 116 bp, Triticum aestivum
catgtttgaagtcattacccttaaccgtaaggagggggatgcctaaggctaggcttgcgactggagtgaagttatcgtcgctgtaattttatcatcaagtggaattctgtaatttt

SEQ ID NO: 448655 - DNA, 89 bp, Triticum aestivum
ggaatggacatctctgcattttacccctgaattcgtctgcaatctcttgctctgttgttaaatcttatcagttggctctgttaaatctt

SEQ ID NO: 448656 - DNA, 287 bp, Triticum aestivum
gtcaaggattagcaagcagtaatagtgaagttgtactgaggagcgagcgaaacgatcgaaggttcacgaccccttattagctattaagagagtttgaggcaatgtatgtgatacagattcagagttgttatggagatattaacctgcaataagctgctatgctgttgtgtactagtgctgccttatgtataccctgtttcctgtagtgcactgtaggttttatctcaactactatgtatgtattcccctctgaaaatgatgaattctcctgaggatttctttcatca

SEQ ID NO: 448657 - DNA, 229 bp, Triticum aestivum
actaaacaagagcttgagctcgatcgatcgaactcaaagatgtggaaaccatgtaccgatgaataatactcaatcaaccttttgcttcaaaaaaaaaaaaaaaaaaaaaaaaaaaaaaaaaaaaaaaaaaaaaaaaaaaaaaaaaaaaaaaaaaaaaaaaaaaaaaaaaaaaaaaaaaaaaaaaaaaaaaaaaaaaaaaaaaaaaaaaaaaaaaaaaaaaaaagggggg

SEQ ID NO: 448658 - DNA, 249 bp, Triticum aestivum
cccacgcgttcgatcggagcaccaggtaccgagggctgtgggagagccgctttcgcggcaaatacggctccttcgacgaccagacaactcttggggccatgcgctatacattcggacccatcccgagctacgccagacctcattggaccatccagatcttgggcatgcgggtggacaacctggaagacggtctgcagcggccggtgcatgtccacggctttgtcgccgtgagggacacctcggatcaca

SEQ ID NO: 448659 - DNA, 59 bp, Triticum aestivum
aaattattaaaatatttaaaaaaaaaaaaaaaataaaaaatatatcaaaaaaaaaaaaa

SEQ ID NO: 448660 - DNA, 359 bp, Triticum aestivum
caaagctgaaggtgtgaggcaaatgttcttccctgctaccgtccccgcgtattaccgtgcacctcctgaagcggagttctgatctatgaaggtgcagctaatctctcgcacgatgacatttttcctgtgttggtagttgttgaaaatgtgctgtgttggtagtccgaatggatcgaggaacgtgtatagtatctccgttgggtgctgatcctgcttttggaatgttctgaattgctgcatcggtgcccatgttgattcgtcctagctaaattgtacatctttgttgtgctactaatgaattgcgcctgctgttctaactagtggaccaaggtggtgttccttgtctactgatcgtgagc

SEQ ID NO: 448661 - DNA, 94 bp, Triticum aestivum
cccacgcgtccgccggactatttaaactctgaactatgctgtgatggttgaactgatgttggattgttaagggttatgttggaggccactttat

SEQ ID NO: 448662 - DNA, 360 bp, Triticum aestivum
ccccggtatcgctgccgctctggtcggaggctgtgagagagggagatgacgggactaggcggcggcgcggcggcccccggggactacgtctacttcaagtccgtcgtgccgctccacaagatctctcttgcaggtgccgatgagtccgtgcagatgatgcaaccaagctcaggaggagctcgttgaagatcttatcctttgtgttgtttcgttctagttgatcagtagtggagcccagttggggtcaatcggggaccgtgtcacatttgggttcttcttttattttgggttccgtagtcagaccttgattgtatctagatgatgtaatgctttattcatgtaattgtgtgaagtgcttgc

SEQ ID NO: 448663 - DNA, 62 bp, Triticum aestivum
aaaattatataaattataaaaaaaaaaaaaaaaaaaaaaaaaaaaaaaaaaaattaaaaaaa

SEQ ID NO: 448664 - DNA, 337 bp, Triticum aestivum
aggagaattccaaggtttgttggtcctagttggagttgaatttgcatcgagggttgacttgactggtggtatacccggcgccggagatgggcaagggcggcggctgcgtccccagcaagaagcgccagctgccgaccaccaccgttgccgccgcgccctcgtcgtcgtcagccaccgcggtcccgcgggacgcgcccgaggaggccctggacgcatccaccggggagtcgaggcggacgctgcggctgtacatcgtgttctactcgatgtacgggcacgtggaggcgctggcgcgtcacgcggcagcgggagcgggtgcggtgcaaggggtggaggt

SEQ ID NO: 448665 - DNA, 189 bp, Triticum aestivum
cttcaatttagtcttccaactttattgtatgtccggataagcccttgcatttcttccgttgggacctctggcttgatgtgtcttgcggattaatccatagattattctgtacgatgcaaatcagcctacggcttactgtaagttgcagtttaggctttctctctactgcaaattttactttgaaagatc

SEQ ID NO: 448666 - DNA, 296 bp, Triticum aestivum
aaattaggcacgtttagcctcattttcccatctttttcctgtccaataactggagcaagaggggctcccagacggtagaattttgtacccaagtcggacaatctgtcaaacttggcatgaaagattaggacacaatgcttgggctttgtgtcgctcggcaacgtttttgtactttatgttgctcgagttttgaaccacaccagttacggaatacggcagaataatctgacatttctacagaggtgtttgtatttgcgagttatactatgcaattacgttttgtgtgctgtgtgtaa

SEQ ID NO: 448667 - DNA, 394 bp, Triticum aestivum
cagacttcaagcacaagagcaccggcgaagcgctgtgggttgaggggaggaacaaccccaactgggtcgtctcccagctggcgatcttggactcgaggatgggttccctgcaggacaaacagaggaaaccagtctcctacatgtacgccgacgacttcatgacatctgacgccagcgactaagccctgctctaggagggaggaagcttctgaattctgacccccaagtatccagctccagtatcgtatcatgtagtactagaaaggtgcgttagttgcgccaagtcatctgcgcgtctcggtttttgttgtacataggtaggctccggaagctttattattagtccatgtgttccacgtcggtggtagtgacaaattgtgaacatgaccatgta

SEQ ID NO: 448668 - DNA, 144 bp, Triticum aestivum
aaaaaaaaaaaaaaaaaaaaaaaaaaaaaaaaaaaaaaaaaaaaaaaaaaaaaaaaaaaataaaaaaaaaaaaaaaaaaaaaaaaaaaaaaaaaaaaaaaaaaaaaaaaaaatataatataggaaattatttttttttgggggg

SEQ ID NO: 448669 - DNA, 201 bp, Triticum aestivum
cctaatcaaaagtaatcattctcttctagaaagtagaaataaaaggttcggggttcgttaatgggtacgtttgtaggttttgtcccgtctctcaaccgttcccagatgcaatggtttcgagagaagtgagaatatttcaaccccgaacacatgtcctgtttaatttacagccccctcacttgatctaaaggtggttgtggc

SEQ ID NO: 448670 - DNA, 268 bp, Triticum aestivum
gaagtaccagaggaaagctggtcacagacagccaaatacgaggttaagaattaccggcataagtggatatgaggaattccctgctgatccaatacttcaagttccagcttaagtgtaattgtaagttgtttagttacaaatgcttggtattacattagagtgcaagagcattttccccactgttccccaagtgaggctcttccccaagttaatgtactcgaaatgctgccattcgttgagtggttggttccatccttttgtttattcc

SEQ ID NO: 448671 - DNA, 353 bp, Triticum aestivum
cgcgaagaggaggtctcgctctcgcagattccaccccaccccgccgcgcatgctcgcccatcatccgatcccaaatccgcaacccacaccgtcccaatcgtccgcgccgacccccgtgatccctaagatcaagacaatccccggcccggccagcccccgccgccgccccctcctcgcccggcgaagatgcacctgtggccgtcgctccggatccgggactcgttcaagcacgcctacctggagaagcttgagttcaacctcgcccacaagaagcgcgcgcaggggcaggggcaagggcggcagggccaggacggggacgaggcgcctctgctcgagggccgctcgtcgtcgat

SEQ ID NO: 448672 - DNA, 510 bp, Triticum aestivum
aactacaggcagtggtttttttcttttcgttattgtcacaagaaacagacaggtattattcatatgcaagagatggatccagcttctgggctgctgactctttagcgagcttctctgcctttgcaaccacctcatcgatacctccaaccatgtaaaacgattgttcggaaagatcatcgtacttgccatccaacaaaccctgaaacaaacacaagatgattttggtcacttactcttactctaaatattctatttgataataacaaatctatctacgccagagtaaatttagtccatctacacatagacatcacaatgaattcttctatactgaaaggcagttgtagctaaacttctaatacgcggacatgttaaggcagcattgaaagctttcaggaattcaaagcaaaatgtttgataatcatatgattatagcaaaatgttgttgtatgtatcatacctggaaactgttgatgttttctttaaggtcgacatattttccaggggcac

SEQ ID NO: 448673 - DNA, 421 bp, Triticum aestivum
ctttgttttcctctagaccaatgagcttgttgtgtctgtttatgtggcagttctcgagttcttaatgtttccaatcgatgaccgcatcaatgtctattgagtccttacacgagatcatgtaacagcaaacctctctgtctgttacagattcaagccctttgcatcaaatcatttcaaagtcatatactcgaatccagattgttttgtatggactttgtataagaaacttacagttgatcaaccaaagcttgcttagagagagcttcagacttatcgattttgctgccaagaatcagaagaggaatgccacttaaagacggtttcgttagcagatcattcaattcgcttcttgatatcggtacactattcttatctgcagcatcaatcacatatctgcaatattaccacagtaacatatacc

SEQ ID NO: 448674 - DNA, 427 bp, Triticum aestivum
tataaatgttgtctaaacactcatactccatttctaactcttatgttttgtcaaatgcattggattgtgacacatgtttaccatagaaacactagcaaagctatttactgcttctaagcaaatttttgttggtttttagcctcttttgggacaaaatgggtataagtattgtttaaacacttctacttcatctctaactcttatgattaggtaaatgcattggattgtgacacattttgaccatacaaacactaacaaagctatttactgcttctaagcaattttttgttggttctagcctctcttggaagaaaattggtataaatgttgtctaaacactcctaaaccgtatctaacttatataactagtcaaatgctttgaattgtgacaaaatttgattttgaaaacactaacaaagctatttac

SEQ ID NO: 448675 - DNA, 344 bp, Triticum aestivum
ttccttcccttttgctatgtatttggacaaagttgggctaaagttgggtaaattcaatgttttttttctccctaatttagcttatcggttatcttctttagtactacaatgacccgtcaaaggagaaacttttgaaaagctaacccacaaagtagcttttttgttcagttgagtactcatttcgtttttctcttatccagtctcatgtttgtcaatcttgattaggtttttgcctctcctctttcacaacttcttatcaaaggttgaaggttgaagcaatgatggatatgaaggagagaatggtgaagaaacttaagcttattacatctcttgggaacttgaag

SEQ ID NO: 448676 - DNA, 437 bp, Triticum aestivum
gctcgctggaagagttcgttccgggatgttttgctttgatcgacttctcggcaattaacgaaattctccctggcgtgcttggcgtaatacggccttgaattcgccggcaaaagtctcaccagcctcataacgccgccgtatactctcagcaccttcttaattttcgattaccttctgcaacacgttacccaattctaggactctaatactgtatcataaacatccatgggctcttaatgggcctttaataataagcaatcactgaccggctaaacgttcacatttgagggtctaaaaccggttcaaacaagacttttaaagcttaaatctcttgatcttttaaaccggtctctatcgattacagaaaccataactcaaaacatctctttagatggaaataaacaaaaacttttattatcttaacacaaagccttaac

SEQ ID NO: 448677 - DNA, 244 bp, Triticum aestivum
gattttggtattctgattcgatctaagcaagttaaattaaaagagacataatagttcttctctcttaattgaatctttctttacaaaattatcaacaaagttataaaagaaagtcccaataaccgaagaaatcgagacttacaaggcaaagtaccaaacacaaactctctggaatcactgcacaaacatatcctacttatgttgacttcttttttctcaaatctcaaaatgaaccttccgtttg

SEQ ID NO: 448678 - DNA, 353 bp, Triticum aestivum
attcttgaatacacataatttataaacataggttagattttcttagttaaatcagtgtttcttctaaagatcgctatcactcggggtacacatcctttggtgtgggttctcgcataaactttcacctcctataggacgctcttcagagaacagaggcaagaaataccctctaagcccctttagatctcatgattgggacaaagttgatagtagaagagacgctgccaggatttcgtcctcttttggcaatacaaatctacaatggcgagaaaaaactacttctagatgcagtccaagacgggatagctttgaagtattgataacacgacgttttagcccgttttatctattgt

SEQ ID NO: 448679 - DNA, 495 bp, Triticum aestivum
tcttcttaaatgcatcatcatcatcatcatctaaactctcttcagattcatcatcattatctaaaacctcttcagatgcatcagtatcatctaaaccctcttcagatgcatcatcatcatcatcattatcatccaaatcttcttcagatgaatcatcataatcatccaaatccttcttcagaagcatcagtagctggatctccttctttccagcacagaggttcagttatcttcacagtatcctttggtacatcaataactggaagaatctgtacctcagcgacaataatgagtctatctctcacgagaaatccattgcctctagcatctgtaccttaccaattgcagtcagaggctacgaaggtgcgagagtagcaattgttatgttgcaatgaacagaagtttttcaaaacccaactgaatcttgtctccttttgcttgctcattattcttgatgaaacggttgaaagtggcggagcacaatagagaatcact

SEQ ID NO: 448680 - DNA, 235 bp, Triticum aestivum
ggctaaatcgtgactataaagccacgaattggtcatgtaaaaattcgtggtaaatatagccacaacatagccacgaatatattcgtaaccaaatggtgacgagaaaatttgtggataattcgtcgctatacaatagccacgaaaaacaacgcggcttttcgtcgcaaatccaccgaattaaacatcacatcatgcaacaacaccgaattatacaatatccacgaatgggaaacgt

SEQ ID NO: 448681 - DNA, 471 bp, Triticum aestivum
tgagtttggtggaatagagttctaacaatttcctcttcacctggtcaccggtagaagaaatgggtcaatgttagtaatcattacacaatgaactaaaatgtctttatctttgtggtcttatatgtttcttatcaccttttgctccatcaaacaaaacttcatgaatttgattattctggatttttttagaacacgtagttcatgtgactatttatgtggttaaggtctctactataatttggagtatccccaacgctttagctgtatatgttaccttggatagagttctaagatacaaacattgtataatctttttaaatgattctgataaactgatactgatcataataaaccaatatgagaagtagcacacaaaaaaaattacaatctagtgatttttagtcaacttacttttggtttctggaattggaggaaccacctcttcagcttcagctgctgcagcaagtgttt

SEQ ID NO: 448682 - DNA, 323 bp, Triticum aestivum
ctgtttggtttgtggattttgcacagttttaggaaattcacatattaagaagggaaatgaattttgactattaacatacctgttcaagtgcattaggtcgggattcaaaaacaatcagaagtacgcctaatggtgatgaggttttctctaagacaagaccatttgccacctgtaaaaggaattgtcacaaagaacaaatagcattaacaactattgtatgtcaactaggaggatagtcatattccttatttaactcatgagtatgtaaattaactatatggtaacaattgtcctctgatcacctctgttttctttaaaacacg

SEQ ID NO: 448683 - DNA, 440 bp, Triticum aestivum
aatgcattagaaacttgggctacagaaaacgtgaacttttttaagatcccaacgaaaccttcaaagattatcattggtatccaactattgcatgctctggatatccaactattgcacgctcttcaactctcatcaacaacttttattttgacaaatgttgcgtcattcttacaagtttgccatataaaagaagcttatctatagctgcaaaccaggagccccgaaacaatggtttcatatgctgagctcttgtttgaatcaaatagactgtagaggagaaatcggcaaaaaacacaaaataaataaaaaacgacccagttgtatatgtttagatcaggatttaagccaggattacaaagacgccatccggctttgtggtagaccaacaacacagctgtttttggaacctcaatacagaccaccaaaacagttcttgctcc

SEQ ID NO: 448684 - DNA, 265 bp, Triticum aestivum
tgaaatataaatagatgttcccttcgactttttgagatttcaactatatcgaactcctcgtcctaagaggatgattttacgttgatgcgacataacagttccgactcattactcatttttgtgatatcatggttaggggaaatcaacgactcagaaccataaacttgggaattaccacccaatgggagaagaatggacaaagaatttccttgggctctgtgatcaaactctgctggcacttctcttcctggtaacagaaccgacc

SEQ ID NO: 448685 - DNA, 383 bp, Triticum aestivum
atgcttttcactttcctatatatttatgaaaactgcagtttcttatcagcccttttgtaccaaaactgattggaaagttccccccggagccgaggacagccattacagcgacaaataagacaatcattgatcctaacaactgcaccattttactcaacttatcagcgatttttcgagatttccatatttattgcagacacatgaaactaaacattgttaccaattctcaaaaggtgaatgaaaaatgttctacaaaatgtaagcaacgatgtattagtgtacctgaagacgcaaggagagccacaagcttgcgattatctctgagtaagaagtccgctggtatagcgtcaaatgctcaataaatttacctacaaaatgctcct

SEQ ID NO: 448686 - DNA, 431 bp, Triticum aestivum
cgtactctcaatcttgtttcgtaagaaaatgtgaaaagaatataaagatttgaacaattttattcctgtttcttacaagcttagagcaatcataatacataacgattgtaaaacagtacagagaaaagttcttgtcatatttttacatacttaatctgaagttttcttgttctttcttgtttaaggttgagaagaaatcaacagagacacaagcaaagaagcaacgattgtaaacattaaaattccaatatgattcactccgttactcatcactacttggttttctgtatgtacaacagagataataatcatagctatggactatggttcaagcttcatctgaagcgttggctcagaacctgcaacataaagatacgagactttaacaacataagagatagttctatagtttcgatagacgaatttgcttc

SEQ ID NO: 448687 - DNA, 470 bp, Triticum aestivum
aaggatttctttatgaacacaaggtagtgaactccatttgttagaacagcttccattgattctctgcacttatcccttttttcgcgctttgtaaactccggtttgttcgcgtaaaccaggatttggctcaggattgcccattgttaattccagggtttctctgaatttgaaagttatcacttagtaggtttccataccaaggctcaatccaattaagtccgtagcgtctaccaattccgccatatccccttttttaggatctcattatgatgtctttccttttttttcttatgccgaaacctcgggattcattacattatagatacttattttatgtctttgctatcttcttttatttttttgagctccatccatattgatttagtctaatcaacaaagattctatcatttttgtatttgcaattcaatatggttatatattacataacatatatatgttcttttttttt

SEQ ID NO: 448688 - DNA, 514 bp, Triticum aestivum
cattttgaccacggaaacactaacaaagctattgactacttttatataatgttttgttcgttttagcctctggggacacttaatgggtataaacgtattctaaacactcctaatccatctttaactcttcttattagtcaaatgcattggattttgacacatattgaccatagaaaaaccaacaaagctattgactgcttctaataaatgttttgttggttttagcctcttttggaggaaaatgggtataaatgttgtctaaatactcctactccatctctaactcttacgattagtcaaatgaaatggattgtgaaacatttttaccatagaaacactaacaaagctatttatttcttctaagcaatttttttgtttgtgttagcctcttttgggacaaaatgggtattagtgctgtctaaacactcctaatccatctttaacacttataattaggcaaatgaattacattgtgacacatttgaacatagaaacactaacaaagctattaact

SEQ ID NO: 448689 - DNA, 405 bp, Triticum aestivum
  unsure (1)..(405): unsure at all n locations
actttgttacatctagcggatttggnccgcacctagcaaatggtaagccaagaaagccaactgtctggacaggggcttttgcccatctccaataggtaacaagaactctttcttttctttacaaatcccaaaacctttactagactttttctgcttctttagcttacttcacctagagtcttctaccttttcttatcattgaatcaacccctttttttttttcttttaaacacatcccaacccaaagtataagcgcccacctagtcctatctagtccgaaaaatgcgaactagaactacatgagacactatctctgtcgttacgaacctaacactttctaccaagcttaatcggaataagacctcacaaacactcacaagttatatagggcttgaaagaaagtct

SEQ ID NO: 448690 - DNA, 203 bp, Triticum aestivum
ttggacgcgtgggcggacgcgtgggcggacgcgtgggcggcgcgtgggaaaaaaaaaaaaaaaaaaaaaaaaaaaaaaaaaaaaaaaaaaaaaaaaaaaaaaaaaaaaaaaaaaaaaaaaaaaaaaaaaaaaaaaaaaaaaaaaaaaaaaaaaaaaaaaaaaaaaaaaaaaaaaaaaaaaaaaaaaaaaaggggggggccttt

SEQ ID NO: 448691 - DNA, 103 bp, Triticum aestivum
ccgcacctagcaaatggtgagccaagaaagccaactgatctgcattgcacatgtgcagacaaagaaatgctgctggtgctattcaacgagatcgattctaacc

SEQ ID NO: 448692 - DNA, 154 bp, Triticum aestivum
cctacgcgttcgcaacgatcgagtgtctagaaactgatcgaccgtgcacgtacgtacgtacgcgatgaagcgtgcgcatgcatgcatgcacctggtttcgtttgtacaaccatgatgtaaagtacgaaggttgaatgcaaaagtctgttgctag

SEQ ID NO: 448693 - DNA, 60 bp, Triticum aestivum
cccacgcgtccgcccacgcgtccgcccacgcgtgcgcccacgcgtccgcccacgcgtgcg

SEQ ID NO: 448694 - DNA, 223 bp, Triticum aestivum
gtacgagggtggagggaatgatcttaaataaattatactccatctcaaagaaagacttgtttcttcctgcgaggatttttgtaatggtaatattttcctgtgttccaaaatccagtgccgccttcggtttttatttcttcatttcaaatggaattgattgatttccatttcataattgcagtcaaattgtcaaaatataatcaaagttattttttttcataaa

SEQ ID NO: 448695 - DNA, 88 bp, Triticum aestivum
cctgaacttgccgcagcttgtgaagtatggaaggcgatcaaattcgagttcgagccggtagatactattgataagtagataaaactaa

SEQ ID NO: 448696 - DNA, 136 bp, Triticum aestivum
gtggaatcttctatgctaaagattacctatcttatgtgcttttaggttgaattttgcggatttgatatgttattctgttgagacctaagtatctgtgcaatgagaactgcaaaccaccttgggatggtctttttag

SEQ ID NO: 448697 - DNA, 84 bp, Triticum aestivum
cgtacgcgtgggttgtaatttagtgttgaattgccatcgtacttaggataaattatggcctgagtaataaagttcattttaatt

SEQ ID NO: 448698 - DNA, 357 bp, Triticum aestivum
aaataaggaggagcctcaccaactaaggaggcccaaacaggacagctgttgtgtacattctcctgttcctgccatggaggcttggaggaggaatgccctgcgctgcgcgcttctcgtgctgctcctcgccgtttcaagcggggtggcgagggctcaggggggcggcgagtgctggagcacggacatggggtacggcatctgcgtgaagcccggcgggtgcagagctgcctgccatgccctcggcaagaacgacggccagtgcaacgggggctacttctggccggtctgcgagtgcctgtctccacactgccactaggatcggattggcgttgctactaggcaggcagacgcctcgtc

SEQ ID NO: 448699 - DNA, 60 bp, Triticum aestivum
tttcgattttgaaaaacagatatttatcaatgagtaaataaatacactgttgtaactact

SEQ ID NO: 448700 - DNA, 60 bp, Triticum aestivum
attaaaaaaaaaaaaaaaaaaaaaaaaaaaaaaaaaaaaaccaaaaaaacaaaaggggcg

SEQ ID NO: 448701 - DNA, 68 bp, Triticum aestivum; identical to SEQ ID NO: 315538

SEQ ID NO: 448702 - DNA, 143 bp, Triticum aestivum
  unsure (1)..(143): unsure at all n locations
tttatncggtggaatcttctatgctaaagattacctatcttatgtgcttttaggctgaattttgcggatttgatatgctattctggtgagacctaagtatctgtgcaatgagaactgcaaaccaccttgggatggtcttttta

SEQ ID NO: 448703 - DNA, 136 bp, Triticum aestivum
gtttcagaatgtgcgtcgtgttagatccatgttagaaccctgttcctctcgtggtgggtggatgtgttatgcctaatctggtggtaccttcttgttgccatcagcaatggaaatgaaaatgtttgtccctgttctc

SEQ ID NO: 448704 - DNA, 337 bp, Triticum aestivum
ttagaggagagctcacaagataagatggcgcacatgcgcgtggtgcaccgggacgaggagggccacaaggtggcggagaagctgccggtgccggagacgaggcgcccggacacggccaggcacgtggagcgcaagctggaggagcaggggctgcaccggctggagcgccacccggccaacgcgccccggagcgtaggcatcggcgcgcccccgcccaagtccggccgcggctgcaagtacacctgggagggccccgaggggctggtcgacagcgagctcgaccccgtgcccgccgccatcgaccgcaacgaccccaactacgacgaggaggaaggcg

SEQ ID NO: 448705 - DNA, 73 bp, Triticum aestivum
cccacgcgtgcgcccacgcgtccgcccacgcgtgcgtccacgcgtgcgcccacgcgtccgcccacgcgtccgc

SEQ ID NO: 448706 - DNA, 74 bp, Triticum aestivum
tttacgcgtgggtgtgttctctcttcacatgtgtgtattttacaattgttcaaattgttgagaaccatttcatg

SEQ ID NO: 448707 - DNA, 118 bp, Triticum aestivum
ctttacgcggggtttataccagttcgagccggtagatactattgataagtagataaaactaaagataaagaagagaaggcctaaataaaaaagaaacgaaactaaatggaaaaaacat

SEQ ID NO: 448708 - DNA, 124 bp, Triticum aestivum
tcgcttttgttatttataatatgagtccttagctatctgttcaactaaaaaaaagttgttatctgttggacatgtttgtgagattgtataattacatatgtattatgaagttgctagtttcagt

SEQ ID NO: 448709 - DNA, 278 bp, Triticum aestivum
tcggtttgcggcttttctgggcggtcaccggctggttctccacgggcggtgctccgggggcgccggcggtgagggccaggccgtcggccggcacggtggacgtggcgcgcttcgcgttcggcagcgccctgctctggcaccccagccggtgggacagcttccccgtctacgagcccgacgcctcacaggatttcgtgaagttcgtgcatcggttggccgcggtggattacaacaagtctggggggatgcccaaccgggattgctcggaggttatggtg

SEQ ID NO: 448710 - DNA, 155 bp, Triticum aestivum
attaattgcacctatctcataacagaccagtagcttgaaaccatgcatgcatgcagtacgatcgactacaaggactggcaagcaagcattttagtgtttgtgtggacgtgtacatatacaaatcactgcatggaatattcaagaggaccctacgt

SEQ ID NO: 448711 - DNA, 75 bp, Triticum aestivum
ctcacgcgtgcgaccacgcgtacggccacgcgtacgctagttctagctcaaaaaaaaaaaaataaataaacatga

SEQ ID NO: 448712 - DNA, 98 bp, Triticum aestivum
tttcgtccggtcgatgactttttttgcacaacaaaagttatggacgttcaaacagacttgctggctgaccgtgtgaatgtcgatgactttcgttgtgc

SEQ ID NO: 448713 - DNA, 242 bp, Triticum aestivum
cccacgcgtgcggtccgcctcaggcccgtcggggacccccctgaccgccttcccgcggagcgcttgtcgtagctgctgctcggcggcgccgagtgggacttcaggctcctcgactgccgccacggcctcgtgctcatctgcgacacctcgcggaacatggtgactggtctgggaccccgccaccggcggccagcactgggaggacgctcagggagaaaacccccatcagctgggcggggctt

SEQ ID NO: 448714 - DNA, 85 bp, Triticum aestivum
cccacgcgtccgcccacgcgtccgcccacgcgtgcgcccacgcgtgcgcccacgcgtccgcccacgcgtccgcccacgcgtccgc

SEQ ID NO: 448715 - DNA, 127 bp, Triticum aestivum
ctactccccagtggccagcaactctgaacctcccggaccaagttagcaatggcaaagcgcctcgccgtcgcgctcctgctgctggtcctgctcgcgtccagcgacgccggtgctgctgcccgtgctg

SEQ ID NO: 448716 - DNA, 303 bp, Triticum aestivum
gcttaaaagaaatatttgtttgggtttccattgaactttcttctatgagttggtttcaccagggaggggaacctggtgattaatcatggtgttgggtttgggatgtgtaacctgggttttgtggagggtttggaatcaaatgcctatgggggtcgactaatcaaggccgtgttgcatcaagctgctcaaggagaacaaaaatgtcttggaagacaggaggtggccatctgatcgtggcgctatcttcttgatctcttggtgttagtctgattttgtggtgtggtcttgttctgtactctgctg

SEQ ID NO: 448717 - DNA, 380 bp, Triticum aestivum
accacgcgtgcgcccacgcgtccggccacgcgtgcgcccacgcgtgcgcgcaaacacaactactccccagtggccagcaactcggaacctcccggaccaagttagcaatggcaaagcgcctcgccgtcgcgctcctgctgctggtcctgctcgggtccagcgacgccggtgctgctgcccgtcctgctaatggcgtccgcgagaagaaggctctggtgcccgggctgccggtggacctccctgggctccctgggctgcctgggctccctgggctccctggcctgccggggctccgtgggctgcctgcccttcccaaatccaccgccaccaacaagtctccatgatcgtctgtggtgtacgtgctggcttacatgcaagct

SEQ ID NO: 448718 - DNA, 99 bp, Triticum aestivum
tcgctgacgcgtgggcggacgcgtgggcggacgcgtggggtacccccaaacttgctccaattttggtccttgcggatatgtacctgattcggacctgtg

SEQ ID NO: 448719 - DNA, 110 bp, Triticum aestivum
ggttaactctagctgagtactcggccttgttttaatgtcttaactgaagtgaaccttggcaattagtgggtctgttaatgtccatcggtacttgtatgcttgtgtgtggc

SEQ ID NO: 448720 - DNA, 366 bp, Triticum aestivum
cccacgcgtccgcggacgcgtggggatcgatcgatcggtgcgcggcgtcgccgtcggagagagacgaccagaaggtgcagttcccgccatgattgggacggctgcacgaatgaccggggcggtgggtcaactgccgccggtgggtcaccgaaaatttctccggttttcacacgctgcttgccggaatgtacgaggatcaacggcagccactagcaaatggcagaagaaacaagacgcactttgtacttattttcgccttgcatggctctcgtgttcgcgtcaaaaatgccctatgagagacgctaatatgaaaaaataatattggtgtacatgatgggaaaacgtcacaattgttggtatacaatg

SEQ ID NO: 448721 - DNA, 110 bp, Triticum aestivum
ataaaaaaaaaaaaaaaaaaaaaaagaaataaagaataaaaaaaataaaaaaaaaaaaaaaaaaaaaaatctaaaaataataaaaaaaacacaccacccgtaccaaaaag

SEQ ID NO: 448722 - DNA, 441 bp, Triticum aestivum
gcggaactgccccaaccacgcctgggactggagactgcccgccctcgccgtcgacaggcgccgcccctactacgcctggtggcgaggacgccccgcccgcgccgtctagtgacacctccccgaccacccctggtggaggctactacccgccaactccgtcaagcggcactgcaccaaccacgcctgggactggagactccccgccagcgccgtccagtgacacctctccgactacccctggtggaggctactacccgcctactccgtccaccggtactgccccaaccacgcctgggactggagactgcctgccctcaccgtccgccggcacctctcctagcacccctggcggtggtgactacccgccctcgccagccagcggcgctgcgcctggtggcgggaactgccctccctcgccgtccgccggcacctctcctacca

SEQ ID NO: 448723 - DNA, 201 bp, Triticum aestivum
gatctgcgccttatgtatgttatttttgctcgcatcaggctggactgggatcgctggagagggcgtacggtaaaggttgcccccatccaggcagagcccagggatcgatatgtgtatattatatataacaatgctacactgtaacatgaaatgaaatgcagaggaattaaaatgcgtgagtttccttacaaaggcaacggt

SEQ ID NO: 448724 - DNA, 100 bp, Triticum aestivum
aaaaaaaaaaaaaaaaaaaaaaaaaaaaaaaaagaaaaaaaaaaaaaaaaaaaaaaaaaaaaaagaaaaaaaaaaaaaaaaaaaaaaaaaaaaaaatggg

SEQ ID NO: 448725 - DNA, 143 bp, Triticum aestivum
ggggggggggtttttttgggggtcccgtttttttccccggggggttggggggtttttttttttttttggggccctttttttttgtttccggggccggtttttccccctgggggggtggggaaaccccgggggccccccctttt

SEQ ID NO: 448726 - DNA, 98 bp, Triticum aestivum
attaaaaaaaaaaaaaaaaaaaaaaggaaaaaagaaaaaaaaaaaaaaaaaaaaaaaaaaaaaaaaaaaaaaaaaaaaaggggggccgtttttgaggt

SEQ ID NO: 448727 - DNA, 295 bp, Triticum aestivum
tcgtccctcctctctgtggaggaaggagagagacggaccccaacatacaggggcggagagggatcatgctgaagcttaggctctgtctcgtcgggctccggccagagaccgactactgctaagaggatggccaatcggaccagcgtgcccaagttcggcacctgggacagggacgatgtgggctacacggtctacttcaataaggtgcgcgagaacaagggcgccaccgcgccgacggtccatgggacgctcaaccccaacgacccttaagaggaagccccgagggtgatccccc

SEQ ID NO: 448728 - DNA, 144 bp, Triticum aestivum
cttggcttcatgaaataaaatcctccatgtattctcaaatgttgcatggcgtgcattaaaaaaaaaaaaaaaaaaaaaaaaaaaaaaaaaaaaaaaaaaaaaataaaaaaaaaaaaaaaaaaaaaaaaaaaaaaaaaggggcgg

SEQ ID NO: 448729 - DNA, 72 bp, Triticum aestivum
cccacgcgtccgcccacgcgtccgcttgagaccatgcttgcaagccagttatgaatatcatttgtagcaaaa

SEQ ID NO: 448730 - DNA, 165 bp, Triticum aestivum
cccacgcgtccgcccacgcgtccgaagatcatgcaaattgctttgttgcatactactccgtacataacatagttgaaccatgagcatccatcactctataaaatcatactaaaatatgttatgtacggagtagtatgcaacaagatcatgcaaattgctttgtaa

SEQ ID NO: 448731 - DNA, 243 bp, Triticum aestivum
cgacgggggcggttcgccgcccccgacgtcgcgagaagtccattgaaccttatcatttagagaaagggagggtttactgtcgacgatgaggacattgacaagctccttgcagagattgaggaccggcctgctgccgctgaggagcctgagcccaaggcaggcaaggcagaggatactgtgcctgctgctgctgctgctgctgctgccaccagtgtggatgatgctgaagggaagaaatcgaag

SEQ ID NO: 448732 - DNA, 111 bp, Triticum aestivum
cccacgcgttcgcccacgcgtccgcacgagcagagcagagtggtgaactgatattgtgtgcgccgtactatgtgcgtctttatgtaatgtgcgtgctttatctataaacta

SEQ ID NO: 448733 - DNA, 91 bp, Triticum aestivum
acgcggacgcgtgggcggacgcgtgggcggacgcgtgggtggatcgtggtctagtcgtgtataatagctctgcctgctacttttgtccggc

SEQ ID NO: 448734 - DNA, 60 bp, Triticum aestivum
cctacgcgttcgtccacgcgtacggccacgcgtgcgcccacgcgtacgtccacgcgtacg

SEQ ID NO: 448735 - DNA, 221 bp, Triticum aestivum
gtttcttctttcttgccagggagagagggtagcgagcaaccagggagctaggcgtcaatggcgaccatagccacgatgaccatgctcaagcccgccaagatcacggccaggtcggcgccttcgtcgtcaccgtcagtcagcaccaaggtggcgtccccgagcatctcgctgcgcagcctgcagaagaacgcggccaagaagggggccctggccgtgtcgcc

SEQ ID NO: 448736 - DNA, 54 bp, Triticum aestivum
tcgcggacgcgtggggacccacgcgttcggccacgcgtgcggtactagatcgcg

SEQ ID NO: 448737 - DNA, 122 bp, Triticum aestivum
cgtcttgttcctatttctttgcattgcacacatacacagttttgtttcatggaaagtttgtagccctactgctagtgtttgatgatgatgatggcgatcgccattttgtccaatcaaatcaa

SEQ ID NO: 448738 - DNA, 361 bp, Triticum aestivum
gtgaagcttgcatgagttcatatttatcaggattcagattacagcaagaaggattagcttcttgagctcggagagaactttggcatggcaacagaatctgcacggggcgttgtccaacacaaactgaaacagcatatgcggatcatctatctactgacgtccggctcgccggagggcctcacgccggcgcgatggacaccttgtcgacctgcacgacgtactcgagcgtcgccccggggggcacctgcgcgccatcgtccccgaaatccgcgccgtcctcgccgaagcccaggctcgccgggacgaccacgcgccgcttgccgccgttccgcatggaccgcagcgcgtactcgatgccctc

SEQ ID NO: 448739 - DNA, 88 bp, Triticum aestivum
gttgagttatatcatttgattaaagacgatgaagaaaaaaaaaaaaaaaaaaaaaaaaaaaaaaaaaaaaaataaaaaaagggcggcc

SEQ ID NO: 448740 - DNA, 184 bp, Triticum aestivum
tccacgcgtccgagagaaggtataaataaaaaaaaaaaaaaaaaaaaaaaaaaaaaaaaaaaaaaaaaaaaaaaaaaaaaaaaaaaaaaaaaaaaaaaaaaaaaaaaaaaaaaaaaaaaaaaaaaaaaaaaaaaaaaaaaaaaaaaaaaaaaaaaaaaaaaaaaaaaaaaaggggggggctttt

SEQ ID NO: 448741 - DNA, 66 bp, Triticum aestivum
cccacgcgtgcgggccgtctcatgatttggcgatttcaattggtttaaagcaaaaagaataaccct

SEQ ID NO: 448742 - DNA, 137 bp, Triticum aestivum
acgcccacgcgtgcgcccacgcgtccgcccacgcgagcgaccacgcgtgcggccacgcgtccgaccacgcgtacgtgtactgctgacacctaattctctcctagaaaaaaaaaagacaaagaaaatatgaggaggag

SEQ ID NO: 448743 - DNA, 455 bp, Triticum aestivum
cggacgcgtgggttacgagtcacctatgttgcacctccacagccaccatctccagttcctgaagaatccgaggaaggctccccatctagggttgaatcagaaaatggagatggtcctgctgggggattcaccagagcactgcgagaacgcattgagccccaagaaaaatctttagaggctggagctttgatctccaagttgaccgaagaaaagaattctgcaattcaacagaaccataaaattagacaggaacttgatatgatgagacgggaagtcagcaagaggcgcggtggagggttttcctttgtaattgtcataattgtagctttgatcgggatcttcctgggctacatgatgaagtcataattcttttcatccgtatcacttgaccgtatcgaagggaactggacttgctagtcatgtttgggaacttgaaagatcattcgagatcaaat

SEQ ID NO: 448744 - DNA, 231 bp, Triticum aestivum
attttccatttatttagttagtttttcttaatgaaattgaaattattaaagagggcaaataaaaataaagaaacaactttgctgaccatgatatatttttatctaggcggaagagtcctcttaatatttatctagtcttatataggtttcggtatattgaaatataaacataaaaaagaagatagaggataggctcattacttaaaaaaaagatatggaaatagctataga

SEQ ID NO: 448745 - DNA, 109 bp, Triticum aestivum
ctgaaggagagggagctagccatgatgaagactggggggtgatgatgggatttggaccggggttcactgtggagacgatgctgctgcacgctgccacctaggtaattag

SEQ ID NO: 448746 - DNA, 62 bp, Triticum aestivum
cggacgcgtgtggcggacgcgtgggcggacgcgtgggcggacgcgtgggcggacgcgtgggc

SEQ ID NO: 448747 - DNA, 266 bp, Triticum aestivum
  unsure (1)..(266): unsure at all n locations
gtttgccattgcttggctanacaccaacatcnccgccatcgtcgaccttctactcctcagagacgtggggatggcggtggagaccgcccccatagcgctcggtgatctggagacggcggtggagaccgcccccaaagcggcggtcggcgacgccaacgtcaaaaggttttgcgccgaaacgccctacccggacgtctgcgccgacatgatcgcgcgctacgacgacgagtgcaaaggcgccgacgacaagaagctggcggggatgg

SEQ ID NO: 448748 - DNA, 283 bp, Triticum aestivum
cctacgcgttctcccacgcgtccgacggcgacgatggcggcggttcggtgcgcggcgaggagcctcggtggctcactgctccagcgaacgcaggcggcggtcgcggaggagggacgccggctcgtgccaagcaggttcatgcgctcccgccagctctccaccaagcatgctggcaagatcccgaaggaactggagccgtctgaagtggaagctaagttgaagctgacgagggcgaagctgggtgcaacgttagataaattggagaaggaacagccagatgagt

SEQ ID NO: 448749 - DNA, 101 bp, Triticum aestivum
actaaaattctaaaaaaaaaaaaaaaaaaaaaaaaaaaaggaaaaaaaaaaaaaaaaaaaaaaacaaaaaaaaaaaaaaaaaaaaaaaaaaaacagggggg

SEQ ID NO: 448750 - DNA, 74 bp, Triticum aestivum
cctacgcgatggatcatcgggctgcactggttattgcctcttgatgaacctttgtgatacttcggtggttctag

SEQ ID NO: 448751 - DNA, 315 bp, Triticum aestivum
cctcgcgatcgccacgcgtccgccccctcaacaatgcaagggctaccgtcaaggcgacgcaaatgatgagacagttctcagacgtcgctgcagagcgtggacttccaatggaggagttatggaaatgataaaacaaaatcattcaactgcctgagggaattcttttcttttttctctactgtatttcttgagtttgttttctgttgtatctatatattgggataaataggggtgcaaatgggggtaccctttgggggtactctatatgacttctgaaaatttagttcacttggttgaactaaggtgggtcggact

SEQ ID NO: 448752 - DNA, 149 bp, Triticum aestivum
actcaaaatttaaaaaaaaaaaaaaaaaaaaaaaaaaaaaaaaaaaaaaaaaaaaaaaaaaaaaaaaaaaaaaaaaaaaaaaaaaaaaaaaaaaaaaaaaaaaaaaaaagaaaaaaaaaaaacaaaaaaaaaaaaaaaaaacggggggg

SEQ ID NO: 448753 - DNA, 182 bp, Triticum aestivum
gataatgttttttcatgcatgcaccaataaataaacaaaggctagtgttaattgaccaaaaaaaaaaaaaaaaaaaaaaaaaaaaaaaaaaaaaaaaaaaaaaaaaaaaaaaaaaaaaaaaaaaaaaaaaaaaaaaaaaaaaaaaaaaaaaaaaaaaaaaaaaaaaaaaaaaaaaagggggg

SEQ ID NO: 448754 - DNA, 131 bp, Triticum aestivum
taacggttcctgcccgctggactctgatacggaggagggttcaccaccaagacggcatgagcagcagacgatatgtactcataagacgaggagaggacccacaattggtcgatgtgcatgcccttctctct

SEQ ID NO: 448755 - DNA, 97 bp, Triticum aestivum
tttttgataaagcactcactgtacagtgtaacaaagaggagatactcatacatacagcagtactaaataaagtccatatcaggctgatttgcaaaaa

SEQ ID NO: 448756 - DNA, 420 bp, Triticum aestivum
tcgtaggcggacccgccgccggccgagggcctgcgcgtgcagaggtgggccggggcgaggtacgcggccgtgcgccggttcggcggcttcgtagccgacgccgacgtcggcaagcaggccgcgctgctcgaggccagcctgcaggggaccaggtgggccgcgcccgtgtccgacggccgcaaggccgacccggcgtccgagtacaccgtggcgcagtacaactcgccgttcgagttcagcggcagggtgaacgagatatggatgctcttcgacaccatggccgcgtccgacatgtaactgtgcaagctagccgcttgttagactaaaccagtgagctcgtatatataagagtgtcttgtcttttaagcttctatgtaagccgacgaataatggtagcgtataaacttgcgagcaataaag

SEQ ID NO: 448757 - DNA, 229 bp, Triticum aestivum
tcgatttgaaacagaaaaggccattgtcgtactcttgtacatatgcagcaccgctaatatattgtatggctgaatgtattagggagccatgctgacatgaaacctgttcttccaatcgatttcttgtgctgaatctagttgaaacatggaaaccgcacttcctagtttgtatttgcttctgaggtgcagtgatggagtaagcagatctgtatttatatgaatgaaaaca

SEQ ID NO: 448758 - DNA, 216 bp, Triticum aestivum
tcgtaaaaaaaaaaaaaaaaaaaaaaaaaaaaaaaaaaaaaaaaaaaaaaaaaaaaaaaaaaaaaaaaaaaaaaaaaaaaaaaaaaaaaaaaaaaaaaaaaaaaaaaaaaaaaaaaaaaaaaaaaaaaaaaaaaaaaaaaaaagggggggggcctttttaggggtccaagtttttcctcccgggcctggccctgtatttttttttttttggggccc

SEQ ID NO: 448759 - DNA, 422 bp, Triticum aestivum
tgtacagcccatatgaggtgaaggctaggctcaagttctgggcgcaggcggtggcgtgcaccgtcaagctgtgcagctgatcaaccgcaccgtcaatcaatccatcccacagactaaggaagacgaagccaactcatactcgcaaggcggcagcccaattcatcaggcgacctatgcgcacgagcgcacgccatctgcccgaatcgcgtgggaattacattacattgcatcaattcatcgccatcatcacgacaacaagcagaaggaagggtgcacgcatcatattgtggacttgggatcgcgcctctgatgacaggaagcgatgaagctagccaggaggatgtcgccggccatttctaatgctgcactcacacattatgatttatgaatcactgaatttccgttcagaagcaagcactatg

SEQ ID NO: 448760 - DNA, 144 bp, Triticum aestivum
tttaaaatttatctgatatagaacactcatatcgataaaatggtttgaactatttactagaaaaaaaaagggggcaccctgcccttttttaaccaatgccgaatcgacgacctatgtataaaaaagagaaattttttggatttg

SEQ ID NO: 448761 - DNA, 142 bp, Triticum aestivum
ttctcggacgcgtgggcggacgcgtggggtgccattgcagttttgtcaactctgacattgctttgggttttccttctccatttgtctttcttgttcctaagaatatgtgtatgtccatgttcatgtaacaacatggctcgtg

SEQ ID NO: 448762 - DNA, 64 bp, Triticum aestivum
aaaaaaaaaaaaaaaaaaaaagaaaaaaaaaaaaaaaaaaaaaaaaaaaagaaaaaaaaaaagg

SEQ ID NO: 448763 - DNA, 148 bp, Triticum aestivum
tcggttccgcttaactttgtacgactattacatatctatctgaatttgtaactgtttttttttgtcggagggaatttgtaatcgttagtggcatgtattactaatgtactgtcaaactatactctcctttattttcatgttacagccc

SEQ ID NO: 448764 - DNA, 389 bp, Triticum aestivum
tcttggacgcgtgggcggacgcgtgggcaagagatgcagcccttcagtccagaaatacagagaaccaaacagggcgagctgttcccaacaattccgaagcttcgtctagttgtcacactgtgcagaagagatcaggaccactgaagctcactcccggcgcgaagcatatactggtgccaagtgatagcacgcatggcgactctatgcctgtgtactcctgtttatctttcggaagtaggagcggaaatgctgcagggtctcagaacaaaggagcatgatagactttgtgaaatgctgtttaaccttcagaagtaggagccttttgaaaaatgtttacatttttctatctgtaaaactggattgactatcctgtaagaatagttaccata

SEQ ID NO: 448765 - DNA, 100 bp, Triticum aestivum
tttcttttttattgttgcagcaatatccggtggatgtttgtcaaaaaaaaaaaaaaaaaaaaaaaaaaaaaaaaaaaaaaaaaaaaaaaaaaaacaaggg

SEQ ID NO: 448766 - DNA, 55 bp, Triticum aestivum
tcgatcgcccacgcgtccgcccacgcgtccggccgcgcgtcttcccacgcgtccg

SEQ ID NO: 448767 - DNA, 348 bp, Triticum aestivum
tttgttcgggacgatgttcttggaagcgcgcacgtggaagtctagtttggcgacgtggtgcatcagatccaggtggctgtggagtcttgccctgtgaactgcatccactgggttgggagcgaagagctcccggtgctggagttcatggcacgtccacagcccaaggaagggcacggcgtgttcggcggcgggtgggagaggcctaaggacgtgttcgcggcggccaggaacttctccaggaaactcgagaagcaggagcggcaggaaagttccaggggcgcaaacgggggtgaagatatggaggctgaaacggcagctcatgccgaagcgagacgccacgcggggcag

SEQ ID NO: 448768 - DNA, 179 bp, Triticum aestivum
tttcgttcgcccacgcgtccgttccattgtcttcttgttcttggtgaacttgatgttcttgtcgagcttgtggaggagcttgccgagcttggggaggagcttgtgaaacttgacgatgcacgtgagtttgatatattcgtgcttgaacttcatggctaagtgctctttgttgctcatga

SEQ ID NO: 448769 - DNA, 138 bp, Triticum aestivum
ttggtcgcccacgcgtccgaaaaaaaaaaaaaaaaaaaaaaaaaaaaaaaaaaaaaaaaaaaaaaaaaaaaaaaaaaaaaaaaaaaaaaaaaaaaaaaaaaaaaaaaaaaaaaaaaaaaaaaaaaaaaaaaggggcgg

SEQ ID NO: 448770 - DNA, 74 bp, Triticum aestivum
tgtgttcgcccacgcgtccgcccacgcgtccggccacgcgtccgcccacgcgtccgcccacgcgtccgaggttt

SEQ ID NO: 448771 - DNA, 128 bp, Triticum aestivum
tctgtcgcggacgcgtgggcggacgcgtgggggatgattgttttgttttgattttccatggcttggattttaattatgtttgatggtgtttttttaattcgtatatcatgttgtgttgccgttaaaaa

SEQ ID NO: 448772 - DNA, 54 bp, Triticum aestivum
tcgtcatgcgtacgcccacgcgtccgtccacgcggtgcgttatgcgttcggcga

SEQ ID NO: 448773 - DNA, 315 bp, Triticum aestivum
ttctgtccacgcgtacggggcagtccatagtcccatccagactgccgggaccactggactgtaccaatgtcagagcagcagattactggtactaccatcactccgcactccgcagagatcacggggtccagcgtgagcgctcggcgcagcatatcggcagccatggtcacggtggttctgaccctgctgctgctggtgctcctcccggtgcgccatgctgtcgccacggcggacggcgactcgcacccgggctacgcggacacggaggccgacacctgcggggcggctcccggtggctctgcccgttccggagga

SEQ ID NO: 448774 - DNA, 151 bp, Triticum aestivum
tgtttggctcagaagttattgactgcctgtcgtttccttgaacagtccttgggaactgtatgcatctggatctgttggactgcttgtatttggaagttttcctcaagtttcagtactgatgaattttactgtcttgatacaatttggcaag

SEQ ID NO: 448775 - DNA, 227 bp, Triticum aestivum
tgtttacgcgtgggttttttttaagcaagtaactgcaggtagatgaagccttcgactgttcttcagaaacagagcaactactctctcaaaaagaaaagaaaaaactcaaaagatatactggcatacagcttgctcgtacatgcatctatgtttgtttcgcttacataacaatttctagtgcctcgcttcaaacttcgaacttcaagagagtgaaagaagagagagac

SEQ ID NO: 448776 - DNA, 246 bp, Triticum aestivum
taaaaaaaaaaaaaaaaaaaaaaaaaaaaaaaaaaaaaaaaaaaaaaaaaaaaaaaaaaaaaaaaaaaaaaaaaaaaaaaaaaaaaaaaaaaaaaaaaaaaaaaaaaaaaaaaaaaggggggggcctttttgggggtcccaagtttacttccccgggcttgcaacgtaatactttttttttggggccccctaaattaaatccacgggccggggttttaaaacggcgggacggggaaaacccggggg

SEQ ID NO: 448777 - DNA, 164 bp, Triticum aestivum
tactggttgaatttgggtcttgctggggttgtaatttgatcaggagaggaaatacctgcaaaaaaaaaaaaaaaaaaaaaaaaaaaaaaaaaaaaaaaaaaaaaaaaaaaaaaaaaaaaaaaaaaaaaaaaaaaaaaaaaaaaaaaaaaaaaaaaaaaagaaaa

SEQ ID NO: 448778 - DNA, 383 bp, Triticum aestivum
ttcttgtccacgcgtccgcccacgcgttcgggatgagatggtgttgctgcttaggctggtgctggcgtgactctgagtagtacgacctcatcgtgtgcgcggctaaggagtaccactactacttattacgtataaaactataaattataacctgcatatatagagagagtttgttgttcgtaccatctatgaacttcattgcgaaccaagtttctctgggcctggaacagcattcgacatgcttttcctcgtctgaatgatcgactaaataaagcggcaagtttgtaacccctgcttctacttcaggcttggagaataactcagcatggttttacagtttggattgtcgacaagataaaccgacttgtactcatgtgcgcatg

SEQ ID NO: 448779 - DNA, 89 bp, Triticum aestivum
tttgttatatgcctttttttttcaaaacgaactgccatatgccctcctttgtaagcctgtgcacgtactatttcaatagactggaatac

SEQ ID NO: 448780 - DNA, 70 bp, Triticum aestivum
tggacgcgtgggcggacgcgtgggaaaaaggaggaattataaaaaaaaacaccgagtgcagccagactag

SEQ ID NO: 448781 - DNA, 90 bp, Triticum aestivum
catacttctatgttctgagactgtttgcattgtatgctgattgttctgcactctgttctgcactctgtttgcattgtatgctgattgttc

SEQ ID NO: 448782 - DNA, 67 bp, Triticum aestivum
ttgtaacaccgcggcaggaaaagaagaaaataaatagaggaatctttagggtacgagacgtatcctt

SEQ ID NO: 448783 - DNA, 97 bp, Triticum aestivum
cgcgagaaagcatgctcgtatgtgaatgcaattggtggctatgtatatgcacatgcacataatatatttatacaatctgtcgactatgtattcgggt

SEQ ID NO: 448784 - DNA, 224 bp, Triticum aestivum
cccccccgtccttcccccccctttccttttttttggggccccctatttcttttccccggccccccttttccccccctcggacctggaaaccccctgggttccccccccttttcccccttgcacccctcccccttttccccagttgggtttttcccaaaaggcccccccccttccccccttcccaccttttcccccccctttttgccatttggcccccccccttt

SEQ ID NO: 448785 - DNA, 96 bp, Triticum aestivum
tcacgcgtccgcccacgcgtccgcccacgcgtccgcccacgcgtccgcccacgcgtccgcccacgcgtccgcccacgcgtccgcccacgcgtccgc

SEQ ID NO: 448786 - DNA, 71 bp, Triticum aestivum
aaatccataaaaaaaaaaaaaaaaaaaaaaaaaaaaaaaaatttaaaaaaaaaaaaacaaaaaaaccaaag

SEQ ID NO: 448787 - DNA, 216 bp, Triticum aestivum
tgtttggccaacccttcaacagacagtagagtgaagctatggttccttgctagaccaggctggatgtactgtggtggtgcaaatgtagaaatgggatgatttttgtgcatagagttgatgacgatggttgtatcagttgtaaaatctaacggtctggaatttgagtagtcgttcacaacaaaagtaagtaccaacatacatattttcctgacacag

SEQ ID NO: 448788 - DNA, 326 bp, Triticum aestivum
aaaatatataaaaaaaaaaaaaaaaaaaaaaaaaaaaaaaaaataaaaaaaaaaaaaaaaaaaaaaaccaaaaaaccaaaaaaaaaaaaaaaaaaaaaaaaaaaaaaaaaaaaaaaaaagggccgcccgcccaaggggacccaagctaacacccccggccagccaacgaaaaagctcttcaatggggcccccaaaatcaaatccccggcccgcggtttaacacccccgggacgggaaaaccccgggcgtacccaaactaaaacccctggcaaaaaacccccctttccccagcgggcaaaaaaccaaaaagcccccccccaaccccc

SEQ ID NO: 448789 - DNA, 152 bp, Triticum aestivum
cccactcgtccgcccacgcgtccggttctgttttcaaaaaaaaataaaaaaaaaaaaaaaaaaaaaaaaaaaaaaaaaaaaaaaaaaaaaaaaaaaaaaaaaaaaaaaaaaaaaaaaaaaaaaaaaaaaaaaaaaaaaaaaaaagggggggg

SEQ ID NO: 448790 - DNA, 107 bp, Triticum aestivum
cccactcgtccgcccacgcgtccgcccacgcgtccgcccacgcgtccgaaaaaaaaaaaaaaaaaaaaaaaaaaaaaaaaaaaaaaaaaaaaaaaaagggggggccg

SEQ ID NO: 448791 - DNA, 394 bp, Triticum aestivum
ttctcgcgtccgcccacgcgtccgggatgcagatgctaacaaatttctgtaaagctcttctatatatggatttgattggcaggagcagaaaaaaggaaagaaatcttgaatagggttttgagatttttttttttaacttagagaagcctagtattaaaccagtggcatcttccttctgttaacttgcttttgtttcagagttagaaaaatgggttttcctgttttgttagtttcgatggcaaaaaaatctgaagttttggtccgtgtaaatttctgtatctattcaccgcagtgacatttaatcgctcatgtagagttttgctaattgtagtggcagcgctgttttctcaaaaaaaaaaaaaaacaaaataataaccttaaaaacaaataattg

SEQ ID NO: 448792 - DNA, 51 bp, Triticum aestivum
aaatataaacccaaaaaaaaaaaaaaaaaaaaaagggcaaaataaaaaaaa

SEQ ID NO: 448793 - DNA, 132 bp, Triticum aestivum
ccctcttgtccgaaaaaaaaaaaaaaaaaaaaaaaaaaatatttttaaaaaaaaaaatctaatttcttacaaaaaaacaaaaaaaaaaaaaaaaaacgggggcggcccctctgggggccccgggcctccccc

SEQ ID NO: 448794 - DNA, 200 bp, Triticum aestivum
tagataccacatggagcttctgctactacacaatcagccgcattcttcggagccaggtgcttgtaattccttgtacttgaaagcacgggctctttacgaggttctttactcaaaagtggatgtgtgaattgccacgacttatgtgcaccaaaattttgggatgcgtagcttctttgaagtttgaagcaggcgttctttcc

SEQ ID NO: 448795 - DNA, 90 bp, Triticum aestivum
tgctagaccggccgtcttcagttggatgttacaattaatgtattagcaaataagctttcttccttttccatctaaaaaaaggctttctcg

SEQ ID NO: 448796 - DNA, 337 bp, Triticum aestivum
cccacgcgtccgcaagcagataccgagacccagtccgcctgctgcgccgccgccacctccgcgatgagggccaagtggaagaagaagaggatgaggaggctcaagaggaagcgccgaaagatgaggcagcgatccaagtaggcgaacaatgaggagaaagcttaaccttgtgtcactacaccagtctgttgggatgacagggtcttttggttcctgatatgtctgggttgttctgatattttggggatgcccacccttgtaacatgaggataattatatgctttccttgaaggctggatattcggcttaagaagtattatcgtctatttttgattaa

SEQ ID NO: 448797 - DNA, 197 bp, Triticum aestivum
cggacgcgtgggcagatgtttaagaaattcttttatctcgattcgttttgaaaaaaaaaaaaaaaaaaaaaaaaaaaaaaaaaaaaaaaaaaaaaaaaaaaaaaaaaaaaaaaaaaaaataaaaataaaaaaaaaaaaaaaaaaaaaaaaaaaaaaaaaaaacgaaaaaaaaaaaaaaggggggggcccttttaggg

SEQ ID NO: 448798 - DNA, 109 bp, Triticum aestivum
gtctggtcctatgtatcgtcatgctcgaatgaaattgcaacggaaaagttcagtcatcgatctgatgctcgaatgaatttaattttgcttgtaaatcgctccgtgattc

SEQ ID NO: 448799 - DNA, 292 bp, Triticum aestivum
tctatttttccggttgaagcgtgccaacgaaatcataggcaccactactgaagaaatggtgatgcgagcacaacagagccctgcttcttaactgtcacctcaaatgaaatgtttttctctgtctaaaagcacaagccagaactgagaaggcatctgctcatcctcaaggaacacgttgctttcaatgtaccatctgtacgcaatatcttagattctattttccgacatcggcgagttctattgagtgtaactaagggtgccttgtttaggtccaaaatctggacatgttact

SEQ ID NO: 448800 - DNA, 193 bp, Triticum aestivum
tctgtggttccgtcggggcactgtctgtacaaaatcttcacggtttgtagaaccgctccgcatgttttttcgcttgaactgagtccatttgatctgttgggtctgtacaatccctgtacctgagtccattcggagaactacgttattataaggataatgaatcacacaaaggatttttctttgtgctgctttc

SEQ ID NO: 448801 - DNA, 51 bp, Triticum aestivum
taaaaaaaaaaaaaaaaaaaaaaaaaaaaaaatagggcaggaccgcatcta

SEQ ID NO: 448802 - DNA, 288 bp, Triticum aestivum
gtgttactactgcttcctcatccaatccggcttgtgcattcccgagtgcgcaaacctctgcagggtcaactgcgagtgatcgaccatgcaggaacgcatcgacatgcatggattcgagggtgtcgatgagcgtgcctgcgttgccattgttatattagctgctctatgtacaataagtcgatgccggtcaggctgcatgcatgtattgcgtgcgagtgcctcgacttagcatttgataccgtgtttaatttgctactattcccttcactcaacatattacatattacc

SEQ ID NO: 448803 - DNA, 127 bp, Triticum aestivum
tttaactagccgcagcttgtgaagtatggaaggcgatcaaattcgagttcgagccggtagatactattgataagtagataaaactaaagataaagaagagaaggtataaataaaaaagaaacgaaat

SEQ ID NO: 448804 - DNA, 84 bp, Triticum aestivum
cttgtaaaaaaaaaaaaaaaaaaaaaaaaaaggggaaaataaaaaaaaaaatcaagaagaaccaaaaaaagggccgcgggcctg

SEQ ID NO: 448805 - DNA, 62 bp, Triticum aestivum
cctggtacgcacgctatatgtatatgttgtcaactataagaaaattggacgctcttgatgat

SEQ ID NO: 448806 - DNA, 178 bp, Triticum aestivum
tccacgcgtccgtctgatgtggtggtactgaataatgaactgtaaagtgaaaaacaccagttgaaactgtaaaaaaaaaaaaaaaaaattaaaaaaaaaaaaaaaaaaaaaataaaaaaaaaataaaaataaaaaaaaaaaaaaaaaaaaaaaaaaaaaaaaaaaaaaaaaataaaaa

SEQ ID NO: 448807 - DNA, 153 bp, Triticum aestivum
gctgagcgcatataatttgttaaaaaaaaaaaagaaaaaaaaaaaaaaaaaaaaaaaaaaaaaaaaaaaaaaaaaaaaaaaaaaaaaaaaaaacaaaaaagaaaaaaaaaaaaaaaaaaaaacaaaaaaaaaaaaaaaggggggggcccttta

SEQ ID NO: 448808 - DNA, 105 bp, Triticum aestivum
cctcgttccagccaataatgtaatggtctatgggcaaataaatcatggtttaaatcaggctctttattactcttttgattgatttaaggtattcacatatataat

SEQ ID NO: 448809 - DNA, 89 bp, Triticum aestivum
tttagaccggccgtcttcagttggatgttacaattaatgtattagcaaataagctttcttccttttccatctaaaaaaaggctttctcg

SEQ ID NO: 448810 - DNA, 107 bp, Triticum aestivum
ctgacgcgtgggcggacgcgtgggcggacgcgtgggcggacgcgtgggcggacgcgtgggcggacgcgtgggatcaaagttaagttataatggatgtccggttgtct

SEQ ID NO: 448811 - DNA, 62 bp, Triticum aestivum
tctgtaaaaaaaaaaaaaaaaaaaaaaaaaaaaaaaaaaaaaaaaaaaaaaaaaaaaaatat

SEQ ID NO: 448812 - DNA, 111 bp, Triticum aestivum
tttcacgcgtccgaaaacttcagtagcggcttgtacgtatggaaatgtaattcttgatgtgaatgatggcagagaatccaaaattggctctaatacgtcaattatttgttg

SEQ ID NO: 448813 - DNA, 438 bp, Triticum aestivum
ttaagacgaagctgacaatggcagatgtgatctcccggatgtcatgggatctgttgcggctggtgatatagaagggaatacttctgagcattcttcagaaagaaacattattgaagatgaggaggccaagggtgatatttctctcatggtatgtgatttgaacaatgatgttgctgagcagtcttcacccgtggtatgtgatttgaacaatgatgttgctgagcattctcccgcaacaattgctgtcgaatctgaggacgcgaaacatgaagatacttctgtggatctcaaggtagaagatgatatcgaagttggcatggaggaaacttgcgccgctgcggataagatcagtgatggtatgcggcatatttcacccgagtccaaagagggaaacattgacagctgtgctatcagtgacagcgctgttccccatgagcc

SEQ ID NO: 448814 - DNA, 159 bp, Triticum aestivum
tgctcacgcgtccgcccacgcgtccgggatgttagattagattagctttcttgactcgttgactttcttgacttgttgttgttttcccctgtgccatgtgtataccgttgtgctgactcatagattgtgtgtatcaaggataaaataccttttacagtg

SEQ ID NO: 448815 - DNA, 111 bp, Triticum aestivum
aatttatatacaccaaaaaaaaaaaaaaaaaaaaaagggaaaaaataaaaaaaagaggcaaaaaaaaaaaaggggggggccgataggggggcccccagctggcgcccgcgc

SEQ ID NO: 448816 - DNA, 208 bp, Triticum aestivum
gtgattaaattctaaaagaaaagaaaatggagttgtaacacatactgtgttcttttagttttttttttcacatgttcctttgggagattgtggttgtgcatttgatgcatttttgttgatcgtacaatccagtttgatgtgtttttgttgtaaacttgaagttggccattttgtcattgtgtaagattattttccaagattcattcaa

SEQ ID NO: 448817 - DNA, 71 bp, Triticum aestivum
ccctcgtgtccgaaaaaaaaaaaaaaaaaaaaaaaagggaaaaaaaaaaaaaaaaaagccggattactgcc

SEQ ID NO: 448818 - DNA, 59 bp, Triticum aestivum
ataaataaaaataaaaaaaaaaaaaaaaaaaaaaaaaatttaaaaaaaaaaaataatgg

SEQ ID NO: 448819 - DNA, 262 bp, Triticum aestivum
ggttattgtgcggctggtgattgagggcaaggaaggtagtcagctcagggcccggctagctgctctcagggaagaggcagaggcagccctgcaggaagggggctcgtcgcaggcggcgtttgcccagtttctgttggatgtggataatcttgaaaggcagctcagcgaatgatgcactagtatgtacatttatgttgccagcatgttgctagtccaagccgcccctgtttacattttggttgtgtggtcaataacttaagtc

SEQ ID NO: 448820 - DNA, 60 bp, Triticum aestivum
tcctcgcgtccgcccacgcgtccgcccacgcgtccgcccacgcgtccgcccacgcgtccg

SEQ ID NO: 448821 - DNA, 145 bp, Triticum aestivum
tttgtactcctttttttctctcctgtgtttattatgtgtactatgctagtaattttgtggtggagccgctgctactgtgtttcctccccctgacttgagcttgcaagccaataatgataatgtttgctactgaacatatatcagc

SEQ ID NO: 448822 - DNA, 218 bp, Triticum aestivum
  unsure (1)..(218): unsure at all n locations
tcttcatantcgtccgctcaaatgttgagttgtccatcactggagtgattttgtgcaataaagcaaattaaccagtcaaaaaaaaaaaaaaaaaaaaaaaaaaaaaaaaaaaaaaaaaaaaaaaaaaaaaaaaaaaggagaaaaaaaaaaagaaaaaaaaaaaaaaaaaaaaaaaaaaaaaaaaaaaaaaaagggggggcgttttaaaaaaataaaat

SEQ ID NO: 448823 - DNA, 72 bp, Triticum aestivum
cccatgcgtccgcccacgcgtccgcccacgcgtccgcccacgcgtccgcccacgcgtccgcccacgcgtccg

SEQ ID NO: 448824 - DNA, 57 bp, Triticum aestivum
ttgattttgtatctacacattacatagtacatccctgcagattctttattccttgtc

SEQ ID NO: 448825 - DNA, 112 bp, Triticum aestivum
ataaataataaaaacaaaaaaaaaaaaaaaaaaaaaaaaaataaataaaaaaaaaaaaaaaaataaaaaaaaaaaaaaaaaaaaaaaaaaaaaaaaaaaaaaaggggcggcc

SEQ ID NO: 448826 - DNA, 147 bp, Triticum aestivum
ccctcgcgtccgcccacgcgtccgaaaaaaaaaaaaaaaaaaaaaaaaaaaaaaaaaaaaaaaaaaaaaaaaaaaaaaaaaaaaaaaaaaaaaaaaaaaaaaaaaaaaaaaaaaaaaaaaaaaaaaaaaaaaggggggggccgtttt

SEQ ID NO: 448827 - DNA, 399 bp, Triticum aestivum
ccctctcttccgcccacgcgtccgctcaccttcctccaaagctcaggcatcgacaaatatgggccagagtcatttctggtgaacttcacggcattggttgttgtgctattcggtgcctcagttgttgtagctgctgttgccccagctcgccttgaagagccacagggttacgctccaatcccagaacactagtatttgtgaagtgtactgcatgcacagaaattcacaaagtttgctctcaccattgtgcttcgataccaggatctctccgatttgaaaataaatgatctgataagaaaatgttgtgcatcttctgtgtatatgtaaatacatacaagtacatattgtccttccatgtatcatgtataattgaaacatctatgtaagcagctattttac

SEQ ID NO: 448828 - DNA, 57 bp, Triticum aestivum
tgtatacttaccggatgttgcattatttagattcctaatgggtactattggttttgg

SEQ ID NO: 448829 - DNA, 69 bp, Triticum aestivum
ccataaattaactgggcaattctcttcttcttaattaatcgatgaggcaaaacttttgcctccgtttcg

SEQ ID NO: 448830 - DNA, 109 bp, Triticum aestivum
tttcgttattagctataatagcggaagaatttctcgcattttgttggatgatatgaatctagctgctactttcagcgttgttgagttgtaattgatgctgttttgcgtg

SEQ ID NO: 448831 - DNA, 61 bp, Triticum aestivum
aaattaaaaaaaaaaaaaaaaaaaaaaaaaaaaaaaaaaaaaaaaaaaaaaaaaaaaaaaa

SEQ ID NO: 448832 - DNA, 105 bp, Triticum aestivum
aggtgttgtgctactcgacccgggcagtgctgcatctaaggcgttgagcatcccgcccagggacatgcgcggttgatatacaattgatatcacagacgtttattt

SEQ ID NO: 448833 - DNA, 229 bp, Triticum aestivum
cccactcgtcctctctctccgattgtccatctccgctcatatggggaccgaggtcctccgcccgcacagcatcctgcagccgcagacgcagaggatctgcgccgcgcaccggaggcccagcaaccccggcaccgccaggaggtctcctcctccatcggcctcgacgaccggccggagaaaccatgggcggccttcctcttcttcttcttcctacgggaaggtgacgtat

SEQ ID NO: 448834 - DNA, 114 bp, Triticum aestivum
aaaattataaatttaaaaaaaaaaaaaaaaaaaaaaaaaaaaaaaaggaaaaaaaaaaaaaagaaaaaggggaaaaaaaaaaaaaaaaaaaaaaaaaaaaaaaaggggggggcc

SEQ ID NO: 448835 - DNA, 263 bp, Triticum aestivum
tgcccactcgtccggcctcccttgtcctcctcccagggctgtacagtagatgtgtgcgcgtatagaaaggtagcaaaaataatagtccgagcgtacgattgttaccgatcttggcaacattttagctcttccatttttggcatggtaggacatttgtttcttttttcttttccagaccactgtttcttcctttttttttttctttcgagccctgttactccccgtcaagtagacggtggaagatttggttatcagggttgcat

SEQ ID NO: 448836 - DNA, 66 bp, Triticum aestivum
tgtaaaataaaaaaaaaaaaaaaaaaaaaaaaaaggaaaaaaataaaaaaaaaaaagatgatggtt

SEQ ID NO: 448837 - DNA, 136 bp, Triticum aestivum
agtattttaattaaacattgctgctcaaaaaaaaaaaaaggaaaagggaaaaaaaaaaaaaaaaaaaggggaaaaaaaaaaaaaaaaaaaaaaaaaaaaaaaaaaaaaaaaaaaaaaaaaaaaaaaaagggggggc

SEQ ID NO: 448838 - DNA, 133 bp, Triticum aestivum
tttcgctgatttaccgcatgtaatgttcgcatgtacaggtctgttgcatcaaaatttgcctagaatcatttttcctcatgggcctgatacagagaacacacatacgtgggggcccctctgtttcgggggcccg

SEQ ID NO: 448839 - DNA, 89 bp, Triticum aestivum
tttcccactcgtgcgcccacgcgtccggccacgcgtgcgaccacgcgaccagaaaggtaagactgtttattggaataacactaattcta

SEQ ID NO: 448840 - DNA, 157 bp, Triticum aestivum
tctctttctctcttaaagtcgcgtcccttccgacggaaccccgccattaatccccacgaccgacatgccgtgtttaattctctgtaccacctagctctagtagatgatccatgaccggaccagtgttgcttcctaattgtgcttgatttcgttgctc

SEQ ID NO: 448841 - DNA, 54 bp, Triticum aestivum
tcggccacttgtgcttccacgcgtccggccacgcgtacgaccaggcggggggac

SEQ ID NO: 448842 - DNA, 217 bp, Triticum aestivum
tcgagacttatcgcctcagctcagtcctcaatgcagaaacagggcacgatctggaaaaaaaaggggcagaacatgtcgtcggagaaacaggagacggtggcggtgcgcgtgctgggcaggtggccgagcccgttcgtgatccgggtgctgatagttattgggctcaagggcgtggaccactagctcgtggaggaggccgcgggcaacaagagcgagc

SEQ ID NO: 448843 - DNA, 188 bp, Triticum aestivum
tgtacgcgtgggcggacgcgtgggcggacgcgtgggctgacgcgtgggcggacgcgtgggcggacgcgtgggcaggatgaaggccgcggtcttatatataggtcacctcgtgagtgtgcgcaattaatgtgttaatttgttctttggtgtgggcgtggagactaggttccattaattgccgtgtgcta

SEQ ID NO: 448844 - DNA, 144 bp, Triticum aestivum
ttttagtgcaagttttgctactgttagcgccgtgtgatatgcgccctgttgatgtgtcatttgagtactgtcgttaattttggcttttggcaaaacatggaagcttctgagactactcatttttatcctctgctttggaatgtt

SEQ ID NO: 448845 - DNA, 62 bp, Triticum aestivum
ggcggacgcgtgggcggacgcataatattatacaatatgtcgactatatacgttttaatggt

SEQ ID NO: 448846 - DNA, 370 bp, Triticum aestivum
cccacgcgttcggcgcgttccaacttcgaaactgctgtgcggacgacgcacagcctgcacgacaaggaaacgatggctaatccatccgttggccccactttagtcatatgcatggacggcttgatttagttgtcgtacacaaatcgtcttcaaaacatcgtctgcatagcagtgctcttccaacttttggttatgcgcttggttatctagtactagtagtatgtggtagtggcctgtgatggcctgttgggactcctggtatgttgcgttcctaagctggttgccgcacttggtgcctcagaacctttgaatcctgttaggatgctgctgttgaacctttactattaaaccatcttaattgctgcttttc

SEQ ID NO: 448847 - DNA, 198 bp, Triticum aestivum
atttgtagaggctattggttttctagtttctactacctaacaatttatttgtatctacaccagttgttgacgatgatgtgctgctgtaagttgttaacaaaaaaaaaaaaaaaaatttaaaaaaataaataataataaaaaaaaaaaaaaaaaaaaaaaaaaaaaaaaaaaaaaaaaaagggggggccgttttaaagg

SEQ ID NO: 448848 - DNA, 118 bp, Triticum aestivum
ctcgtttattcttgtgaagtatggaaggcgatcaaattcgagttcgagccggtagatactattgataagtagataaaactaaagataaagaagagaaggtataaataaaaaagaaacg

SEQ ID NO: 448849 - DNA, 125 bp, Triticum aestivum
ttctcacgcgtccgctatttatgacatgtcaaccaaagatttgtgtattgtattaatgtgtgtattatatcaccacaacaatgtgcctgctattagcattaatgagtaccgtatatcttgagaca

SEQ ID NO: 448850 - DNA, 148 bp, Triticum aestivum
ggtaatatagaaccttgaaagatagggttttcacggttgtcggctgtgtcggtttttgtcagatgcgtttctgtgctgtattaacttgtcgaaagagtatggagcacaccttataaacatcaatagcaactgggttttgggagtccaa

SEQ ID NO: 448851 - DNA, 188 bp, Triticum aestivum
tctcactcgtccgggactggaagttgtgtgcaatttgtgaaactaatttttggggtccttgttgttatccatattccgagttcatgtgtgaagttctttttgtagaaatggtacctttgtaagtcattttgttttataggagtgacttattcgtcacagtaaagaatgtgtgactttcaaaataaaaa

SEQ ID NO: 448852 - DNA, 143 bp, Triticum aestivum
cccatgcgtccgaaaaaaaaaaaaaaaaaaaaaaaaaaaaaaaaaaaaaaaaaaaaaaaaaaaaaaaaaaaaaaaaaaaaaaaaaaaaaaaaaaaaaaaaaaaaaaaaaaaaaaaaaaaaaaaaaaaaaaaaaaggggggggc

SEQ ID NO: 448853 - DNA, 271 bp, Triticum aestivum
aaaaaaaaaaaaaaaaaaacaaaagaggcacctaaaaaaaaaaaacagaaacacaaaaaaacaacgggggggcctgttaaaagccccaagctacccccccgggggggggcagaacaaaacccctttttgggggcccccaaaaaaaaataagggggcggggttccccaccccggggagggggaaaacccggggggtccccaaaaaaaacccccggggaaaaaccccccttttcccagggggggaaaaaaaaaaaggggccccccccaacccc

SEQ ID NO: 448854 - DNA, 189 bp, Triticum aestivum
ggagcaactataggggggctttaccgttcgcttactcgcctttcgatgaactatgttccttggtgaaatttcccacgaggcagtaaaataactgcattgtagtttctgcattgtatttcatgtgctgagtttcttcctgatgatgctgcacgtttatgctgtgatgatacccagcctactgtttttgtc

SEQ ID NO: 448855 - DNA, 129 bp, Triticum aestivum
ttcaagggaataggaggggattcaccaaaccattcctcggagatttgcactcccagttctcttgtttggcttgtggattgaattaaatattgagagctggacaaggaattcatatccttctgtttggtg

SEQ ID NO: 448856 - DNA, 123 bp, Triticum aestivum
tttcatgcgtccgcccacgcgtccggtttcagattgccatgttcctcttctgctttatggagactctgtaaccattagccgtccagcacaatgaaatgaaatgaaagggcgttgctcctgtcc

SEQ ID NO: 448857 - DNA, 67 bp, Triticum aestivum
ggaggccaagcgcaaggccgggcgggataaggtgaagcgcgacatcgaccaagagaagcaagaaagt

SEQ ID NO: 448858 - DNA, 235 bp, Triticum aestivum
tcgtccacgcgtccgtccacgcgtgcgagccgacaacccaagcaaacaaactatggccgccgctccttcccccgccgtcgccgccgtcagcagcagcgcgccctcgacggggctcctgccgccgcggcgcagcaccgtcccgctgtcgtcgatgaggagcgcggcgccgggcggtaggatggcgaccgtggcgcgcgcggagggccacgtgggggccgtgggcaacacgtacctc

SEQ ID NO: 448859 - DNA, 487 bp, Triticum aestivum
ttctccgacctcttcccgcacctagcaaatggtaagccaagaaagccaactgacggcattgcacatgagcttacaaagtaatgctgctgctgctattcaacgagatcgattctaacctcaaagcgcccagatcccaatgacgagctcgtcgacgatgtccaccacgttgcagtcgcgccatgggccccgaatgcgaaccccgtcgacatggcctggtccgttgtgccggtactgcgatccggcgacttgccccattcgtccatgcccacctagtcctatttagtgcggctaaagagatctagcgcgaccctggaacaggtggccccttcgaagctgtccagccacagccgcagcggcattgagatcctcgtcctcgacgttgctccccttccgctagacacggtgttcgtcaacctggagagcgaattgacaaaacggctggagagcggcgagggcaccttttacaaggaccatccgacaagcccca

SEQ ID NO: 448860 - DNA, 60 bp, Triticum aestivum
cactttgttacatctagcggatttggatttctttaacaactaaggttcctgtttttaaca

SEQ ID NO: 448861 - DNA, 343 bp, Triticum aestivum
ccatctaatgtctttattaatatgaactagaatcctgcgccatgcaggattttgtttacctgctgctacgatagtcacacctactgcatgcgcaaaggcaagtgtcgagatcacatttggttgctgagtgttgggagtcaaaaattgatgttggggatttgtatttttaccgtgtaagagtagggtcggcatctatctatctatagaataaggcctccagttgcaatctgatggttgtatcatctccacactggagcatgtacttgtatccccgtggcgcaaatttgtgcaacctatctatattgtacttatttgtccccaaacattgtgatgataattttta

SEQ ID NO: 448862 - DNA, 154 bp, Triticum aestivum
tgcacatgagttgacaatgaaatgctgctgctgctattcaacgagagcgattttaacctcaaagcgcccagatcccaatgacgagctcgtcgtcgatgtccaccacgttgcagtcgcgccatgggcctcgaatgcgaaccccgtcgacatggcc

SEQ ID NO: 448863 - DNA, 365 bp, Triticum aestivum
gtcaaatcttagcttgctacgctgcaagaggcagatacgtgatctcagcaagcgagaactcccatgtgtacgtgtggagaaacgacgacagccctgagcaaagaagcagcagcagcaagggcgtcgtgtctgtcgcaaactcctacgagtacttctactgccgggacgtgacggtggccgctgccttgccatccacggcggggtcagcggcgacgtcccggaccaactccaggaggaagcaccaggagctggattgtgtgtccgagtatcctctgccgcacgcaggagacggagattcctctgatttccagcggcagcagagccgcaatgacctaagcaacggttcgaaccacagcggcggtgac

SEQ ID NO: 448864 - DNA, 297 bp, Triticum aestivum
acgcttgcatcgtgctcgacctcgaccccctccctcccccggccggcaatccatggcgctgcgcaacctggccgggaaggtgcggatccccacctctgctgctgcccggctcccgatgccccccacccgtgctgctttccggctcccatcggaccctagcgttccgccggcgaccgtttctcgggtcgagagcgccagagactggtaccagttccagcgggcacgttatgatgatgtgacaagagagtttagaaacttcaggcttgaggttgtgcggtctgaaaaggaggctaacct

SEQ ID NO: 448865 - DNA, 121 bp, Triticum aestivum
gttctccgtctctcttcccgcacctagcaaatggtaagccaagaaagccaactgacggcattgcacatgatctgacaaagaaatgctgctgctgctattcaaggagatcgattctaacctc

SEQ ID NO: 448866 - DNA, 53 bp, Triticum aestivum
tcttcccgtacctagcaaatggtaagccaagaaagccaactgtcggcattgca

SEQ ID NO: 448867 - DNA, 432 bp, Triticum aestivum
cttattttgagcacttggccatggcgttcagcggcgcccagatgctcgctgccttcaccatgggctttctactcatggccttctgtgtggaggctcgggtatgcatgtcccctagcaagtcgtacaaaaggagcccttgcaagaacgtgcgctgcaccgcggcctgtcacaaagaacacttcaagggtgggtactgctccagtaagaagtcaattgttggcgatgacctcaacgaagacaacgaggagaacttctataagaaacgtcctaagaaaaagacgtgcatgtgtacatatgaatgcagtaaagccccgccaccaccgtcagaacctgatgtgccagagccaccgggtgaacccgtggtgccggatcctcagaagaagccgccaccgccatatgaacgtgacgtgccggagccgcccttgggagaac

SEQ ID NO: 448868 - DNA, 404 bp, Triticum aestivum
tcgggaatttgttaagacaattgatccacagttatccaattatgacgaagaaggtgcttggccctacctaattgatgaatttgtggagtacctaaccgagaatggatgcgttcagcgtaacaagtgaaccattcgaggctgcattctgacttggatatcatgatttggtggtacaaacatgattcatgtcgatcaatagaatatttatctttggatgtcggcattgttccagctccccttcacaaagcagatgatgtcgtttggcggaatctacttgcgcaggggtgatttcactggctaggattgcaaactatctatctggtttgtattttgtgctgcacctatctgctacagcatacccaaaatagttattggtttactgctgaatgggcgatgggtctata

SEQ ID NO: 448869 - DNA, 348 bp, Triticum aestivum
ttttatcttcttccatctctggatcctgaatctacagctctctaatctgcaaatacacgcagtagcgacgggtacaattgcatggttgtgactgccgaccagtacacgagtggggctgccgttctcctaccggtaatcagctgctccagtgccaccgcatatatactccgatgagtatccttgatatcttccctccacattgcatctaatgacacactaacacattgcatctgatgacacacttccaactggaatatatcaattacataccacggtgaaatttgaaacttcccttgagagatgctaaagtactatttatttgaccggcttggtgtacattgaccttta

SEQ ID NO: 448870 - DNA, 102 bp, Triticum aestivum
gttctccgacctcttcccgcacctagcaaatggtaagccaagaaagccaactgacggcattgcacatgttcttacaaagaaatgctgctgctggtattcaac

SEQ ID NO: 448871 - DNA, 346 bp, Triticum aestivum
cagtgccccagcttttgccgccaccgccgccgtccctgcccctctccgcctgctgccaccgtcacagacaccgccgtctacttcagctgctgccgaccccgagacggagaggctcaaggaggcagccgctcgacgcaaggcggagggcgcgacggcgtcggcggtgtacgcccgccagcgcgacgagtactggaccccgcagcggaaccttccgtacacggccatctttccgtagccggaggcccagagcgccgcgccgccgcggagacgggtgcgaagagcgtacggtggcgagaggccgaccgagaggagggcgaggatcgacctgacggtgccgatgctgatg

SEQ ID NO: 448872 - DNA, 387 bp, Triticum aestivum
cgtacgcgtgttttgctggcaagtcagttgctaaggacgcaattgtggatctcaagtctcctgaggtggcagtactagtggaggtgctccccatttctggggtgcctgttggatcttcagtcgccggggtgtctgttctcccagctgaactcgtctcggctaaaccccgtctttgtgtcaaggctttggtgtctgatacaaaaacaaagaacaagtgatgcgccaattcggctgcaaccagtcagagcacctgtaacggcaatatatggaggaaacgatcttgttgggcatgctcatgtcagccatgccgcagcttgagcattccacaaacaaagaaacggcatcgcagctgtcttgcctggctctgagtatgtcaatttgtaagct

SEQ ID NO: 448873 - DNA, 321 bp, Triticum aestivum
  unsure (1)..(321): unsure at all n locations
agtagttacagntcccgctagaaggttaaagaccaccatctcctgctacaaagttaagaaacccaggtcatccgaccttgtttctagcctgcctggttttcgaagaacatgaagtggagctccttggccttgagtctaccctttcaggatattcattggcctaacttggagctcaaagttgatgaataactatgcatgcatggttaatagcttttcgtggcacaatgcctttgggtattgagtaatgcttacttttggcacatttaataactagctactgtacttcgttgccgtgcttcacattttgaactcaaaggaaca

SEQ ID NO: 448874 - DNA, 322 bp, Triticum aestivum
tttgagtttctcgagacagttccttcccggcccgatcccggatcctctccgccggcaacgctcgtcgaagaagtgatgggggaggtgctcggcgtgttcttgtacatagtagatgtaggttcagtttccgttctggtgtgttgggcgtgatgcctaggactggcgatatgccgatgaggagcgcgccgcctgcgcgtacgagcagcgcatggtggctagcggcgatgctttggttggtggcggtggcgtggtgctactcgctgctgcgtgattcatcgtcggcgcatcctgcaataagctcggttgctgccatgatttggag

SEQ ID NO: 448875 - DNA, 175 bp, Triticum aestivum
tttctccttggtcctctctctctctctctgtgtgtgtctttttcaaccgctgccgcgagcccgtgtgagagagatggggaggcgccgagccggcggcggggggcgcggaggaggcataggtcgaggccgaggagaaggacggggtggaggagaggaggaggatctgcatgtgcac

SEQ ID NO: 448876 - DNA, 333 bp, Triticum aestivum
tttttgtacgagtcgtgggctgaaggagcacaggacccccgcgtcgctcccaccgggcgactcgggggagaccaagctcgcaggcgccggtccccctccgtcggcgccctcctctccgccgctgccgccggctcggccgcggtggcggcggcccccgtctccaaaggcagcatggggagatccgcggtggacgctttgggcgctcgctgggcgtgggcgcgagatgcgccgttcgtggccgcgatgctggagcttggacgctggtgcgtgcgggctgcactcacctacctcgtgcgggagcggtggaagtgccagcagagctggatgcgtggc

SEQ ID NO: 448877 - DNA, 377 bp, Triticum aestivum
tcttgattgtcggcaatcaagtagaggcgtgaatggggatatggagttttggaatgtcatatagaaggccaatgtcttttagaagatcagaattttgtttggcatgcgacatctaataacctggcgatccaggtgaatagagttatgcaccatctggctgctccgggtatgtactctatatttgtggggtggaagatgaaagcatgtcccatgctctgatggcttgccccgaggagagctctacgcatggagttgaaggaagtttggaatattctggggagtgaaatcttcaacttcttaaggctcgattggatgcttctcttgttggatcagttaacctcaacataccttattcatattctagggagcttggcact

SEQ ID NO: 448878 - DNA, 102 bp, Triticum aestivum
ttaaaaaaaaaaaaaaaaaaaaaaaaaaaggggaaaaaaaaaaaaaaaaaacaaaaaaaaaacaaaaaaaaaaaaaaaaaaaaaaaaaaaaaaaaggggggc

SEQ ID NO: 448879 - DNA, 272 bp, Triticum aestivum
gctcaaaaaagccagcagaccatggactgctgatcttccttactgcaggtgatgaatgctcgtacaagagagtggcgcctctacttgatggcatgggcaaggtgaacatctgtaatcacaaagaggcactagaataagaaaaatagtcgcgtgctgataagagaatgggcttacattttacctactctgaaagcaggcaagattttatctgggggatgtcgggaatggcacaacaatgaagctcgggggtaatatggcgacggggagcatga

SEQ ID NO: 448880 - DNA, 205 bp, Triticum aestivum
cttgttgccacctttaatttgcttacagctgcggagagcgccaattccgggggcggggggggtcaccatgctgggggtgaggaagggcgcggcgactgtggagctcgggtcgctgacgatgaggaggaagggcgccccgcctccggctcccccggtggtgccggtggaggaggggaagaaggcgccggcggtgggggcggggaag

SEQ ID NO: 448881 - DNA, 69 bp, Triticum aestivum
acaaatgtaatctgctgctggccgcctgtgaatatgtgcacatccggctaatgctagagggaagaaagt

SEQ ID NO: 448882 - DNA, 381 bp, Triticum aestivum
ctcatacattccacaacttgggggtgagaatttcgagtttggagaatgcacatttgctccagttccatccccagcttctgctaggccattcattggtaacaagatgggagaagaatcattagtaaattacgctatgaaccagagcctgtaccctctggtattgggctcgacatggaagaatctcgaaatggctcaaaagtgccagaaagtgttgttgggattgctccgctacctgagctgaataaatccaaaaggggatcccaaacagaaagatatagtaaaccatcaaaaccagcaggtttacttgaacgaatgctcatgttctccagtggggttggcattggtattttatcttcctctctatcaagcaaaaaagatctt

SEQ ID NO: 448883 - DNA, 399 bp, Triticum aestivum
gttctttggtttcaaattttcctggcgaggacccaaaaatgctctccaattttaaagaccttcttgaaaaaatatttgtcttagatccagataagaggataaccgtatcacaggcacttagccatccatttatcactggcaagtgaaaataagatgttgattcctcttgacattgtaaactacaatttgggttcctcttgtctaatcatcggcatttctatcttgtgtctgggagctatgagatctgagtgcgtgcccaaatggacgaagcatggggttgctgaagagatgctgtcttacggaccttgctgcatgcacttaccatttggatagttctgctgcttggattctgccagggcctctgctgcatgcacttatatttcctaaaggaccaacaaa

SEQ ID NO: 448884 - DNA, 241 bp, Triticum aestivum
ttggtttggagggaaattggggcacgtacgttataccgccgatgcgtctgaaggtttgagaagatggacctgactgtctatcagtttggaattactgtccgatggtctaacaaaaaagtggttatgggacagttaaagttttattttgcatgtctttgaatcacgtagctggatcatcgttttctagcatgtgtggtacatccaaatatgcaagtaagacgaattgcaagttttattttgc

SEQ ID NO: 448885 - DNA, 431 bp, Triticum aestivum
tcgatttaggtttcagttcactttccctgaacccgattatggggagtacggctctgatttcggtgaggaagaggagtgtttaccgaggcagaggaaacctcccgaagtaaggaatgcactccgtgagaagagagtcgcgtttaggcaaaagactgggcggcaccatgcaaaggtagccctgcgtaagtacaacagagcaaacaacaccaagtttgagctggtggaggtgccagtgatccgtgagttttgggagtttggagggggctgcatccattacaacttcacggctaagcaagcagaggatcatcgtcattctgctgatgcagacaacaccaagctcttcttctctgaggtcaactctgctttccatggcgacaaggatgtggtcctgtgctgtatcgttggagaacatgacaatgggcattgctatg

SEQ ID NO: 448886 - DNA, 255 bp, Triticum aestivum
cccagatccatcctctcctttcctgcaaccgccgccgccgatctccactcccccaaaccgccccgccccgccggcgacctccgccttcctctcccctagccacctcgcctaccctcgccgcctcgccacccctctccgcgctggcgccctcctggagcacggaggtggtgctggcctcctacctccgtcccgaccgacgctcacgtccctggcgcacaccctgcgcctcgaagacgccccgctgcgctggatcgt

SEQ ID NO: 448887 - DNA, 119 bp, Triticum aestivum
gggcaaagaatcactctggtgacccagagattgatgaagctttaaagaagggagaagatgctggccttgccttggtgaagaaagcgtatgtgtacattcacaagaatgggtacaagaca

SEQ ID NO: 448888 - DNA, 238 bp, Triticum aestivum
ttttcgttgagaagaaaaaggaaaaaaaaaaaaaaaggcgaggcgaaccgcgcgcgctcacgggatccgcggcagccagcaccgtcgcctcttcccgccgatccgccccgtcccgcccgatcggcatggcggacggggactcggcggcggcctacgcgccgccgcggtcgccgctcccgcccgagacgccgtccacgcagaagcggaggcagcgcggcctcgtctcgcgggtctggaa

SEQ ID NO: 448889 - DNA, 372 bp, Triticum aestivum
acaagaccgtccgaacctgagatttatgggcataagagatctgaaagagacgcatgtggtcccgtcctggatctcattgtttgctgaatttttgtggacggaagaattttacggtgctttgtggatgttccttatggatgggggctgggagtctcacgtggaagaattgattcatatggcttctggcggtcaatgccgtagtgtcgcattatcgatcccagctagccgtaaacagattgacatatatcttgaattattttgttagtggacgtatgatcaaatggattcagagatactctttctgttccaaaaggagggagtagtgattcccgctgctatttcatctttgggtaagtagtataccccgcaaaa

SEQ ID NO: 448890 - DNA, 402 bp, Triticum aestivum
  unsure (1)..(402): unsure at all n locations
tantaacaagatatgaagaattaacctgttaatttctttgcaaaggaattggccagttagtattttactaaataactatggactagctactatttttacaatgggttacttattagactagggacgtgtgatatctttctcccgttgcaaagctaaaccacgtcgtgtcatctttgtagtttacatattttttagatgtgttggcacacattttgaggcatcattttctttcaagtcgttcatcatcattggtcccattctgcacaagactatcgatgataccactctgcattggacctacacaatcatcaattttaccaatgtcacaaatggtctgtcttgtaatgtgacattatggctaactgtttggtttaaattatggctggtagatgtccttggatg

SEQ ID NO: 448891 - DNA, 326 bp, Triticum aestivum
attattctttgcctcctctcctctccctttcctcttccccttcttctcctcgacacgaaagcaagcttggcgattgggattcaagcgccagcgctccaaatccggcggaggggtggcgcgcgccggcggcggcgatttcgatttgtggtagtcctcaccgctggaggcggctgcccgatccagccacctgagaacaaactcccgaccatccctccttgcccgcgtatataggccgtactcgttttcgccaccatcctcgacgcgtctggcgtaagaggctgggggtggtcttggtggcggcacacatcccaggaaggagcgagtgg

SEQ ID NO: 448892 - DNA, 331 bp, Triticum aestivum
cgctcgggggtggcgctggcgcccagatccacctcgtccttctcaggtgcgtcgggggctggcctgctcctgtccttcagcgctggctcgatccggcctgcctgtgtgcgccgctgcatcttgcggcggccctcggcttctccggcgagtgactgttccagctcggggaggcgcgaccctggctgatcctgtgctcgatggggcagactaatctctgcccagatccggtgcgcgccgatgtggtctcgcaagatccgggcagcacacgccctgaagatgccgtcatggtttgctggttgctcacgctccggatgcaaaattctgggtcgac

SEQ ID NO: 448893 - DNA, 86 bp, Triticum aestivum
aaatataaaaaaaaaaaaaaaaaaagagaaaaaaaagaaaaaaaaaaaaaaaaaaaagcaaaaaaatggggcggccgatctagagg

SEQ ID NO: 448894 - DNA, 273 bp, Triticum aestivum
aggatgggcttaatgttccatctagagagcaggcagctgtggttgcccctgtgttgtcagaagacggaagtaatgctgcccctgttcactccagttagaactactagttaccgtttctggtggcgcaacgccttcagtgccttatattcaattggcatgtagcatagtattctttcttggagctgcaccctcgcaattcttaggctcgtctcgtatagtagaaaataatagctctacccttcaataagcctataagcagcgcaactgcagatg

SEQ ID NO: 448895 - DNA, 123 bp, Triticum aestivum
ttcgatcatgccgtgtctgttgtaatgctgtggaagaagttaagcaaactgtcttgtgtaccaacgtttgttattcgtgtaggttgagtgtaacgagtgtaataaggacacagagctctagtt

SEQ ID NO: 448896 - DNA, 305 bp, Triticum aestivum
tcttcatactcagattaccatgcttttggtatatctctactgtttgtgctctatactaagctccttagtactgaaagaatgctgtgatttttcttgaatgtacaagatctgtacacgctgggtcacggtgctcaggcgggcaacgcgtgccaaggcgcgcttccgatctagtataggtggttgaaggcgcgatcgaggaaggcctggctcggtctcgggcggccatccgccgggcgactcgcgcgcccagggacgagagcgtccgccggatacggagcttcagggacgtcggcgacgcttttgcg

SEQ ID NO: 448897 - DNA, 280 bp, Triticum aestivum
ggagcaatagaagtattatttaggttcagccaccatacatgccacaggagactactcctacattctatcatacacagcatagcagcagttttctgcgaatttttatgtccacagtggtttctcttcttcgagtattacaattaaaccggtactacttggatagctaatctattctataatccagctagagagacagacagctcttggattcaccactcactgaccaagaccttgtcttcttgatcaagtgaaccctccgtgctttcgcgatattccagat

SEQ ID NO: 448898 - DNA, 310 bp, Triticum aestivum
ttttattttggatgtttatcaacaataaaatatgggttagggcagaacagtaccaaactcgaaaaatgcatatgaggattttccggaattgttgcttgtttttttcggtctaaattaaacttgcctaaacaggtagtttactcatgcttcacctcttgccatgttaaccaacatttaatattgatgagtagctaaacgagaatgaactaaataattgttgtgcatattgagctgcacttaatctgttttattgtttgttgcaccttgccatgccatgaatcattaaaccggacattgcatcacactcgat

SEQ ID NO: 448899 - DNA, 348 bp, Triticum aestivum
tctttgacttccagagttccggactgatgcatatggtagccaccgaccagagcaagacggcgaccaagaggttcggatggctgtacgtggcgcggtgggcggcggcgtccgtggtgacagtgctggccgtggcagtgatcattcgggccgcggtgctgatgctccgcccccagaagctccagttcaggctctccgggggccatgtggcagtcgactcgatcccgtcgatgccgccgcctgacaacgtcgtgacgctcaccttcgccttcgtggcctacaaccccagcgggcgcgcctccggcgagtacaacaacgtcaccgtccggctcacggacatcacgagcgcgt

SEQ ID NO: 448900 - DNA, 440 bp, Triticum aestivum
ttctttcgcgtgggttcgaaatccttgaaggagaaacaccgtgcagagctagttgagcagaagaaggaggagctgtacgaactcctcgccaatgcccactccaattcctcggcctcctcgctggacaagaatctgatcaaggatctctctacacaaatcaagcctagactagaggacccccaatggtgcaagataactaggaacaagaaggcgactgatttggctgcgtcggtggttattcttgctacttctgctctcacttactgcgtcttgacagctggtcctgaaatagtaaagtatgatggacatcttgttactgttgagagtctgcccattctacaaggacatgagcctgctgctactgctaagggagttcacaagcaagatgtgcagaagtgaaggggttgaagaagagatgcatcttgtttgactatcagttc

SEQ ID NO: 448901 - DNA, 385 bp, Triticum aestivum
tctgaaagcaagcggcattcaaggagatccagggaaaagagacatcacaaaatgcaagattttcccgtgagcaataggtctgcacggaaatcggatgagaagtggcactatactgattcaagcgcacgtgaaagcgatagacattcaaggaaaccaagagaaaaatcacgctactctgatccaagtgcttctgagtattccgattccgatcggccttcacggagatcgaatgagaagcgacactatactgacttgagtacacgtgaaagtgatagacattcaaggaaaccgaagggaaaatcgcgctgctctgatcaaagtgcttctgagtattcagattctgattggcgtaatagtcatcgccgtcgtcgaagaaagtgagtag

SEQ ID NO: 448902 - DNA, 353 bp, Triticum aestivum
  unsure (1)..(353): unsure at all n locations
ttttagagagccacccagccatgagatggtatgcatcggtaggctgagggcgctggtgcttcgtgcggcggcgggcgcgggcgcgggcaggcgccggtggtccaaggtcctatncagtcgggcggttgatgtgggcgggagaccccgtccgcgcggacaccattggcataaattcctggcggtggctggcgccaggacaaatatgatgctcgattcatccgactctgactccggcgctcctgctgggcagctgcagctgcagcgccgcgcggttgctgctgggacccatccgcaggatggagggtacgccagtgcggggtggcagagggaagatggtaaactgaaatgtgggt

SEQ ID NO: 448903 - DNA, 374 bp, Triticum aestivum
cttactcgtccggaaaataatgcagagaaggctacggcggcagatggtcaagctaaaaagccagaagatccttatgcagagaaggctagggcgatagaggttatgtttccttcaacagagaaggttgggaagattggagatgtaaatcctgttaaagattttgaagccatgctggcagagagatctagctcaatatgggttcagaaggcaattgaagagatgaagaagtacacgaccaatttggtagagaattctcttcaaggagattattacgaaaaggcactcaagtgttttgttgctctgcggaaggcctgtataatcgaacaggagccggaggaatataaccaatttgtgacgaagctttatgagagact

SEQ ID NO: 448904 - DNA, 312 bp, Triticum aestivum
tgggtgagcgcgcaatcacccaatgtttcctacatcccttctggcaacaacggccagatgctgcttgggctcagcactgcccggtgaatgaattgccacttatcttccagttggtcacagtactttcgtcacttcagatgcccaattatccttcacttgattacaatacttgaataacttcagatgcttcgacatagtagttatgattttatcgtagaatggagacttctattatggaggagtcattgaacaaatgttgtattttggttgccaacctatgctatatttgtgcttatgatgcgttcttgaatt

SEQ ID NO: 448905 - DNA, 466 bp, Triticum aestivum
gttcttacataaaggttatgttggaaaaggagctgccaacatgttctgcgtttgaaagcctcacaactcttgagattggcgaatggtttttaactgaggacttgtacgttgtgcttcgcttcctccagctttcaccgaggctagaagaactcactttgatgcataggccgcttgatgaaggagcggaaatagattgcatgccaattgacgggatgaccttccggtgtccactccttgaaagtgttgtcatacaatgttcagagggtgatggaggaatcgataagctgctaagtgttctggtagtcaatgggattagtctagacaatataaatattgccttctatgatgaaattgaaaagcgggaccgtgcggagaggatacgtgccgacgaggaacggtcgaaggagctgcgcatcttcgagaagagggtgaagagaaatccagaatggagagagtatgatcctta

SEQ ID NO: 448906 - DNA, 407 bp, Triticum aestivum
cctccaccatgctcctgcttgtcgactgcatcgccacacgaagttcacaggccatagctacggacggacgaaattccaactgtactgcaacccctcaggatccacagtggccaaagatggcgatccacagttgttcggtgtaatgcctaaggagaaaacaatgtctctctcacttttgtttttcgaaagacctacctatcatcttgccgctgctgcgttagagtggctccatctgcagatgggggaggtctcgaccagcagctgggagaagtctcgacctgcacctggtcacgcgtgccactgccacttaggtccaccacctacagctggcgccgcagtgcctcaaccattcaactatgccacctcagcagttcaatatatattggagaagaagaaaaaacaacagt

SEQ ID NO: 448907 - DNA, 416 bp, Triticum aestivum
gttaaagattacgcacccgaattgctctgggaaaggctaaaagaatggatgtcgtcgcaggagaaacagctggtgtggaagggcagctattgctactatatcctgttctttttgtattacaggggtttgaagcatatgtcggagtgttgcttcttcagaccgcgtggcacgggctcacctctgaatggcaggtcatagtgtgcgggatcttgctggtggtgatggcggttggcaacttcgtcaacacggtggagactctggccctgaagctgaggttcaaagcaaagatgaagaggacgaggcccaggcaggagcctggccagagccgtgcgaatcgcctgcatcaaaattgacaatccagtctggtgtcacccctccatgcctggaatggagacatcaacactgacaaaaccatc

SEQ ID NO: 448908 - DNA, 179 bp, Triticum aestivum
tcggtcgaattcacccgtctgcaccgctcagtcccccggaccggaccgccggacctgttcttgccttgccatggcagcagcagcactgagggcgcacctgaacgatcatatcgccagcatgtacaccgatggtgtgggcgacgaggacacgttcgaggagctgcgggacgagggcaccg

SEQ ID NO: 448909 - DNA, 312 bp, Triticum aestivum
ttgaataggaatagaggtcgtgattggtgtaacgggctacaacgaagacctgagacctgagaagaagtttgcaaagaaggcaaggagcgcaggacctgagacctgagaagtttgcaaagaaggcaaggagcgcaggaggctagatatctgtggagctgaatgttggaacaacgaagtaaccaacgagtggcttcataactcatttcaattgcagtatgcgtgcttctcttccatcatcttttaagcatggactaaccgtggtttgtagcacattgagtttttgcaacaccgatagacatgaaccactccctc

SEQ ID NO: 448910 - DNA, 210 bp, Triticum aestivum
gttggggggggcaaagatgtttctcattaattacccaaatacataggcgacagattggacttataatattatgtgcatgggcatatacatagccatgggtaggatttacatacgagcatgctttctagagttatgttgggaacatggacatacacatattcttattttaggaacaaacaagaaagattaatggaaaaggaaaacccaaag

SEQ ID NO: 448911 - DNA, 169 bp, Triticum aestivum
ttaccggaatccgtttgttattgcggtatagtgagcgacagtgcgcctgagggcagatcttcccttgtttgtacattcatttacactctacaacaggatgtcccaaagaataatggtatctacacctagcaaaccagataacgttattgatgcggtgattctatagctc

SEQ ID NO: 448912 - DNA, 102 bp, Triticum aestivum
tattttaaaaaaaaaaaaaaaaaaaaaaaaaaaataaaaaaataaaaaaaaaaacacaaaaaaacaaaaaaaaaaaaaagggggggccgtcctagaggatcc

SEQ ID NO: 448913 - DNA, 325 bp, Triticum aestivum
aatttcactgcatgggttggtctccgctggattgtgaccaactctttgtgtgtggcctgtcccggttctttgtggttctttgcgcctgctcggtcctcccaagacatcagataaattcttgtgaatctgatcagcatcatcttatcgctgatgtagcatctgtagtctagatatttgaaagagtatgtgatcgaaggcattacctcatcaccccatagcccctctgtatagtgtcttgttagaggaatatgtggaatcgtgttcgttggttgatcaagcacagctgcaggtcaaataaatcttaagctgccaattcttattttcc

SEQ ID NO: 448914 - DNA, 375 bp, Triticum aestivum
  unsure (1)..(375): unsure at all n locations
gcgttatcaaccacttcaactaccaaggctgccgcgggtacgtgtcggacgcgaggggcgcccggtgcccgtcctgcgggaacgagatggcgaccgagacccagtacgtgccgccgccggcgccggccctgccggagcagagcgccgccacggcgaagacggggtacgtgcagggctccgtgacgtacacggtgacggacgacctggccgtgacgcccatgtcggcatctcagcatcncgcggctcggcgccctcgccgccgtcgggggcctcgccgcgctccaggagaagaccgtggagctcgggtacagggagggcctggagatcctcaaggcctcgctgcggtccaagactgtcctcacggacgtcttcctc

SEQ ID NO: 448915 - DNA, 343 bp, Triticum aestivum
cccacgcgtccgcccacgcgtccggggagatgcccagccagcaaaggtgagcgtgaggatcccttcatggacatccacagctgacgcaatggcaactctgaatggcaaaaaactcaacctgacatctgcaggtgatttcctcacgttgacaaaactctggggcgatgataccttagtgctccaatttcccattaacttgagaaccgaggcaatcaaagatgaccggccggagtatgcgtccatccaggcggtgctgatcgggccgcacctcctcgccggcctgacacacggcaacaagggccattaacgcgaccgagcactccaacgacggcctgaccccggg

SEQ ID NO: 448916 - DNA, 102 bp, Triticum aestivum
aaaaaaaaaaaaaaaaaaaaaaaaaagaaaaaaaaataaaaaaaaaataataaaaaaaaaaaaaaaaaaaaaaaaaaaaaaaaaacaaaaaaaaaaaatagg

SEQ ID NO: 448917 - DNA, 394 bp, Triticum aestivum
cgccgtgccacttccagtgcctgcgtgtgcggatcgctgctctcgtcgccggcgttgtggacctcgctgtcaccgccagcatcatgccgcgtcccgtggaaggttagctgcatgcatgcggcgcgggtgcatgtgccagaggaagatggatctggagagtcacgaattggattaaaactggcatgccttatagtatataccctaaataacaagggcatgcgttgtgtcgagtgttatattgtgtctttgtgttgatcatggatttccccggttatgtgaacatgttttactttactcagtatagaagcatttgagggttggagctgttatgtgagactctatttcgtgagcaacttctcgaagggtttatctatgcatgaccttatcttggttt

SEQ ID NO: 448918 - DNA, 375 bp, Triticum aestivum
  unsure (1)..(375): unsure at all n locations
tgctgnnagtgcagcagaccagttctacacttccaacgcacgcaagaaaatcctccaggttcatctacagcataggaagcggggagatggaagggagcagcagccggacgccagagataaccatcgtcccggcgcctaggccggcggcgggcggtggcggtggcggtggcgccgtggacgcggtgaaggcggcgagcaaggagcccatcagcccgggctcgccttccccggccagcaaggtgcgccccggcgccgtctccctgcccgggtggaagctcgactccctctgcaaggagtccagctcgccgccggccatgatggcgcgcttcccctatttctgaagccacgcgggcatccttgtcatcctttgctagt

SEQ ID NO: 448919 - DNA, 393 bp, Triticum aestivum
gaaggggttgccggatcttggcctggagctgtgggattatctgatcgggaaaggatgtgtacctcataggcatgcattggatgttctggttaccggtttatgctgcagagatgtggttggtgaagcatataggtgcttccgggagctggttgagatgggaatggcacctacagagcgtgcattcagggttttggaagggttcttgaagaagaagcgggagtttgggaagattgacgagattaggcaaatgatgaaggctatccaattggaggagcatcaagctgaagaagaagctgcgtgaagctatcaaccctcctgtgggcccttttgaaaagaaacatatttatttcttggaccatgtaaaatttccaagcctgcgtggtttaagcaaag

SEQ ID NO: 448920 - DNA, 365 bp, Triticum aestivum
gtagtccatgactcttctgcgcaccgcgggcgcgaggccgccgcgggccggtggcgcggccttgcgcgccacgccctgcagcagcaggtgatgcagcaccgtctcggccgcgctgctggcggccaggcggtcggcgggcgcattccagtcggtgtcgagcagggcccggcagacgtcggtcagcgagtcgtcgtggatgtaggtgcggtcgcgcagttcgagcgagcgcggttcgcagtcgagccgcatcacggcctcgcgcgccagccgctccggcgcgatgtagagatgcaggaagtgcaccgtgtcgttcatgcaccagcgcgaatagtgctcggccggcagcacgcagaatttgccggcgc

SEQ ID NO: 448921 - DNA, 418 bp, Triticum aestivum
gaacttacttcatcctaaatcttccccaaccccaatccaggcgacatggatctcgccatggcgccgccgcccaccgccgtcgcggccgtccgttgccacccgcacatcctccgcaggggcctcctgcccgcttcgtcgccgctgctccccttcgcctcccggctggcctcctccacgccgctgcgcgcccagccgctgcgcttctcgctctcccccgtccccaagagcatctcctcctcctcgacctcccacatccccgtgcgctccctcttcaccgggatcgtcgaggaggtcggccgcgtgcgccgcatcggcccgccgcccacgccttctgggggcgggggagacgcggctcccggtgtcgacctcgaggtcgagaccaagaacctcctcgccgggacgcagctgggcgacagca

SEQ ID NO: 448922 - DNA, 408 bp, Triticum aestivum
ttttgtcccatccctacacgtcatggattcctatggctgtatatatttgcctacgcggttgcacccagcagttgaggggcgcttctttggctctcttcgcttggcttggcaaggtcacactggagacttatatttcccagatccacatttggctcaggtctagtgtaccaaatgggcagcccaaatggcttctgtctttcataccgggctacccgatgcttaacttcatgctaacgacatcaatctatcttttgctatcataccgggtatttgagatcacaaacgtgctgagggcagccttcattcccagcagagacaacaaccgcctgtaccagaatttcgttgcgggggttgccatctccgtatgtctgtattgctgctcgctcgttcttctaaaaattccggctg

SEQ ID NO: 448923 - DNA, 174 bp, Triticum aestivum
caacaacaacagggacagagtatcatccaacatcagcaacaacaaccccaacagttgggccaatgtgtctcccaaccccaacagcagttgcagcagcaactcgggcaacaacctcaacaacaacaaatggcacatggtacctttttgcagccacaccagatagctcagcttgag

SEQ ID NO: 448924 - DNA, 320 bp, Triticum aestivum
aaggacacaaagggggaggctgcagagggagggggggatgaaaaacatgcaacctcaccaactcacagacaaggagccgaccaagcagcagctgcagatgatgatgacgatgacgatgtggagtggcagactgacacgtcagcggaagccgcgagaaaacgcatggaggagcagctgagcgcagcaactgctgaaaaggcaatgcttgccaccgaggagacggagaagaagaagaaacaggccctgcacaaagagggcagccccaaagggacaccaaaggctgaagataatcccaatggcaaccagactgggcccaagac

SEQ ID NO: 448925 - DNA, 263 bp, Triticum aestivum
gtcgctcaacatcctcatcaaggggggggtcgttgagtccctggggggggcgcccttcttcgccacgtacggaggtgtgctgttcaagtacatctagaagactcgtcgagcggacttagaatctacggacaccatcacgaataactctgccccgcccgcccgccgttcgtatgttgtgcgctgctgttatttttggttcttgtgtcattattccaggattgccgcagtttacccccactttccctttggccttttgggtgtgt

SEQ ID NO: 448926 - DNA, 308 bp, Triticum aestivum
tacgataattcctcaaagaagatatccatggaccaccgatggaggttgcagttgccgaattaccagtgctgccacaagatgtcctgatgtctatatttgcacacctggagatccctgacctgatgcgtgccagcttcgtctgctcctcgtggcgctccgcgtattccagcctgcgcaaccttgagcagtaccagcaacgccagacgccgtgcctcttatacacatctgaatctgctggtgaaagcgttgcgtgcctctacagcctcttggagaagagggtcatacaagttgactctcccggagccacc

SEQ ID NO: 448927 - DNA, 60 bp, Triticum aestivum
ttaaaaaaaaaaaaaaaaaaaaaaaaaaaaggaaaaaaaaaaaaaaaaaaaaaagagggc

SEQ ID NO: 448928 - DNA, 302 bp, Triticum aestivum
ctggctagtttcgggtgcgcggcccagcagacctccgggcagtgcggggcgtgcgcggacggctgtggcttcttcgacccctgcccggcgctggacgccgacgtatgctccaccagggtccagtgccccaacgccggctgccacaggtacgtgacctaccaccaggccgaggagcaccggagcgcctgcgcgcacgcgccctgccgctgcacggagcacggatgcggctaactcggcgcggcttcggacctcgccgaccacctcagcgccgaccactgcgtgccggtgcgccccatccacta

SEQ ID NO: 448929 - DNA, 345 bp, Triticum aestivum
ttcattgtacggcacaaccaagcccgtcatacaggcctacaagcccgcacactacctctggaggacctagcccagattacagcccgacatctccaaactacagccccagcgcaagctactccccgactgcaccgggctactccccgtcctacaccggcccgaagacaactgacaaggacgatgagactgttgactagaaaatggctgctgttggttggcttgatgcagaacgatgccccacgaccaactcttgtttcctcgagtgtccggaacaggcgtgttgatgtaagctgtgatgctaatagcagcactagaatctgcggccgtagctgggctgatatttaa

SEQ ID NO: 448930 - DNA, 89 bp, Triticum aestivum
ttaatataaaaaaaaaaaaaaaaaaaaaaaaaaaaaaataaaaaaaaaaaaaaaaaaaaaaaaaaaagggcggacgttttgggggggcc

SEQ ID NO: 448931 - DNA, 289 bp, Triticum aestivum
ttaggtatgaggaagaagagggttttgctacgtggcatggaattcatggcatagttggttctttcttcttcctcttcctacctctgcctcttgctcttccttcttcgcaagcagcagcctcttcgccctcgcagccagccgctgtcgataggggggaggtcgtcaccgccggctgctctctgccacgccgcttcgaccagagacaggtgagatggaaggtttcgagttcttccagatcgtacttgacaactcctcgagcaggctgaggctgcctgacaagtttaccatg

SEQ ID NO: 448932 - DNA, 211 bp, Triticum aestivum
gttttattttctcgtaccgctgcatcctttaccaataaggaggcaagcacttcagtctggttgatgtattctgacctctgggccagagcgtgattaacggccaggatttctctgatggggcaatctaacggctgtagaggatcgttcctgcctggctctcatgcctgacagggtggcccagaggttgtctgacagactacaaaacttttta

SEQ ID NO: 448933 - DNA, 388 bp, Triticum aestivum
cacgacgaagaaccaagaaacggccgccggcgacaagcccgcgccgccggtgctgccgtggtcggtgaggctccagctgttcgcgctcgtcaccgccaacgacatcgcgcagcgccgcgacgggaccgtcaaccgcttcctcttctccttcggcgaccggcagtcgcccgcgaggccgcgcccggacgcgcacggcgttcgctccgccgacgtcaccgtcgacgcctcccggaacctctgggcgcgcgtctactcccccgcagcggaggcgaccccactccccgtcctcgtctacttccacggcggcggcttcacgctgctctccgcggcctccacgcccatcgacggcatgtgccgccgcttctgccgcgagctgggcgccgtggtc

SEQ ID NO: 448934 - DNA, 445 bp, Triticum aestivum
ttgattttgttgaacgagaggacgagttcgacataaatgcatatgcagaaagggttgaagaactgatgatagatcaggatgcagagattgatgttgaaacatgtgagaagaactcatcattcagtgattttgaggactcagcagatgagatcatctacttgcctgctattccttccccggatgctcctgatgagcagccagacaagtgcctagtaagctcatcaaaattggaggatagcaatcattctggttcgcccccatcctcaatggatgctgtgcagaatggtctagccattcctcccgcatctagtccattggaagttgttgacaattccatggccgaagagccatcagcggaagcggcaaacgcaaagcggaagaggaggctatcagccaaggggctggagatgcagcaggctgaaaaagtgaagaaaccacccataaa

SEQ ID NO: 448935 - DNA, 329 bp, Triticum aestivum
gcctttaatttcctggactttgcagctaccctctacatcatccatttgttcatttgcattatttatggtggatggccagcttcaggtacatggtgggtggttaatattgctggtttggcaatcatgtccctcctcggtgaatacctatgcatcaggcgagagctaaaagatattccagtaaggcttcgtgcaagtgtttaatctcagaggctaaaggagtctaggtggtttccaactgttgttaccccccaggagatgcttgttaatatctgtccttaggaatacaagagacctgcgatgcatgctatcttctgtgattacaaccaata

SEQ ID NO: 448936 - DNA, 304 bp, Triticum aestivum
ttcttctatcctgttcgacggctggcgcacgtccgggtggacgggctacctcctctgcctcctggcgctcttgctcggcgccggcttgtaccagtacctggaggccttccggatccgggtcaagctcctcgccggcgccaaggcgtaccccctgcccccggccggcggctcctacgcgcgggccccgatgatcgcgccgggctccgccgccttcttgggcgggcgctggccggcgcgggtggccacggcggcgctcttcagggtcaacgcgggcatagggctcctcctgatgctcgccgtcatg

SEQ ID NO: 448937 - DNA, 288 bp, Triticum aestivum
ggcagcctgcctgtgcctcttcctgcttgccgccgcgccgaccctcgctctcgcccgcgcggcgcccgccgccgactcgatacacaagttactgcggtcgcacggcctccccggcgggctgctcccgcgcagcgtcgagtcgtacaccctggacgaggggaacggcctgctcgaggcgcggctgtcggcgccgtgctacgcgacgtacgacaacggcgacctggctttcttcgacaccgtggtgcgagggaatctcagcttcggcgcgctccgcggctgtgaggggct

SEQ ID NO: 448938 - DNA, 218 bp, Triticum aestivum
ttgttctgccatttccgcaagcacgggcgcaacgtcctggtggcctgcaaggcctacctggacggggcgcaggtcgggtgcctcgccgggaacggggtgcaggacgtggacgagggtgacaagagctgctcgctcaagttcaagacctcgctcaagaggctgttcgaggagctgctgatggagttcacggtgaagggagcggactgcagcaagttcct

SEQ ID NO: 448939 - DNA, 301 bp, Triticum aestivum
cggtcgcgtggggcttgcgcgcctcgtgtgatacagatcaaggatctgaagggaaagctgggggacgaggaggccgcggccagcttcacgtcggtgaaggaggagccggcggcgtccgacggcccggccgcccgcgggcatggggtcatccgacagcgactcgagcggggtgctgaacgacacggacgcgaccggcgccacgccaacagaggaggcgccggctccggagatggggacgctgctcggcgggcccggggcggccggcgcggcggcggcggggcacgggcaggtgttcctgcac

SEQ ID NO: 448940 - DNA, 374 bp, Triticum aestivum
  unsure (1)..(374): unsure at all n locations
cgcggccatggcgctcgccnacttcccacccgcgcccgcaggccaccatacgccgggccccttctatcccccgccgctcgcgtgcgccaccaacaccggcttctctttccttttcccaccgtcctcccgctggccctccctgcagagggccagctccgcggcagccggagatggcgccggctcgtcagaagcgccgggcgacagctcgctcgacgcagacctcctcaggagggtctccggggtagaggacgcggaccgagcgttggacattatcgcggagtcgctgggaggcggggctggctccggctcgaaagcgttcctcgacgcgttcgactgcaatgcgatattagcggcggcgcttgaccggggcaacg

SEQ ID NO: 448941 - DNA, 98 bp, Triticum aestivum
ggccatggcgatgagggagagccggaggaccagggaggacaggcagacccccatggctaccaggaggacaccttctcggatcgtgaggattgggacag

SEQ ID NO: 448942 - DNA, 130 bp, Triticum aestivum
ttcgtcgccgaaacccttactcgcccccgcccccgcctcccgccgccaaacacccatcgccatgcgaccaccgagaggcggcggaggtttccgcggacgcggcggcgaccgaggtggccgcttcggtgga

SEQ ID NO: 448943 - DNA, 252 bp, Triticum aestivum
atctgatcctagctgtattaatgtaaagaaaaaaaaacacatgtgcagtacccattgctaattcaaaccccaactgtctggccgtcctgcctcacgccttgcataatctgtagcaggattgggaagtgtatagtggagcaagttgggtgtcgacgtgtgtgtgaaggtgagagactttttatgtgaagaaatgtaatgcttgccagatgttgtaaaacttcaaacactgaaatgaaggggttgaatttagca

SEQ ID NO: 448944 - DNA, 500 bp, Triticum aestivum
gtcgccggcgccgtggagcagggcgacggctgcgactccccgtccgcgggcgggggcatggtggccgccgcatgcccgcgctgcttcctctacgtgctcatcgcccggagcgacccccgctgcccgcgctgcgagtcgcacgtgccgccacccccggccccggcgcccaagaagaagccgcggatcgacctcaacgtcggcttcctcggaacctagccatgccaagccaagaagaagtaggtcaagatggttgtcgtccgtcctcgtcctcgtcctcgtcctcggcgcgttaggtaggcagcaggcctccggtgctcggattggccacgacgacgccattgtttttctgatgccaccgacggattccggtacataggggaggcgctccagatttttgcttgtccatttccaagtatggccggccgtccgtccgtccgtccccgattctgtcatgtcagatcaatcaaacactcgacagaacatgaatgaatgaaactact

SEQ ID NO: 448945 - DNA, 200 bp, Triticum aestivum
gtggtggacaaaatgcctgactgctggttcttcttctgtctcgcatatcaagttgctgcgtttttctgtttcctcttattatggctgtgattgattaatggacaagtaatgttcagttgtcacagagtactagcttatacgggagcaacgtttgccctagttttgtaataatggtatatatcaactcttgacgttctgtc

SEQ ID NO: 448946 - DNA, 319 bp, Triticum aestivum
ggactttgcattttcagccctttttctgttgagttttaacattccagaaaatatgtggttattatatatggcatgttcaatgcgtttgctttttagcaatccctataacatgtcttattagtccaacaatattgttttgcgattgagattaaatttttctcgcataacaatattgatttgcgattgagaaaaaataatgttttcctctcaaaaaaaaaaaaaaaaaaaaaaaaaaaaaaaaaaaaaaaaaaaaaaaaaaaaaaaaaaaaaaaaaaaaaaaaaaaaaaaaaaaaaaaaaaaaaaaaaaaacaaaaagggg

SEQ ID NO: 448947 - DNA, 487 bp, Triticum aestivum
tggacgcgtgggcggacgcgtggggaaaactcacacggggactctttgaaggtatcagaattctatgatcccaagtctgagtcagacgtggacatggactataacagcttgtactcgaggcaggactttctagagggcgaggatggtgagctttcatggtttaatgctggcgtgcgggttggagtcgggattggcctcggcatatgcgtgggcgtcgggttgggtgtcggcctgctggtccggacataccaaggcaccagcaggaacttcaggcggcgactgccctgatggccaacgcttcccacaagtatataggaaactgactgcccatcttcctgcccatgctagtgatagatgagcgaggccttgtgttctcccctcctgcagcttgtgtgcactgcgaaccatttttgtccctttgaggtatgtaaatgcgagtatgtatatgtatagtaaaaaaataaataaagagtcgagtcgggtcgag

SEQ ID NO: 448948 - DNA, 88 bp, Triticum aestivum
gtacattgtacctgcccttggttttgagtaccatgctggagttctggatcatcttacattatacaaggtgctggcattttgacgttgc

SEQ ID NO: 448949 - DNA, 334 bp, Triticum aestivum
ggtctcggcccgtgagctagctcgaagaccaggtctttgccttctagaacttggattctagcagcggtctggggtctatgggcgtaggcccgggcaaagtaaccgtctctccagccaagtgaccatgacggcatgtactcgcatgaaacgcaaaggggcgtcgcatgcctcgacgggaataatatgtagctcaaggacggtccgatatatacaaaccctcccgtgccctcccttcctcaagacctataagaagcggggaaccttgccgcaatggggcacgtgaaatggggtagaaacgacatatgtatgtgtagatatttatgcatatacccac

SEQ ID NO: 448950 - DNA, 236 bp, Triticum aestivum
cttacgcgtccgcccactcgtccgggtgggtgtggtgtttcatcagatcagaccagacagtccctcccttctcccttgtgcaaattaacagacgctttctgagctgtgttaaaaaaaaaaaaaaaaaaaaaaaaaaaaaaaaaaaaaaaaaaaaaaaaaaaaaaaaaaaaaaaaaaaaaaaaaaaaaaaaaaaaaaaaaaaaaaaaaaaaaaaaaaaaagggggggccgttttaaa

SEQ ID NO: 448951 - DNA, 281 bp, Triticum aestivum
ttttgcattaatcttagtgaaggtgatttggtcgaccttgcctaggggcttttccgccatgtgtgatgggctggctcgtgattaacttggagtgtaataatcaaaactatcctagcaattctttgctaagtgtaataatcaaaacgacaagtctttgcttaaaaaaaaaaaaaaaaaaaaaaaaaaaaaaaaaaaaaaaaaaaaaaaaaaaaaaaaaaaaaaaaaaaaaaaaaaaaaaaaaaaaaaaaaaaaaaaaaaaaaaaaaaaaaaaaggggggggc

SEQ ID NO: 448952 - DNA, 357 bp, Triticum aestivum
tcgatcggtaatccggtaacgttgcgtttgtgaggatccgttcgactacatccatttgtcttcttcatggactcggtcctcttccttgcgggatctcagcttgcaggtgccgttgaaccgtgcaggtgatgcaaccaagatcaaggaggagctcgatgaagattgttttctctatgctgtttcgtttccagctgatcagtagtggtgcccagttgggacgatcggggatctgtgtagcatttggggtagtcttcttttattttaggtttcgtagtcggacctttattgtatctggatgatgcaatgctctattcatgtattgtctgaagcggcgattgtaagccaactatgtatctc

SEQ ID NO: 448953 - DNA, 182 bp, Triticum aestivum
gtatcgtcctcgacctacgttggtaggtgcttacatacatatgagaattacaacactggctatacatacacacatatattatatgcaaaaaaaaaaaaaaaaaaaaaaaaaaaaaaaaaaaaaaaaaaaaaaaaaaaaaaaaaaaaaaaaaaaaaaaaaaaaaaaaaaaaaagggggggccg

SEQ ID NO: 448954 - DNA, 386 bp, Triticum aestivum
gtcgtcttatgaggacttccatgagtagcgaagcaatgcaggcaggccatagtatctattcaacaggcagcacaatgacttgcggattgtcgcgaaccccttcaccgggtgaacacaagaagcaactattccgccggcgatgtacagttctacttctacctgctgtgaggtgcatagtctttggggtagttctgggaaaaaaactcccccttgtacatagtagggtggtgaagacagcggaggaaaatatgtattgttgtagtcaggtgtatcggtaaagaattccagatgtagccgtcattatattttggccttgtaagttaaataagaggccttctcacaaattctgtaacagtatcatgagaacaaaagtccttgtctcattg

SEQ ID NO: 448955 - DNA, 177 bp, Triticum aestivum
ctttctcggtgtgagtcacaacagagcgagagaaagaaaaaaaagatggagatggccatcgacacgccatcgccgtcgccgtccgtctcgccggcgccgtcggcggtggcgggccggcagacgcgcgcggccgagtcggtgcgggttgagcaccagctggcgcgtgcgcccctggag

SEQ ID NO: 448956 - DNA, 72 bp, Triticum aestivum
atcaaattcgagttcgagccggtagatactattgataagtagataaaactaaagataaagaagagaaggtat

SEQ ID NO: 448957 - DNA, 455 bp, Triticum aestivum
gttgacgtcgacaactccaatgtgctcgtcatggacaaatacatggactcgctgctgccggaccggagaagcctcccgtacgccagctcctccgtgagaagcgattcggtaagaaggaagcccgccgcctcctcccccgactacagccgccgtcctccgcagcccaccccgcccgtgtcgctgtcgaagaaggaatcatgggatctcattcaggattcggagtttgagatactcgacagctagcaataataagagatcgtggttgatctccatggcttcgttaattttcttcattgccctactacccttcacctggtttgtaaatggcggccttacaggtggtgccagtgatggttggaaaagatcttgtcagtcagtcagtaataatatcgtgtgcatatatatgtcctctcatcccacttgctgtaacataaggaatttgtcatggatctggc

SEQ ID NO: 448958 - DNA, 303 bp, Triticum aestivum
ttcattgtaacgtcaagattcatttcaactttataggtatactttgaaaaaaaaaaaaaaaaaaaaaaaaaaaaaaaaaaaaaaaaaaaaaaaaaaaaaaaaaaaaaaaaaaaaaaaaaaaaaaaaaaaaaaaaaaaaaaaaaaaaaaaaaaaaaaaaaaaaaaaaaaaaaaaagggggggggcccttttaggggaccaaagtttcctccccggggctgggaaggtaaaattttttttttggggcccccaaaataaaataaaggggccgggttttaaaaacggggggaggggaaaaccccggg

SEQ ID NO: 448959 - DNA, 413 bp, Triticum aestivum
tggctccgacatctggttgcatcaaccagaaagaagaagaaagggggaaatgggaattaaagcaaccgcgagtactcatccaaagtactcgcaagcacggatctatactacatatgcatcggtatcaatgaaaagggttgtatctgtggactggactgcagaatgccacatgagaaggggaaagcctagcctatcgaagactagcatcttctggaaaccaccatcttgcaccaacaggagggagtcgcgtagcataaagtaaagtagtagaagtgttatcaacctcgggcagagatcctttctcgactccctacaagacagcaatcccagagccatactatccaggtctcatctccatttctcatatgcatttcacatctcaggtatccagttctagttgtatcgatcgggat

SEQ ID NO: 448960 - DNA, 54 bp, Triticum aestivum
gcaccaccaaatgtttcatttataaggcaaagatggaatgatgttggttgagga

SEQ ID NO: 448961 - DNA, 351 bp, Triticum aestivum
tttgccgcagcagctcagctacccgtacccgtgcccacccccgacaatggttcgtccgctgcgcgtcagcagccggtaaaagcgcggcgataccagaaagaaataaagcgcgcgcgcggtgcggcaaaccactcttgcagtggcatggcatggcaacctttgctctgttctgccccgctcatacagagaaatggtggcttggtgagtgggttagccactacccacttgtggagcgatgctgtgtaccaataaatctgaatgaaatgtatgttgtgcctgcacgtagaagtatccgcagcaactatttgtatgctgcgtactaactaataaatattaacagactatgttgta

SEQ ID NO: 448962 - DNA, 75 bp, Triticum aestivum
tgttgatttgcgaactcgtggttgctgctagatgtactgtggatgtttaccttattaagtgctatttcgggacct

SEQ ID NO: 448963 - DNA, 72 bp, Triticum aestivum
tccacgcgtccggccacgcgtccgcccacgcgtccgcccacgcgtccgcccacgcgtccgcccacgcgttcg

SEQ ID NO: 448964 - DNA, 69 bp, Triticum aestivum
tttggcacccagcccccctgggcatatcgcgatgggtttctcgtaaaactctgacgtgtgtatgtatgg

SEQ ID NO: 448965 - DNA, 390 bp, Triticum aestivum
gtcgtgatgctggacgccaaggggagctgcgcggtgccctccgaggaggcggccatgggcgcgggtggcaggtgcctgtcggtgccgtccgtcgtgccggcgccggaagggggagggatcgtcctccgtctccgcatcgacaaggaggtcaaggcgagcaggagcccccgtccccgtggctgattacttacttggtcaccttgggctccttattatctactactcgccttaacctggagtactatatatatttaccatggttggacattggtgatttggtagtgaactggtggtagtgatcgaaggttgaaccatggttgggctttgattgattctgtccatggcaatgttggccaatgtatcgcgcaggctatatatgcagctgatcac

SEQ ID NO: 448966 - DNA, 245 bp, Triticum aestivum
tccacgcgtccgccagcaacaatatgcacaattaactctaaagcgtaggtatctagcaggatttgtttctaaaaaaaaaaaaaaaaaaaaaaaaaaaaaaaaaaaaaaaaaaaaaaaaaaaaaaaaaaaaaaaaaaaaaaaaaaaaaaaaaaaaaaaaaaaaaaaaaaaaaaaaaaaaaaaaaaaaaaaaaaaaaaaaaaaaaaaagggggggccgtttaaaagaaacaaacttaattgcccggg

SEQ ID NO: 448967 - DNA, 194 bp, Triticum aestivum
cgatcgaccccgtctcacccacgctgccgtcggtgatccgggaggcagtcgaggggacagcgcgcgaccggaggggatgcggcagcagcggggcgtcggcaggggcgggggccggctggatcccggtctgctgaccagggtggtggacaaggtcttccgcttcgttcgcctcgccgagttcgagatcctctttg

SEQ ID NO: 448968 - DNA, 364 bp, Triticum aestivum
ttctcgtcctcggcgtcctgctggctatcgccgtcgccaatgccgaggcagcgtccgtcgtggtcggccaggtcaagtgcaccgactgcaccaggaagaacttgaaggccgaggaagccttcaagggtggcgatcaagtgcaagaacgtccaccgcgactacgagagcatggcggtgggtgccctggacagcaccggcgccttcagcgtgcccctggccgccgacctccatggcgccgactgcgtctcgcagttccacagcgctgcctccaacgcgccgtgctccggtcaggagccatccaagatcgtgccggtgtccgagggcaccaccttcggcatcatggccggcgccaacactgccacgc

SEQ ID NO: 448969 - DNA, 266 bp, Triticum aestivum
tttcgcgcgaggaggagggaggtcgcgcgccggtccatggcggcggcggcaacctccgtgcgggggtgcggcccggcgttggcgtcgacggtggggctctcgctgcgttgggcgctgcagcggtcgttctttttgccgcccttgacggggagggcgtagttcgtgcgcgcgctgcgggccgtggtcgcggacgcgccccaccgggggctggagctctggccggaggggaggcaggcggtgctgctggaggccgtgatcgggggaga

SEQ ID NO: 448970 - DNA, 119 bp, Triticum aestivum
agatctggtctgtatgagactgtcagtagggggcatccagagaacactcctctctcgtatcagagcacccttcggacgcacggcggcgatggccgaggcggtgcaggtcggcgggctgc

SEQ ID NO: 448971 - DNA, 371 bp, Triticum aestivum
tacgatttcacacattcgcggccgagggagcgagcagcgccggccgccccgcggcaccgccggttgctctcgcctcccgctccgcagcaccgccggtagctctcgcctcccgctccgaggcaccgccggtagctctcgcctcacgtcccgcggaaccgccggtagctctcgcctgccgctgatacaatggccaacgccgcggtcgaccccgagcgcaaaaggtcgcggttgacgtcgtccatgtcgtccatgtcgtccgtggacaccattgtccgtctcccgccctcgccgatgttgacgtccccgacgcgcgccccggtgggacacgcgctggaggagcctaccgcgcggcacaggccggcgcggagatc

SEQ ID NO: 448972 - DNA, 357 bp, Triticum aestivum
ccgggtcgacgtgtgacgaggccgacgccaacccccaccgcattcccgacgacgagaccccgccgtcggcgactgcgaccacctccttctcggtggtccggcgcgtgccgtcggccatctcgacggacggccgcctccgtcggacggcgctgacgcaggaggagccgcccaactacgagatcgggtggaagcgcaccaagaatctccccctggagaagcccaaggggtgggccatcgccgactttctggagaagctggaggggctgatggagcgcgggcggtacgggtcgggcgcgctgctgggcacggtggcgggcgtggtgactgagcgcgcccgggaggaggcggagatcctga

SEQ ID NO: 448973 - DNA, 424 bp, Triticum aestivum
  unsure (1)..(424): unsure at all n locations
gttaggctatgcgaggggtcggggaagggaagaggatgtctctgggggcggtgttccacggcgcgcagctgatgctggatctggcggtggccgggatgtccctcatgttcgcgctcggcctcttcgccgtcgtcaccaccgtgctctgctccgccgccttcctccaccactccaaacccgtcgcgtcgtagccgcgagctgcctcccaccaggcccacgaccccctcggcgcatcctaatcgagtgagattgctgttgggaggtaataccttcatttgcatcatttgcccagcagaaggtgctccatatgctactgctgctagtactgttgggagggaactactgtagacgcaaagagtaggaattgcacatatcangtgatagctggaggctcttgtaccttgtattacttgtcatgtctact

SEQ ID NO: 448974 - DNA, 510 bp, Triticum aestivum
  unsure (1)..(510): unsure at all n locations
cgtatgatttccaagacagagagngncaaagaaagtgttgtcgccagcaagggtcgcatgaggatttgccggatgcccacctggttcgagacctgggataggtctgacacctacaccacgcttgctgttgttgcagctgctgcaacggtgttcgtcgctttcagggcctacaagaccatgaactgaagcctgcgaagcaatcctcaaaacaattccaggttttgtgcaccaaggagagtctacctcaagtaatatactacttgtccatagtggtaatgctagaacttaaaaagtagctgatctggagatggcgacgaaaatctgttatgcgtaatgtcctcatgcgaaactcctaggttttgaagtttttgacgccttggctatatgtgttgtagcaaggctatagccctggtgttctacatgacgatgttatgctcggttggttggaattgggatgttctggagcatgctggttttaaagatgtgcatttgaaaatcgtgcatttctgt

SEQ ID NO: 448975 - DNA, 124 bp, Triticum aestivum
gctttgtatgtcgaacaagaacagaatatgcacacacaaaattgtattctgtccagaaatcttgtgttctattgcaaaaaaattgcacttgaggaatgaggagacgagtgccccgtttattctg

SEQ ID NO: 448976 - DNA, 308 bp, Triticum aestivum
attaacaatagtgttctgcatgattttgccgaaaagtttctgtaggaatgtttcagcagcctgctgacagcagcgattcattgttcacttggtcacggtgattcatcacatcgtttatagatagcatcaatcatctgtcggtttggggtttttctccgtccgtttgctgtacccatgtttatctcttctgggcttgctgtactcatgttctatcctgttctgggcttgctggacatgtagtgaagttgtaagatgtaacttttggttgattcaattgtgaaaaatatatagaagcattcttattcaca

SEQ ID NO: 448977 - DNA, 187 bp, Triticum aestivum
gatgtttagtctatggatatgacgatgcagcggtgacaaataaagtgtcacacaatgtcgtgtgtgacccgcccatactagttgtttaaattctgaaataaaataaaataaagttgtatcaagacaatgttcatattggcattgtgtggatgtcgatctgattgccatgcttgcaagttcataagtt

SEQ ID NO: 448978 - DNA, 75 bp, Triticum aestivum
attaaaattaaaaaaaaaaaaaaaaaaaaaaaaaaaaaaaaaaaaaaaaaaaaaagaaaaaaacaaaaggcggcc

SEQ ID NO: 448979 - DNA, 234 bp, Triticum aestivum
aatagtggtcttaagccaaccgcaaggcaaacggggatcaacgaaaagctacgcgaaaataatacatgcatccggtctctctcaaaaaaaaaaaaaaaaaaaaaaaagacaaaaaaaaaaaaaaaaaaaaaaaaaaaaaaaaaaaaaaaaaaaaaaaaaaaaaaaaaaaaaaaaaaaaaaaaaaaaaaaaaaaaaaaaaaaaaaaaaaaaaaaaaaaaaaaaaggggggggccc

SEQ ID NO: 448980 - DNA, 340 bp, Triticum aestivum
ggtacaacttttccgccttggagctcggcccgcctccggccggccacctctccatcggcctcgtgctcctccgcctcgatccgtccgccccatcgccatatccgcgccggagcagccggatccgctacccagaccaccaaccaagagccgcctcttgcctgtcctacggtcgagaggaggacgaccgagaggagcgcccattgatccgccgcctgggccgccttggagcacgccctgcctccggccgccacctctccgtcagcctcgcgctactccgacatgatccgtctgccccaccgccggatccgccgcccagaccaccaaccaagcatcggccctt

SEQ ID NO: 448981 - DNA, 358 bp, Triticum aestivum
cttactgttttgtcaccgccttcctgccctgaacgcagatatcgacccacccagctggtgcacgccggaggcggtttgccaggacccggttacgccgggaaacagggaaacgtgcaaaagcatctgcaaaagttttggctacaacccggaacaagcctactgcaatcccgatcccactccgaggtgctgctgcatctattaagcgcaggaaataacaatgccactggagtggcagatgatggatgacaaagctagcaaactcacttttatgtgtccatttcgacttatgtaaaaatcggaacagatcatggtccaggcctgtccgtcaattaataaagattagaaaaagtttcttttt

SEQ ID NO: 448982 - DNA, 363 bp, Triticum aestivum
cctcgcgtttgcccacgcgtccgcccacgcgtccgaccaattttcccgacgcgagagcgagagacctactttcccctcgtctcaggccatggctcttagggtttccaccctgcccgtcgccgccgtcggccgcgccggcaactacaccgtgcacggcatcacggagagcccggggggcatctgggacggcctcaccatcgtcggcatcgtcgtcaccggagtactcctccgccgtcgccttcgcagctggagcaggcacctgttctctggttcccggccccatgacccccagcaccgagacctaagggtgagggccgaccgggctgaaaacaagggcaaacgtgagcagtgggcggagacaaa

SEQ ID NO: 448983 - DNA, 245 bp, Triticum aestivum
ctacgcgttcgcgcgttttcagttttatgtttggggtcctttctataagatgcagggatttgcttttattttcagcttctttagtgtccttggtggaagctataatgtcttttcgtcataatcaatgaagtgctgggtccttctgggcccttgtagtggtccaaaaaaaaaaaaaaaaaaaaaaaaaaaaaaaaaaaaaaaaaccaggagtaaaaaaaaaaaaaaaaaaaaaaaaaaaggggggc

SEQ ID NO: 448984 - DNA, 307 bp, Triticum aestivum
ctacgcgttcggttgttatgcatggtgtgtgcgtgtgtgtttcctttttaattgccaccgagaataagacgagatcgatcgtaccgtgctagttaatggcttatgtgtgccccttgtggcctgtaccgtgtggtgtgtaaggcgtcgtcttgtgttgtgatgcgccttttcctactgttctagttcccgtcctgatgtgccttcctcgtcttatctagaattagaatctcaaattttctgtctatgtatttgtatctgtatcactctatgtgtggtgccagctcttgatattttctgtttgttcttc

SEQ ID NO: 448985 - DNA, 382 bp, Triticum aestivum
gtcgccctgcaggcaaaccatggcgctctccgtctcctccctcgcatcggccttctcccacctctccctcccctccacctccgctccccacccgccccctctcctgcgcctccccaccacccgccgcgccgctcgcctcgtcctcttcgcctccggggccgacgccgccgagccggtcctcgaggcggaggcgcctgccgccgacgacggccccgaggaggtgctcgcggctgaggccgaggaggacgcgctctccgggctggcgctgcgcaagtacgtgaagcagcggctgcccgggggattcgccgcgcagcggatcaccgccacgggccgccggaagatggcgtccgcccgcgtcgtgctccaggagggcaccgggaag

SEQ ID NO: 448986 - DNA, 391 bp, Triticum aestivum
cgtacgcgtttggaaatccccgtccctacaccagcatgatttgccttcagtgatgtggcttcatccaaagcgatctgcttgtttagtcagtctcgcgctttacttatcgttggtgagcattttgttgtaggtgtacaaattagtcggtatgcaacagagcatgtgctgggcttggtcagatatggtgctgagctgcttggttgcccaggttggcaggttattgccttccttgcggcagttcgtagcccgccaacgtatgatcatcatggagtaggagaagaattaaagagacagtatttgtggtagtctagccattgttgcttgctgctggatgttttttcttttcagttctaactgcctgatactttgatatgcatcggataattatctg

SEQ ID NO: 448987 - DNA, 354 bp, Triticum aestivum
ttctcgttatatgaaaacgaaggcgggccatataaaaagatgatgaaatgccgagccgcggcgggtgactggaccaatggatggtcctgtgttgttaagctgatggtactaacccgctcatcaaaggataatgacgaatatgcatgcatgcatagcagcttgcggaccggcgtcggctggaaatgctgccatgttgtctcccatacatgtctctctctttttggttgtcgggtaaggctgcatgctgaattgtgtctagtagtatgtgtaaattcctggtgccgtctgagccttgtacaaaaacgctcttgatagtgagtgttgtgcgattctttttgtactccagtgggtgat

SEQ ID NO: 448988 - DNA, 380 bp, Triticum aestivum
taccggttattgctccgaccgataccgggagcatttcttcagaactctaccacgcgcgaatcgccgcggaattttactgaattaccagcaccagagcagagatctcggtcggctcggcgccaggggcaacttccgccatgagcgccacgaggtcgtccttcttcgggtccaacggcaagaagaagcccgccgcatgcgcccggaaccccttcgactccgactcggacgacgacggcgggatggtccagcagaggccgccgatgcgggcctactccgtcccgacccccgccgccgcgccggtccccgccgacgagcggaactccctcttcgtcggcgccgccgcggcgggccccgggccgtccgggttcgcgttctcgtcg

SEQ ID NO: 448989 - DNA, 449 bp, Triticum aestivum
  unsure (1)..(449): unsure at all n locations
nttttacctagcgcacatccatggcgcgcttccttgtcgctctcctcgccaccaccctggtcgcggttcaggctggagggcagctgggccacgcggcgccggcgacggcggaggtgttctggcgcgccgtgctgccacactcgccattgcccgacgccgttctccgccttctcaaacaacccgcagcaggtgttgaactgctcacagaagccaccagcttcgtgagggatgccgaggacaggccccccttcgactaccgtgattacagccgctcgccgcccgatgatgaaccgagcaagagcaccggcgccgcctccggggcgcgggacttcgactacgacgactacagcgggggcgacaagctccgtggcgccgcctccggggcgcgggactttgactacgacgactacagcggggccgacaagctccgtggcgccaccgatgaatac

SEQ ID NO: 448990 - DNA, 286 bp, Triticum aestivum
agtaaatgcaaaaacgaagaggcgaacagcgcctatgaggatctcaaccagggcaagatcgttggccgagctgtagttgaaatcatgtagtgctgactgctgacgagatgatcatgtggttgaaaatctgggtcaaacaaataagaatatgccgcggcaactccgcgaactcggtttgtgttgcagcatggtctcgctccctgatttgtgttggatgcaaaaaaatttgttgattgaaagattattgtgctccaaaaaaaaaaaaaaaataaaactcgccctctat

SEQ ID NO: 448991 - DNA, 175 bp, Triticum aestivum
  unsure (1)..(175): unsure at all n locations
cctacgcgaccgcgacaaacaaagacaggcgcatttgaagtttgaanccaaaaaaaaaaaaaaaaaaaaaaaaaaaaaaaaaaaaaaaaaaaaaaaaaaaaaaaaaaaaaaaaaaaaaaaaaaaaaaacaaaaaaaaaaaaaaaaaaaaaaaaaaaaaaaaaaaaaagggggggg

SEQ ID NO: 448992 - DNA, 143 bp, Triticum aestivum
cgtggccaagcccgccaagagcaaggcaagcagggagaggaagagggccaggagggaggcgagaacggcacagggcccgagggatcaggcaccaacaccagcggctgcagcccccgagcaggcggcaccggcgccaaagaagg

SEQ ID NO: 448993 - DNA, 130 bp, Triticum aestivum
cttcgcgtccgcccacgcgaccgaatcgttgtagtgatgacaaataaagtggtgtgcaccatcatgtgtgaccccgaccagtgctagttcaagcttgggaataaaagacaaacaaagttcttgtttgctt

SEQ ID NO: 448994 - DNA, 385 bp, Triticum aestivum
gttcatgctacccgaggcaatcgcaataggtatggtacctaccgacacaagaaaaaaacacggtatatttcatctaacggatccgggtggtattggtgtgatccatgattgcccggagagaggattccatccacataaagcccctctggatggctcaccaatctacgagcattgctcccacgtgtacatgaatgctgatacaaagtttgatatgattgacctccgagaacagtgagaggtatcagtttcattctgtcatagtttggcggctgtacttgcggcagttgagcaaattgtctgccttgatttctctagtgcgctgaagaaatgcagatactgatttaagtgattgtacatagctattgtgtctatagagatatgattg

SEQ ID NO: 448995 - DNA, 122 bp, Triticum aestivum
cctacgcggccgaaaaaaaaaaaaaagggaaaaaaaaaaaaaaaaaaaccaaaaaaaaaaaaaaaaaaaaaaaaaaaaaaaaaaaagaaaacaaaaaaccaaaaaaaaaaaaacaaaggggg

SEQ ID NO: 448996 - DNA, 178 bp, Triticum aestivum
cgtactcttttgtggacacgcgccaggacgccacaaagcgatcagacgcatactcgatcacccgcaggagcgtgcacaaaggcagcaccatgtatcgatcacaagggaggcccagctgggggcatgaatggcaaggacgcagagctgaccactgatgcagggtacccctacagaaacc

SEQ ID NO: 448997 - DNA, 312 bp, Triticum aestivum
gcgcctacgcgttcgtccacgcgagcgagagcaccgcggcgtctcgccccaagagagcaagccggccgccttatcgccctccgccgcgacgcttcatcccgtcaaggccagctccggaggccggcgccgacgaactcgtgccgcggcaagcgtgccggcggcgcctgcccgtctgtggaggccggcagtggataagtgcccgtggtggccgtggtggcagggttctttttgcaaaatacgaaacgttatctcaccaggacaaactttaaattggactgcgggttgaatattaagaaatagagggacttttct

SEQ ID NO: 448998 - DNA, 63 bp, Triticum aestivum
acacgccgacgccaaacacgccgaccaattaaaggctcgggaggagcgacgaaggcccgccgc

SEQ ID NO: 448999 - DNA, 188 bp, Triticum aestivum
ggtagatttagttgcactgccctccaaactgcgcgtgcaacgccagtgccaagtgtgttccttttgggtgtgagtgcacaatatgcatatacgctaataagcagagtacacccctccaacaaacagatggatctagctgatgatgtacaaggacatgttccctgaaataaatgtgattgagacatatg

SEQ ID NO: 449000 - DNA, 51 bp, Triticum aestivum
cctgatatttctaaacgaccacacactcctattggagatgatgtggaatgc

SEQ ID NO: 449001 - DNA, 327 bp, Triticum aestivum
cgtacgcgtttgcggacgcgtggggtgatgaacgcaggcgagctcgggctgggcgcgctcggcgcgctcctgcaggccgccgtcccggcgctggagtccttcgcggggcccgacggcgcgctgggccccgacgagctcgccagggtgctggggctcatgggcaccgccagcgccgaggactgcgcggagatcatcgcgtgcatggacggggacggcgacggcgccgtcagcgtcgaggagttcaagctcatggctgacctgctctaggctcgagctacgtacgtagtattgagctagctagagggcgtgcatatatgcagttatgta

SEQ ID NO: 449002 - DNA, 221 bp, Triticum aestivum
gcgcttatctttttcacaaaaccaatcctgctctgccccccgatccccaagagcatcacctgcaagcaatggacgtttcgggcaccggagctggcgccaagggcaagaagggcgcggccgggcgcaaggccggcggccccaggaagaagtcggtgacgcggtccgtcaaggccgggctccagttccccgtcggccgcatcgggcgctacctcaagaagggc

SEQ ID NO: 449003 - DNA, 141 bp, Triticum aestivum
cctcgtctttaaaaaaaaaaaaaaaaaaaaaaaaaaaaaaaaaaaaaaaaaaaaaaaaaaaaaaaaaaaaaaaaaaaaaaaaaaaaaaaaaaaaaaaaaaaaaaaaaaaaaaaaaaaaaaaaaaaaaaaaaaaaagggggg

SEQ ID NO: 449004 - DNA, 175 bp, Triticum aestivum
ggtctgcgttattacttcgtgaaaaaaaaaaaaaaaaaaaaaaaaaaaaaaaaaaaaaaaaaaaaaaaaaaaaaaaaaaaaaaaaaaaaaaaaaaaaaaaaaaaaaaaaaaaaaaaaaaaaaaaaaaaaaaaaaaaaaaaaaaaaaaaaaaaaaaaaaaaaaagggggggggccc

SEQ ID NO: 449005 - DNA, 138 bp, Triticum aestivum
cttagtttgatcatatcagtagaggaagtagcagcagtagcatcggattctaataaccgagtgagtctgtatcgtggtgtcgaagatggtagtaattagtttgattaacctgtctaatggatgtaccatttgcgaaaa

SEQ ID NO: 449006 - DNA, 382 bp, Triticum aestivum
ggtcatttttttggggttcacatgccaggacaataccagaatggatgttacaatcagctggcgtatactgcaggccaaggatcacaccagaactggcgtggggcgcaatacacacccggccatcaggcgaggtattataggaatggggtgactacaaggtacgagcctgttgctggaggactccagaatggaccggcacgggcacgggactcgcggtcgcaaggctcctcaagccgtacggaatggcgaggaagcagccaacatcagacctgaccagaactgttagtcgcagcaaagatagcaatttgctgtttccattggctgacaaaatgtatcgatttcgatttcatgatgtatgtcatccttcatactttagcttgtc

SEQ ID NO: 449007 - DNA, 142 bp, Triticum aestivum
cgtttgcgccaccgacgagcgcttcgacgacgactacatcgaggccatgatcgccgccgccgacgccgacctggacggcttcgtgcagtaccacgagttcgagggcctccttggccgcgcagctaaggcggtggcggacagc

SEQ ID NO: 449008 - DNA, 246 bp, Triticum aestivum
ggtgctggcccggctcgttgctcttggacgccgttttctttctggcggcggcggccgtgtcggaggccaacatcggcgagttcgacgagtactggcagcggcgccagctggaggccagagcccgcgcggaggccacctaccatcccaaccccatcgaggtcgccaacagcttgaaccgcgccgtccacaggaccgttcgggaggagagcggctcgaggaggaagttgctgggactgcacaagaagt

SEQ ID NO: 449009 - DNA, 95 bp, Triticum aestivum
gctgaaaaaaaaaaaaaaaaaaaaaaagaaaaaaaaaaaaaaaaaaaaacaaaaaaaaaaaaaaaaaaaaaaaaaaaaaaaaaaaaaacggggcg

SEQ ID NO: 449010 - DNA, 422 bp, Triticum aestivum
gttgtaacacctggatagtaaatctgaagatctcgctcacagtatttagatgatcaagatctctttattgataatttcagctgccacaatttggacattgtgatgatgctgaaagatggttcttccctgtcaagtgcgtatgggtgcaatacctgtcactgatctctgaaagcaacggtgatgtagagcgggtttgtctacatatgtgttgaaatgtgcatcctttctcagattcatatattaacaaagaatgtctgtcaataccatctggtaaagattgctactccctctgatccatattacttgtgatgacttctcattatggctctgaaaagaaggattagtatgcgccatctggggcttgctctgcagcttttcatcctggacagaaattgtggatggatgattagtatgcaccatct

SEQ ID NO: 449011 - DNA, 276 bp, Triticum aestivum
ttttcgattacacacactccacgctcgcccaggaaaaccagcggcaagaagcaagttcagttgaggttggaggtcgagtgggatcggatggcgtcggcgccggtggagttcctgggcgcgcgggagggcggggtcggcggggacgcgctctactgcgccatcatcctgtggctgtccgtcatgtcgtggatcatcttcacctgcgtcggcggcgacgacggcggcaggcgccggaggggccgccgggacaccaaggtcttcgtcggcgccgagcgc

SEQ ID NO: 449012 - DNA, 309 bp, Triticum aestivum
tcggttgaggagagcgggcctgcgtacgtggaccgctaccctgacctggggccgtgcggcgcgcccacccgtacgtggccggggatcggatggacgatcatctggcggtgctggcgcgcggcgaggggtggacggaggagcggcacgcggcgttcctcgacggcgtggagcgctccttcgtgcaggaggtgctcgtgggcgccgccggcgtcagcgaggagcggcgagcgtcgcgcaggctctgccaccgggggccgccgcccgccggcgggcgtggccagctcccgctggatcgccccctccctgaca

SEQ ID NO: 449013 - DNA, 67 bp, Triticum aestivum
gcgactacgcgtgcgcccacgcgtgcgaccacgcgtgcggccacgcgtgcgcccacgcgtccggcga

SEQ ID NO: 449014 - DNA, 128 bp, Triticum aestivum
gttggttcgaagcctcgcccaagtccaagcgccgcccacgtttgcctcctcgccatggcctcccctgcttcgtctgcttcgcggacagagctccgtcttcgtcaacgtgttctcccgccgtctctgtt

SEQ ID NO: 449015 - DNA, 113 bp, Triticum aestivum
tcgctgcgatctccgtcgtgccatagcctgtgttgtgccggattcggccaccggggccactagatccatggcaagtggatcccgtgcgtgctagattcggctgtgttgcgccc

SEQ ID NO: 449016 - DNA, 109 bp, Triticum aestivum
tcggtcctgtacccggagctggagtgggactgccggctgtcgttggtgaagagcatcaacgtgagcgggcacaagtacggtctcgtgtacgccgggatcgggtggtgca

SEQ ID NO: 449017 - DNA, 315 bp, Triticum aestivum
tttcgtctttcctcccctctcccgccaggaggttcctgatgcaagaataggttcctgttttcaagaagctccatcccctcccatatcagggcaatcagggtatacaccatttgccagtcggagctcacggactgctgcacgcgcaatggatttggaattcccttctttatcaagcagtaataacagaactgctgcgtcaacagagcagggggtacgaaaggtagctgagaacactcatgcatttgggcttcgacaacaaagcaacggaattgtgaatacacaccattctgctcagcattggtcccttaaaaatac

SEQ ID NO: 449018 - DNA, 129 bp, Triticum aestivum
tcgttctcgccacaacctctctctctcctgtgctccactctacagaacagaacaaacagtaggaggagcgctctccttcggccgcgcgcgtctgcgtccgttccgcaatggaggcgtgactcgcgagcg

SEQ ID NO: 449019 - DNA, 231 bp, Triticum aestivum
ctcacgtgtccgcggacgcgtggctaggttttccaactgccctgctaccgccgccgccacctcccctccccccaccacaccctcagccatggcggtcgcggagccggtgcccgggggcgacgtgaagctcttcaaccgctggaccttcgaggatgttcaggtgaccgacatctcgctgaacgactacctcgcggtgacgtctatgaagtactacacttttctgccgcactt

SEQ ID NO: 449020 - DNA, 185 bp, Triticum aestivum
ttagatagaagagccagtggcagccctctgctcgcgcctccagaaggctattgaaatgctccggtcgcaagcaacaccttcagaggcagcctctgcacttcaaacactcttcaaaattatcaagaatgtgatagagaatccaaacgatattcggtatagaagactgcgtaagaccaatcctcatt

SEQ ID NO: 449021 - DNA, 305 bp, Triticum aestivum
ttttgatattcttgtcatatgtatatgactcatattgttgaaatctcacctctaaatcgagtttagtgctctttttttggaaatacaggtacttctgaattcctgcaatttctgtactaattttgtattttgtgaggagccacagatgtttacaaatactagaatgatgcatgataggtcgcacacaaactcttgaccaggtgcctctcacatattctcatgtttgtactatattcttcttaaactgttaacacaatgagcatgtacttggttcatccaagaacacaatgagcatgttcttggtt

SEQ ID NO: 449022 - DNA, 179 bp, Triticum aestivum
tcgtttacgcttcccacccttctcttctccatcacgactcacgagcgccggcggcggctggtagagaggcgagccgagaggtgcggctacgagcggaagaggcgaggagatcgagcgagcgatggggcggaggatcctcaacgacgcgctgcgcacgatggtgaacgcggagcggtggg

SEQ ID NO: 449023 - DNA, 166 bp, Triticum aestivum
ctcacgcgtccgcacactttggagcttgatagtgagtgtgctccagcgagtgacgccgccacagcaaactctctcggcatacaaaactagtaccagtagtaaacaacagagcagagaaagaatataagttctttgaagggccggagaggtaactgtaggggaaatg

SEQ ID NO: 449024 - DNA, 92 bp, Triticum aestivum
tttcgtcgaaggccgaagaggagaaaggttccatgtgaacggtttttgcacatgggtaagccgatcctaagggacggggtaaccccggcaga

SEQ ID NO: 449025 - DNA, 120 bp, Triticum aestivum
ttaaagtctgtaaaactacctaaatgggcaggtttatgacagtagaggacacaaaaaaacatactatgacactggcattgagaccaactgttagagacatatgtacatgtgcccattcaa

SEQ ID NO: 449026 - DNA, 299 bp, Triticum aestivum
taatctcaacaggtttttgtttccacgtcatcgaacacaccatccatccgtcccaatcgtgcacatttccttgcccttttgtccgtccctgagctctcttggattttagcctttgagccttccatggccgcacttcactagccgcccctcgggtattaagatttgtaaaaatcggcgagatctgggtacccgtccgtcttattcatcctgctatagcgtaagtatacttggcttgcacttgtgcttcctgcccggtctgcattacgtttcgtctgttggcagtccttttgttcgtgtct

SEQ ID NO: 449027 - DNA, 184 bp, Triticum aestivum
tttacctttctgaattagctgttaacagtatgggaatgaacatggggccaccagttgtgagaagagacgaatttcagctcaggaaaccagatgggaggagacatgaaatggatcgattaaacggaagggaccgggaccgggatcgggatcgggagcgtgaacattcccgcgagagggaaaggga

SEQ ID NO: 449028 - DNA, 127 bp, Triticum aestivum
ttcactgtccggtgaactatttgcagtttcgaactcctgacattggaggctgcttagcttgagttcttcggtgttaaagatgttcctagacatagttaccgctgtctggttgtctgttgttgtgtgt

SEQ ID NO: 449029 - DNA, 251 bp, Triticum aestivum
tcgcttttgccccctgaccaagccggcgtcgccgccatcttcggtcaccccgcctgtccgccctgtccctccccggcctaggcgacgccgacccataccggaacaggaggaccgacaccgccgtaaagcctccgagccagctgcctccccgtcggccacgctgcaaccagagcaagatcccgcccctggtcgcatctcagaatggcgaccctgaggaacctgaagatcaagacgttgacgtgcaagaggat

SEQ ID NO: 449030 - DNA, 153 bp, Triticum aestivum
ctgaaaccccacgcagacacagctccgctccgggctcacgcacctcaccccggccacctcctcccacccaccgccgccggcggagccatggaggtcggcggcgaggagttcgcggtcggcgtggtgatctcggcgaagaccacccttggggag

SEQ ID NO: 449031 - DNA, 88 bp, Triticum aestivum
tatgaggtgatttgggcatggaaattcctgtagagaagatcttttatgcacagaaggtgatgattttcaagtgcaacatttagggcat

SEQ ID NO: 449032 - DNA, 160 bp, Triticum aestivum
ttttcttgatcccggtcgtatttatacaggcccattcaaaatccacgccgcaaaatattatccacaaatccatccggggttaggctgctgctctgcttcactgctctcccgtggtgacttccggtctcggctctcgcgtggtaggtatgggggcgggaga

SEQ ID NO: 449033 - DNA, 362 bp, Triticum aestivum
tggaaaagaaaaactaaaatcttagtctcccccagcacgcgtctttcaaaatttagactgactgggtctttcaaaatctagatacagctagcaagcgtatgcgcggtcagtccagacgaccaccagatctggatctcttcattcccctttgggctttggtcaacgcttttgcttggtgagcatcgtcgaccggctgcaggttgctcatggtctagctacctagaagacgagcagcagcagcaggccttggcgagtctccgtgtccccttccctcctttccccagcaagtcaagggaggaagaagggaaggaaggaagttaggagaagctgctagcggccgaagccttatcgctttgctgaca

SEQ ID NO: 449034 - DNA, 183 bp, Triticum aestivum
gtagtctctattttctaaggaaggttgcttgataaacatatccagcgactcaaaaaatcttgaaaaatctggtcaacatattgccaaatttcttgatgcactgccaagtgccccatccctgggaagtgacccatggctctctcgactgccttctgtttatgaagccattgttatccctacaca

SEQ ID NO: 449035 - DNA, 199 bp, Triticum aestivum
tttcgatatgcctctgacgtttgcctccccctcgtcggccacgaccttcggttcgatctgctccttgtgctcgtcctgaggattgtctggttgtgagggctaggtgctacatctctgccttttgcgtttgcgcgagtttggtgtctgtgtctgtgttcgatcaccaggttcgatccagagcgatttggcctgttggagg

SEQ ID NO: 449036 - DNA, 215 bp, Triticum aestivum
ttctctacccatctcagccaaaaaaaagctagcacagatccacacaccatggcagccatggccaccaccgcttccagcctcctcaagacctccttctccggcgttcgcctcccggcggcggcccgcaccccgtcctgcgtcgccaccccgcgcgccggcgccatctgcaactccatcttctcctccaccccttcctacgacctcaacgccttcaa

SEQ ID NO: 449037 - DNA, 112 bp, Triticum aestivum
ttaaatttaaaaaaaaaaaaaaaaaaaaaaaaaaaaaagaaaaaaaaaaaaaaaccacaaagaaaaaaaaaaaggaaaaaaaaaaaaaaaaaaaaaaaaaaaaaaggggggg

SEQ ID NO: 449038 - DNA, 156 bp, Triticum aestivum
tttagttggcgctggccatgcaggcgcacccggacagggtcgccgtcgccgtcttcgcctccgccgccatgccggccgccgggaagcccctcaagttcgtctccgaacagtttgcgcaagaaaggggcccgggtttcttcatggacagcgtgatcg

SEQ ID NO: 449039 - DNA, 120 bp, Triticum aestivum
ttactttcacaccacgcggccgacgcccaatccgcgaccacgaagcgcaacccgccgagatggcctccgaggcggcgaaggaggcggagcccgacaaggggatcctacagaggaggaggg

SEQ ID NO: 449040 - DNA, 198 bp, Triticum aestivum
tcgctggcctccatgacaagcgcgccaccagcgagtcccggagatccaagcgccctgagcggtccaggccggaggcgaaggtggcggagcctccggcacgccgggccaagcgcgccgagggccatgttcctctgcgcaagcgcgagtctgcgagggtcgggcgaccaccccaccccctggactcggagggtgtgactg

SEQ ID NO: 449041 - DNA, 182 bp, Triticum aestivum
tcgctagagcatgggcggagagctggtcccgtgctcatccgccggcgagggccagttcgccttccagggcttcgcggcggcgaaccttacgctggatggtctcgccgacgtcatgcccaacggactgctcgcgctcaccaacttcactctccagacaaaaggccatgccttcaaccccaccc

SEQ ID NO: 449042 - DNA, 156 bp, Triticum aestivum
tttcgttatcgacccccacgatttatggccgcgtccctaccctgctatgctgccccgtcccttgtctcccccaagcacacaccggcaccgcagtaagccaccaacgcgccaagagaaacactcgagggagagagggagagcacgcgtgcgcgcgcc

SEQ ID NO: 449043 - DNA, 286 bp, Triticum aestivum
gtacctcttctgttctcacctcgcagcgccgcaccacggaatcactccggccggcgagcaccaccggcatccaggcggcggctaacggcaagcggcgaacgtaggcagtttcatgatgggtactgaggactctaaagatatgctgaagaatgcggactggaaaacagtgagtggtccagtgattactgagtcaagccagccaattgttaagaagcgtcttccaaagaaaatcagacaagtccccgagtgttactttctgccccggcgatctctaccttctgcattg

SEQ ID NO: 449044 - DNA, 201 bp, Triticum aestivum
gtcatcttgtaccagcgccttatgcggaatgggggccattctacctatcaaacagctagcaggcgaggggacccgttcccacctagagccgatgcgcgactccgtacagggcggtggcgctgcagcagcaccagcgtctggtctcctcctccggcggcctggcggcgacgggggcccacaggtgcggcgagcacgacggga

SEQ ID NO: 449045 - DNA, 110 bp, Triticum aestivum
tttcgtcgcagtacgtacattcgatacatagatccagtgccggtgatctatcaaaccgggacgcacatacggtgacagtgcttcagagacatattatcagaaatggagcc

SEQ ID NO: 449046 - DNA, 247 bp, Triticum aestivum
tcgcttggatcttagagggctgcgcagttaccgaaggctgtaaatgcttcacctgctatcagcataacatgtaatcttcagctgctcttccttagtagcgtatttctattattctctggggtcatcaacttcggccatggttaggtatgcagaaaactagatagatgttggatctggctccatcctgttttatttgcagctaacctgacgatgtaagtgcgtttgatactcgctctgatacatctgc

SEQ ID NO: 449047 - DNA, 365 bp, Triticum aestivum
tttcgtacccgccaccggagtccccttcttcgggagggggcaatcaacacccaccttactcccactcccacctaccatcccccgctcttctacacatcgaggacgaaacggtggtgagggagccgggggactagctgctaggcggaggaggagatggagcgagggctcgtcgcattgctgggtctggggctggcgcttcttctgctggcgccctcccgacgtctcgcctcggccgctccggtggaggacggcctcctcatgaatggtgatttcgagacagcaccacctggcggtttcgtcaaatctgcttcagtttccgagggcgcagcgaccccaagctggatgatcaatggaacagttgagct

SEQ ID NO: 449048 - DNA, 256 bp, Triticum aestivum
caggatctcgctggtcgtggagctcgccttggagcgcacttcggtgttttttgcgtacgtacgaggtacgcgcttgacacggtcgctacacccgacgagcacggtgtacgtcgtctcttccaccggtgacaggcgccgggcgcgagacactgagcgccagacgtgagcgagcagggactggagggacgagagggtggctgtggaggtcgccgagccgacgccggcgctggccacctcggcgttcgctctggacttc

SEQ ID NO: 449049 - DNA, 364 bp, Triticum aestivum
tttacgtgttcgcccacgcgtccgggcagctgctccttctgcctctgccgtttccgtcaggcagaggactgccgcggcagcatcgccactgctccaggatcagcagcaagaaaagcatgaagctgctgatccggtgccgccgccgccgccgcgatcgacgctgtaccaggcgctgacgtcgacggcgagcctggccaacctgctccccacaggtacggtgctggctttccagctgctcgcgccgaccttcaccaaccacggcgcctgcgacgccaccacggcgctgctcacgcggatcctcctcgccgtcctcgcgctctcctgcctcctcgccttcttcaccgactccctcaatggccccgac

SEQ ID NO: 449050 - DNA, 90 bp, Triticum aestivum
ttctcatgcgtccgcccacgcgtccgcggacgcgtgggctacagcaaaagggaattctggctggagaagagcaccggcatggattgcatg

SEQ ID NO: 449051 - DNA, 222 bp, Triticum aestivum
aacaaaagcatataacagtctccgatcgagagggatccagagggcatcaacagctagcatggagagtggtggtggcaagaggagggcatcggatgtggtggccattgccattacaatgctgctgcttctgcagctgatggcagctccgcggacggtcatggccgcccgcaccctgcacgtggaggacatgaataccttccctgtcctgcgcttaaacaccat

SEQ ID NO: 449052 - DNA, 221 bp, Triticum aestivum
tcttggcgcccaagaccggctgccaccccaacaagtcctccccgcggctggtggaccccaagcccgagcctggcacgccggtggagtgccagcccgagcaagggcctgaagcgccggagcaagagcaggaggaggaacatgagcagaagcctgtcatcggtctggccgaccccgcggcgatcacgacggtgaccgcggcggccgatgaggaggaggagagc

SEQ ID NO: 449053 - DNA, 64 bp, Triticum aestivum
ttttcttggagagcttgagccttgagctccacgataaccttagggatccagccagcattggacg

SEQ ID NO: 449054 - DNA, 152 bp, Triticum aestivum
ttgtgctagctcacagctcacgagtactacgtacatgtatacgtgttgatcggggcgaagttagcgtatacaagtggcgagcggtacctagaggcaggggagagggaagctagagcagtggtcgtggccatgggtgcccaggagatcaagta

SEQ ID NO: 449055 - DNA, 136 bp, Triticum aestivum
ttaccaaaccccgctccaaaatccccaaatcccctctcttccgaagctactcagccatgtcggggcgcggtaagggcggcaaggggctcggcaagggcggcgccaagcgccaccgcaaggtcctgcgcgacaacat

SEQ ID NO: 449056 - DNA, 85 bp, Triticum aestivum
tttctttctagacaggcttcgtttcctccggcgacggcggaacgagcgagagagtcctcggcgcggccgacaaccggttgtggga

SEQ ID NO: 449057 - DNA, 215 bp, Triticum aestivum
tttcgtttgagacattcacctaagccggagtcaagtgcagtgattgctgggtgtagcatatctgcttaccactacctatcatccgtgacatttgggacccttgtattccctatggttttatatatgtgcttggtgtcaataattgattgatttggaacggtgcaaactgtatgccagaaagcacgcctggctattattattgtggatcgcatgat

SEQ ID NO: 449058 - DNA, 216 bp, Triticum aestivum
ttgggaagaacccggcaggctcatctctttttttctcgaaaagactactgtgattatcgcacctattaagtaaccatgacgtgcagtgtggggagttatctccgtgtaaatacgcagtgcgatgagaaccgcatatggatagttcttgttatggaccactatttggtgtatgtatactgttgtgtttgtgtatgagctcaagaaagaactgttgaa

SEQ ID NO: 449059 - DNA, 123 bp, Triticum aestivum
cccgtccttctcaattcgatctcttccaccaagccacttgagtacgcgacagaagccagtgaatcagtgagcgacaggcagagagctcggcctcgaccaagaagaagaagaagaagaaagaag

SEQ ID NO: 449060 - DNA, 380 bp, Triticum aestivum
ttagtgatgccgtagtggaagcgctccctatggatgctcttgttcatctcgacactgaagcatgttcatatctacaaggtcgagtcatggtccgtgtggaagactaccatccagagcaacctgaagtctctcttcatattacctggcagccaacaccccaaagcaatgggaaggagcaattgacagaatggaagagaacccctcctggtgctttgggaagcactaccggagcgtcaaacagctggaaattgtcggggcgtgcgaggacgagttcggggtgcccaacgacctgcatcttcctgatctgcaccttctcccgcacaacctcagacggctgaaaattagttgtcctaatctgctgaatgatgaaaaccccatgc

SEQ ID NO: 449061 - DNA, 137 bp, Triticum aestivum
tcttacgcgtgggttgtaataaaacaaaccttgtgttgtatcaatggtctgtgtgtgatgatgtaataaaagggcagcctcttccgctcgacgaacatgcggtgattgacctagcgttatcaagttgcttgcagttt

SEQ ID NO: 449062 - DNA, 89 bp, Triticum aestivum
gcgtccttcccagttttatgtgaaactgtgtccctggttatctgcccgattgccgttcttgtgatggaatgaaacatgtaccggtttgg

SEQ ID NO: 449063 - DNA, 351 bp, Triticum aestivum
gttcctcagcctctaaggtttgctcatacggaagcagttgagccaagatttgccattctgttgcagagaaggggctgggatgcatcatactgcaaaaggggtgggttacagtgtacaaatatcggggaagaggctgtaaatctatttgacatgttcaaagatctatcggttttaaatgtgaaggcaacctctctgaacctcttaaatgatgaccctgaaatgctagggtatctcgagcaaattggcgatgtagctcaagagggtaatgttctcatctcaccaatggaaattcaggcatacaagttagacctacagccaccatcatcaccagaagaatagtatgtcgaaact

SEQ ID NO: 449064 - DNA, 170 bp, Triticum aestivum
tttgttagcagataaagttcaccttcagatgtgccggacaactgatccccggggccagttgtctcaacatgttgcattagttgtgacatcttgttttttgtttcggtttacactcaattgcgtcaaagcttcaaagaaaatcaactgacttgataagattttccggtctc

SEQ ID NO: 449065 - DNA, 154 bp, Triticum aestivum
gtagtaagctgtagttgatctgggttccatgccttctatgattagtagtaatatctgtagtagcagtagctggttgttcaatggttgcttcagtgttctgaatttctgatgggcaaacactgtgtttgccgagatatatgaatccagagttaac

SEQ ID NO: 449066 - DNA, 147 bp, Triticum aestivum
ttctttacgcgtccgcggacgcgtgggtcttccgcctccctcccggcgccccaccgtgagcgcgagcgaggagaccgtcctagggttcgcgcctccccgccggtccccgcccgccgatcctctccccgccgccgcccccgaggatcc

SEQ ID NO: 449067 - DNA, 63 bp, Triticum aestivum
tttgttacgcgtccgaccacgcgtccgctctagggggaatgttcccacactggctctacttac

SEQ ID NO: 449068 - DNA, 57 bp, Triticum aestivum
ttttgtaatgtaagaatgaaagatttacctaaggaagtacttttaaatcgctccttc

SEQ ID NO: 449069 - DNA, 441 bp, Triticum aestivum
tttctaattactgactgcatcaggcgaccaatctgtaaagatatggagcatggtgaataagaaatgccttggtgtgctgtcagggcacactagaagtgtgaagtcactgacatgccattcttcaaatcctgatcttattatttctggttcaagagacggttcttttgcactttgggatctaagatgtgacccccaaaccccaaatggtcatggtgaagcatgactcatgtgtcgaattgttgatggaggcttcaggccgtccttctcaaggagatgaggctggccattaaggatctggggtgaaggtcatgttatctcttctcgtggctctactgcccactgcttccactgctgatattttgagctctttgatcagagcatgcaccatgggaagatgaaattggagcaaaccaagccaacataatctatgtccctttagga

SEQ ID NO: 449070 - DNA, 215 bp, Triticum aestivum
tttctcgtgggcggacgcgtgggcggacgcgtgggatctatgtattactgctggggctttagtccttcgcttccagcggcggctcaagacggctgagagagtgatgggaaccgtgaagcggttcaacttcaccaaggggttcggattcatcttcgcggaggacggcagccaggacctcttcgtccaccaggactccatcaaggccgacggctacc

SEQ ID NO: 449071 - DNA, 406 bp, Triticum aestivum
ttgtgtttctagctaaccagaggtgtggtttacggacaccaaccaacatgctagaggagcgggatacaaacattttgtgaaggtttcagattttagtttaattttctacgtgtattaggtcttttggttttccaatgagatgtgcagtggtgattgcggcacacacttagaaggtgttccaacataagctggaattctgtcatacggacgacaaacttgtataccagggatgctgtattatcttgcccatttatggcaacattagcttgcgtgtttttcctcttttccttttttaaccatttcatttgttactagaggatttggtcggctttatactagtaaaaactatttgggggtgccaatgccatcctggtccccattaataaagtcacccaaagtacatact

SEQ ID NO: 449072 - DNA, 415 bp, Triticum aestivum
ttttttagcccttccaagttatgatgatccatacatcaaagttccaaatgcactgaccaaagtaatgacatgtgggtctgtaaatcaaagttgtgattattgtaacattctatttcattatacaatgaggcatggtgaatcaactgagcttgcaaaacatcgaacgagcaatcagcaagcctgagttaagtttgacatcctcggctagaacagtacgactcaacaatttgagcgatggatctgcagtgcctgcaatagaagatccatccttgcgtgccatcctgtgttcggaccaaatacatgtcattttcttaatgtgcttttatttatgtttctggaatgtgggggcttcttgcgccatgccttccaaacggcgatagggttcatgtgatgctattacccggtaatttgtctt

SEQ ID NO: 449073 - DNA, 85 bp, Triticum aestivum
gaaagagactctcctatttcctatgaaattccaagggatttaggagctctgagtcaggaccaggatcaaagattctcctagcacc

SEQ ID NO: 449074 - DNA, 218 bp, Triticum aestivum
tgtctgttggatgcttgcttctaagttgaattctaagcgacagggaagagatttggtgcagctgctatgtgctccatattggaaattgggattggcttgttgattaatagtagtactacttcttagaggagattacaagaactccttaccgtcatgtttgtatgttcagatgattggtgtaccttttcgcattaaaaaagatgtttgttgtaatgcct

SEQ ID NO: 449075 - DNA, 474 bp, Triticum aestivum
  unsure (1)..(474): unsure at all n locations
agctggtacccctgcaggtacacccacgcgtccgccatttcctgcctgaattcacattatctaagttagttgccaggtcaagcttcagacaggataggcacttggacaggaacatggatggggacaaccctgattttcagttccttcaactttatttgttcttcctctaaagatgtatgctaaaattaaaattcctttttctccaagatagagacacataaattgccataagagaagtccagagaccggcaacttttgtttgcactgttcaacttcagacaggattctcaacggagactgcgccaatttttctttcctaaggcttcgttcgtttaatcccacccccgccaggatcgagggggtatttgtcccgaaccccgntgggttttaccctcgcaggggtttggatccccgcttagcttatatgcatattcggttaaacccggacgggtttattttccatccaaaaccccc

SEQ ID NO: 449076 - DNA, 402 bp, Triticum aestivum
ttagaggagtttggcctagtgccggggattgttttcatgccgatgaggattttgctgccggcgcgcccgagccgcgttcggtggttcctggcgatactcttgttggtggtggcggttggctcgctgctgttggaaggaggtgcgctggaatcctcggaaataagctcgatgtcttccctggtatgcaggaatccccttcgcttgctctcgccgacggcagtcaccatggtggtggtcaagtcgacggggactggtatgaagacggctcttgcgaccggttccagagcaaatcatcgatggtgcttgagctttggcgctcccggcggacagccggcttgcagcgccgccgcgccaccgaatcctctggccaaagggggggcaaacctcttcctcctagccttg

SEQ ID NO: 449077 - DNA, 269 bp, Triticum aestivum
tccccttgcgcttgctggcaccagcttgttcatgattggccgcgggatctacaacatgtctaatgggatcgggaaaaaggagtgaatttctgtgggttttgctagtatctcagtaagcggcatggaagcaatactgcccaagctatgatgtcatcttcgtttgcaaataatattgtcagagaaagactcgggtccatttcatgttctcttttgctggtatttgcggatgcttgctaaacttgcaatgatgatgctataacatcagcatc

SEQ ID NO: 449078 - DNA, 65 bp, Triticum aestivum
ccttggggcaccttgggttccctcaaaccctctgattttatgttgttttggatcattaagggtta

SEQ ID NO: 449079 - DNA, 184 bp, Triticum aestivum
ggaggagctggcttcgccgggggcggcctgccctccccgcggagggcccgggctggcgttcgccggcgggaaggtgtgggtggtctacaggttctacggggacgcggagctcgacgatgtgcactcctacgacccggccaccggcgagtgggccgtggtcgacaccaccggcgacaagcccacc

SEQ ID NO: 449080 - DNA, 185 bp, Triticum aestivum
gtgtaatacatatcctactagacttgtattgtgacgagcaacagcagtgtggatttgaaaaatgatgatctgttatatttaaaaaaaaaaaaaaaaaaaaaaaaaaaaaaaaaaaaaaaaaaaaaaaaaaaaaaaaaaaaaaaaaaaaaaaaaaaaaacaaaaaaaaaaaaaaaaacatgggggg

SEQ ID NO: 449081 - DNA, 420 bp, Triticum aestivum
cgtcaactctgcccactgctctccctcgttcctgatctctctccccttcccgtccccgcttgctcctcctgctcctgccgatcgctcatggattccaagccccaagccccgccgtcggagggcgcggcgtacccgcgcatgtccccggaggacctcgcgccgccgccgccgccggtcgtggcgcccgcgggctccaacccctacgtgctgtcctcgccctcctccggaccgcccgccaagagcaccaaggagaatctgagggagatgttcggctcggtggggaagaggttcagcgaggccgcgcgcaagaccgagggcatcgccggcgacgtctggcagcacttgaaaactgggcctagcattacggatgctgcaatggggaggatcgctcaggtatccaaggtcatatcggaaggggga

SEQ ID NO: 449082 - DNA, 364 bp, Triticum aestivum
ttttaaacccctcgtcgggacgaccgaccgaccgccgcgccgtcctcccaaaccccgcaagaaaatggcgaccagcgccaccttcctccacctcctcgcccctccgggcctccgccccaagcccatactccggccccgcctccgccgcctcgccctctccgtctccccctcgggccccgacgagatccccgccgacgacccgcccgtgctcccctccatcctcgtcaagaacaccgagcccgaggacgtcgcgcgccgccggagctgggtcgagcacgggtgggcgccctgggaggaggcgatgagccccgaggtggccttcgcgcgccacagcctgaacgagggcgaggaggtgccgctcacc

SEQ ID NO: 449083 - DNA, 199 bp, Triticum aestivum
acctatgagaattggccatgccctttggaagattgcgatcgagagcagctacttccagcaaggtcgtggtgcaacccgctgatacagtggtatggtttgctagaatcaggaattcatttgttttaccctgaacgatgtatgactgtcgcagttctgtcatttgcaaaactataatgaatggacagccctatgttttgca

SEQ ID NO: 449084 - DNA, 129 bp, Triticum aestivum
tatttaaaaagttatcgagatggaagcaagagtatgtgctgtcctcaaactgtttcttgtcgccgtaaatcattgtcacgttgatttgtactgactattttgtacaatggaaataaaattattacatgg

SEQ ID NO: 449085 - DNA, 73 bp, Triticum aestivum
tctaccacgcgtccggctatccgatgtaataagcatttggcacttgtgcttgtttttcaaaccatggatcgtg

SEQ ID NO: 449086 - DNA, 234 bp, Triticum aestivum
tttttggatactcggctctcaagaggcattctggcatttcgtgacgttttgtctccagttggttttatgcgagaactggcggtgagccgcagtatgcatattgccgtagaccttgccttcgctgcttgctacagtagtaaataggcgtatgtatatattgatgatgtttgggtacctgtacgaattgatgcaattcagcaattgttacttttagcagcagcaaccttttcgctt

SEQ ID NO: 449087 - DNA, 225 bp, Triticum aestivum
gtccgcccacgcgtccgcccacgcgtccggctgactgaagcataagttgcttccagcagtgttttgtcctaaggaattatctgttttttgcagtttagacgatactttggattcagttctgctggctgtttagtcaagggtatctttgtacttggtgccatggatgtttttgttatgttattcccccctaaaaaaaaaaaataataaaatataacaaataataag

SEQ ID NO: 449088 - DNA, 230 bp, Triticum aestivum
cacggtgcactgcttaaataattagcacaccgtgcgtgataatcatctccctctccttctcttctcaccattacatacatacatatactaattaatcaacaacgcacacagcaattaacacacatacgaaaacggaggctatgacctatacgtacgtacgtacaaagtgcccgtatatgcgcttgtgtatgcacgtacatatgtacaggctgctggtatatataaggaaa

SEQ ID NO: 449089 - DNA, 258 bp, Triticum aestivum
ttctatgcatccgcagacgcctgggcggcgatgcagatcctattccggtgctgttgcggtgaggcggcgtgcccggagtgggcggtggtggaggtgcagggcgtgctgcagccgcagccctgcttctccggccgcatacagggcctccacatcggccgcctttgctccacctacttcgtcccgtcttccaagggcgggtacaccttcaccgcggggtaccatgagctcgccggctcgaaagtgactctcaagaagccc

SEQ ID NO: 449090 - DNA, 222 bp, Triticum aestivum
tcttccacgcgtccgggaacattggaggatatgacagcatagcgcatgcttgatcattaccttcccagaagagctcaacggtgtatgcttaccaccagaagtcattgccattcatatttcctccctgattgatgtgtaaactcagagctgtaatggagaaatgaacactatgtgagatttcagatttatatgctgtacaagtggccttaccctgctgataaa

SEQ ID NO: 449091 - DNA, 157 bp, Triticum aestivum
tcttcggcatgctgaggctgccggaggaagagcagcacaagggatatctcagagctctgtaccaaattctccgccagatgctgctcccggcatcctgattcgaacttccaacttcacaaacgattctatatgatgccttgtggcgccgattgcctct

SEQ ID NO: 449092 - DNA, 238 bp, Triticum aestivum
tcttccacacgtccgcccacgcgttcgcccacgcgtccgcccacgcgttcgatttttggaaccattcttaattcatgaggccaaacggcctaggccaatagtattaaattgatttttgtagatttaggcgggaaagaacaaaaaattgggaaagagactgtaaatatctcccagtatttatagtacaatactggatgcaaaactaccgggaatgccaaaaattaattcttgagttgta

SEQ ID NO: 449093 - DNA, 309 bp, Triticum aestivum
cgtccgggggaattcggcaattacacgaccacatgttagcccttaaaagagaagaagctcaagtgcaaggaagattcaacaattgatcggtttgaaatgcgaggcgatatctgggcaaggagaaggacatgcctgcgggataactctgcctttcacttgatccagtggaggaggacagcggggcttcggcgagtacaagtgcagcagccacgggaagcctcatcgcagaatgacagcaacacgctccttaaggaactgtatgtcacgatgaagagtctcctcgaagaattgaaagtcaacaccaaggca

SEQ ID NO: 449094 - DNA, 210 bp, Triticum aestivum
tttgtttttgtgtgtattcggtggcgtatgcataatgtatattggcaaggtatacccatacatacagtttgtttgtacatgtgggtacgttttcttttcctttcattaaacgggtttgctatttctcaatagactgagaaataggtatagctcaatcgatgctatagccttcaaaaaaaaaaaaaaaaataaataaaaataaataaaata

SEQ ID NO: 449095 - DNA, 145 bp, Triticum aestivum
tatttaaaaaaaaaaaaaaaaaaaaaaaaaaaaaaaaaaaaaaaaaaaaaaaaaaaaaaaaaaaaaaaaaaaaaaaaaaaaaaaaaaaaaaaaaaaaaaaaaaaaaaaaaaaaaaaaaaaaaaaaggggggggcctttttagggg

SEQ ID NO: 449096 - DNA, 399 bp, Triticum aestivum
tctttcgatcgcctcatggccgtccacatctccggcgagctcgtgcccatcctcaagaaggccggcgccctctggctctgatcggacccttccttcctttccttagtttcctttcatcagaagacggtgccgcggtttaatcctggccgttggatcgaattttacaccgcggccgatttactctaggattttgggtttctttaatggtgtgctaaattttttctcaacaaatatattcatgagaaaaaagaaacagacaggtagcattactgtttttcgtaatttatttcgtctggtcatgagcatgtgaatacggaagaagagcgtgcgcggcattgcagcgtctgtacagtttgtcgtttctatttccgagttaatgagaatcagatgcttcttacg

SEQ ID NO: 449097 - DNA, 316 bp, Triticum aestivum
ttcatcggctcctaccagcaccacgccaggcaagaagaaagccacgacacctcctctactgttccttatccgtgtcccgtagctagccagcaatctgcgcagcaagaaaagaagggaggtacttggatcgcttcttctgtggagatggtggcgcccatggtgatcgcgtccgcggggctcgggatgctggcgggcgtggcgatggcgaaccggacgaccagggacgggctgccggcggcgtccagatgggacgcgcggccacgttgctccacgtgcagcggcaccggccgggaggagtgcctctgcagccgttggt

SEQ ID NO: 449098 - DNA, 71 bp, Triticum aestivum
tctttaaggagcaccgtctttagatggcttgttaccctctcccatcaaggttgaataatatatgctttgtt

SEQ ID NO: 449099 - DNA, 290 bp, Triticum aestivum
tttttatgtcaagtgtccttaggaagatgaggtctgctggtggtggtgctggtgacaagaagaaatagaacttggctagctggtgaattttatccggaagcaaagtcctgtattaccagtccgtacctatagagctatggccattgtgttgacactatctttagcccgtggtttctattttgagaagaccaatctttttaagatttttatacatgagtctggtgcctttgtttgattacttggtactctgctgtttattcagttatgtagcttgtctgggttttgtacct

SEQ ID NO: 449100 - DNA, 164 bp, Triticum aestivum
tttgaccagaccaggtacaaatactctgtcgaactgagaatttcctgagatggatgcatctaggtgacaaactgtaattgatgtagccttgcatctggacaaaattgtattggactctgaattgtcccagcttcatagtgcccctgtgcaaaatgcctgttcac

SEQ ID NO: 449101 - DNA, 424 bp, Triticum aestivum
tcttctgtacaaaccattcagctcaaccaatttgagcagaattatatggaaatgcgcagtctgatgtctagcactgatggaaggaacgggcctccgagcaatgatcaccagtgcccacttggaacctaccctaattgccaagggatgtcccagaatacccaagaagcagctcaagctgttggaggaaactaaggcaaactgagggattatgagtatggaatgaataccctaagtttatattgcttttacttccacgtacagagtcatgtggcatgagatatgtatcatgtcgtcaatgtctctgcgtagtccggccgtagctccctagatgctacacaccatcaagatctcaggaatgtacttatcctatatgctactggtgtactggttgaatttacggactctcatatctgtgtgatacagt

SEQ ID NO: 449102 - DNA, 294 bp, Triticum aestivum
tcgtccacgcgtccgcgcctctcgccccttccgtccccttgccgccggagcgagcaatggacctcgacgacgacatggtgccgtactccccctccggcgactcctcgccgtcgtcctccgacctcgacaccgagtcgacggggtctttcttccctgaccggagcacgacgctggggacgctgatgggcgtgtcgacgttcggcggcgccggtgtccagcggcggctgactcgggcggcgccggggcaggagagcgagaggccgacgcgtgcggcaacggaggagcgagacgggc

SEQ ID NO: 449103 - DNA, 282 bp, Triticum aestivum
tttagagacccaccgacgcccgtacgattggtcctactgcaattacaccacacaacggtgctccgctacgctgcgctcgctctgcccgcaccgtactgttcacaaggggcgtgggcgccggtcgccgacagtgaccggaccgagccgttcgtgcgagcacaggacgcggggaggagatgccggctgatctccggttctcagacgcgtctagctccagcgggaggaggaggcggcgtcatcgatctcggcgggggaaaggcgcgagcttgggcttgcctgact

SEQ ID NO: 449104 - DNA, 53 bp, Triticum aestivum
acctaccacgcgtacgcccacgcgtccgaccacgcgtacggcaactggacctg

SEQ ID NO: 449105 - DNA, 231 bp, Triticum aestivum
tttttccgtggtaatgctgttgccgcagtgctgttaataagacagatatatccaggtttcctgtaaaacgtaagagtatcattcagctgttatgcatggctctagctgatgaagtgttgtccgaggtctctactcgtatgatgtcggagcctgtaaacgcaagaaacaccccttgaaaaacgcatgtgttgtggtattaatactggtttgctaggcttggattctcctgaa

SEQ ID NO: 449106 - DNA, 254 bp, Triticum aestivum
gatctggctgcgagggcgcctgtgaggacgcctctttctcctccatcctgagcatgcggttcaccgtcggtttcgctgcgcaggctggttcatgatatggccacattgttggaggatgaaggtagccattttagttcccatcccctgtgtgtgcttgtacacttcagagcacctcaatttccaggccacatctgctgttcatttgcactcttttaataatagcatatatctctattgacagagttggctagtct

SEQ ID NO: 449107 - DNA, 312 bp, Triticum aestivum
ttttctactatggaagcgagctgcctctagcacagggaattaactttggctagtttggtgctgaaggactgccagtgaaacgtcgtgctgcagcatggggattggggataatgtgttgagatatctggagcgtgcagccatcatcttcaggaaattctctgtgtcgatcattgcacccaaattgcgacgctgctgctgagtacatataataagagatgtgttgatctcatgtatgcattgttcatgccttttggcatgtttagccatctgtgccctggacctagtctattaataaactggaaaaatagcata

SEQ ID NO: 449108 - DNA, 84 bp, Triticum aestivum
tctcgtttgggtgctctggtcctcgtgtaatcatcaattgatatggtaataaaatggtccgtaccgctgccgtggtaccacacc

SEQ ID NO: 449109 - DNA, 223 bp, Triticum aestivum
tcgtgatctgcgccaataatttactggcacaaatcttcttgttccatttctttgacataaaaaaacaaaaacatgtacattaccagtgatgtatttgtgtgtacatgttcagcagttctcctgtgcaaacgcgattgtactgctataacatgcatgtttgggttcggttgtgatagtaataacattgaaaagagcagttttaagatgacaatgcagttgttgc

SEQ ID NO: 449110 - DNA, 58 bp, Triticum aestivum
tttttccggattggattggtttgattcccgcgtgccatcgagtggagacaagaagaag

SEQ ID NO: 449111 - DNA, 58 bp, Triticum aestivum
ttcttccggattggattggtttgattcccgcgtgccatcgagtggagacaagaagaag

SEQ ID NO: 449112 - DNA, 312 bp, Triticum aestivum
tttttcacgcgtccgctcctcaaggcctaggagatggccgccaagtaccgcgccaccggccactctcccaagaaagtcatgggatgcttcggggcctgaagtaaaaacgttcctagttcacaaatggagcaagagtgaatgaagtgttcatccgtggttgcttgcttgcttccttctttctttcatccctcccaagtgtgtagtgtgccttgtgtgtaaagtctgccgtctctgtatatacacattgctcccaggacaggtgctcggttgtgtacatctttgatgcttgacaagcaacattcttatgtgtag

SEQ ID NO: 449113 - DNA, 358 bp, Triticum aestivum
tttttgcggccattggtgccatgctgcgtgcggtctggagaggaacttgatcagaccaggcccgacactcaaggggccgatagggacgactgagatgcagttccagtgtcttggttgcagccattcttctgagatgtttggatttgttaaggaggtgttcaattgctgcgcagagaactggaatgctgagacgctgatgaaagagctagatgttgtcagcaagtccaaaggcatattggcagcaaatcaggcgagccaatctacgattccccttctatctccggccatcagtccacccaaatccttcaatttcaatgccagcacctccattctcgactcacagattgatgcgctcaag

SEQ ID NO: 449114 - DNA, 339 bp, Triticum aestivum
tttttgctaggatgaatttaggaatggttgccatttcatggtacagttgagctgatgttgagtatctgtttatgtgtaacggttcatttcctccttttctttctgcaacatttcgtgaacttgcttatacaaagattcatcacataggcctttagcttgattgttccgccatgagaaccagcatgactttggatatatgtttctgcaggtttcagaatgtatccaagattgcagggaagttaattacaccatctgtggaagatgggttgtggaagatggacattgcccctcaggtaatttcactttgtcctagattaataacagattactaatttattt

SEQ ID NO: 449115 - DNA, 331 bp, Triticum aestivum
ttgtgccggccgagggcccgcgtacggcgcgctggcgtgatcgctcgatccaatcggcggcccgtgcctccctccggcggtcaactcgagcccggctcggccgcaggggcgtggcggtaaaatcgcgctgcgattttgcgattgatgaatcgaaatccatggtggtggtggtgcgcgggtggtggcggtcgattatttttctcttgttctttctggcgtgaaggcgaggggtcggagcgtcggctcggaccggacggtgcgcatttcccacccggcccctcgctgtttctccttatcgcgagacaccccctagcagtgttcctagctctag

SEQ ID NO: 449116 - DNA, 272 bp, Triticum aestivum
ttgtacaacatggcacttcattccaccagtagattaaacatagtagtgtagtagtggtacacaataatgtcaacaatctggtgcaaacttgcagagcaagtgccgctgttgaatctgtaaaggatgcttctgatcaaatccagtttgtcactaggcaaattagatacgaacatgtgattggtcctggaactttgtaggttgttctgcccatggctacgcgcagatattgccgaataaaaatgccaagattgcaagcatgtgttggtttggca

SEQ ID NO: 449117 - DNA, 65 bp, Triticum aestivum
caaacacaagcaaccttgcaaatttatttttagggaaccttaagaacaattttaaccttggatac

SEQ ID NO: 449118 - DNA, 191 bp, Triticum aestivum
tcgtccacgcgtccgcgaaaatgtaaggatgcatggcaaaatagccttgcatgttgttccatcaatttaagatcatataatggtgtgaaaaaaaacaaaaaaaaaaaaaaaaaaaaaaaaaaaaaacaaaaaaaaaaaaaaaaaaaaaaaaaaaaaaaaaaacaaaaaaaaaaaaaaaaaaagggggggcc

SEQ ID NO: 449119 - DNA, 65 bp, Triticum aestivum
ttttttatccgggtcggggacagtgcatggtttacataagtaatcgagtatactcgcttcgtttg

SEQ ID NO: 449120 - DNA, 154 bp, Triticum aestivum
ttttaatatagaagaactctaaattattatgccatggatggaacatgtcattaatctggtctttggttattcggtctgacaaaagaattggatgtaagtgaattttgtatcaggaaggcaaacattacattgcgtgtcgttttcatgatgtaaa

SEQ ID NO: 449121 - DNA, 222 bp, Triticum aestivum
tttcccacgcgtccgcttctctgtgggttgggttcacaggtcttgtgtctttgatatgtcctcgaatggtgcctgtgtctgtcgtcctggtcgtttctatgtttctaccgtagtgtgatgcatcgttatgttcggttgtttttgagaattgctgctgttgtgaacagctttggtgaacttgataaataagtgagccctgaattgtgtctgcagctgcgagtt

SEQ ID NO: 449122 - DNA, 277 bp, Triticum aestivum
ggctcagagaagaagaaactccaagcctgcgtggcgacgatgaagctggttcgaccagattagtacagccagcagtgtgcgatgtcaaccaccatgatgaatctgagctcggcgcggttcgttgcgagttgagacgggatctacaaactgaatctgtctccccgttgaagaccctctctgttaaaagactcacggaagaaacaaaatggtactgctaattaggactccctctgtaaactaatataagatcttttagagtactatcgagaaacatttc

SEQ ID NO: 449123 - DNA, 309 bp, Triticum aestivum
ttctcacgcgtccggtttttgtgggtgtggtgctgcttatcatcttgatatcaggactttgctgcatgatggggatcgataccccgtcaaggtttgaggctccccaggattaaacttggtctgatcttgaagcaaacccgatgtggatggccagtgtttgttaccctgcgcagtggatatagttagcttcctcttcaaaggtgccttgcttgtgtattttactaagccaaacttctgtttagtgatcaattttttgatgtactattgcattcccaaacccacggagatctgagcctttgcaactactac

SEQ ID NO: 449124 - DNA, 216 bp, Triticum aestivum
tcgaaaaaaaaaaaaaaaaaaaaaaaaaaaaaagaaaaaaaaaaaaaaaaaaaaaaaaaaaaaaaaaaaaaaaaaaaaaaaaaaaaaaacaacaagaaaaaaaaaaaaaaaaaaaaaaaaaaaaaaaagggggggccgttttattggaccaacccttattaccccggcgttgcagcgaaatattttttttttggtggccccaaaataaatttaatt

SEQ ID NO: 449125 - DNA, 151 bp, Triticum aestivum
tatcggtgcaatgaaaacattgacggggtgcgttgctaatggagctcctgtttgccgccactaagttgatcaatatggtaactttgttgaaccttgtatttctaatgttaacatgttgaagcactctgtaaataacatgttattgttcgat

SEQ ID NO: 449126 - DNA, 243 bp, Triticum aestivum
tgatcgccggccggcggctggttgatttggtggcttaattactttggttaatctgttctctgcactgtgtgcgtgacgtggagtgctctgccatttcgtacctttttttgcttcctattccacattacattactacttgtgttgatatatgtactggtgtgttagtttactcagggctgtgagattgtacgagcagcaatgttatgtgtttttcctgcagattaactaatacatttgtcttgt

SEQ ID NO: 449127 - DNA, 155 bp, Triticum aestivum
tctcacgcgtccgcccacgcgtccggtttgcattggcttgaattggttgctttggaggcttaggttagctgcagactgtacataaggaaattgtttatgttggttcttttctccagttctttacatgagatccatgtcggcaacagtggatacag

SEQ ID NO: 449128 - DNA, 269 bp, Triticum aestivum
  unsure (1)..(269): unsure at all n locations
ttgtgccgcgaaccaaacgcacccttggttgcagttgcaaagagctagcacatcacgtatgtatgtatgtacctgcagaactctctgaatcaccccgagtgagagaacctatgttggactgagccgttttattcagagttgctgccagtgctggttttcagagtgtcgnaaaaaaaaaaaaaaaaaaaaacaaaaaaaccaaaaaaaaaaaaaaaaaaaaaaaaaaagaaaaacaaaaactacaagaaaaaaaaaaaaaaggggggggc

SEQ ID NO: 449129 - DNA, 172 bp, Triticum aestivum
tctgtacttacgagactactacgttttctgtaatagggttgtaccaggttttttgccccatagcttgtattcaggtatacaagcagtgggttttcctggtgaacatcgaacccacaacctacctactattttcaataaaaatcatataagaatttgccgtggggcaacttgc

SEQ ID NO: 449130 - DNA, 409 bp, Triticum aestivum
tttcgtgtatgatggtattctccgcagcatcctgctgagcccgacgccgcagaacttgttgcgggctgatgtcaatcttcttgattaccgtggcaagcaaaacagagatgcagctgcggttcgccagaggttttgtgaattactccaaggcttcatccacgtcaagcagatcaaattgaatatccgtcttcggaaaggtttcaatgttaccagccacggcgttcttcttccagtcctactcaacatcgagtgcattgagcttggtctcgtctactcaccaagttgcaaggaagcggcggcaatgttgattgcggagctacttacctgctgtcctaagctccgtgatcttcggttcaaccttatcaccagttttgaagaggatggtcgccgctctgagggatctggaaat

SEQ ID NO: 449131 - DNA, 222 bp, Triticum aestivum
tgccacgcgtgcggaatcgtttgagtgggcgttttctttgccctgctctccctcaagccaacccacaaaggtgggaataatggtcggccaaggcgaccgacgtgggtcactcggggggccgcccggtggattacgatgaagatgaatcgtcaagatactgttccatcttgggtgcggatattgcagtatttcggacgataatgctaatgaagctgcttatgt

SEQ ID NO: 449132 - DNA, 274 bp, Triticum aestivum
tttctggtggaccttgacaagatgcttgagcgtgcgaaactcgccaatgagcagcgctactttgacgaagacgacgattagctattcaaatttgtttggcggctaccagggtttttgcagtttgctttggtcagaaaaactggctccgcatttcatctgcggtagtgtaataaactgatgtttcacagtacttgggttgtacttgtacgggagacctttttatggtacttgaatctgattgattaccttctctgaataaaaaaaaaacataaaa

SEQ ID NO: 449133 - DNA, 256 bp, Triticum aestivum
ttttcaccccttgtattaacaccatcgctgctcttcactcggagcacaagatcacacgcataaaatggtgtaggaaacacaggggcacaagaactcgagcaccagccactccagctgcctgctctgctcattggtttggtagggagagatgaaggcgatgtccgggacgaagctgctcctcgtccgccagccgtcgagcaagtacggtaacggggcggtgtcgccggcgacggccacatccatctcctggcgccgc

SEQ ID NO: 449134 - DNA, 304 bp, Triticum aestivum
tagtatcttgggtgtactgtatggcaagtgatccggtcaagatggtcctcttatgttcttagtggcaccgcctcccctatgtggttttgcacgtgtacttgctgactgcagatggatggctggcttgcatgtagtattgagctatgtaccctgctggtgccatgcatgctagttctttttgttctttgtttctgtcgtcccgtatgttgtttcagcttgtaatttgtttgaatctaggagagacttccttagtgacatgtatcctatgaatttggcgtggcgccttggttgtcaatgattctac

SEQ ID NO: 449135 - DNA, 314 bp, Triticum aestivum
gcgtccggccacgcgtccgcccacgcgtcctcccacgcgtccgcccacgcgtccggttgaagtgtttgatgaggaaggtctccatattctcatgggcatggcttttcttacctatctggagctaaaggtatcagagacagccggcgtcatgactgtaagtagcaacgggttcaagctgctagaggtgttccactacagaattaatgaagaccgtttgaatgaaggcgaagcaccagggatagaatttgcagcaggtgctatgccagcactccggcggctccatcttttctggaacggaaattttgctagtgatg

SEQ ID NO: 449136 - DNA, 286 bp, Triticum aestivum
ttgtaagaagaagagagggtgctcaacaacttctgcgactccgccatgtttgctgctcttttggttatctaatcctgcatagcgtacgttgccgtccgaggctgcatgtggtttgtcttgagcttcgtactactgtctactagtgcttgtaactttcttttcttatcccggtctgctcactgcatgctagcgagtgatgggtgtgtatgtgtgtactttgtgtacgctccatgtgtaaattctcgtgtgtgtggtgtggtgttctcaatgtttaaccacctactat

SEQ ID NO: 449137 - DNA, 305 bp, Triticum aestivum
tggggaacgcggaaagggatctcgccggaacgctccatggagctcgccgcaaccggcgctgctgccctccggcgatcgttggcgtcggggtatccggtggttccgagggagaggagaaggcggatgccggccagggtgtcctgcgtcggccgcggaggcagaggcgtaggcgggggattcgccgacgaggcgcacctcaggtactacgaggcgccgccgcggaaggcggtggaggcggctgccagggaccttaccaagctccaggccatgggccttgtcgcctgcgacccggccaaggagaagat

SEQ ID NO: 449138 - DNA, 359 bp, Triticum aestivum
tggtcatctcctccgccaccaccaccaccacgtgcccggcctcgctcctcgccaggcaggccgtccgccccggcgccgccgtcgtcgcgctgacctccgcgaacggcggcggcgacgacgcccccgtccggcccgtcaaggtcgacgccggcgccgcgtccggcgggaagccgtgaagctgaccggccggaacaagggtgcatccgtgcatgcattatctatgttattaggatataatcacatgtatcgctcctgtatactgcttcccttccaattttcttgctctgaagatcagactcaccatgcacacgtacgtgcatgtgcatgatcgagcgagctcccatgagaaggcttatctc

SEQ ID NO: 449139 - DNA, 214 bp, Triticum aestivum
tgctctgccagtgcttctactggctctcctggatgtgttttcaactctttcaatggttagagctgacgtcttccttgtaggccttcgggcagtgctacttgtagtggtttggatcaagagtttacctgtgttagtgtactgcagttatctgttgttctgtctagtctttcgagtttcagtctgtcagagttagtgggtgttggtcgtctgtcag

SEQ ID NO: 449140 - DNA, 211 bp, Triticum aestivum
  unsure (1)..(211): unsure at all n locations
cctacgcttccgcaagtctgtgtagtaaacagtctcttgatatttccctgaaaattcattgccgccaagcgtnaaaaaaaaaaaaaaaaaaaaaaaaaaaaaaaaaaaaaaaaaaaaaaaaaaaaaaaaaaaaaaaaaaaaaaaaaaaaaaaaaaaaaaaaaaaaaaaaaaaaaaaaaaaaaatgggagaaaaaaaaaaaaaaaagggggg

SEQ ID NO: 449141 - DNA, 288 bp, Triticum aestivum
gttgttttgtatcgtacaaatcctttgccatgagagctgaagcgtgagttaacctcatctttttgatccagctcagcagtagttttctgtctgtgggcaagttgagaatgcggcctagtgtgttcttgtgaagatgtttctgcctgtcgctggtaattatagaaaaatagtgtgtacagcagtaaatgcttcgtagccgtgttaatcctttctgtagcggacgactctagactctagtgtaaggtgatacttagatgtgtgaacacctgacttaatgttctgtgctcc

SEQ ID NO: 449142 - DNA, 306 bp, Triticum aestivum
tcgtttgagcagtcatgcaaactctagactggatagctaccgccggcgcattttcctcttgaggatcaaataagaaatcgtgtaccgaaagcatgggaatttctttcacttgttcataatgttgttaataagtgctcccagacacacatactggactggatgacgtctcttgatgcctttgcctaatgcttgtatctcgtcgttactgtcatgagaggctaaactaaagtaaataacaccagtcccagtccagtatatactagtagttcgatgtgctacttgtcttattcagtgtttgttctccca

SEQ ID NO: 449143 - DNA, 223 bp, Triticum aestivum
  unsure (1)..(223): unsure at all n locations
cttactgtgtgggcggaatttgagttccaataaaccaattacaccttcgtcgttcacttgaaagattgtattattagaaacttcatacaaggcctggctgtttgtattaccgtcgctttttgcggaacttgtgctataattgatttaagaagtgcataggctaaaacataaggagcacanantaaaaaaaaaaaaaaaaaaaaaaaaaaaaaaaaaaaaaaca

SEQ ID NO: 449144 - DNA, 289 bp, Triticum aestivum
gttacctgtcagaacggcggcagcggtggcggcacgggaggtggcagcggtaatgctggtgcatacccttaagttatgtctatttatgtgatagatctgaagatggagcccagaatttcatgtgttttctttctttctgtttgcaccttgtggccccgctagtttgcggcgtttaagttcttgtatgctttctcatgtatactagtatggatgaatcaatcaagggccccatcaacttgtgttgttcaaaagctgaaagaggagcttgatgacacgaggcctaagcttg

SEQ ID NO: 449145 - DNA, 292 bp, Triticum aestivum
cttcttttctcattttgataacaagtatttccggacggaggggtacttccttcgtcccacaatgtaagacgcttttgcaacctattttgggacggagggagtattcgcttgctactactacttggtctgtatactgtagtagtgcttctgccctggatgtgatgtataaactgcctttgtggccagataagataagtctttgaattctcatcggacaaagttatcgtccggtgcatgtggtggagaaggacaggtttggaataaaagtttctacagtttcttcctcggtaaa

SEQ ID NO: 449146 - DNA, 185 bp, Triticum aestivum
tcggtcaatggaagctcctgattgcactgtgtcttatacttgttcagccctaatgatgctctggaccgaggggctcttcctcagtagcaatgtacccggccctgtattcttatcttctgttgcagtttgtttctctttcttgagagctgttacttggccaaaaaaaaaaaaaaaatacaatagat

SEQ ID NO: 449147 - DNA, 223 bp, Triticum aestivum
ttcgatatatctcaagcaaagatgatctagttttaagggcgacactggactcaattactagaattggataaaattgcaatccggtgatgaaaaggaacatgaaattaccggcaattgcacaaatatcaccttgtccacttattgtttgtaagagaatgcagctgtgccgcttgccgtctataattttgtcaaaaaaaaaaaaaaaaaaaaaaaatattacttt

SEQ ID NO: 449148 - DNA, 52 bp, Triticum aestivum
tcgtttacgttttcgcccacgcgtccggccacgcgtacgaccacgcgtgcgc

SEQ ID NO: 449149 - DNA, 251 bp, Triticum aestivum
tttcgttcacgcgtccggaagacaatgcggttggctctcaaatcgacaggaaaaaagagggctgcacctgatgacgacgacgacgacgagattgagatggaccctgaaggccgtatgatcattcgcgaagaacgggaatggcgtaaaaagaaacccgtcgtctcgcatgaggaggaggctgatgacaagacctctgtcagaagccagtcggtgaagaggaggaaggtggccagcactggctggtcctacac

SEQ ID NO: 449150 - DNA, 127 bp, Triticum aestivum
cttacgcgtccgcggacgcgtgggccatcccagaagacaggactggaagtgtttagacggtcctgccccaatgtaaaatattcaagtttgtaaatgcttatataatgcggacatggagcatgtgatc

SEQ ID NO: 449151 - DNA, 78 bp, Triticum aestivum
tctccacgcgtccggagctttctacctattggatttattttagttgtatggtcctgatgtgctctaggaaccactctt

SEQ ID NO: 449152 - DNA, 224 bp, Triticum aestivum
ttgtccacgcgtccggccacgcgtccggggctcacagctagctagatccaccagccatggccggcagcaaggcactgctgctactcctgtgcgcggcggtggtgctgctgaccccggcctccgagggggaggacggtctgaccaagttcaagctgtattggcacgacgtgctggcggggacgagcccgaccgcgatccggattgcgcaggcggagtgcagcaac

SEQ ID NO: 449153 - DNA, 249 bp, Triticum aestivum
tgtcgcccacgcgtccgggaaaggcccccaagcttggctgtggtggcgggaagcgctagatggagtcccttacgatcaatgtgaaattttgaaccagttgcatgatgtcttaccccgtatcttttaggaagttttttgctcaaaccagctgttgctgtcggtatgcagcatctgggtgcacaaaccagtggtggatcagtgtgaaagattgttttatgtttctcatcaatgtgagattgttctatgctt

SEQ ID NO: 449154 - DNA, 228 bp, Triticum aestivum
ttacatgtactcatctacactgtgcaatctatgtatgatacaggttacagacactgggagatgacctcccaccaattgaccaccacgtttattagatcaaaggagtcaaaactacaaaacacaggatgatgttgatgagtacatttacatgtaataatccttatgtttgcacaaagtgacagttcatgtaccttttgacagcaagttcaaggtgttgccattcttcgg

SEQ ID NO: 449155 - DNA, 121 bp, Triticum aestivum
tgagatatatgagttgtgacaataattgatgtaaaatggtttgtcagttcaaactgcattagtccagattgcagcaattcgaactaccattcactgttggaagtcttgaaaacatgttgtt

SEQ ID NO: 449156 - DNA, 100 bp, Triticum aestivum
tcgtctgcaagttgtccttcaccatggtttgtatgtgccaccagtatggcagtatggtttatccaggttattgtgcactaaataaatgtactttaagctt

SEQ ID NO: 449157 - DNA, 261 bp, Triticum aestivum
actgcgtcgtccacgcgtccgcccacgcgtccgaaacggatcgtctctcgattgttcgctcccgagcaccgacccaaccctagatctcgcagcagcaagcgcgaagccgacgccatggccaagccctggggcggcgacggcgcctgggcgctcgacgctgagcgcgaggactaggagcgcgagcacgccgtggactttcacgcgcccgacccgtccgacgacgcgggcggcgccgtcagctttcccagccttaaggaggcc

SEQ ID NO: 449158 - DNA, 253 bp, Triticum aestivum
tttctgttatctacggtatatgatacatcgagggttcaagtgtgtttgccccgcgtgtttgagggctggcttgatttgtgcgtgatgggtcgtgtgaagaatatgcgtgcgtgcacgcatgtgcgtctcaatgtttcgttcggccaatgagccgtggaagtaacaacattgtttctttcaccgtaagtttgtaagtgtataaggcctccccgtgcatggaaatatacgtggaatatacatacctgttattact

SEQ ID NO: 449159 - DNA, 369 bp, Triticum aestivum
ttgttcacgcgtccggttagtgctgaagctatgttgactgctttaaatggtgtggcctcttcaagtaaaaatgattcaaaggatgatgagtgggcatcctcagatgatgatgcagatgccatggaacaggatggtgactcagaagctgacagatcatcagtgagtttcaaagagcatcgccgcaatcactacgatgaattccgcaaggtcaaggaactgatgcgcactggatccctggttgaagacgaggcccgtgcgaatgagcgagctgcaaacaacgtcgaggacaaaaccgcaggagagaaggcaacaggtgacaagagtgaatcgtcagcatcacctcaagtatgagccgcaaagtgaattctg

SEQ ID NO: 449160 - DNA, 58 bp, Triticum aestivum
ctgctcacgcgtccgaaaaaaaaaaaaaaaaagaaaaatttaaaaaaaaatgggggtc

SEQ ID NO: 449161 - DNA, 400 bp, Triticum aestivum
ttctggccgtttgcccccactggcggtctaggtgcgtctgcccacgcggccgtggtgttgtcgacccgcgctttcacccgcgccggtggatgatgctgcccgagggccacggcctgtatcctggccacggcaggctacatgggtacatccgctttatcaacctctccactggcgccatcgtccgttgcctgctcccgcttttcagagatcactgcatcctcgactcggtcgatggtctcctcctcttgcaacgggacgaagacaccgccatccgcctcctccacccattcactggagacattgcagagctgccgccacttgcgaccctcatgcgtcttcctggagccaagaaaaatgttgaaatggtctggacgtatcttagaaacatcggtgccacgtc

SEQ ID NO: 449162 - DNA, 321 bp, Triticum aestivum
  unsure (1)..(321): unsure at all n locations
ctggcttcccttgggctggacatacacggcgtcacgttggcaggtggccaaccgatgatgcgaggtgggtgtggtgttgtgatgtgtgtggtgaccacnatggtggctagcagagctgggtcgcggcttgtccttctgatgtcgaaggtccggtgcgccaatggatgtgcctatgctgatttctggctgtgacagataagtcggagctgcgggcggcagggccactgcggcaatgatgactccatgagggcggttttcagtggacggtgctctcccgatgttgcgttggactaggtcgatgcgaattttgcaactttctcc

SEQ ID NO: 449163 - DNA, 225 bp, Triticum aestivum
tttgtcgtacctcccgggcggcgtgtgcgtggggggcatggttaggtcggtgtggttcgagcaggctgtggcttgtaaggtgctgggcgactacaactcgccgcactgcctcgacttcatgttcgtcaactggtactttggctagtagtttgtagatactagttcacaaactgttctgcaaagaaccttggtgtgccggcgctaggtcgcttttgccttgtgttt

SEQ ID NO: 449164 - DNA, 360 bp, Triticum aestivum
tttttgaaaatcattcagaattttagcatatgggcaacaaggccctctgctctgctgaaccccatcctcctttccagaaaccaaccagaaaatggcgttcagaggctactgccatcctcacccttcttcctccatggccaccaccggcccgagattcggcgcgaggaggccggcggcagccctgagcttcagagcctctgcagcccatggatgcaaccagccatcctcgcacctctcctttgctgcaccaaccagcaacaaggtgttcgaggaccaggtgagagggatcgtgtgctacagggacgacaagggagagctcgtctgcgagggctacgacgagggcccgaggctcggaatgcg

SEQ ID NO: 449165 - DNA, 143 bp, Triticum aestivum
cccacgcgtccgcggacgcgtggggggaaaaataaaaaaaaaaaagggaaaaaaaaaaaaaaaaaaaaaaaaaaaaaaaaaaaaaaaaaaaaaaaaaaaaaaaaaaaaaaaaaaaaaaaaaaaaaaaaaaaaaaaaggggggg

SEQ ID NO: 449166 - DNA, 107 bp, Triticum aestivum
tggtaaagatggagaaaatgttgcagagagggcagttctgatccagaatggagcatcgacatgtcttatctcatttcatcaacttaacacacgtacatgcgtctact

SEQ ID NO: 449167 - DNA, 376 bp, Triticum aestivum
tttcgggtgaacctagccgatgttggggtcgtcggcggcctcagtgatgggttcgacgacaaggctcaaccctcatggaacatgggtgcagggggatctggccaaccctcatggaacatgggtgcaggggggtctggcctaggaatgtctggaattcctccgtctacgcaaggcggtggcatcgagagcttggcaaactacaacaagtatcagtttggtggcttcaaatgagctccataggagaacatttctagcacctggtgtttgttgcttttttgctggactgcgcctttgggctcttattatctttttattggttttgtcatctcgctgttgttgactgtcacattgcttataattgctgcagtattcaagt

SEQ ID NO: 449168 - DNA, 159 bp, Triticum aestivum
tcttttgcatccgatcgacagcacaggacaacgggggcaacttataaccagaggacatacctgctggataacaacaggagcaaccagcaggctcctccaccaccgccagggtacccaacggcggatgcggagcaaggccaagcggtacggatgaagggg

SEQ ID NO: 449169 - DNA, 130 bp, Triticum aestivum
tgttttcaatcaatcaataatactaatagggggtgcttgttgatggtggtgggaatagtccgctaatttgatctggtgctgaactgaacccagtgtggcttacactgttgactgatgagggttgagagag

SEQ ID NO: 449170 - DNA, 338 bp, Triticum aestivum
tcttacccctcctcgtcacatcgggcgcctagggttttcccacccgccggccggcgatgcccgcctcctccgtctccggcagcaccggccccggcggcgtgtcgcccgacgccatcatcgagtggctgcaggacgagatgggctacccctccgcgccgcccgcgcccgagcagctgcgcaagatctgccgcggcaacatgctcccggtctggtccttcctcctccgccgggtccgctccgagcgcacggtcgccacggcgcgccggaacatcctcgtccacggcgtcgcggccaggcgggcgcgggaggggggcgtcggggcgggagggggcgacgcg

SEQ ID NO: 449171 - DNA, 255 bp, Triticum aestivum
tcttcacgcgtccgcgcccccgtccccgaccggggaagctattggtgctgtattgccattagcatcatacatgacaccgtctacctgaccgcctaagctattggtgctgcattgccattagcatcatacaggacaccgtctacctgactcttcttgttgttgttacaataaacaaacccatgcgtgcagcgtgttaaggtgaggtctggcactttgtttgctcgatgatctatacattattttggtgtttgcaaa

SEQ ID NO: 449172 - DNA, 376 bp, Triticum aestivum
ttgttggtatccaagtgcaaagcgtgcagtactgaggactggtggggattttcccttcctgtcacgtccagatgaggtcaatttgtaccttcagctacacttaaggcgagttggagtagaaccaagaccagatctagtccagggtttcacacgggatggtagctccggctcaaacgaccacgaagatggaaacagttttgatgaccatcccacagatgatggggaccgtagttcatgcagcgatggccgtaagacagagcactctgaatcagggccacctaattcagatggactggtaccaacaagcatagtgctaggcatggtcagatcagctctccatgtttccctatgtgcgtgctcatgatgcatcattact

SEQ ID NO: 449173 - DNA, 251 bp, Triticum aestivum
aatgtctacaaggagacgcaccactggtcgagactcgtgaccaccgcgtcgctgctacccatggaggacctcctcgctgggagcggcgcgacctgatacacgcggtcgagcgacagccgcgccatgctgctgtcgcgcacgcggcctacttccgaccggatctcgagccctccggtgagaatagacttgacggcgtcggagatggaagcggcgccactcgatgcgcgcggagggcgaccgccgccgtgctt

SEQ ID NO: 449174 - DNA, 405 bp, Triticum aestivum
ttttcacgcgtccggggaggtgcaaaacctgggcttcctaatgccgcacagaccccaactgcaggtgctcccatgaatcaaggcaccccaatggctcaaggtactcccatgaatcacagcaccccaatggcccaaggtactcccgtggctcaaggtgcccccatggctcaagcccctcctgctccggcacaaagcaccgatgaggtaaagccatcggaggctacaacagctcctgacaatgtggaggctacagcagctaccagcaatgccgaagctactgcagcccctggtactgcggaagctacagaagctccggttccagacccaacaagtagcagtcctgacgctgctgatgctccagcttcagctcctgctccagcagctgattccagtggcactgatgca

SEQ ID NO: 449175 - DNA, 113 bp, Triticum aestivum
ttctcacgcgtccgaaaaaaaaaaaaaaaaaaagaaaaaaaaaaaaaaaaaaaaaaaaaaaaaaaaaaaaaaaaaaaaaaaaaaaaaaaaaaaaaaaaaaggggggggcgttt

SEQ ID NO: 449176 - DNA, 318 bp, Triticum aestivum
taccacgcgtgcgcccacgcgtccgacaacccggacgatgtcgatgtggtcgtcggcgcctcctccgccacgggattgaatgggctggtggacaggcgcgcgactctacgccctcctcggtcgagggttggatggagccctcggctgcgtgggaacaaccatcggcagacgcgaccccgacgactgtgctcgtggtgctcgctctgatcccacccgtgcttccacaggtgtaccagctcctctctgtatattctttgattttttttctgttcagttcatctttcatggttaattctttgcaacaatttgataagatgc

SEQ ID NO: 449177 - DNA, 393 bp, Triticum aestivum
ttctggatgggaaaatgaaagccattgttgaggggcggttacaacaggcttcgtgaatttttctcttccaaaaatcttgacgttgagttgaccggcgatgctgagaaccctatgatcgtcatcggtcaggctatcagtgttgcggcatacgtcaagaactttgacctcatcttccttgataagtcacatcaggggactccaaaaaaaatcttcaagctcacgcatgaagtatctggcactagagaagaagtgctgggtgtgatgcacgagtcggttcacgtaggccttttccggatccaggaaaaaaagtcaaaactctttcttgcaggctacaatttcaaagaccctgaaaacaggaaaggacgttttccggtcttcgcgcgggagatgagc

SEQ ID NO: 449178 - DNA, 310 bp, Triticum aestivum
tgttcgttcatctcattcccccacctccccctcccggtatggttgacagcgaccgcgggaagctcccggctcgcctcctccctccctccctcccctgtctcctctcccggctccatccatccaccgggaggagagggcagcaggcggaggaggccacacctacctacctatctatctatctgtctgtctaagccgccggcatggactcggagcactggatctcgcgcctggccgtcgtcaagcgcttttacgccgcgcagctcggacacgccggcgcagatcgggcgggcatggacgagctggacatgga

SEQ ID NO: 449179 - DNA, 115 bp, Triticum aestivum
atcgtgatcagtttcggttgccaacatagcatagattctgtgaacctgtggaaggtttggctagacttgtttgtcaaatgtgcggaccattttagtatatttctatatcagcact

SEQ ID NO: 449180 - DNA, 246 bp, Triticum aestivum
ttctcacgcgtccgcccacgcgtccggtatgggagttgtatcagctgagctatgtgtagttggtgtagcgactgagaagtgtgtctagttgcatccgctaggctatgtgtagttggtttagcaactgagttaatgttagttccaagagttgttcatggtcctttgtaagatatccaaaagtctgtgtctgtattggtcgatcatagtgttataattcgtgaaataaaatatatcagtggttgcttt

SEQ ID NO: 449181 - DNA, 106 bp, Triticum aestivum
tctcgtacgcgtgggttttttttttagaggaggcgccatgtattagagttgctgtaagctacttattgttgatgtcatgcgggaaaggttgaattgggattcattc

SEQ ID NO: 449182 - DNA, 214 bp, Triticum aestivum
tttttttttcttctgtatcattgtggcctcttcaggcttcgtgttgacttcagtcttcgtctgtacgtttgggtgcgtgctatgccttgtgatccgatgagatgctgtattaatcccagtttaaccttcggtgcatctggtgtgttgtgccaatctatatcccactacgattgattgttttgagcattattagttgggaatacatgcggcgtgt

SEQ ID NO: 449183 - DNA, 135 bp, Triticum aestivum
tctgttatttctggttctagtagagatttacagggtggcctatgtgcgcggtttggtttgtacatttgctgcacactactgtagctcgttggtctgatcgctcttgttaggtatatatgcacatattttaggact

SEQ ID NO: 449184 - DNA, 253 bp, Triticum aestivum
gagcaattctgtgcaaacagcccctacagaggatgctaatgggagcggccatgttactacgagcggcgcattagcaagcacaaacggaatgccacagatgaacatttgagctctgcgttgcagtgcgccatcgatcatgttctgaatggagcaccatgtgtttaccagttgtggcaggataaggtcctggacgtgtgtaattcagaacagacttcccgttgcttttccggaggtgcatcagaccgttcaagct

SEQ ID NO: 449185 - DNA, 61 bp, Triticum aestivum
ttcttaaaaaaaaaaaaaaaaaaaaaaaaaagggggaattttaaaaaaaaaaaccgaaaag

SEQ ID NO: 449186 - DNA, 335 bp, Triticum aestivum
tttgtttatggaatgcagggccttgtctgcctgggggggattttagattaaacatgctgtacagtgataaagcggggactcttagacctggcatccaagaagataatggaatgtctgcacttccaacacccaatgaaatgtttgctcttccagcacccgaacaatatcgtggctccatttcctcgaggatgaagaggcgccctttgaatggttcatcccagggcagtccccgtacatgatttcctcgggaatttaggtagaactgtgttcccggattgaagaaaaggaagaggatgaatcgctagctcactgcagctattcagaaaactatgtct

SEQ ID NO: 449187 - DNA, 189 bp, Triticum aestivum
tgagtggcggctccgggtcgtgtggtggaggggcaactttggttgtttgggcgacaggggagtcggctcgttaggtacgtagcctcggggctggtgtgtgtcgatgtatcggttttcggccaattttccttataaattggtcaattctcttcttcttaatgcaaaggcagagctcctgctgttttctcg

SEQ ID NO: 449188 - DNA, 214 bp, Triticum aestivum
tcgtcctcggcgcgcgcgcgccctacgcccgcccggcgcttttcgccgcggccatcatggactcggaggagaagtcggcgtcggcgtcggcgtcgtcctcctcgtggctcgggctggccagcaccgacggcgccttcgccctctgatctgcacggacggacggagcaagacggcttgcccgcttcaagagatcgtttgtagagcacttgaagcg

SEQ ID NO: 449189 - DNA, 195 bp, Triticum aestivum
acgctaggtacgatgtgtaatgtgacgatgataaaagattttcgatggatcaaaaaaaaaaaaaaaaaaaaaaaaaaaaaaaaaaaaaaaaaaaaaaaaaaaaaaaaaaaaaaaaaaaaaaaaaaaaaaaaaaaaaaaaaaaaaaaaaaaaaaaaaaaaaaaaaaaaaaaaaaggggggggccgtttaaaagaac

SEQ ID NO: 449190 - DNA, 186 bp, Triticum aestivum
agtcggaaggcgctaaggtgttggagacgtggatgggctatttgaacgttttatcggtaaagtgctatactgtgattggtgtaatattatatggtcatattgtgattggaggaatgtaataaactagattggtacatcggtgatttggatgatatatgaatatatttaaaatgtgttctctgattg

SEQ ID NO: 449191 - DNA, 241 bp, Triticum aestivum
  unsure (1)..(241): unsure at all n locations
tgnttgttcatcggctcccttccaggcttctcagggggtttgtttttacgtctggccaaactgctgatctctttgttggcttagcgaaaggcgaagtcgtactcagctccttgctaaatggccatggctgctcgtgcgagcgctttgaattagtacggtgctttgacgatctgtttgaagcatgaatggtactgtattttgctagattgcggtgatgggtgctttggattgaacttgtttt

SEQ ID NO: 449192 - DNA, 338 bp, Triticum aestivum
tctttcacgcgtccgcccacgcgtccggtgaaatacaaactattttcattttgactgccccagaagaactccttcgccgttacctctttccttagtgttgtcttactatatttcctgcaaagattgggtgcaaccctgagttcatatgatgtatggctacgaggcacgagtactcgtagcttctaaggtcccctgctgccaccgtagtccagttccatattctttcgagtgtgataatgtcaattttgatttcattggctgtgtaatcagttgtaaatattagttatctcggctctgttgcacattgtctctttccccgccttggactcctgatgtgt

SEQ ID NO: 449193 - DNA, 236 bp, Triticum aestivum
tctttttcgcgtgggctgaaatctcctctctggttttttacatgaaactaacttgtgacttcaacgccactaccaatggaagtactccgtatgaaatttgtccatcctttctgtggttccatgttttcatggattataaacatgtttgttcaattggaaacagggtatagtgtttgggaataacaatttctgcagtgtacgaattagtgttctttctaaatgacactctcatgcaa

SEQ ID NO: 449194 - DNA, 268 bp, Triticum aestivum
tgttttcgccgccgccgcagctatgggcgcgtacaagttcgtgtcggagctatgcaggaggaagcagtcggacgtgatgaggttcgtgcagcgcagggctctcggctcccaggccatagcagcttggcaagcctattgaggagaccaaggaagatgtgtacccgaggacccacaagtcgcctgccaagatacgcataattttgaaatctttcaataaccagaagaacaatctgaaggagcttgcgccatacatgcataaggtcgggct

SEQ ID NO: 449195 - DNA, 229 bp, Triticum aestivum
gttgcattaagctggggtggaaggaaggcctgtgaatgaagtgttggattacagttccaattgctcgtcttaatttttgaataaatatatagttgtctaaaaagctcagtaaaatcttccgaatcgagaactcatcatttgtgtagcccctctgtatatttaaaactcatggatggtcccgtggttgaaatgtcagatatgtgtttattatttagcctgccttgtagaa

SEQ ID NO: 449196 - DNA, 77 bp, Triticum aestivum
gaagaagatggcggtcgaggggaccgacaactgcatcgacatcattcttgccatcatcctgccgccgctcggcgtct

SEQ ID NO: 449197 - DNA, 198 bp, Triticum aestivum
gcggccatggccgcaggccactgctaccttcgaccgccacagcctggcgccgcgcgggcgcgagcgccgcagtaaccgacgagcgagatgggttcgccgaccgtaagaaagagcgccgcgtcagccgctggccgcctccactccaagaggagccggggctgcacaggagccgcgctaggaagccccacgcagaggccg

SEQ ID NO: 449198 - DNA, 188 bp, Triticum aestivum
aggaccagagaagagtacaccaccgggccggaacctgctgccgtgaaccgtcgtggcggcacggaaggagcgccgctacggattggggaggagcgccgttgcaggcctagggagagcgccgtccggaccaagctccctgctccaccgatcaaggactcttgattccggccgcctgcagcacatcaggc

SEQ ID NO: 449199 - DNA, 311 bp, Triticum aestivum
ttcttattcctggcactctgtcttcaagcttatcgcctttatcctatctccggcctctcttcggcatggggaacttcgcgtcctgcacgctggccaggatccccggggcggccaagggcgccagggtcgtgctccccgacggcgggctcaggctggtcaggcccccggcgacggcggcggagctcatgctcgaggcgccgggccatttcctgaccgacgcgcgcgcgctgcaggccgggcgccggatcgaggcgctcgcggctgacgacgacctcgagctcgggggcgtctacgccgccttccccatgaag

SEQ ID NO: 449200 - DNA, 116 bp, Triticum aestivum
ttttcaatgttagcttcctagctcatgtgtgtcagtttttcagttagttgcgactgcttgcttgtgcatcacccctcaatcaacaagtgaagtaaataaaagtggtggtttatgtg

SEQ ID NO: 449201 - DNA, 310 bp, Triticum aestivum
ttcccacgcgtccgccggccatccttcaaaccgtcagctctcaggccaccggagcttcgctcgccgaccgactcgactcggccggcgatggggaggacgctggacgtgctgctgggccgaaccaccaagcagacggcgcgcctcaagtccctcctgcacctcgccacgaagcggatcgccgtggtgcgggcgcaccgggaggtgcggtgcgcgcaggcgcggggggacgtggagcagctgctgcggcagggccacccggaccgcgccctgctccgcgccgagcaggtcatccgggagcgggacacgctcg

SEQ ID NO: 449202 - DNA, 69 bp, Triticum aestivum
tgtctgctcggtgatcagcaaaaaaaaaaaaaaaaaaaaaaaaaaaaaaaaaaaaaaaatactaatagg

SEQ ID NO: 449203 - DNA, 323 bp, Triticum aestivum
ttgtaagaaagagggagccgccgtgtagtcggcggccgtgggcgtaggcgaggtcgttagcggtggcggcggcagcggcggcggtgaccagttagggtcggcggccaaaggagccggcgaaggagcagagtcgggcgtgggcggcactgctgaaaaagcggggtccggtgggagccaggcagtccagggcgccggtcaaggtgctggtagctcttactccggcggcggcggcggccgtcgttgagcctgccgtgtaccgcgggatcatcgccgccgtgactgaggaatgatacccaaccatgccactgcgaataaaatcaagc

SEQ ID NO: 449204 - DNA, 364 bp, Triticum aestivum
tgtcacgcgtccgcccacgcgtccggagcgcggcgttcttcatcggcgacgacgcgccgttcggcatggcggcgccggagctgggcaggttcggcccgggcttcgacctgtcagcggcggactacgccggcgccatgcagcagccgccgccgcagaagcacgttggacccaactggttctactgaacaaccaaggaggaaccacccatgattagcatgtagctctaggccattagaattcataaggcttccattctcgatcagtccatggcgtcttgcaacctgtaaggatcggtcaaattcaggccatgttgagaacactggaattttttcacaaatcacaccgaaatcgaagttcttctttc

SEQ ID NO: 449205 - DNA, 283 bp, Triticum aestivum
tttattcaaagcttacaatccccatcatctgtcaccaaaccgatagcaaagcaaccccatacatagaagcttacaagcgaagcatgcgaccgagctaatggacatggcaccgcctgcatccgccgtctccttctccccccgcccatcgacgggaacgactttccggccccgcgccgcttccgcctctggctccgtgggcgccgggcgggtccgcgcggcggtagcccccgagggaggcaagtggtgggcgccactgctcggctggtctgggcgggcggactac

SEQ ID NO: 449206 - DNA, 307 bp, Triticum aestivum
tttgaaggcgcatggctcgagcatctacatggctcttgagagcggaagcagggtcgggatgaaccgcaaagctgagcgcttcagctttgcggtgcctctcctgacctcccaggtggtcgcctgaggtacgcaagaatcggcaagtcacaaaacggcaatggtgaactccggcaggagtccaccccccttttatccttttctctccattcagttgtatcaggtggaagtcgaataatcggaagtctctgtgtgtgatgaatcaatggatgcttcaagtccatgttttgtttttctcttcctttattat

SEQ ID NO: 449207 - DNA, 233 bp, Triticum aestivum
attggcaggggcagaagagcgcggagatgctgatgcaggtgctgctggtggcgtcggcggtggcggcgttcctggtcgggtacgcgatggccgacttccagctgatgctgctcgtctacgccggcggggttgtcctcacggcgctcgtcaccgtccccaactggccgttctttaaccggcacccgctcaagtggctcgacgccgccgaggctgatcgccacccccgcccgcag

SEQ ID NO: 449208 - DNA, 297 bp, Triticum aestivum
ttctcaaacctgcctcctgatgtgactgttgaggaactgcaagagctttttggaggaattggccaggttggaaggatcaagcaaaaacgtggctacaaagaccagtggccctggaacataaaaatctacactgatgattctgggaaagccaaaggagatgcttgccttgcttatgaagatccttctgctgctcattcagctggtggattctacaacgattatgacatgagaggccgtaaaattagtgttgtgatggctgagaaatcagcacctagagctcctacatctggtcatgga

SEQ ID NO: 449209 - DNA, 93 bp, Triticum aestivum
gtttattttggattgaaaatttacttgtccgaccagcttcttggtacttgtaagttagtacaactcttggtcaatgtggatgaggaaactgac

SEQ ID NO: 449210 - DNA, 365 bp, Triticum aestivum
tttctagggtttgcctctgtcttccggcggccggcggtgaacggattcagacgatgtcgaagaagaacagcctctccaagcggaagaagcagcacgagttcgacctccagagggagaagaaggccaaggaggagcaggccaagaagctgcaggccaagaagtccaagatgaagattgatggcagcgataagaagaagaagggcagcagcttcaaggtgggcaagaagaaggtgaagacaaagctctccgcactgggaaaagccaaggccgcgcaagccatggagctcgacaactgactgactcccacggcctaaactgttgcaccaatgccggtcattttttatgtaatcgtcggagaaatgaag

SEQ ID NO: 449211 - DNA, 152 bp, Triticum aestivum
tgttggcatagtggcttatagcagtttgaatgaaaaatgtaggcttttattccaaaaaaaagtatgtaggttacatggctcacacctgccaagcggaagccccggtggaagggttactggaaacctattgaagatggggaggcaaaccacat

SEQ ID NO: 449212 - DNA, 340 bp, Triticum aestivum
gtccagggtctttgcgggcgcgttgggcgccgacgggctggtctacgccggcggcgccctgcacacggccggcggcggcggcggcggcgccgcgggcatcgccgtgcagtccggcaccttgaccctgaacggcaacgtcacgggcggcgcggggggcccctctccgtaccagcccggcggcggcggcgatggcgtggtgctcgggcatggcgacatcatcgtcaatgcgcggatctccggcggacaaggcggctcgcgccgttactacggtaccccgagatcggccagcggagacgggggcagcggcatatcgatcggctcgggcaccgtcatcaacaac

SEQ ID NO: 449213 - DNA, 333 bp, Triticum aestivum
gtccggtcggctcaccgaaaggtgcgcctggaggaaacaagcgccttatgaactctccaaggagtgttggaagcccaagacgtgggtctgccgagaagaacattcctgggctagaacatgtataccaggcaaggaggaaggctatactgcgggagctgaggaagatgaaggccgcaggcaggtgaagatcccagagaggtatcgtttgaaccatttccgaaccttcagtgcaagtcaagttttagatgctactcaacaagtttgaactctggattgcttctcagccagagaagatgactgacagccgaattgttgtgcctcgtttgtttcaag

SEQ ID NO: 449214 - DNA, 62 bp, Triticum aestivum
tctatcgggtgtgatggacctgaccaattcaatcatgcaagaatttatgctgcgcggtttgc

SEQ ID NO: 449215 - DNA, 129 bp, Triticum aestivum
tttttcggcgtggtggcggcgcggtcgcggctgaagatgaagctgaagcgcgctctgagtatcattcaagaggttgctgagtgaagcatttctctaaaagataaatactagtagtgtttttttttttag

SEQ ID NO: 449216 - DNA, 196 bp, Triticum aestivum
ttttggacgcgtgggaaaatgttgatttctttgattcgatctatgtatgcttccctagaccagttggggacacaaaccttgttcttctttccctatgttccctacgagttctttgtcgaactcataggcaaaggcatcgatcgatggattagttagcttaaaaaaaaagaacaaatacaatagatagaagaacaag

SEQ ID NO: 449217 - DNA, 316 bp, Triticum aestivum
ttcttagaagcaagcaagaaaccttcacagcatccaagcaagcagcagacagtgatcatcatccatggcggcgcaccagcagcaaccgcagtcgcagtcgcagcagcaggcggtggggttcgaggactacctgccggtgatggcggagcggctgggggaggaggggctgatggaggagctggcggcggggttccggctgctcatggacccggcgtcgggcctcatcaccttcgacagcctccgccgcaacgcgccgctgctgggcctcgggggcatgtccgacgacgacctccgcgggatgctcgccgagggcgac

SEQ ID NO: 449218 - DNA, 225 bp, Triticum aestivum
tcacttgtccgcccacgcgtccggcacacatggttttaggagtcccgtcacatgcgcgcacgcacatcacaccattcgtgggtgctcatggctgccgacatacggacactgaattaccctactccacattctcatgcgtcatctgatcgatccggggactgtttgagacccacaccaggttctacagatctggagacagggaggcgaacgtgttccccacaccac

SEQ ID NO: 449219 - DNA, 308 bp, Triticum aestivum
ttctttcgacatgatcaagcttgacaaggaagagtctggccaagaagtgtagccacatgccattttacgatccctggctgctgtttgttatgccatggctggctgcttatagactcataggttgctgcttgtgattttccttttcttcctccttgtattggcggacgttctcgtagaatgttgtacggaagatggatgtatgagtgattgagtgtgtatcattatgtgtgggtagtaggactcgggagcaaattttgcctggcattgctgatagttcatgcaagtaacattgttgtcatatatgtatt

SEQ ID NO: 449220 - DNA, 201 bp, Triticum aestivum
gcatacccactgccatcacagctgtcgtcgcaagccggctgccgtcttctgctgcacagcgagaggaggggcggtacattgcggcggctgcgacgggaagaggaagaacagtgcataggggaagcaaattcttgttcattcacgatacaattcggattgattcattatgctgtgatccggaggtggtgactagggaggggg

SEQ ID NO: 449221 - DNA, 55 bp, Triticum aestivum
ttggtgtgctctacgcctccatcgggttgtacttgtgatccttttgttttaaaaa

SEQ ID NO: 449222 - DNA, 248 bp, Triticum aestivum
  unsure (1)..(248): unsure at all n locations
tctttaacagatacaacaatcccacgagagtttacgatttacaatgaacaatttcactgctttatcatcttcttcctttatggaaaatccctcgcccgaggtagatcgtggcaatgttttggcttctattccggagtctaacaattcagtacctgttgactcatgtccttatggatataaaatggttttgaaacttaagagtaagatctacccagaagggttcacatnnaaaaaaaaaataaaaacaa

SEQ ID NO: 449223 - DNA, 211 bp, Triticum aestivum
tctgtcccttccaccctcccggacgcacaagatcctcgtcggccggcgcggccgtggtggtacacgactggactagctagccatccatcgctgcggtgccgtcgcccaatgacccggctcgccctctccgactgccgcggcctcacgccgctccgcgcgcgcagccgcggcagcgccattgcgctgccgtcgcctccccacctcgctgcgg

SEQ ID NO: 449224 - DNA, 260 bp, Triticum aestivum
acaatcacacaagcaacatcctcaccaagaaccttgaatactccaaagcgatggaattagctcaaagtcgatgaacttcttccaatgttcttgttcctttatgtacagaaaattcagaaagtatttttaagttgatggctgcttagtgatgctgccctttatttaagcgagaaatgtaaatggcattgtacatacgacactgcttcgacaaaacattgttgagtgttaaatagaagaaaggttgtcattcttgttgtttt

SEQ ID NO: 449225 - DNA, 214 bp, Triticum aestivum
gccgctgtgatgacctgaaacggtctctggtggaatgctacggtgactagtttccgttgtagaagcgttattatccggactgttttcgtgtacttccgtgtgaatttagacggcaagttttttcctctttactataaaaaagtacaatgacttgcttacccgtgatctggctggcaactttgaaggtatcatacaccaccgttctgttgtcagt

SEQ ID NO: 449226 - DNA, 174 bp, Triticum aestivum
ttactgagtgttaacgagaatctcgttgtactaatttttgtttgggggtgtatgtggcgctagagttcaccttggtggagcctctccttcacccttgcatgtaaccaatggtttttatacgtttccatcatagatccatgctttctgaatcctggacattgttgtacttgtgga

SEQ ID NO: 449227 - DNA, 431 bp, Triticum aestivum
tcgtattatggtggtaattttgtcaaagatgtctgcattgatgacggacaacctcttcctcggaagatttcagaagataaagtagtagatgaaaagtcatctccaaattttgattgtcaaatgatacacgcaaatggtgctccgacgtacatagaaaaagattgtgctgcaaaatctttccacaaaccgagaccagaagcagttcaacctgttcattttgctcctgatagtaacaatgagaaacgatattcttcttgtgaaaaacatgatcctgaaggcaggagtaaagccactaattttggtgatctcagtgagaagaaaataagtctggaagaattacttagactcgaaagtgcagaagagtccctgcataaaggtgcaataagctctgaaaccagtaaaaatcatatgccatctttccatggagaagc

SEQ ID NO: 449228 - DNA, 145 bp, Triticum aestivum
acgggaagtcccgtcatagcgcaccatgtcttcagcggcgtgctagagtctagcattctacacaacaatggaacatggcgtcgtctgacgaaaccaaaaaaaagaaaaaagaatctctaaagaggagaccaagacaaaagaaaaa

SEQ ID NO: 449229 - DNA, 158 bp, Triticum aestivum
ttgttcacgcgtccgcccacgcgtccgcccacgcgtccggaagatcgcaatcgacgttgtaagccctggattcgattttcacctgcctgaatgtaaatgttccgtatgttttctgaaaaaaaaaaaaaaaaaaaaaaaaaaaccaaaaaaaaaaccaa

SEQ ID NO: 449230 - DNA, 424 bp, Triticum aestivum
ttctttcgtccgcggacgcgtgggcagaccatcatacagatgactaaagaggcgtccaattatctggaagaagtgcatgctgcatcagacaagatccatggtcttgctgccactgccttagaccctgctgccagcctgtctctttccactctaaaacaaactattttggcgattcaagattcacttgttgctcttcaaagcactaccgccgctgcacgtgcctccctagaggaaaagggcatgtactcagaggatgatgtggctcaaccaacctacgatgggctttctgatgaagagaccgatgaagattgccatcaagacatggatgatgactacgctcactatgtgcgatccccatgagcactgtctaagccctactaagctgatcagcaagtgaagctttctatatatagcttcatgatga

SEQ ID NO: 449231 - DNA, 151 bp, Triticum aestivum
gccatcaaagtcagctggacttcatgtaaattcattttgtacagccaaccactgtctgtacacaattaagaaacaaagtcagactcagccagcagacagacggtgccttcattgggcccaaaaaaaaagaaaaaaaaaaaaaaaaaagaaa

SEQ ID NO: 449232 - DNA, 284 bp, Triticum aestivum
tcgttgacgcgtgggcggacgcgtgggtgtacgagaacaaccacccgttggatatggtggaccagaggctggaagagtttgacagcgaggaggcgctccgggccatcaaggtgtctctgctctgcacccagggctcgccccaccagcgtccctccatgtcgagggtggtggcgatgctgacgggcgacgtcgaggcgcccgacgtggtgaccaagcccagctacatcacggagtggcagatcacggggggcaacaccacctatatgagcaccgacgtcagtggg

SEQ ID NO: 449233 - DNA, 102 bp, Triticum aestivum
caggtgcagcagattaacaattcagctcgtgcgtgcgtgcgtgctccatggtgagatcgcttccgtctgttccaatggaggggaggaggctggaggaggagg

SEQ ID NO: 449234 - DNA, 119 bp, Triticum aestivum
tcgtacgcaggacccaacaggaagctcaactgaaccaagatatagctagctaccaaaccagtgatggcgctcctcgaccatggcgagtttgaacgagcggacggactatgctcccctcg

SEQ ID NO: 449235 - DNA, 56 bp, Triticum aestivum
tccacgcgtccggctgctggaaagtaacgatagccctatgctaaacggtcaattat

SEQ ID NO: 449236 - DNA, 115 bp, Triticum aestivum
ttggattgcaagttgctttgtactgattttctgagaccctatcggaaggatattgtatacctcttctggtccttgctacctatatatttgctaaataagcaaacatactattctt

SEQ ID NO: 449237 - DNA, 88 bp, Triticum aestivum
taaaataataattattgtaagaatgtaacttggagcaatagatattaaatgttacaatggtgtttctcacggttccttttccaacatt

SEQ ID NO: 449238 - DNA, 288 bp, Triticum aestivum
ttcgaaactgctctgtctgcgcgaaaagcgagcgggcgatcggccatggggacgatgtgctgcagccaggaggaggaggaggcggggttcaacctgctgccgctggtgatggccgccttcgtcatcatgctgctgttcgtcgtctgctcgccgcagccccggcgcaggcgctgcgtcgtcgtcccgtgctactgacgtggcatcatggcggtggtgcggcggagggagcctcgacctcgatcggcggcgctcaaggcaggcaagtggctgctactgtggtggtaggcg

SEQ ID NO: 449239 - DNA, 206 bp, Triticum aestivum
ttattttgtaaacgactcctcatttttcttttgtagtacggatgcactatctgttgtcgaattgcttttatggcagatccttacctgttggttcaaaaaaaaaaaaaaaaaaaaaaaaaaaaaaaaaaaaaaaaaaaaaaaaaaaaaaaaaaaaaaaaaaaaaaaaaaaaaaaaaaaaaaaaaaaaaaaagggggggcccctttaa

SEQ ID NO: 449240 - DNA, 130 bp, Triticum aestivum
tccgtgtcactgccaactttggtgtgcacattgctgttttgtaacatgtcttagatatattctttctaaaaaaaaaaaaaaaaaaaaaaaaaaaaaaaaaaaaaaaaaaaaaaaaaaaaaaaaagaaaag

SEQ ID NO: 449241 - DNA, 145 bp, Triticum aestivum
ggacggagggcgtatgtttaataagctaaccgtgagcatatgaggatgacgttaatgcttttgtaagatattttaaactttgactaaggcgttgtaatattccagattcatcgttatgtgctcattagtcaggttttttcctctc

SEQ ID NO: 449242 - DNA, 99 bp, Triticum aestivum
tatgtgtttttgatcgcgagctcgagtgtcgctctgtccgttgttaattagagctggttacgcgaggaagaaacaacatgtgttatctttcagtcggtc

SEQ ID NO: 449243 - DNA, 365 bp, Triticum aestivum
tttattcatcacaaatccaaaacaaaacgtcttcggcgactacccgcatccgatagcccccttctccgcgccttctccggcgagaagcacccacaacggtctcaccggcggccatgccggctacggactaccagggctcctcctcctcctcccactccccgttcgcctccttcggccgctcgctgctgtctcgaagccgggacaccccggcgtcccccgccatgcttccgtccggcggggaggccgaggtcgaggcgttccagcggcacgtggccgttagcctcgcggagctgagggacggggaggatttcctcttcatcgcgtggatccggcagctcctcgaggcgttcctgctgtgccaggag

SEQ ID NO: 449244 - DNA, 327 bp, Triticum aestivum
cagaaatagaaccaccatccaatctttattcatagaaccaacgacacacgagacagaaataatacacgcagcaatgtatgatacaaaagaatattaagcaacggagtaacgcccacgccccactcagacgaacacaacacaacacaacccatcactactcgttactactgctccccctaaactcagaagcgaagtgaccgtcgccgccggacgagcgacgacgcaccgccaccgccgccaccaccaccaccagctcaccgcctactgtgcgacgagcagggacagcacggcggagcaggccacggccagcgccgacgcggcggcccc

SEQ ID NO: 449245 - DNA, 171 bp, Triticum aestivum
tttattctgttgtcctctaacctttgtacgttatgctgtataagatctgattatcaatttatctgttgggaatctacccgcctatgggtttcctaggaatacagacagaccaggtgaatgccatggatctttgtttgcgctgatgcagtttaactggaatagtgggctttc

SEQ ID NO: 449246 - DNA, 184 bp, Triticum aestivum
tcagctacacagctagtgacagcgctctcttggtctgcacactatgcaaagggtctttctctctctgcttcccacgaattcttcgggaatttcacaacttgcagaatcgagagactctcgcggatcaaaatgggcctaagaatttagagacagagaaatataatacttcctctgtaaattaaaa

SEQ ID NO: 449247 - DNA, 322 bp, Triticum aestivum
tccacgcgtccggaacaatttgtggttgcgatgcaagaactatttgagaagtacaagacaaaagctggatatgacaaactcgaattgagggttctatgatggccgttccaacatccagacataggatctttcaaagttgcgtttacagggttcggtagcattcaaactggggtgtgtttatgtcaagccttcgccaggattcagtagctctgaatgtgtaggaaatcccagcagctggaatgacttgctcacctggccttgcagaacacataaaaatgtaaaaattgtgttaataaaaaaaaaaaaacaaaataataaacag

SEQ ID NO: 449248 - DNA, 61 bp, Triticum aestivum
tgaatatgcaagaatgaatgatttacctaattaactactcctaaatcgctacttcggttaa

SEQ ID NO: 449249 - DNA, 200 bp, Triticum aestivum
ttctggaacgtggctctggtggatcatgcggacttcctcaaggaactccactgaagatgagcaggctcaaatgttagtgttgcgaggaggcaaaccttatgttagcaatggtctgtgtgtgattgtaataaaacaaaccttatgtagtagcaatggtctgtgtgtgatgtaataaaacggcagcctcttccgctcgacga

SEQ ID NO: 449250 - DNA, 390 bp, Triticum aestivum
tttcacgcgtccgaggaggcagaggttcgcaaggttgaaactgcaatcccggcgacggcaaaggcttctctttagttagctagcgtagcagacttctattcatatactgttcttgcgtgctctgcacttcttggctagctagctggtcggccatggcggatcaccagaggcagaggatccacccggtggacctggaggcgggccagccgaggccctcggcgccgctggtgccgccggggagctcgttccggtccgacaagggcgaccctgccgcggccccggacaggaggccgccgcaccaccagccgctgcccccgccgaagcggcgcaggggctgctgctgccgcttcatctgctgcgtcctggtgaccgtcatcctgctcgccgtcc

SEQ ID NO: 449251 - DNA, 438 bp, Triticum aestivum
tttgatcggcgcgttctttttctcggccctccttgccggttacgtctacgacaaggaggcggagaggcagaacccgggcgtgctggacccttcaaactgctttggacctgactgtttcaggctcacattctacgtctgtgccatggtgtgttgctgcggaaccctgatctgcctagttttcatcgcgaggatcaagccggtttatcagatgctatatgctagtgggtcgttcagacaccctcgacagcagcagctgtactgatggagtaagtggcatcaatagaaaagcttgcaagtatgagaaaagaaaagaacagaggaagttgtcagctggttgtctgtaattctgccttcttcttgcatcatattgcagcagcgtatattatcccacggttgtttgcttgattcatcccttgttggtattggagcatatgagag

SEQ ID NO: 449252 - DNA, 171 bp, Triticum aestivum
gctgcaaatgctcatctggtgtgtgtttcgtataaatagcgctgggttacaagaaataaataagtacaatgcctcactcgtcaatggataatgcaatgaatactcaagcagacgaactgttaaggggccggtcgcgtcagaactgtatgcacgtaaccactcatatgtatg

SEQ ID NO: 449253 - DNA, 258 bp, Triticum aestivum
gacacgctgaattggcgtctagtttttggcattttggtatggcatacagaaatatgtgctgagttaatactagtcgggtcttttgatgtcttctgcgctttgcttctgctttttgagtctactgaaaccgcagtacttgtgcggtttcctctatccagttattttttagtactgcatctgtaaaaccatatgtgatcctagtaccctgttcttcccaattctcgatgcttggtgcagtcttaaccttttcgatattca

SEQ ID NO: 449254 - DNA, 421 bp, Triticum aestivum
ggaaccggcgccgccacggacacaacctgcagtggccaggacggcacgcgctgcgctggaccccccttggctgggagggctcccggggagccgcgccctaggaagccacccttggaacaagcgagggtacctgcggcgtcgacccaggtagcctcacagagtcacgagcgacgactaccgtgttgcggtggagcagggctacgcaggcgacggcagtcgggccagcgacaccagagcctgcgtgctccacaccacggccagctagcccgctgtcccgctctgcatggcaccattcacaaagatggaagaaccagtggccattacctgaagctgagtcacatcccactgcggcgacctcgttcgattctgcagcctctcttttctgatgtttgatgctgtgaatcggtgcacacacgtaatt

SEQ ID NO: 449255 - DNA, 353 bp, Triticum aestivum
tacgtgaccacgtcatcagggaagaaccagtgcgtgatcactgggcagttcgacgtgatcggctccgcacggcgcgcatcttacaagagcttgataccagccgggatcgtcaccatgcttgtgcatatgctcattttcggcactggctcacgtagatagcaggcgagccagctgacatcgtgatttgattattattacctcggcgtattcagaggtagagacgtcgccatccctgctgcgcttagtcggttagtcgtatggacgaagagttggcatggcctgagcattcttactgtacatacagaaaatgaaaggtctattgttcatgtagtacggcctcctttttctcaaaa

SEQ ID NO: 449256 - DNA, 230 bp, Triticum aestivum
ttctcacgcgtccgaggataactcgccgctttatttatctaatgaaagtttgggatctccttggagaccacatctaaaaaaaaaaaaaaaaaaaaaaaaaaaaaaaaaaaaaaaaaaaaaaaaaaaaaaaaaaaaaaaaaaaaaaaatgaaaaaaaaaaaaaaaaaaaaaaaaaaaaaaataaaaaaaaaaaaaaaaaaaaaaaaaaaaaaaaaaaaaaaaaaggggggg

SEQ ID NO: 449257 - DNA, 265 bp, Triticum aestivum
tgcctgcgcacgtcgtgcccctgacgaacctggactacatcgcgacgtgcatactggtgaagccgtgggcgcacaagccaggcgcgcggctcatcacccagtgcgtgacgcccgaccgcatcgccgccttccacgaagggatgctcgacatgaactgaccggggccgagcacgacgacggagccaaagaagaagtcgaagacgaaggcgagaggaattgacttgtttatgtgatgattaaattagtagaagtagtacaggatatt

SEQ ID NO: 449258 - DNA, 96 bp, Triticum aestivum
tctcctcgcgtccgaaaaaaaaaaaaaaaaaaaaaaaaaaaaaaaaaaaaaaaaaaaaaaaaaaaaaaaaaaaaaaaaaaataaaaaagtaaccct

SEQ ID NO: 449259 - DNA, 129 bp, Triticum aestivum
tcgtcctttttcgttttctgtaatatgtttgtttgctgcactgattgattgtgaatgttgagctgcacaagtagcatctaataatctctggactggcataatgcctgcataaataaaagtgtgttgttt

SEQ ID NO: 449260 - DNA, 295 bp, Triticum aestivum
tatcttccttaaccaaacaccacctggctaaacacgcgggcagcagttttgacctctgaccgtgtcacggcgcccgcggaatatctacaccgtggagatgcaggcctcgccgccgccgccgagctcgctgcggcgcagactgcgggccacggcgtgctgctgcttcggctacggcgaccgggcgcggtggggcgggcgggacagccgcggcgtcggcaggtacgacccgctcagctacgcgctcaacttcgacgagggccccgacgacagcgacgacgacgtcaactacgacgac

SEQ ID NO: 449261 - DNA, 121 bp, Triticum aestivum
tgtcaccaccggcctcgtcgaggtcgccgtcaacatcactctcagcgccggcaagccgctcgccgcctactcggacgacaaggtgctcctgccccaagcgctgttcggggccaaggcgccg

SEQ ID NO: 449262 - DNA, 211 bp, Triticum aestivum
tttctttacttgagacccacacacacaccagagcacgatcaagcttcttggcctgcctcatcgatcgaaacacagcgggatcatcgactcgatcaggaccagggctctgacgtacctgatacctcatggtttcgtccacgacgcgccttctgctaggggtgggtctggccatccttctaacgtcgacgtgccatgtcgctgatgctgcaag

SEQ ID NO: 449263 - DNA, 180 bp, Triticum aestivum
cgcaagttgcgcccgaggccactcggccgagggcacgcctgcctgggcgtcacgcttgaaaaaaaaaaaaaaaaaaaaaaaaaaaaaaatgcaagaagaaaaagaggaaaaaagaaaaaaaaaaaaaagaaagaggggggaaaaaaaaaaagaagaaaaaaaaaaaaaaaaagggggggg

SEQ ID NO: 449264 - DNA, 266 bp, Triticum aestivum
tgttcttccacgcgtccggcccgccgctggtgctggttggggcgcgtacggcggctacgggtacgctcctcaggcgcaggctccggccaagggccacggcggctactacggcgcgagctcgccggcgtggcacggccagggctactgatcggtgcgcgcgctccgcgtcgaccgagccgaccgcgcgggccggagacgggcgagcacgtgggatcgtcataccggagcacctgacgacgatggcatatacatatgcgtactccttt

SEQ ID NO: 449265 - DNA, 265 bp, Triticum aestivum
tcgttcccttgctcctcctcgccccgcagattcgcctccctcctcctcttatactggcgccgcgcggcggatattgatccggtccggtcctgccgcgtgccgctgggcgccgatgctccggctccgggtccggccaaagattgctgcttgcggggtccgcggcggcgggcgggtggctccgttccggcggcagaggcggctcgatctgcgccggggctcaaatctgatcggcgtggcgcgctcctggagcccggggttccgattc

SEQ ID NO: 449266 - DNA, 349 bp, Triticum aestivum
tctccacgcgtccgcgagcagtggctgcagacggaggcgcagagcttcgacgtgcccagcgctgacatgatctacagcctcgcctacctgccgcgcaccatgccgctcgacggcagaaaggacggcggcgccggcgccggccgcgaagccatgcagcagaagcagcagcagcagcgggacatgatgatgagcccgtcccacatgcagaaggtggaggagatgaagcagctgttcgagaagagcagcagggatctgagcaaggtgctggacatctacgaccagcggcttgaggaggccgagtacctcgccggcgacaagttcaccctcgccgacctctcccacatgccca

SEQ ID NO: 449267 - DNA, 283 bp, Triticum aestivum
ttgctactagcagttacgcgcccctatccccccacctcttccttccactttccccacctcgcaggccaagcaaacgccaggcgacgcaaggcaaggaagcggcccagcgggcgaggcagccatgtcgtactacgaccggcgtggggagtcgtcggtgctggaggcgttcacgctgtcgccgctgccttacccggtgatcctgatcctgatgatggtgacgctgctgctgggggcgtcgcggctcttctcctacgaggagttcatggaggaggcgtcggagcag

SEQ ID NO: 449268 - DNA, 66 bp, Triticum aestivum
tctaccatgtaagacaagctaaagatagccctggaaatcaaataaaacgaataaagcattctccat

SEQ ID NO: 449269 - DNA, 241 bp, Triticum aestivum
ccgctttgcaatctcaatgcgttccgacacttctacttgccatcgcacggaaggtgattgttgggagaacaaagaaaaatagtagccgcagcgtgatggtattttatggtgcttgctactcattggaatttgcatctataagctgtaagttgtgactgtttcatgcttatttactagtggtactatactaccgtgtggttcaattgtatccgttatacctgatcaaaaaaatacaaatttt

SEQ ID NO: 449270 - DNA, 416 bp, Triticum aestivum
ttcttcgcgtccgcggacgcgtgggcgagcccgaccagccctccgcccccgcgaccgcgcccctctccaagcgctgccgtgagcccgccttcgcagtcacggggaacgcgacgagctcccgcggcggcggcggcctccgcgagaaggcgagggccgtcacccgcctcgccggatccggctcccgccatacgcatgccgatgctcagtactccgggggtccggtccccggggtcgcgttcgaccccttcgacatcgaggccgaccctccgccgttggcgctgacacacgagcagatcaagctatgcaaggacgcgctcgcgcatttcgagcggaggagcaagcagctggatgccttgtccgacgagttccaacggcttcagggcatgagaacaatgcatccggagatgatgaaaatg

SEQ ID NO: 449271 - DNA, 82 bp, Triticum aestivum
ttctcttcggaatatcctccgtgaataaacacctgtagtgattgtgcgtggctgccaataatgtgagttctcttgtccacgc

SEQ ID NO: 449272 - DNA, 363 bp, Triticum aestivum
gctttcttcacgcgtccgcccacgcgtccggccagaaggtacccatcaacacacctctccatgacaaagcttgcttactcagcttgcaacaagcaagccttggtcttcctcttctaccctctagctagctagctttctcgaccccccaagaaaaaggagcaaccaaaatctcatactagatcgattgatgggagctagctggcttgattagctgcaatttcatggcgcgtaattaagatccagggcatcatggtgaagtagctcggcaagaagtcaactcatcaagaaagcttgctagccgcccttgaaactacacaaggaagatgaagaccagatcgaggaaggaagcacgctatagcacag

SEQ ID NO: 449273 - DNA, 367 bp, Triticum aestivum
tctttcacgcgtgcgcttattttccactgctcccggaggcgtcaagggcgtcatgccctctgtcatgatcggatggggatcccaagttcagtcccatcttcactttgctccccctcactgcagcttctctcctatctgtcgagatttactatgtctgtctacagctattctacttgatattgttcttggagcatcaaaggcaattgctttactggttaacatgcgtaggagggtactgttgctcagcgttattatacctctgtaaatacatgtataggaggattcttggagcttcgcacactcagtaaggccatcaaagctacttgccttgctggtcaacatgtataagaggacccctgtacataca

SEQ ID NO: 449274 - DNA, 250 bp, Triticum aestivum
tctctcacagcagagcaccactactactaccaccagtggcaaccctgacaaggctctagcagcttcgctaaagatggctgggctactctctgtcaaggccatcgcgctcgccgccgtgcttgctgccgcgtatgtctcttgcgccgccgctgagcagctgggggcggcggacctcgacgcctccgccgtgtcttacagctccgcgtggcttccggccagagcgacctaggacggagcgcccaacggcgcc

SEQ ID NO: 449275 - DNA, 78 bp, Triticum aestivum
ttccacgcgtccgcttgtttctccagcagcatagttatgatttattatgaataaatatgagttctattttctctagca

SEQ ID NO: 449276 - DNA, 372 bp, Triticum aestivum
tttgtttgaaggttaagcaccaattatggttaaagctttgtctcttttgtgtactatgcatgattgatctgattttgctggtcagcttacaaattcaagtaatacaactattgcaatgcatcttactacgtgtgtatctatttgcattgatattttctcctccttaggctccaaatcgtttgtgggtcataaattattatgcattattgatgttaatttgcaatttaaatgacaatagggatgggttttataagtgcaatggcttgaaatgtgaccttcgagtcaagaaatttccttagtgggaagcttatgtgaagaatgatgtaattaagttagcaatttacagttctctttgataattgtaactgaatt

SEQ ID NO: 449277 - DNA, 160 bp, Triticum aestivum
tcctctcatcaccaaaaccccaagaaaccttcagacctctctcctccccttgcaccgtgctgttctaaagcagcgagatcagagggggaaggggggaggaaggagaggcagaccgcaaaaggggcagccagggcggcggactcgtgcggagaggagagag

SEQ ID NO: 449278 - DNA, 306 bp, Triticum aestivum
gccccgccgccgtggcggcgcaccaggagatgatggccacgctgatggtgcccaagaaggaggcggcggacgaggccggcaggaacgacctgttcgtggacctcagctacgacgacatccagagcatgtacaacggcctcgacatgatgccgccaggggacgatctgctctactcgtccctcttcgcctccccaagggtccgggggagccagcccggcgccggcggcatgccggccccgttctaagcagagccaagacacagaccgtcagataccgagatcgacagaagtggaacggatgacttct

SEQ ID NO: 449279 - DNA, 86 bp, Triticum aestivum
gggcagacgcgtgggcagacgcgtgtgtggagttgcctgaacatctacatgttgaaggggaccaagatggcaataaaaattcatgc

SEQ ID NO: 449280 - DNA, 443 bp, Triticum aestivum
atcgtatgcagaatgtactcatgatggatcgataaaacacattcagaagtttgagttctggggatggaaaacattagaccgccgtgtactcaacgtagaaagaactggcaacctacttcatcttcagttagggcttctcacaaatggctttaaattattgaaaacaggcggatcacttgtctatagtacttgcagcttgactgttgcacaaaacgagaatgtggttcagcaattcctctcaaaacatccttcagcagagctgctaaagatcaatccagccgatagctggccctgcagaagcggcggcatccagaaaaccttgcggttcgatcccgcgacgtcacaaactagtggacttttcgttgccaagttcgtcaagttgcgatgttctttatgagatgctcgcaacttcgtataagttaatttcatatgaaaccaggatg

SEQ ID NO: 449281 - DNA, 64 bp, Triticum aestivum
tcctcacgcgcccgaaaaaaaaaaaaaaaaaaaaaataaaataaaaaaaaaaaaacaatactac

SEQ ID NO: 449282 - DNA, 122 bp, Triticum aestivum
tctgctccgacccgcggtccacttgcctgggcccctccacggtcgctctggcaggcctcggcccaggcggtgccctcgtcgacatgaccacctccgaccccacactcgccggcgagatagcc

SEQ ID NO: 449283 - DNA, 227 bp, Triticum aestivum
cctttgcggcgacgccggctgaagccgcgtcgggtgccgagttcgtcttctgctgcgtcggcaacgacgacgacctgcgctcggtcgtgctgggcgatgagggcgcctctgccggcatggcggcgggcgccgtcttcgtcgaccacacgaccgcctcggcagcggtcgcgcgtgagttgcatgccgtggcggccgaacgtggcctgcatttcatcgacgcgcccgtc

SEQ ID NO: 449284 - DNA, 178 bp, Triticum aestivum
ccgcgccccggaggcgcacggcaagatctgcttagtccctggcggggctccggcgggcgatgcaccccatagacgtcgccggcaaggtgtgccagcacgacgaggcccgcgccatcgcgtgcagcatgccgaagctccggcacctggagatcgggtacatgctgatcgcgaccaacgc

SEQ ID NO: 449285 - DNA, 380 bp, Triticum aestivum
tttgctccgccgccgccgccccgtgcttttcgcacgtgagcctcaccttttcggttggccaactggaagggggcgttttacctggactaaaccgccactatcgcgacttcttgattcagcggctcgtgcagttcttccaaggcgccatcaccgtgaaggatctcgtcttgcggtttactgggccagagatgtggatcatgccgaagaatcccttctctgcaatgtcgaacctgagaaggctgctggtcgccgacgtgccttcctcatgggacgcctcatggccgcgcctgctcatcgaggcggcgccgttacttgagagcctatatgtgcatgtctcccacagcgaagatgagccgagacaggaggtgccgggggagacc

SEQ ID NO: 449286 - DNA, 185 bp, Triticum aestivum
ggagggcattcccgctgatgaagcagatctgcgtgacatgataacgtctctagagagtctgttacgtgacgggatccagcctcgcgtggggcggtatgctgaacaagagttacgtggttttgataccaccttcaagagtttgttacctgatgctgctgcagctaccaccatcaaggaagagccgg

SEQ ID NO: 449287 - DNA, 60 bp, Triticum aestivum
ctgccggatggggaagagatggggaaggtgctcccagctctactataagtagtaggacta

SEQ ID NO: 449288 - DNA, 225 bp, Triticum aestivum
cacgcgtccgcccacgcgtgcggtttttcccgcggctactcaaggttgtgtcagggcaacggcaggatcatggacatggtggagctggacgaggtggagctggagaaggcccaggccaacggcaaggcggtcaccatctcggtgccggccgccggcggggaagccggcatgtagcgcgacaacgagaactgatcgctggagcaagagatgggtggatcttgatgc

SEQ ID NO: 449289 - DNA, 191 bp, Triticum aestivum
acgatgatgcaggagagctttgctacctggcttacgggttttatgattactctagagggagtggtgttggcatcccttcgttcttcctggagggattgtatcatattgcattggcatgaaaaccacaccgcataacatacatggggctagactgctacggtgctagctgatgctcccctgtaacgtatcat

SEQ ID NO: 449290 - DNA, 91 bp, Triticum aestivum
acgcgcctcggcggcgggcccttgtccgaacggtctccttgttttccctgccgagcaagctttatttatggacgtctctctgcgcggcgga

SEQ ID NO: 449291 - DNA, 300 bp, Triticum aestivum
gcataggtggccaggcaggtgtgatatgttaagatagatttcccatttttcatgaataccaccatggcgcatatggaagaagttgcttatagctttacctgacaggcaggaactctagcattttctgcttgctgcttttgtagataagaattgtgccagatagatttcgagacgacacacggaacagagataaggttgcacatagcagttatgagtctgcacattgttgtacaaattttgtgattttacatactccctctgttcacttttgtaagacgttttagacagctgaaatcgaat

SEQ ID NO: 449292 - DNA, 171 bp, Triticum aestivum
gttggctgagtgctacctcgtggttttttttgagcacattatctgtttgttagactttactgttcatgtcgatctgtgcttccactatgttgtatttggtgaacatttgttctctagaacttttgtgcttcttggttatcaaattatatgttgctgatgagacagtttgac

SEQ ID NO: 449293 - DNA, 478 bp, Triticum aestivum
  unsure (1)..(478): unsure at all n locations
tataaaaaattggtatgctcgccgttttctagaattctaggtttgttattattttaggctgccgatggctatactggaaatgtgcagtttagagatgctacataagaactgtgtgagcactcatgttttacaaattaggatcacaacagtgacactaaagaagtgaagatgcaagtatctgtttccgcgaagtcactcctttgtacttgtattgtttcgttttactcaagtgccttgatacaagatacttaagtatttttcggttttacctcgttccttattactaacccacaaccgtacttncggttaatgtggtctggactgtcattcaggtgcttgctggagcttccagctacaggtgccatggaaggaataaacatgatcacaacgggctctcttctcatccttcctgagtagaaactaatcggctgtgacagatcccacaatgctggctgtggccggtaggctcatgaactat

SEQ ID NO: 449294 - DNA, 149 bp, Triticum aestivum
cagactgtctgtgtgcacatctgtctgataacatcttgagcgagccagaatgctcgagtgacacgaaaaatgccatcagaaaagcatatctacttaccgatgagaaaatattggaaaaagcagctgagttgggcagaggaggctccacg

SEQ ID NO: 449295 - DNA, 305 bp, Triticum aestivum
cggcttgcgcattgtgtgattttcacaggctcatccaagcttttgagagcatcctcaaggaagacaaaatgggcgagacggaaaaggcacagagcttcaaaaagctccatgccgcgggtaggaagctgaccttcatgacatgctgggctcatgagcagccaagtgaggcctggccatcgctggctcgcatcgctgaggtgcacaaagtggcttctgaggagcttgacagcggaagcggactgaggaaggcaggtcgaaagaacaacccacagtccaaggctcttatcgaggaggtgtaagcatat

SEQ ID NO: 449296 - DNA, 193 bp, Triticum aestivum
tgggacgtccatgaagtggatatgcacaatattagggatcacaggtcatgtcgtagatcgatcctgccctgtgcaagacatcagaatatggatggatgaacactggtcgaaatcatatcatatctaccggcccattttgtctggtacgggagttcagttatccggcatttggagaaaggctgtggtgggatat

SEQ ID NO: 449297 - DNA, 122 bp, Triticum aestivum
cacgaacggcgatggatgcatcagcttggaagagctggccgcggtgactggctccctgagcctagatccgaccaaccaagagctcaatgacatgatgcgtgaagtcgacatggatggaaatg

SEQ ID NO: 449298 - DNA, 450 bp, Triticum aestivum
ttttggctttagtcataaggaggggtgacgaagatactgatcttgcttttcagtgcaatgagggttattcgtatggtgttttgtttagtcatggtcggttgaggagtaaattccatggtccttcctgggaacgattggtcagtgattatggtgttcgtcctcgtgatataatgaccattaggcttgaacactatggaacatggattggtattgattttaatcgtgttggtcgtggagatgcgttgtctcctttaccttctgttggtaaggtttatttttaaggaactttttagcttgttttattgcacatgatgatttgtctgttccctcgagactgtgtaattatattttgcagctcttgatggctcgagcgactccgagatggaacttattgagagttgttattacacccgtggtgtttttcttaattatcagcagatgtatttcatg

SEQ ID NO: 449299 - DNA, 335 bp, Triticum aestivum
  unsure (1)..(335): unsure at all n locations
ttcacgcgtccggaagagagagagagaaaagcaacgagacgcgaatcaacggcggcgatggctctcccggcgtccagctccaccctgtcccgctaactctcctcccgccggatccagcccacggacgtcaccgccctcgccacctggggcatcttcgccggcagcgccgccatctacctcgtccagccatttgactggatcaagaaaaccttcttcgagaagcccgagcctgaggcataagtgtctatgggggtgcacggctacagcttttgatgcgtacattntcaggatgattctctgagtttggacaacccagccaataatatacaagaccc

SEQ ID NO: 449300 - DNA, 361 bp, Triticum aestivum
ttgtctcaccaagtggcgatcggcgagctcaacaaccttcctccatccagggctgcttaccagaagacctgcaacatcttcttccgcaaggacatcaagtcggccgtggcgtcccaacagaagcaacttgatatcgccaaggcgaagctgcagaagctggatcaggcatcatgaaggttcactgcaggcagaaatttgaaattgcaacttatgctgcttcatccatccacctcgctgaattctctctaatcaagtgtcttcggagtgccagttgactaggatgcaacttatatagatttctgtgtaataatggtgtgtttaatagttacgagtgcgagacacatcatttctttctgaatat

SEQ ID NO: 449301 - DNA, 128 bp, Triticum aestivum
ctagtatgtatctcccctcaggatacagttgcctcgtcctttgtacaaattcaggaaatgagatgtagtgaaaaacaatagcatttttgttaaaaaaaagagagaatggcatttcaggctgtacctgt

SEQ ID NO: 449302 - DNA, 117 bp, Triticum aestivum
tttttataaaaaaaaaaaaaaaaaaaaaaaaaacagaaaaaaaaaaaaaaaaaaaaaaaaaaaaaaaaaatgaagaaaaaaaaataaaaaaaaaaaataaaaataacagggggggcc

SEQ ID NO: 449303 - DNA, 175 bp, Triticum aestivum
ttctttcgtccggttcatagagtcaggattcgagaaaagaaaaggcactgtcgattggttgaatgatctccatgtgtactgccgctcccgcacggggatctctctgaattaatcgacataagcttctaccgtttaaaaaaaaaaacaaaaaaaaaaaaaaaaaaaaacaaacaaa

SEQ ID NO: 449304 - DNA, 201 bp, Triticum aestivum
ttgttttactgtgcttaacttatggcgacgacggcagccttgttatgccgggctatcattgtgcctctgttgtcaactctatttcatttttacactgtcatgcttggagtttaatgcaagtgtattaaggaataatgatgattattgagctgggtagtccttgtggtgcagcttgtatagttctaaaaatttctggtatct

SEQ ID NO: 449305 - DNA, 427 bp, Triticum aestivum
tgtctgctgccgtcgctgctgctggtggtggttgccgccgccgcgagccgcgaggttgctgctctccccgacgcatctgctctccgtggtcgttgccgagcaggggtggctgctgggcgtcgtgtcgctagcagtgttggtacttctggttcaggatcctttaacccacaagttgtgccccgcggttgaggtaaatcctgaggacgacatgcatgggagtcttgggagtagcatcttcaccgttttcacttcacgaaactcacacctattgtcctttaggaccgtgttttgagaacctagtatagttgtactttactacctgtggtggttcatcttgaattggagagataccctcttggtctgtatggcttagctaatttccccttaagactaacgctatcgcctaaagttaccgaggatgttctcg

SEQ ID NO: 449306 - DNA, 410 bp, Triticum aestivum
ttactgggcgcacgacccccacctcctcctaccttcttccccgcacgagttcgcacgcgcatcctcgcagccggcgcccccatcccgtggccttcttcgctgccggcgtaccccatccagccgctttcttcgccgccggcacgccctatcccgccgtctccttcatcatcggcgcgccccatcctgcgcccttcttcgctgccggcgcgccccatcacgcggcccttctgcgccgccggcgcgccccatcccgccgccttcttcgtcgtcggcgtgcccttcttgcggccttcgccaccacctcccgtcccactccaccctccctcgttcctccacctccttgccccgatccagaccgcccagaccccgacgcctccaccaacggcgcgcgcggacctccctccctctac

SEQ ID NO: 449307 - DNA, 465 bp, Triticum aestivum
tgttgccaagaagaagtgtccaattgcccttgaagaacggaatgatcgcaagtcatcacaagccgctcattcttcatctattaggagtcaaagggatatgaagagtagcattcgtgaggaaatgtttttctctggtccacaaccttcgcctgagcctaggaaccgaaatgttcctcttctttcgggctttgaacgtagagtttgggttgagcttcttgcttggcgcttccatacaggaaagttttgggctttgtataagctcaagaaacatttgttcagtgctttgcattatcaggattataacatggttatgtccatttacaatgatatggacatagataattatgttttccaattcggttgttgggctgattgtccctcttggagatcttgtatccatcgtggttctatttctggcaactcaactcagccactttaccattatcaaggaactccacgtgagtt

SEQ ID NO: 449308 - DNA, 66 bp, Triticum aestivum
ggtttgtgtccaccgattattatttggagatattatcacgattcatagaacatattttttatgttc

SEQ ID NO: 449309 - DNA, 173 bp, Triticum aestivum
tttacgcgtccgccggcgccggcgcggccaacaacgccgacaccttggtctccacctcctccttcttcacctggctcgcctccaccggcgggccggcggcgggaaccacctccaggtcgagccgcgccgccctgccgctgccgccgccgctcctgctgggcggcgtggcgaag

SEQ ID NO: 449310 - DNA, 461 bp, Triticum aestivum
tttttgtcagacttcctcggccggttgcatctttagggacctgcttcatatatatcgaattattccgaagacatcagtttaaatcgaggcatcttggaaaactgctgctttatctccaatttttttggtggttgctttgtcgccaaacatacaaagaaaattcgaagttcgctgccggacgcctggatgaccttgtagcgctattgaccagtgaaacaatggaaaagaagttatgctgcgagtacttgaaaagtgaaaaaaattacaataattagaactgctgaaacgcctttccgtatgcactttgtgttgcttcctgggtggtcaccagtgattcggtagaacgttacctggccattgtgcgaacgaccggtgtgtaatactcatttccaaactgccattcccctgttgaggaaggctaccgcaccaacaactggtgaactgagaccgtttggttgtat

SEQ ID NO: 449311 - DNA, 95 bp, Triticum aestivum
ttattaaaaacaaaaaaaaaaaaaaaaaaaaaaaaaaaaaaaataaaaaaaaaaaaaaaaaaaaaaaaaaaaaaaaaaaaaaaaaaaaaaaccat

SEQ ID NO: 449312 - DNA, 260 bp, Triticum aestivum
gtgtgtccgcgcgccgaggcacatttggggccggcgcggcctttgccttgatcaccggtgtgctcaccgggttctactactacaacttctccaaggcacgggtggcctaccaacgcccggaggccgccatcgacatgagccggtatagctgaagattggtgcctggttgaggggctactcgagtctctatgaagctgctgtaacgcattgtggggaacgattcactatgaactagctcaacagttttgataaccgttatg

SEQ ID NO: 449313 - DNA, 422 bp, Triticum aestivum
ttcgtcacgcgtccgctctccctctccctctcccgtgccgccttcacgatggcgaccgccgacggccagtcccagcctgcggccaccgaaccctccccatccccggccaagcgtaagacggacaccgactccgagatctctcccctcgacccacccgccaaggccgcccgccccggcgctgacgaggaggccgccgccgaggccaaggcccgggtcgcggacaaggggaagggcaagatggtggtcgatgaggaggaagaaggcgacgaggaaagcgacgaggaggaggatgacgaggaggtcgagggagatggcgacgagagtgacggcttatgcgaggatcccctctccgaggtcgacctcaacaacatcctgtcctctcggacccgccgctgctccccagcacagcctggggcgtacct

SEQ ID NO: 449314 - DNA, 279 bp, Triticum aestivum
tctgttcacgcgtccgctttgtttgggtccttgaagtaggccttcttagaagcacaaaggagatgtggagatttgggttaaactctccatgtgtttgtacaaacgaaacagttatattgattgttgattacttatcaaaaaaaaaaaaaaaaaaaaaaaaaaaaaaaaaaaaaaaaaaaaaaaaaaaaaaaaaaaaaaaaaaaaaaaaaaaaaaaaaaaaaaaaaaaaaaaaaaaaaaaataaaacaaaaaaaaaaaaaaaaaaaaggggggggccttt

SEQ ID NO: 449315 - DNA, 88 bp, Triticum aestivum
tttcctcacgcgtccgcgtcagtactgaaataaggaattgccatgtaaactttatacatagtacacatatagttgcttctttagtttc

SEQ ID NO: 449316 - DNA, 108 bp, Triticum aestivum
ttgttcattagcgttataaacttgtcaacaagtctataacttggtagttttgccaagctatatttgctgcaaggacaaagggcaactccaacgggttgacctaaacgg

SEQ ID NO: 449317 - DNA, 138 bp, Triticum aestivum
tcgttgtttcgtggggtgtaagagatgtgcgttctgacttgtggagttgtgttgttaatttacacacgttacatgtagtaagtactacttgtatttgtacttggagtaatggtatgtaagagaaataatgtgtgaaaa

SEQ ID NO: 449318 - DNA, 76 bp, Triticum aestivum
gcccacgcgtccggccacgcgtccgcccacgcgtccgcccacgcgtccgcccacgcgttcgcccacgcgtgcggac

SEQ ID NO: 449319 - DNA, 189 bp, Triticum aestivum
tttgttgctgcggtggtaagcaactatatgtggaaacataccatgtcttgctcatccagaaggttttctgccttaaacctgttcgtcaactcagccccgctcaaatcagcattttgaagcgcaatctgggtagaacaaggagcaataaaatatcagtgccaaaataaaaaatcaaagaaaaacaatttg

SEQ ID NO: 449320 - DNA, 380 bp, Triticum aestivum
tgagcctttcttctactggtgagtgctacagctcaactgattgtggttgttggagtttctgaacctttggtcagatcaagagatgatgaagttatgaccttatggactgatgatcaccatgtttggttctttaggctcgacatcggagagggcaaggagatcaacctcgaggaccgatgcccgcggtcgaagcttctcagccagtgcatcaagtatcttggtccggtaagcttttgcaaacagtttagtacatgggataaatttagagaatgcaagtccatgagagttcagaaggactaatgattcaaactggatttttgttgtgcctgcagaaagagagagaggaatatgaggttgtgatcgaggatggcaagttcatg

SEQ ID NO: 449321 - DNA, 191 bp, Triticum aestivum
ggagaaggatggagcaatcgatatgatattggaattgtcaagaatttccaacaaatattcggagttgacaaatctcccactacatggctattaccgggcaaacctgatattggtgatggtcatcgattccccaccttggcttcattaacctctcttgctgaagaacaagaacttgctcgagctgttcaacc

SEQ ID NO: 449322 - DNA, 91 bp, Triticum aestivum
ttggtaccaccccttcccatcccgaacaggaccgtgaaacgactccacgccaatgatagtgctgcaaccagtgtgttgtctcattgatcat

SEQ ID NO: 449323 - DNA, 203 bp, Triticum aestivum
tttattttcaggcatatgggagtatatagtatctaagttatcttctttacatgttgtttactctattttttacttcccatgcactatggatttgagggtatatgcatatttatgttccggaggtaagtcatatgcagattttactactgaccatgatggtcgacttgctttttttccttttgctgaattccacaataatttcc

SEQ ID NO: 449324 - DNA, 313 bp, Triticum aestivum
tctttacgcgtccgcccacgcgtccgaccctctctccccagccccacccgatttccaatcatggcgctcgcgtccggcacggcgacccgcccgctcctgggccgcctcccgggcacggcgcggccccacctcgccgtctccccctcgccctccgccccggcctgcacggtccgcttcgccgcccgcagcgggggctcccgcgccgtctccctccgcgccttcgccccgccagctgctgcaacagcaacgcctggtagtatcgcaccagctatctcattgacagagaaggccttgaagcatctgaacagaatga

SEQ ID NO: 449325 - DNA, 154 bp, Triticum aestivum
cacgcgtacgaccctgtgtaccctgtcccacccgatttccaatcatggcgctcgcgtccggcacggcgacccgcccgctcctgggccgtctcccgggcacggcgcggccccaccttgccgtcttcccctcgccctccgacccggcctgcacggt

SEQ ID NO: 449326 - DNA, 218 bp, Triticum aestivum
aaaacgaaaggaataaaaaatgcataataaaagctcaaaaagcggaatataaaaaatgagatattacagaaaaaacaaaaagttttaagagtcagacaaaataaaagttatacaacgtgatactaagcagcagacaaataagatcaaaaattgacaatgaaactctgagacagaatgacctgagatatgtgcaatatagctactctaacaagaactaa

SEQ ID NO: 449327 - DNA, 145 bp, Triticum aestivum
tccacgcgtccgcttatataaaaaaaaaaaaaaaaaaaaaaaaaaaaaaaaaaaaaaaaaaaaaaaaaaaaaaaaaaaaaaaaaaaaagaaaaacaaaaaaaaaaaaaaaaggacaaaaagagcaaaaaaaaaaaaggggggggc

SEQ ID NO: 449328 - DNA, 277 bp, Triticum aestivum
tttcagtgcaggcccctgtcgaaaaccgtgagattcaatgtcctgaaggtcgttccagctggaaccaccggaggcgggaagaaggctttcgtcgctgcctaagcccagactctgattcatgagtagttcatagtcagaactttttcgcacttgaaatctaccaggctgctgtttcgagatttgattccgtgttatctgtcaaaccgaatgtcgtgatctgaacatgttttgtggaatctatctatcattaatagtttcgctttaattgtactgcctt

SEQ ID NO: 449329 - DNA, 267 bp, Triticum aestivum
tttttacgcgtccgcccacgcgtccggggcgaagcgccatgcgggagagagggagaggatcagaggaggggcttagaattagattgatcgattagctatcaaactggcggtgccagagttagctgctgcttaatttgctgacggaatggctgatgctttcgttctggaactgtgggatgactgataaacgtacgctgccacgcgcgaccgatacatgcatgtaaatcttgtttaacaccttattaattgaaatggttaccagtttgt

SEQ ID NO: 449330 - DNA, 107 bp, Triticum aestivum
tcacgcgtccgttttattaatggcgcatcactggtgcgccattagtataggccacggtgcaccattagtataggccactggtgcgccattagtataggccacggtgc

SEQ ID NO: 449331 - DNA, 267 bp, Triticum aestivum
acaggcacagattcagctaggaggagagcaggagctaggtagccatggccgtcctgcgcgccctcacccgcgccctggaggacctggcccacgccctggacgacgtgatgcgcgcccttgcctacctggccagcctcatgacccacgccagcgcccgcgccttgcccaacgccataagccgtgccatcggcgcctgatttgtataccctccggcggtacctttgcaccggatcgtcgctcttcgttagaggtactccaccgaaagag

SEQ ID NO: 449332 - DNA, 175 bp, Triticum aestivum
ttcccacgcgtccgccggcgccggcgcggccaacaacgccgacaccttggtctccacctcctccttcttcacctggctcgcctccaccggcgggccggcggcgggaaccacctccaggtcgagccgcgccgccctgccgctgccgccgccgctcctgctgggcggcgtggcgaag

SEQ ID NO: 449333 - DNA, 381 bp, Triticum aestivum
cctcggaggaagttgtgtctcatcagcattgcgttctgcttctatataaagcacatccaagaatcactgtccaaggtctctctttcgattgatagcatcggtagcaggatataacatcaggttacaagcctttgtggtacaggaaggaccgaaggaggaagttggtgagatacagagggaagttgaattgggacgagggatagagatacaaccagcaaatgcgccgaggaacagtaaggtgctattttcttcaccagttaactccttcaagtatgcgttcttgtcatcagtacacacagcctcctattgcaggtctctaacactttcgcccaatggtccgatgcagacttatactgacattatcaagagaaagaatacgtt

SEQ ID NO: 449334 - DNA, 286 bp, Triticum aestivum
  unsure (1)..(286): unsure at all n locations
ctgctccggtccacgcacccgctcagccccagcaggagctgcggaggtagctcggctccggcgtctagctccggcgaggcgatggtggggggcgcgccgagcggggcgaagctgctgcagatcctgaacgtgcgggtggtgggcaccggcgagcgcgtggtggtgctgtcgcacggcttcggcacggaccagtcggcatggagccgcgtggtgnngtacctcatacgcgagcaccgcgtggtgctctacgacctcgtttgcgcctgcagcgttaacccggaccact

SEQ ID NO: 449335 - DNA, 191 bp, Triticum aestivum
agttaataatgctaattgacaaatcatttcttacttttttgggagaaaaaacatttcctacttgtgtaaactggaaacagagcaagactccgtgtggagcttcaccctatgccgtcactggatcaatggacttgccatccttcaccattgcaacgctcggcttaggagcaggagcgcttgctgccgagacc

SEQ ID NO: 449336 - DNA, 271 bp, Triticum aestivum
ttctcacgcgtccggcaagaagcaaaaccccatagctatagctcaagtgaagtgagctgagggattgaaatttagaggagaagcctaggcatgcaattcagctagcaatggcggacatggtgacggcgctcgtctttttcagggcaccgtggtgatcttcagggtgagcagctgctgcatgttaaacacaatgaaggcgctcttcgcgcacctgggtgtgagctcgacgatggtgcacgagctggacaaggccccccaaggcgaggaggtc

SEQ ID NO: 449337 - DNA, 270 bp, Triticum aestivum
tcctaaggtgaaggaggaggagcgcaaggacgtgttccacgtcaaggtcgagtaggtagtggtagtgctcatgcaggatggccggcgcgagagtgtgagagacgccttgttgatctggtcatgtttggtgtctttcttccttgttttgcttcattggtcgtcttggatcgagttggtagtggtctggtggtgaagttggtcgcgaactctgttaatttcctctagttcggcatatgatgaacttactttggtggtgaaattggtcatgaa

SEQ ID NO: 449338 - DNA, 279 bp, Triticum aestivum
tgttcaggaaaaaaagggcgtgagtattactctgaaataggactgtcaatcatacaaagccggggcacatcgcccagtcctggtcaccgacacaccaccgtgcgctcttcctgtctaccaagattatgcaagaacaagattgatcaatcataagcctgctgggagatatattatagcatggattttaaactcagtgtacttgaaaccattaccaataatttttcagaagaccgaaaagttggcagtggtgggtatggagatgtttacagggggatgtat

SEQ ID NO: 449339 - DNA, 60 bp, Triticum aestivum
gtccgctaccaccatctgttatcatatcatggacgatgctttaaaacatttgaatacttt

SEQ ID NO: 449340 - DNA, 143 bp, Triticum aestivum
aagcaagtccgacagcgcctcgtgtgcccggtcctcccccgcgggcgggaccgtcaccccgaagacccgtgggacatgcatgtgctctccgacgaaccacccgggctcgctccgctggagcctgcacaaggaacgcaagcaga

SEQ ID NO: 449341 - DNA, 304 bp, Triticum aestivum
ggatagctgaaaaggtactagctcatggagcagagggtgccacatcaatcgccgagcagactatagttcaggccctaacaacagcaagagagcactttgccaaatctctgcttatgtgacgtgtccctttctcgtggacgaagatggcattggaccaatgtgttcatttcattgtcaaaggagaaatgaggggaaaaggtccgaatctgtgggtgtaaaattacgcgttttcgttgacgttatatgattgttcagttttacgagtgctccaaagttgtgtggacaaagattgtgaaatgtgacc

SEQ ID NO: 449342 - DNA, 364 bp, Triticum aestivum
tggacaaaatcaaatggcagacaaggacgaagacttgtccaacatagctgaagaaattcgactcctaggccttcaatgggagaacatccgtcaaactatccctatcaacaatccttcacttgacagatccaataccatcaattcacaacctcctgtattctctttaccaccattctcccaacaacttacccatgacctgtctactgaaaccagcgaccaagaagactccttggccaggaaatccatgaattctgttgcttcctcgagcgcttcgtccacagatgagaaaaattaaacagagtatttttagagggtagcgagagcaaaaagaaataatgttattgaaaaagaaatttaatattac

SEQ ID NO: 449343 - DNA, 167 bp, Triticum aestivum
tttgttggtatcgcctgtctagcagatatttggatggcagatgcttgatctttagactgttgctttcgttgaagttgtcagcgcagaatttgttctaaaggagggaggaatgtctgcaagttatgacaggacaagttataaatctaaaactgtcatgaactgtaaaa

SEQ ID NO: 449344 - DNA, 227 bp, Triticum aestivum
cgacgacggcgagcgtgaccgcgaccgcgctcagcccccctacagatccgtgcggcggccggcaagatgtttgacgatcaagacttgggtttcttcaccaacttcctggggatcttcatctttgtgttggtcatcgcgtaccactttgtgatggcagacccgcagtatgagaactgatcgccttttgtttagcaatgagaccgtattatactcggagcaaataggga

SEQ ID NO: 449345 - DNA, 308 bp, Triticum aestivum
actgctgacgcgtgggcggacgcgtgggcaacggcggcttgcacggcagtaagtggatcaggtgaagtggcgcgcgtggcagcgcgtacgtgcgtacgtgcgcgcctccatggcatgccttagttgatcattaaccatgctctccgtatactacctaaataagggcgacgcatggtgtgtgacactatgtagctttcctttcagctggtaatgatgtgtgtggtgacctaataagtctgtgtgtggcttagtacgaaaaatttgtgtttgctgtactgatgaaatacaaggaatatgtaccaccgtgc

SEQ ID NO: 449346 - DNA, 347 bp, Triticum aestivum
tgtacacacagatccggaccttgcggatgaggcttgtcattcgttcacctgagattaataaactccgttagtcaatcatggaacaacaacaagtcaagccatctctccccccgtctgatactcctatggataaccaggattcatctccacttcctgccgttactactgctgatcctgttccacgtgctctttcaaatgattccgcgacacaggctgccagtccaaatcctgttgccccttcatctccttctgctccaacctctgccaccacacaagatgctgcaggacgcgaggcaccatcatccatgttttctacatcaggcttatcttcctgggcgaaaaatctg

SEQ ID NO: 449347 - DNA, 211 bp, Triticum aestivum
ctccagctgcgcccccgatcccagctgcattctgagcggattccattccattagattctcccgaggagcaaattgcctcccgagatcttcatctcgtttcggattcctctcgtctaattggttccggagccaggcaagaagcgaaagaggaggaaaatgtgcccgctgagggtgatactcatcttcctctccgccaccgtcgccggattct

SEQ ID NO: 449348 - DNA, 262 bp, Triticum aestivum
ataacctcgtttatgtttgttatgcgaaaacaaaacataatgtagcatatcttgtcgagtcgctcgctcgctggatgctggccgacactgggcgtcgacccgacaacacttttatttagcccacgccacgcgccaccccgcgcaaagcaccccacaccttgtacgtagtaaaaagcagtagcactccagtccactccactggctgactaagcatcacgccgtgccacgtaggagcacatgaccgccgccgtggacgctgacc

SEQ ID NO: 449349 - DNA, 287 bp, Triticum aestivum
cgtccgcaaaagaggcggtcatcgtctaccaccgcagcgatacggcctacatctcgcaggtttgcctgcacgagatggatttgtcctctctgctgcagaccatgaagcctctgagctagctgcttgttatggatcagttttgggaatgttcttcagtccacttcttgttctactgctttgtttgcttagagcagctgttttagctctaagcagtcgtgctccttggccaatactagttgtaaaaggaatcgagtcactcctaagtttgttaagtcttgtcatttctc

SEQ ID NO: 449350 - DNA, 216 bp, Triticum aestivum
tctcgtaaggtgtaagatgtttgacattaccctactttgttttcgtgaagaaaatgcaaccgtgtttctatggtgcccgaatgctggcaggctgcattcgtaattgtgtttcgaaggttttgtaacgatatgtcacagcactacatttttaccaaatatgtaaccgtgtgaaactattggctccaaataacattttatttataaatagattgcaag

SEQ ID NO: 449351 - DNA, 277 bp, Triticum aestivum
cctaccccggcaccggcaaggtcgagtaccgtgtcgccctcgacatccccaccgccacctactacgtgcgcgcctacgcgctcgacgcctccggcacgcaggtcgcctacggccagaccgcgcccgcctccgccttcaatgtcgtcagcatcaccggcgtcaccacctccatcaaggttgccgccggcgtcttctccgccttctccgtcgcatccctcgccttcttcttcttcattgagaaacgcaagaagaacaactagatgtggagatcgaaacc

SEQ ID NO: 449352 - DNA, 64 bp, Triticum aestivum
ctctcaaaaaaaaaatttaaaaaaaaaaacaaaaaataccaaaaaaaaaaagaaaaaaaacaaa

SEQ ID NO: 449353 - DNA, 112 bp, Triticum aestivum
aaaaaaaaaaaaaaaaaaaaaaaaaaaaaaacaaaagaaaaaaaaaaaaaccaaaaaaaccaaaaaaaaaaaaaaaaaaaaaaaaaaaaaaaaaaaaaaaaagggggcgccc

SEQ ID NO: 449354 - DNA, 304 bp, Triticum aestivum
attggggtgacgaaacgcgtggataaagaaggtgcgatttgtaagctcttgccagttgcaacccaaaagggtatgaacaattacaaaatgcgggaacggaagggacgacggagcagaagcgcgggatacgagaaggaacgaattggcagcccggactgattgttggagtaaacgtacctattgcaagtctgacgcggtggacggcgagccgtccgggagcctggttagacgacgcggttgcgctgtattgtcgatgcgatattgcaacttgtattgtgttgttgtggtgttttgcagagcgctg

SEQ ID NO: 449355 - DNA, 312 bp, Triticum aestivum
ttctcaattttggcgagcaatatttctagccgaggtagagtaaatttactggttgctatatattatgatcgggtaggatgaggatgagattaggttccagctgaagaatgagaggtggaagactggtaccatttgtatagcttgtgtgataaaaagactaagacattttgggtgtacactcctccgtgttggtgttgccacccgtgaacataaacactgcctgtatgttatatgttacactttgtgttcagaggtttgggttttgtacctggaagaatgcttttgttgaacgaacggtgtatttgtatctgt

SEQ ID NO: 449356 - DNA, 302 bp, Triticum aestivum
tttttcacgcgtccgaaaagatcatttactcgttacttgtttcttttgcagaaaagtgcgatgaggcactataatcgtcaagagtccatccatgtggctattgagaagagagaagggcgggaaagaagtgaagaaagggacatgagcatcaaggaaagaagaaaccgggggccaaaacttaagatggaggggatctacttgggaagaaagaaggaaaggagaagggccaaatcagaaaagcggcagactagaggaggggtcaaaatccctagcagcagccccgatcccctttgggcctagca

SEQ ID NO: 449357 - DNA, 171 bp, Triticum aestivum
ttttggtgaaagcctttttctcaaataatgatttttgtctttgcaaaaaaaaaaaaaaaaaaacaaaaaaaaaaaaaagaagataaaaaaaaaaaaaaaaaaaaaaaaataaaaaaaaaaagaaaaagaaaataaggaagaggaaaaaaaaaaaaaagggggggtggtttt

SEQ ID NO: 449358 - DNA, 278 bp, Triticum aestivum
ttttcacgcgtccgcggacgcgtgggatggtactgtcatactagagtcaacttctgttctcatacagacaagttccactgttggagcagcaggagcattcagttattcagattgcgtgtctgactcaacaattgacctgtgcttccattatgagattataacttcgagctgattgtagtcttaatgtttgatagaaatctccaaatatgataagtttcctgttattaccaatgtcatgtcagttatgttgggtgagtcacaaaacaccagttgacacc

SEQ ID NO: 449359 - DNA, 164 bp, Triticum aestivum
ttctattttctctggactattgtctcctgctgtgtgtaataagataattggttaagtatgtaagctgttgaacatctaagtgcgtagttttcgtgcggctgtggtgcatgttgatgtatgcatctttttgtgtccaaatggaagaatatgcgggtacaaggcat

SEQ ID NO: 449360 - DNA, 334 bp, Triticum aestivum
tttgaaccggccccgtgcccacaagtcgtcacgcccttgatggaagcaggcgtgcgatagattatcattcattcatcaaacaatggcagcactccactttttttgctatgtaaagaagatgcaactggtgtccacccctttctcatgaagattgtgttctatatctatctatatgtatattctttgttcttcaagtccatatgtaatcgatttaacgaccacttgcagtatcgtcaggacatagttacagtttgttgtgtatttattctaaactggcagaataatggttgtccagagcttgtgcagttatgcccaattgagatttttttttatc

SEQ ID NO: 449361 - DNA, 317 bp, Triticum aestivum
ttctcacttcaagtcccagtacaactcgtcgcacaccggctcctggtgctcggcgttcgaggtgctggtggccaaggcgtggcagagccgcacccgcgcggcgggcttcgaggaggactccatcgtccacctctgcttcgccatgaacgcccggcccctcctgcacgcctcgctcccgcgcgccggggccgggttctacggcaactgctactacatcatgcgcgtgtcggcccccgccggcaaggtggccggctccacgatccccgaagtggtgaaagatcatcaaggacgggaagaggcggatgccgtcggagttc

SEQ ID NO: 449362 - DNA, 261 bp, Triticum aestivum
ctaagctgcactccggcctttggtatgatatattaaataaggaaaaatgagccatcaattgttgttcttgcggggcatgtggcaggcggtttttgtacattggcgattattcttcccaagttgtaaccctcgaaattctagtaccagaaatatctgattgttcgtctcggttgcaaggtcagcaagtatgtacgacctagaacacttgccatcacacagagaaaaaggaagataataaacactgatgcgtgagcttatgcc

SEQ ID NO: 449363 - DNA, 412 bp, Triticum aestivum
tttcccacgcgtccgcctcgggctagtaagaacgtgtggaaggaaaaaatcctggggtatgacgaagccagcaatgtgatcattctgtatgttgatgacagtgcctacatgcttgatcttaagtcgatggaatccacaaaacttgatggaagccgtttgatgaattcctgtcacccattcaccagtttctatccgccagacatggccatctaagaagcattgatatgtgcacacggacacaggggtacggatacacggaatacggcattttccagaaacaaccatacataaataaataaagtacagcatgtaatgttgtgaggacaaaagtatatttgtaagatgtgcgatcggttgttttctgccttcatttccacgtttgtatatgggtgagcttaatgcagctgacgct

SEQ ID NO: 449364 - DNA, 322 bp, Triticum aestivum
aaaatgcagggagctttctgtgcggtgatcatcctcggggagaacgccgactaacagcgacgacagcgacggcctcccccgggtgtggtcgacggtgcgagccaacaaggccaagcgttgggcgggccgtgtgtgcagatgccgaccatcatcatcaaggtggacctggattgcgcccgctgccaccgcaagatcgagagggtgctcgacaggatcagagagaaaggcgagttcgtgatcgacgacatcgagtacgatgagaagaacaacaaggtgatcgtgaagggccccttcgacgcggacaagctctccgacaagctct

SEQ ID NO: 449365 - DNA, 75 bp, Triticum aestivum
ttggacgcgtgggcggacgcgtgggcggacgcgtgggattaccagttggaaaaattggaaaggaagtgatctaaa

SEQ ID NO: 449366 - DNA, 144 bp, Triticum aestivum
tttcgttgattccgtcaattatgtataagctacaaatctccttattgattggtatcattttctaatcttcaaatttgtaataatagtgttccccacttgtatgaagtatgagccctttttaatgtcactaaactgagttgcaat

SEQ ID NO: 449367 - DNA, 280 bp, Triticum aestivum
tttaagaggctgttggagggaggtcaagtatgttgggttatagaggcgagccctgacaccatcaggcattcttacattgtgcacctgatctctaccatgtagatggaatggtctatgtgggcttgcccgagattgcccctctctgcaggtgaattgggactttacaaactcgacttttgtgcttccataatcaatagtcctgattgaatgagttgtatcggttatgtaaactcgcttcatgcgtgacttactgtgcacatataagctatgctatattgtt

SEQ ID NO: 449368 - DNA, 312 bp, Triticum aestivum
tttacggcggcggcggcggtggctacggaggtggccgcagcggcggcggcggtggctacggcagccgtgagggcggcggcggctacggcggcggcggcggcggctacggcggcagccgcggcggctccggcggcggcaactggagggagtgaatggtggggcccctcgctggccagttatcctagttacccgatccgtttgtacctgtctaccaaaatgttatcgctcgctcgctcccgagtatcctagatctcgctccgtcgcgtaggttccgagatgttcaggctaccgatagatgtgacgctgctaccg

SEQ ID NO: 449369 - DNA, 119 bp, Triticum aestivum
ctgacgcgtggggcaatggtctgtgtgtgatgtaataaaacggcagcctcttccgctcgacgaacaaacataaaaaagcaaccaccgcatgcgtatgcggtgattgacctagtgttatc

SEQ ID NO: 449370 - DNA, 239 bp, Triticum aestivum
ttcttggatgcacgcaccatgtgtttgtgtgtgagtgtgctgtgctgtctagtcaataagacgagtgtgctgcttagttcgtatgcttcctatagcatagggtcgaccgagcttccttttgcacgccggtgtaagatttctttctttttttttgcgggaaaccggtgtaagatttcagtagcatcgtaatgtcgtcttttagatttccaaaatcgtaatgtctcactaagctgcatgac

SEQ ID NO: 449371 - DNA, 56 bp, Triticum aestivum; identical to SEQ ID NO: 55658

SEQ ID NO: 449372 - DNA, 355 bp, Triticum aestivum
tcttccgtgtcctttctccacgcctcccgacttcttatagcgcaaatggcggctcgtgaatcctgatcacatcgtcacatcccccatccctatcgcctagctactacttcgggcccgagcacgaagccatttttgcatctctgcgagcgacttgggaagttgagatccactttgcagcgtcaaagatgaagcggctgctcgttcatggcgggaggggaatcggctgcccctccaggagcgcctgggagatccctccgccctgcccgcgcttggcaacagcgttctactgcccaggtaccactcgacagagaaacacgacgacagtgacacgctgggcgaaatcggagagaaggca

SEQ ID NO: 449373 - DNA, 407 bp, Triticum aestivum
ttctctcgcatcttaatagatatggtttttggagcatgtggttaatgatctaaaagcaagaaagagaatgggcttttacttaatttcataagagaatatgccgtggtcttatgccatatcgatgggtatgttgatattggtttttcaaattgtacgagatgctgcctccttggtcgcctctcttaaaccttatgtctcaaagcattaatgtaatgtgaatgctaaaccgtaagttgaatggaacctatctttccacaacctattacctaaagagaagccattttatggttcctaatatgacattgagtgctgtcatgcatgatttggtataatgtttgccgttgatttggtatactatttgcagttgtcacccagcacaatttcttgatgaatggttagatttgtat

SEQ ID NO: 449374 - DNA, 383 bp, Triticum aestivum
tctgcgagggaagggatgtccgaacggtgtgaagagcaagcatctcctcttgattctctgggtctttggtatgctgctgctttggttctgcagagtaaccgtggcggagtttgtttctgcacctctcgttgcctggagcctgggaacgatatccacggagccacgctgctgtgctacatgacaagaccaagttgccccttgcgtgctgcgtgttcactcaggtccatttcaacccatgccactttcccggggaatggggccctgcctcgtttcggttcctatccattgagccaagtagtgctctgtgtgtagccaccgtgaaatcaatcaatcaatcaatggatccccactagctgccgtgcaatcatgaactgggctgaaat

SEQ ID NO: 449375 - DNA, 75 bp, Triticum aestivum
tttctgacgcgtgggcggacgcgtgggtgcgatggtcctcgcggatgctgacgcaatgtgatttccgcccagtac

SEQ ID NO: 449376 - DNA, 380 bp, Triticum aestivum
gtcacgcttcgccgagggcgccgccggcatcgcgctcctcgccgacgccgccgccgcgcagggccccatgccggcgcccaggatggccccgctccccgcaccgccggcgaggtcgccggccaccgcccctgcgccgggcgccaccccgcccaccggcgcgtcgccgtccccgatggcctcgcccccggacccgcccaccgacgctccctccgcgatgacgccctccgcggtctccgccacgcccaccggtgccctcaccggcgcccccgcgagctccgccgcgtactctgccgccgccagcttcgtcgccgccgccggcgcggtcgcagacgtcatcatgttctagatgtggcgagggtcctgagctgatcttcgacctg

SEQ ID NO: 449377 - DNA, 339 bp, Triticum aestivum
  unsure (1)..(339): unsure at all n locations
tccacgcgtccgcccacgcgtccgattctgatgtgattcagtgcaccaaaggttacataatacgagtaaaaattgttaggtcatagatgtgcttcaaaatgtaattctgagcgcatatgttgcgggaaatctgtagcatgtagagcaaattggtaattgtttgtattgttttgtacacaatagattacttgtgattcttttcgttnaaaaaaaaaaaaaaaaaaaaaaaaaaaaaaaaaaaaaaaaaaaaaaaaaaaaaaaaaaaaaaaaaaaaaaaaaaaaaaaaaaaaaaaaaaaaaaaaaaaaaaaaaaaaaaaaaaaaagggggggggccttttt

SEQ ID NO: 449378 - DNA, 208 bp, Triticum aestivum
actaccacgcgtccgcccacgcgtccgattctgatgtgattcagtgcaccaaaggttacataatacgagtaaaaattgttaggtcatagatgtgcttcaaaatgtaattctgagcgcatatgttgcgggaaatctgtagcatgtagagcaaattggtaattgtttgtattgttttgtacacaatagattacttgtgattcttttcgtt

SEQ ID NO: 449379 - DNA, 175 bp, Triticum aestivum
aatgtctggaatgtggtctgtcgaggtattgcaattgcgggcgcctattttcacttggaaacttatgtgaggaagctctgcacttcctgaatgcaagctttccacaagtattatttcatatgtatattcaagtgttgcactacgtattatgctctcttgcaattatccaattgcc

SEQ ID NO: 449380 - DNA, 107 bp, Triticum aestivum
ttctagctctctcctagcaccagagtcatctttgctagttcattgctgcagcatccgtcgaggaagcaaatggcggttactctgaagctcaggatcctcgccgtggc

SEQ ID NO: 449381 - DNA, 405 bp, Triticum aestivum
ttttaccagcgcaggattttatctggtcctaatgggtacaattctgtgccttcaacaacaagagaagacactagctctagaattccagatcgattttctgggagaatagcaactgctgcacaatctgctagttcttcacacagacctgccagccaggagggtcgttcaggaaataaatcatactctgaggaggaattgagagagaaatctattgcaaccatccgggaatattatagtgcgaaagatgaaaaggaagttgcattgtgtattgaggagttgaatgctccgagcttctatccttctcttgtatcactttgggtaaatgattcctttgagaggaaagatatggaaagagagttgttggcaaagctctttgtcgggctttacaatggtggatataattta

SEQ ID NO: 449382 - DNA, 256 bp, Triticum aestivum
  unsure (1)..(256): unsure at all n locations
tgtccgnccagcttgttttatgtttaattatgacccctgcagtttgcctagctagcactatgctatcgtacgctgtgatattgtgtgacatggtatcatgttattatatctctacctatctaaaaaaaaaaaaaaaaaaaaaaaaaaaaaaaaaaaaaaaaaaaaaaaaaaaaaaaaaaaaaaaaaaaaaaaaaaaaaaaaaaaaaaaaaaaaaaaaaaaaaaaaaaaaaaaaaaaaaaaaaaaaaaaaagggggg

SEQ ID NO: 449383 - DNA, 245 bp, Triticum aestivum
ttccggcctcttcgtcatcgtgtgtggttggtagcaataagctgcggggccgttcgtgccggccccgtgatccgcgtgcgccgcgccggacgcggagatgtactactagatgagttcgtgctgctggtggtggcgaaataatcgggacctgatttgtactgtgtgccattagtgagagttgtgattagttgcggtggctgttttgtacgttgatgatgtcgatatggcatctccatttgtggtgg

SEQ ID NO: 449384 - DNA, 60 bp, Triticum aestivum
atcacgcgtccgcccacgcgtccgcccacgcgtccgcccacgcgtccgcccacgcgtccg

SEQ ID NO: 449385 - DNA, 297 bp, Triticum aestivum
ttttcgtgctcaggaagatccccaggggcaaaggtgccaccaccgccgcacacgggacgacggccaacaacgtgcacgggtggcatcgctcacacgtcaactaaacctgcccagccaacaacatgtcactgctaactaacctgtaataaagtacagtacagagtgagcgagctgcagacagacgtaaatcaaggttcagaacaaggcctgaacgaaccaacatgcagagagcgagcagctctgcagacggatgtcgatttaggttcagaataagacctgaatgtaaggtgtttcgtt

SEQ ID NO: 449386 - DNA, 219 bp, Triticum aestivum
ttatgaggaagaggaggtcctgaacatttctcccgcacattgtagataccaccaccgccgccttgtaggaattaagctggcaccgttccacccttgtgtatttgtttttgattgtatgtgcacttgttggatgtgcagacgtgtatttgctcttgtgagtatgtgactggatgatttctggatttaatcagttaattgagagatttattgatttttttc

SEQ ID NO: 449387 - DNA, 142 bp, Triticum aestivum
ttgtaaaaaaaaaaaaaaaaaaaaaaaaaaaaaaaaaaaaaaaaaaaaaaaaaaaaaaaaaaaaaaaaaaaaaaaaaaaaaaaaaaaaaaaaaaaaaaaaggaaaaaaaaaaaaaaaaaaaaaaagggggcggccgttttaa

SEQ ID NO: 449388 - DNA, 406 bp, Triticum aestivum
tgtcttgcctcaagccgtggctggatgagaacaactcatgcccgatctgccggcacgagctgaggacggacgaccatgcgtatgagagccggaaggagcgggagcgagaggaggaggaagacaggaagggagcggccaatgctgtcaggggtggggaattcatgtacatctgatatctgaaggggaatcactgtttctgctagcgagcaaatcgtaatgtgaccaatcttcttatctgctcggtcgtcatgcctgaaattaagcatgtcttgtgttgttcccagattcaccgcgtccctagtttgtcaccagctttatcaaccccaagtcattagaatttagaaagcttgccatagttcacatcacatatgaaatggatactcttggggagcggcaatgcataact

SEQ ID NO: 449389 - DNA, 155 bp, Triticum aestivum
tcgaaaattctctggttgttccagtggtttttttattttcattgcgatctatttgtggcaagaaataagaaagacaaactcttgtgttgacaatccggaattggctgaattgtgtctaccctgttttcacatcaatgatatatgtgagccgattg

SEQ ID NO: 449390 - DNA, 378 bp, Triticum aestivum
tatcacatgtgatctgaatgataacatcgctgccccatggtcgccttctttgcaagcatcggcttcgacatgcaataaatcagctgctcctggtccaacaatcccagagaggcctgcagcaacatcggcgcagaacggtgtcaaccacaacagactggagcttagcctagccgtctgctttggcgcccttgtggccactattttactgcaagtctagttcaccttagtttgtcaaattatccagggtttgaggagagctgattggaacagtgaaccgcggagtttttgtgcgtgcttggtcatcgcatcagagcattgtaactggtagctattagtgtaatttgctgtaagccacagaatgatagtgaatgcaacact

SEQ ID NO: 449391 - DNA, 276 bp, Triticum aestivum
ttggggcacgagctcgacgtccctgctttccgctgcggcggagcttggagttggaagcaagagcggcgccaagaagatggaagccgacgctgcgttgtcagtgcactcctgagctgcatctcgccattgtcaagttattataggatttgtgttctgttccgtacaacaattcttttcaacagtcgataccaccatgtcgaagtagccaattcatccttgtaatatgatgctagcttatatataaacaatgaagtgtatctttggcgtcacttcacg

SEQ ID NO: 449392 - DNA, 116 bp, Triticum aestivum
tcacgcgtccgcccacgcgtccggctatttgtcttcatgtgaggcgtcgtgttgtaaatttccatatataatgtgatgtaaaacttcttggctccaaaaaaaaaaaaaaaccaaaa

SEQ ID NO: 449393 - DNA, 220 bp, Triticum aestivum
tctagagaagagagctagtatgtttgtagtagtaatttgtacaaagaaaattaagaaaaaaaatctataacatcggatcttgcccaaaaaaaaaaaaaaaaaaaaaaaaaaaaaaaaaaaaaaaaaaaaaaaaaaaaaaaaaaaaaaaaaaaaaaaaaaaaaaaaaaaaaaaaaaaaaaaaaaaaaaaaaaaaaaaaaaaaaaaaaaaaaaaaggggggg

SEQ ID NO: 449394 - DNA, 81 bp, Triticum aestivum
tttaattgtttgtctacatgtgtaaatgtgctgcaaaccaattttctttgatttgggaaaataaagttacatttttgctgt

SEQ ID NO: 449395 - DNA, 240 bp, Triticum aestivum
ttttgctttcttttagtgaattattttgaattaatcctgtaattcgtagtggttttgtcactgtaatttctatatcttatcagtgtaattataattttgcaaatgctagtgggatttgtagcacgccatcactgtaaatcctagcggttctttatcagtgttatattccttgtaatcctagtggttattttactgtgatgtatttgcaactgattgttgatgttatttcatttttaaaaa

SEQ ID NO: 449396 - DNA, 280 bp, Triticum aestivum
tcgtccactctgctcaaccaagcagatccaagcagcagcagagcgccggagggacgccaggatgcacgccaagacggactcggaggtgacgagcctggctccatcctccccagcgcgctccccgccgcgcgcggccaacaacaaccccaactccggcgggggcggtggggtgatgcgcggctcggtgtactacgtgcagagcccgtcgcgggactcgcacgacggcgagaccaccaccaagggggccacgttggtgcactccacgcccgcgctcagcccc

SEQ ID NO: 449397 - DNA, 329 bp, Triticum aestivum
tctaaaccattcagttcaaccaatttgagcagaattattacactaatgaagataagtgtgatcatggttgttgggctgatttttatcaacctatgcacctgcatgccaagaaatgtggcgaaccatgaatctcacgatacagtggtgccacagaaggaaatgcgcagtctgatgtctggcactgctggaaggaaccggcctccgagcaatgatcaccagtgcccacttggaacctaccctaattgccaagggatgtcccagaatactcaagaagcagctcaagatgttggaggaaactaaggcaaactaagggattatgagacggaatg

SEQ ID NO: 449398 - DNA, 224 bp, Triticum aestivum
tttccgccgcgccggccgccgccgggaagggcggcgcgaagacagtcgccaatctgcccaccaagccgcctcctcctggtcaggctgctaatgagtctcgtggtggtggtccaccctcccgtggaggatatgggcgcggtgaacgtggctcaggcagaggtggacgaggagggtatggtcagaatcgcgactacggcagtgaagacacaaatggctacagggga

SEQ ID NO: 449399 - DNA, 319 bp, Triticum aestivum
tgtaattttctgagggattcaaacccctgtacatcaggacaaagggaataagactatgggagattgggaagcaccccgttgtcacctttggttagaatatgcttatgtgcaagcttagatgcaaaaaagccgcatcctgagtctcttttgtagtcgaccctttccctagttgactgtcgatgaaccgttgtcatttatgagtccgatgaaccgttgtctttatcttttgacaatttttatgtcgttgctaccatttctgaatgtgaacagcatggatctgtgtccagtttgctttaatctgtgcactcgattgtttttt

SEQ ID NO: 449400 - DNA, 369 bp, Triticum aestivum
tctaacagagctggccaggaggaggttgaagaaagtgacagtcaaaataagtggaaaccatgaccaagaagcactcgctgcggagcctttttccgagtttgtgatatagtgtagtttctatctgtgcccgttttcccccttaaggctcacgcgtagcacgctcactcacagatcatcagtttcctgtaaatgtaattatatgtaatttttggcctcttccctaacctatcatttttttttcttgctttacttaattatagagtggggaatctgatgggtgcaaaacagtactgtcggacaattgattcataattatattgtggttgtaagatattatctatagtaataaagttaatagttgtttccctc

SEQ ID NO: 449401 - DNA, 140 bp, Triticum aestivum
tctgtgcttttgatatccctactccgtgctggatatgtcgtattacctaattttgaaacaggggtgttctcttggggtttatttggataataagattacaaagaactagttcttgttaaattcaatttctaactgaatct

SEQ ID NO: 449402 - DNA, 275 bp, Triticum aestivum
actgtatgagctagcaaactcacacgagctagcaaaccagcccacacgagctccatcggatggggtccttcgccagagctgcgcgcttcctggtgctcctccagatcgtactgttcgtcatctccgacgtgctcatgagcgggcccgtctgccatggagcccgcccagggatcggtggtggagctctcgatcctaatcgtccgacggatacagtgccgcctggtgacccctacaccggtcgtctgtgcagcagcttgtacaggtgctcaccaagt

SEQ ID NO: 449403 - DNA, 319 bp, Triticum aestivum
tctcacgcgtccgggccgtgttcctgctcgtgcaggggctggtgtacctcatcctcaccaactcctccgacgtcttctccaagagcaagaggctccggtccctcagcttccggcccatgcggtccatgagcgtgcgccgcgtcctggcgccgctctccgacgtccccgtcggcaccgacgacgactctcctttgccttcgtcggcttcttcgtggtcgtcgcgccgctggggtagccgcaaagaggattgagcagcttggagtcagcggctggttagttctgacaccaaatgggtagatactagcgagcttgataattc

SEQ ID NO: 449404 - DNA, 209 bp, Triticum aestivum
tgtggaaatcgcgaagaggttgcccaagccaacggcgtcctgataaataaatagctctcgtgtactatattgagatggagtgacacgcttacaagtctgtaccatgtaatgcatgtaaatgcccgaggttaaactgggcatttgattggaaatcgaggataatgtaaagctagcttatatttcattgtgttaaagtgcaagtattgcgc

SEQ ID NO: 449405 - DNA, 158 bp, Triticum aestivum
tgtttgagaggcctttggacgtgcccctctcactgcgcctgtgactttctacactcgtgcggccagccttacatcaagtcgtgaacggtcactgagcaaatttgtctccttgttttggccacttttttctttccgtaaatttggaattattttcaaaa

SEQ ID NO: 449406 - DNA, 60 bp, Triticum aestivum
cgcgtccgatcgactattggcgtagtcaacaaaatcccggctcatgtacgagcattcgac

SEQ ID NO: 449407 - DNA, 142 bp, Triticum aestivum
tttttacggtttgctgttgttggtcggatattgagtttaatcttttcttgttgggaataatccaccacccaaggggatcaaggtttgtagaatattgttgtttgttcaaaggctataataaaaagtgtttctctttttaaaa

SEQ ID NO: 449408 - DNA, 204 bp, Triticum aestivum
tttggttatgtatgttgccggcaaagttcctgatgaggtgcaggcaaagcagaggcagctgaaagccattctgaataaactgaccccacaaaactttgacatgctttttgaacaagtgaaagaggcgaacattgacaatgtgtcaactcttactggggtgatttcacagatatttgacaaagcattgatggaaccaactttctg

SEQ ID NO: 449409 - DNA, 366 bp, Triticum aestivum
tttgtttctgctactggtgctgcagcaatttgttcataacaggtggccctcacggaccgtctgaaagctggagcagtctgtgcatctgcgaagcagctcgaaacaaagaaatgaatccttgccaggaactcaaaagacgcagaacatgtcggtcgtagtctagttataccgaatttagcaacaaactgaacgagcaggtgatgacggtaaaccggatgcttaggattgagaggtgtttcagtctggaggcgtggagtgaagtaggaagagtgtatagcaacagtacataatctcagagcagctgttaatgttaattcatccatcctattattgattgattccaagatagtgtagtacatatggaat

SEQ ID NO: 449410 - DNA, 101 bp, Triticum aestivum
ttgattttttgcgttctatccttgcaattttagctatcaaatctgattcagagatgtttttactcctcttttatgcatgtttatatgcccttttgatgaac

SEQ ID NO: 449411 - DNA, 301 bp, Triticum aestivum
tggttctctgccgccgccgctcccagatcgcggggtcccgccccagtcgccgtagccgctcccatatcggggcgagcgaggaggatgatgggctggtccgccccggtcgacggcgccgctgccaaatcggggcgagcgaggatcgtcggcgtcgccgccagacctctgcggaggcgcctgtccctctgccgggcgacggggatacgccgcggcacggccgtcggccccccgccccgcgcgagtcgctgccgtaggatatgcttggggagatccttctccttctggcaccgcagccgtcgtc

SEQ ID NO: 449412 - DNA, 209 bp, Triticum aestivum
tggttctgcgtggcttctcggagaagcctaggtacaccgtgaagcccaccaagtacgccggctgaccgaggagcggtggcgcaccccgcttcatccaccagcctcgctaggttgggatgccaagcttaaagaatcgagcagatcctgcgccttttctgcctgcagtgatgcattgctctgccttcttctaatacaccatctgtcccaaa

SEQ ID NO: 449413 - DNA, 58 bp, Triticum aestivum
tgctgtttgcccacgcgtccgcccacgcgtccgaacggtgcctgcctcaatgttcagc

SEQ ID NO: 449414 - DNA, 86 bp, Triticum aestivum
aaaaaaaaacaaaaaaaaaaaaaaaaaaaaaaaaaaaaaaaaaaaaaaaaaaaaaaaaaaaaaaaaaaaaaaaaaaaaaaaaaaaa

SEQ ID NO: 449415 - DNA, 87 bp, Triticum aestivum
tggatgtttcctgtgatgattgtgaggataggtgggctgaggaggaagaagaaacacccattaagccagagactggctagaagaggg

SEQ ID NO: 449416 - DNA, 224 bp, Triticum aestivum
tggttatgcactagcttcaagaaggccaagactgactctgtctaataaggttctgacgttgaggatgatggccaggaggacgaggtgtaaatagttgatgagggaacagcagtggtgcaaaccagcgtttgctgattagggtttagcttgccatgacgatgtcctcattatgtaatgctatgtaaggagaatgtttagatgcgtactcctgggctgtggcatgc

SEQ ID NO: 449417 - DNA, 159 bp, Triticum aestivum
ctcgtccgaagaagattagacattaatagtcacttgtttgatggggtgtgatccacgagacaatgatcttgcgaatttcgttttcatgatatgggtcgcataccactaggtttagttggaaatcttcgtcaatccttagatacattcgctggaaaaccc

SEQ ID NO: 449418 - DNA, 91 bp, Triticum aestivum
cactttgctcgttgtccccttccttttggatcgatccggccttcggcggccatcaattgcgccggggtcgccgatgggttgcctgcaggcg

SEQ ID NO: 449419 - DNA, 143 bp, Triticum aestivum
tcttttgatcacacacacacactcacacacacacacacacacacacacacacacacatgtggcgttcgtttctgtagctattccggcacattggtgcctctgatctatcaactaatctgaaaaggttcggtttatcactctaa

SEQ ID NO: 449420 - DNA, 212 bp, Triticum aestivum
tctgatcatcttaacaagtagtgtagcatagaaacttgatacaaataattagcaggaaaatgcccttttgtcaaaaaaaaaaaaaaaaaaaaaaaaaaaaaaaaaaaaaaaaaaaaaaaaaaaaaaaaaaaaaaaaaaaaaaaaaaaaaaaaaaaaaaaaaaaaaaaaaaaaaaaaaaaaaaaaaaaaaaaaaaaaaaaaaaaaaggggggg

SEQ ID NO: 449421 - DNA, 221 bp, Triticum aestivum
ttacttcaggtcttagattgccgttgcatggagtagacagtatgtcggcctttagatgttgaaggaggagggtggttcctttgtgtttacagcacttttaagttgataacttatgatcgtgttggtgaaaactatgcctttgtcacattttgctcctgttaagggaaagtgctactgttgtgagttttgttccccagtttgagatgaatttcccttgtcct

SEQ ID NO: 449422 - DNA, 204 bp, Triticum aestivum
ttatttcatgtaaaatttcctgtgagtttagaggagctaaccatcttatgcttttgttcacatctgaggagtggaacataatgttattgatgtaaattttctgtaagataattttggcacatacgatccttatctagacaaatctaataataaataagaaaatttgacgatttcagactataaaaaaaaaaaaaaaaaaattag

SEQ ID NO: 449423 - DNA, 96 bp, Triticum aestivum
tgtctgttcgtgccatggtggatgtagtgttcctgatctgatgtcacctccttgctgtcatcagtaactgaaatgaaaatgtttgttatctgttct

SEQ ID NO: 449424 - DNA, 356 bp, Triticum aestivum
ttgtttctcgtccgcccacgcgtccgcccacgcgtccgccctctcgtccgcccacgcgtccgtgctcacttactcacacgcaggtttcggcgggaggaggatcgatggcgttcatgcggtaccgtgcgctgccgcagggggaggtgaaggcggaggagttctgggcgtggctggggcagttcgacgcggaccacgacggccggatcagccgggaggagctgcagcgcgcgctgcggagcctcaacctgtggttcgcgtcgtggaaggcacggggaggggtgcaagccgcggacgccaaccgtgacggcgccgtcggcagggaggaggccggcctgctcttcgcctacgcacagagg

SEQ ID NO: 449425 - DNA, 124 bp, Triticum aestivum
tgtttctgaggcgcacggccacgcacggaaggcctaccgggacaagagcgggcaccacggccacaagacagcacaccacaccgggcacgggagcgggcaccaccacgggcagcagcaccacggg

SEQ ID NO: 449426 - DNA, 402 bp, Triticum aestivum
tttcttcagaacgtatgcacacgaaccgacgaacgtactacgtgtttggcgagctatgtggtgccgattaagctggctaggttagtttgtttatatattgcagttcaagaaacgacagctaagctaacgacgtggcagtgtgtgagtaggaagcataagtacgtgtactaagcgacagcgattgacagtagtgactagtgaatgagtggatctgtgaatcatttttgtagatgtagagtcctggaatcaggattatgcaactatgattgggtgattggtacactgattgccagcaaaaaaaatgtgatgaaaacttttggccggtggtcttaacaagtagaagtagtatagtatatttttgacagttggtggtctaactagtaaatttaccagttgccccac

SEQ ID NO: 449427 - DNA, 410 bp, Triticum aestivum
ttcttcaataaggcacgggcacgcattttcaatggttccattcctgcagatgttgtaggcccaagtgatttaggaggtttgtcgattgccagaaacgaaccggtgaatgttgagccttctgttgatgagaacaagggttgcacattcaatagccgttccagggttgctgtttttaaggacactgaaaaagatcgtagtgatcctgactacgatcgtaattacaaaaggtatgttaggccccccgtgcctgactatggtgtgagcccaggcgccttcaattttgccgtgcctcagtttgtgcagtatggtgttggttatatgcagtctcctagcatgccgagaaaccaaccttctgtgtactttggtcaacctgatttatcgatgggatcttctggaactgctgtttaccc

SEQ ID NO: 449428 - DNA, 345 bp, Triticum aestivum
ttggtatatgtagcgcttgtggttttcaccgggagacatggctaagccagctttctccttggtgaagtgtgtgtgcgtgtgagtttccatggtgtgtgttcttgtcttcttaagagaagaagagagaaaccacaggagagttgtgcgaggcagctcgaggaagaagaaggttggcgctgcaagaggagcggcgccaacaattggtattcagagccttgtcggtccggagcggtggcggcgcggcaaactccatgcgagatggaggccggcggcgcaaggaggaggtcggtggctgctgctacggtgcgaggccgttatgaggaggagatggtgcgcggtgatcgt

SEQ ID NO: 449429 - DNA, 250 bp, Triticum aestivum
tctttttattgctagaagcagggttctatccatggcaatggtggtgaaggccctcctcgttgccgtcgtggccgtggcagcgcttgcgcagctcaccgaggcagtggatcaccaggtgggcggcagcggcgcgacctgggccaccagcggcggctacgactcgtggtcggggaagcagaagttctctccgggagacagcctcgtattttcgtactcgccggcgcacgacgtcgtggaggtgagcaaggcc

SEQ ID NO: 449430 - DNA, 96 bp, Triticum aestivum
tttgttgacgcaggtgcagccggacgtaggcatcttctacaaggccatgtccatcatgaactattgcatcaacggcatcttcgagaagctcgccgg

SEQ ID NO: 449431 - DNA, 245 bp, Triticum aestivum
tctgtttataggccaacttagcacaaggcctatttaccactgagtgttttctcagttgcctgcagcagtcgacttgtcaggtgttcaagtggtgccagagaggattcttgaacgcaagatggtgaaacgccacaacaaggtgcaggtccaagtgttgattcagtggtctggtttagcagctgaagcagccacctgggaagactatgatgtcttgaagaacaggtttccggacgcaccagcatggg

SEQ ID NO: 449432 - DNA, 289 bp, Triticum aestivum
tttgcggcttgggccggcggctggtgctctgcttccggcagtgatggccgctggtggtggtggtcttggcccgtgcttgccagatttgcagtgagcagggtgaggatggtggtggcgatcctgtggtggctcgtcatcgtgggcgtggtcctgtaggaggcgcatggggcgggatgtgaactcggcagcgtgtcgtagccgctccaaggcggctcggggctgtccctcgaggtcccggcgtggatgtgggctgccacggcgtggtggtggctcatggcggtggtctggg

SEQ ID NO: 449433 - DNA, 361 bp, Triticum aestivum
gctacatccacccacggcggtgttggacggcggcgacggcttttctttgctgcaactgtctcggatttttgctactaccggagacgccatttgctactaccagagtcttgttggaagcatcagaagttttcgctaccaccccaagttttttttgacttttgctgaaccagcctaaaaattgctaccaccgtcttttgattttgctggaaccggcattttttttgcttcaccggcggcggtgaaggtgggtcgtgttttgcttcgccggcggcaagcaggggtagcggccggcgacgtgaggctccgcgagccgcggggggcctcgccggagatgcgccgcaggggcgttgctggagctggg

SEQ ID NO: 449434 - DNA, 384 bp, Triticum aestivum
ttgctaatgcttctcttgaagacaagttgtcatccacagaggcgcagcttaagcaacttcatgccgaaaaggcagaagcatctgctgagagtgagaagctgatctctggattgaagcaagatattgccaatcttaagacagagctcgagttactgtcctcacagaaagctgcagttgataataaggtgtctggtttgctgagtgatctcgcgacttgtgatgaaaagatgaaggagatggatagccacttgcatcagctgcacctggagcatgtgcaagtgattgcagaggcagatgccgcacggaagtccgtggcagacctgcgtgcacgggtctgtgagctcgaggaagaggttgagaagcagaagctcatggcctttgaca

SEQ ID NO: 449435 - DNA, 77 bp, Triticum aestivum
ttttccacgcgtccgcccacgcgtccgcccacgcgttcgcccacgcgtccgcccacgcgtccgcccacgcgttcgac

SEQ ID NO: 449436 - DNA, 61 bp, Triticum aestivum
tttcttaaacatagtaaaatgtataaaattacgcagctttccccccaccactggtgggggg

SEQ ID NO: 449437 - DNA, 346 bp, Triticum aestivum
ttgttctgaaattcaaacagccaaaaaatccaaaatgtgtcccatttgtaccaacaaacggggaaccgccaaaccaaccacggaaaccggaaaactctcgacccccgttccctccgatctgccaaaacccattgttccgagtgaaccggaaaaaaattctcgcggggttcgcgatcccaaggaccaatcgatgagcgtatccggcgagttacgggctcgtggtgcagggagatcctcttaacgatatatttttttttgcgttttcaaggagttcgataaggaactcggttacttcacgtttcaaaacccactatgtatgacacgcaccgtattaaataacacgtcg

SEQ ID NO: 449438 - DNA, 190 bp, Triticum aestivum
tgttgtacgcgtgggtttgtttttgcggggggtggaaatagtgttatgttgaatgtatttaagcaaagacatgctgtggctttgtctagcattgatgtgtgcatatactgttgttgtgctgggacaatgggcttcaccactgcggtgacctcgtgtataccactagtaagagacatgttgtgttgtgaga

SEQ ID NO: 449439 - DNA, 314 bp, Triticum aestivum
gcgagggcgaggcgagccactggctgatccgtgtctactctacgtccctgccgcccgtacggacatacatattgagtaaacctggggagtttcttccctgctctcgtgttaccgatgatttgtcccatgtatacatatcgagtagtaggcgcacggatttagtacgatccatgtatagagggtggctcagaaccgtgagcggtgtgtctcaccatcactcgattgtacagagtgttctcttccattttgctatgtgaatatgtgatcagatatttgtaggacagcatatgattattagtacaactttacaaaaa

SEQ ID NO: 449440 - DNA, 430 bp, Triticum aestivum
ttcgaaggaagcgtggcatatatttgctgggaaagcccttattttggatcctacatgctccaaacgtagctgggaaaagaaatcaaaggtacatatgttctttcaggaaaatgggacgttatggacaaggtttggcgcactctcacttccaggtcgttggctgctgccgcaactgttgccgctgagcacgcaaatgttcgacttttgtccttctagggccatgggcactgagctcgggagggcgttctctctgtcaaattcttgtcacgctatatgaaaccttacatctaagctgctaaagtgaatgacgggtattgtctgtattgtgtattgtgtattgtgtaggtagcaagcagcttccttttgttccaggtcatgtaatatcatcagcaaaaatagaacttaagacagcaaggtcttacattttttt

SEQ ID NO: 449441 - DNA, 270 bp, Triticum aestivum
tttcgccccctccaccgccaagctcgcctgatccgtcagattcaggaggggttggtggctagagctcgaagggcgctgtgctcgcaaggatcattaatgttgttcttgtatgaacgaaacatctgtttgaattcggcataaagttaactctttctttcttggtcttgttcccctccgccttccctcctttggttcaagtttaagtttgatggaataaggaaccagctgtcttcctatactctgacgagtgaaatggcaagcttgaagttt

SEQ ID NO: 449442 - DNA, 273 bp, Triticum aestivum
tgttttcccacgcgtccggcggcgaaaataaccatcttagttattggtttccatttgatatggttgtgataggaaaggtatgcattgccaccgtcgaacctatgtgccctcagctcagtttcaccaatgtagtggagaaaatgatgaaggtggttgttctgtttttgttttctattgtcacttgggaattgctacgagaggaaccatattactgatatataatttgcttgctaccgaaatttgttttttgatgctacatttggtataccacct

SEQ ID NO: 449443 - DNA, 137 bp, Triticum aestivum
tttttgcccacgcgtccgttaagtttgaatgtcttgggacaaaatctggtagtcttttgatccaaataaggtctggatctggatatcttgcttatgatttgtcagattaagctttctggtggtgttgaatttgcatg

SEQ ID NO: 449444 - DNA, 151 bp, Triticum aestivum
ttatcacaaatgaattaaggcaagaggcacatctgtagcaaactagcttgggcatttaatagcagccatgacaaaatatgaagtagttcttcgaaaacagttgtactaattctggctttaagaacactggaacatagagcagatccaactt

SEQ ID NO: 449445 - DNA, 281 bp, Triticum aestivum
ttggtgcaccggaaccatcggcttctgtgcctgcgtctggttcacgaggatgatctactcgtccgtgaagatcgattagtcgctggaagcacaggaggcagagacagagacagaagcatagcatatgttttcagctttcgcggtcagaggtgataattgtatgattaaggtgaaggtggggatcatccccgtgtttgttactcttttgagggaaaagttacattttgggattagattatgaactgttgatttatgattattgctgcggtcacaagtgatga

SEQ ID NO: 449446 - DNA, 360 bp, Triticum aestivum
tttttggggcactgccgatgctcgaggatctgggcctagtctactctgtgtcaatggcgaatgccaatggattctgcctgggttttcagcacctcccaagactgagaaatgcacgagtccgtctctacaaagagggcgcaacatcttctgctatcacttctgcagaagttgctataaagaatgaagcagatgcccatcccaaccatcccacagtaactctgatagaacatgtcaagagagtggattattgctctgaggaatgtcctaagagaaccgtacagagctactctgaagacccagaactagttgacaatacaactaagcaaaaggaaacttaaatttgtggactggtgacaagtg

SEQ ID NO: 449447 - DNA, 113 bp, Triticum aestivum
tcgtccacgcgtccgcccacgcgtccgcccacgcgtccgcccacgcgtccgcccacgcgtccgcccacgcgttcgcggacgcgtgggcgcggtgacgggggcggacgcgtggg

SEQ ID NO: 449448 - DNA, 163 bp, Triticum aestivum
tctttcacgcgtacgcccacgcgtccggctggacttgcaaagaaagagagcatcaagattcacggattttaggcaacacacaaatgctcgtgtgctgtcaccgaagcctggaagttgtcgtatacttggtattgtcacatctaagacatttgaattgctagta

SEQ ID NO: 449449 - DNA, 60 bp, Triticum aestivum
tgtaaatgtagaaggtttttttgctgtatataaactggagatatgacactgttcttcgtc

SEQ ID NO: 449450 - DNA, 127 bp, Triticum aestivum
aaaaaaaaaaaaaataaataaaaaaaaaaaaaaaaaaaaaaaaaaaaaaaaaaaaaaaaaaaaaaaaaaaaaaaaaaagaaaaaaaaaaaaaaaaaaaaaaaaaaaaaaaagggggggggcggtttt

SEQ ID NO: 449451 - DNA, 320 bp, Triticum aestivum
tcgattcgaaaaggccaagatcgtgcaggagaattggtagcaaataaatgaaacaaagataagattcaaccaaccatgtgctcccaggagaatgctcttctctcttatgatggatcctccatgcatttctttgtacatagcagcattcccttttcttgtttgtaaaactactactgccagtctgttggtgttatttccatgccatttgtaatttgttctttgaaatggtttgtgatttgttttgtggggagacagaattatcctcatttgtgtgggagccattttctcattggtcataaataaaatggatggtttaccaa

SEQ ID NO: 449452 - DNA, 410 bp, Triticum aestivum
ttgtttcacgcgtccgcccacgcgtccggcagagttggactcatagataccacatatctttgcctccgttgatgcaatcatgttatttcactccaagacacacactttttcatgattccaaaatttgcgtgcagttgtttgctcggaacctatactgctatgatccaaattcaaactctgaggaattggagattgcctgtccagaatctgagtttcctttcagcattcatacgtttgttgaaagtataattcctctgtgtcaagataatttcatcaagaagatacagtgatgttggtcttctttattcttgaagatagatttcagcttacagatttacattatctttgatgttttttctcttcaaaaatggacttgttaactgccttaatttggcctactttatcacttt

SEQ ID NO: 449453 - DNA, 344 bp, Triticum aestivum
ttgttctggccagccttgggtgagagggtgggatgacaaggacaagaggggtctggatggacccaagtatggaaaccagtgataaggtgcttgaaaccattatcgcagtcttaaaactcagcttgttatcctcggtgtgtatgatgcttgtgtaaataaagcaagtcatggttagtgatgcgctatgatttgtattgtcatttgatttgtgctagtaataaggtttcacttgttcccgttgagggaaacgtgtctgactgtagtggtaatgtgcagccaaatgtatctccttgttccagatcggagttaactatgtatgcacaaatcactggcgcattttcact

SEQ ID NO: 449454 - DNA, 115 bp, Triticum aestivum
tttttggttttttttgagggggaaggaggtgataactacttgctttcaccacgtttatttgtaagctggcggccatgatgttttttaatatgatgattgtcgactatttttttat

SEQ ID NO: 449455 - DNA, 73 bp, Triticum aestivum
tcggtgcccgctacttcaaagaagcaagcacacggcctccatggactccaagatgttgcgctctccggtcatc

SEQ ID NO: 449456 - DNA, 361 bp, Triticum aestivum
tcggtggaatgaggcctatgagtttacttggctggaatgccacggtgatgcatgtttggcaaattgctcttgtcctgaccacatggcaccatggagcatggctgacaaattactgtaaaccccctgctgattaagcggcggacatgattttaatgctaaaatattaagtgctgcatccaatagccgcaattgtattacagtgtactgtttggtaaatctcatgcgccagttttttgtccaagagttcacatgcatgctgaacaatagcatttgtggaagggtagaatgcagtatggttagcattgagatggtgtgagcactgagcacaaatgttgatgtagtcttcctcatgcggatttgc

SEQ ID NO: 449457 - DNA, 317 bp, Triticum aestivum
ttgatcgcgagcgggcagctcaatgtgggtgtgggtggtttctggtggccggcttggagctgcaactggaggagcccatctctgcggtcaccctccccaacgcccacgccactccgtccagtccgcccatccacaaggaggaagaccgccgcttgccaggtgagtccgcaattttcttctccatccccggccgtatccgtatggctggctgctctcaagtctcaacacaccaacgacctcgagcagcgaccgtctgcctggtcccagcatcaagttctcgatgactccggccatggccggctcgccgtacatgcact

SEQ ID NO: 449458 - DNA, 86 bp, Triticum aestivum
tttgctccagttgtgttgagtttcacagacatcatcatcaacttagctgtttgaaaaaaaatccctctttgcttgcccacttgttt

SEQ ID NO: 449459 - DNA, 299 bp, Triticum aestivum
tcgtttgatcaagccctccggcaacaacgtcgacggctccaccggcgtcaagggcaacaacatgctcctcggcagcgtcgtcagcaaggacttcccgctggcctgctactccgtggacaagatgccgctcccctacgagctgttcggcccgcagccgcccaccccggcgcccgccccggccccggcccccaccaagtccaagcccaagaagaagaagaagtccgccgggatcgccgaggcgcccgaggccgacgacgccaccgccgacgacgacaccgagaagtccgccgccgcgtccc

SEQ ID NO: 449460 - DNA, 55 bp, Triticum aestivum
tctttcatctcagcggatggtgatagacgcagaataaagcttgggagtgtcccgg

SEQ ID NO: 449461 - DNA, 327 bp, Triticum aestivum
cactggctgtaggtatcactattgctgttggtgtagtcggttacatacaggagaaccttggctggggaattgggtttggcatgctctgcgccatcatgctcggtgccttagttgtcttcttccttggcacccctacataccgcctctatgcacccactcccggtgctgagaacccctttgccctccttgctcgtagccttgccgcgctagcccaacatgacaatgccacttcgagctcattgcttggttacaaaaaagaataccaggtagaacaaaaagaggatgcggtaaaaaaggaggaggcgcgtggcgtggtacggttgctgt

SEQ ID NO: 449462 - DNA, 56 bp, Triticum aestivum
ttcttaaaaaaaaaaaaaaaaaaaaaaaaaagaagaaaaaaaaaaaaaaaccctag

SEQ ID NO: 449463 - DNA, 208 bp, Triticum aestivum
tttgtcgcgtcatcatcagtaagccagtttagtttcattgcgctatcttgtccttgagaaattcagggtaaacagtgtgtgcgagtcagtcagtcaggaataatctcatccttctcttatcttggtgtatgtatgtacgtcctcaattatgaatgcttctattccatggtcaagattgatgtttgcacagaacaacaaaacactgatg

SEQ ID NO: 449464 - DNA, 135 bp, Triticum aestivum
tttctttgcattgtattgtcttgtgtatcccttatttatttccttgggcatgatttgctacatgcttttgcgagcgtaattaggaccgattgtacctgtctctctttgcctgaaatgacttgttgcagaaaataa

SEQ ID NO: 449465 - DNA, 451 bp, Triticum aestivum
tttcattaacgcagcacactcgcataccaggaaaccgaaacgcatcaaggctaggcgccgctgaccatggacaggatcttggctttctcgatcctcagctcctcgcccgcggacatcccgggtgccggctacagcacgcccacgcgcctttcctggaggggtggcagcggggagcagccggagaaagcggcggacaagcatcggcaggaggagaaggtcaaccagggctctcggccggagaagaagccggaggtgcggttcgccccggagttcgacggcatcaactgcttcgagtccatcatctccttttgagcggctgatccgctgttgtctcgggatagttatcgagcttcatatctatttttgctggttgcttaattagtgatgatgagacatgtatttctcaaaaagaaaatgtaaatatttgggcccgggcgacggccgaagcttt

SEQ ID NO: 449466 - DNA, 153 bp, Triticum aestivum
tttcatcttttaaagatggtttcttaattatctgtaattaggggggtcacaagagcctttaatgtaacaacaattggctccttttaacaggaaccacctctgttttctagtgcagctctgtctgatctatttaaggtttaacaagtttttgtt

SEQ ID NO: 449467 - DNA, 139 bp, Triticum aestivum
tgttttgtatacatatgcttatatgtagcacaagttgagttttttttactagcaaggcgagataaacttcttatcgttcgagttgacgcccacctgtatatacaacccttgattcaattgcatttattgcttagatggg

SEQ ID NO: 449468 - DNA, 443 bp, Triticum aestivum
tttgatagaaggacttcttcccttgttcctcgcccagtctccttgttcctccaagccaagaaactgctctgtctgtgagaaaagcgagcgggcgatcggccatggggaagatgtgctgcagccaggaggaggaggaggcggggttcaacctgctgccgctggtgatggccgccttcgtcatcatgctgctgttcgtcgtctgctcgccgcagccccggcgcaggcgctgcgtcgtcgtcccgtgctactgacgtggcatcatggtggtggtgcggtggtgggagcctcgacctcgatcggcggcgctcaaggcaggcaagtggctgctactgtggtggtaggcgtttggttggtgtctggatttttctgactgatgcgtgttgggttgggtggaagaataatctcaatttctgctgaattccatcggactgtaaagctaaagt

SEQ ID NO: 449469 - DNA, 213 bp, Triticum aestivum
tttcttacgcgtccgcccacgcgtccgcccacgcgtccgcggacgcgtgggcgcgaaaagaccagagtgccccgcccctcatccccgaagtctccaaacccctcgtcggaagaggtgagcaagccttcacgatggcggtggcggagctctgggagacgctgaagcaggcgatcttagcgtacacggggctgaccccgacggccttcttcaccg

SEQ ID NO: 449470 - DNA, 194 bp, Triticum aestivum
ttttgattctgtatcattgtaatagtgagactttactacacccattctgtcggtagaacattctcttaggagattgttttatttgttttggttgagatatactaaaggctgtgtacctatggaaagaaaaaatacactttcaagttttgtatgtagtacttgatgtatgtctcaagtataacttataatgatcc

SEQ ID NO: 449471 - DNA, 128 bp, Triticum aestivum
tttgggtcgcgtgggcggacgcgtgggcaactagtaaagaacattgcattgccaactgctcttaggtcatcacaaaagagttaattgacgttggtgatacaattaaaaaaaaaaaaaataaaaaaata

SEQ ID NO: 449472 - DNA, 366 bp, Triticum aestivum
ttgtttttgtacacctccatttcattatccggggagctcattatctaattcacggcaacattcgcatgtttaccactactagtcatattcttgtgtggaccaacacgtagtctgctacgatacgttggctcttggctgtcaccatgatatggacatgatatgcagagcgacattgtgcatggccattttcaactgctacttcctccgttgttttagtctgcatataaaatctggtcaaagtcaaacttagtaaagtttgatcaactttgtagaaaaaaaaattaatatctataatacatcatatagtatgaaaattaatttcatgatgcatctaatattattgatttcatattgtgaatcttgata

SEQ ID NO: 449473 - DNA, 107 bp, Triticum aestivum
tttgtttgttataactgaccaccaaaccaaaccaatctcagttatttggagagatactaaatactagcaagtattatactaattagttaatgtgaagaaggtactct

SEQ ID NO: 449474 - DNA, 285 bp, Triticum aestivum
tttctcttcgcgttcgggactatcattggttccataggacaattagattctgggctatggcttctggttgctgattaggtttagattatgtgtagggattattgtgcatcttggttgcccttgctaattaatggttagatctcgttccccccctccgactatcagtcagccttggatgtatcatatcgtgattccttcctttatggtagaactggaatttcttggattcaaaaaaaaaaaaaaaataataattaaaaaataaaataaaaaaaagggcgttctttg

SEQ ID NO: 449475 - DNA, 261 bp, Triticum aestivum
ttttctcccacgcgtccggccggcttcatcgtggccgcggtctacgccgtgtccgccatgtgatctgatctgattggcggatcgacgcggcctcttcttcttgtcagtcagacagtagtgattccgtttgagattatatatactggggttcggggatcgaattggcgcgcatacatgtgatatgcgaatgtgatccatggccgattccatttgtaatttgttgtaccgtgacatgcatcagcttatctacttgattgattc

SEQ ID NO: 449476 - DNA, 102 bp, Triticum aestivum
attttagtctgactactgacacatacacacacacacaagtgctagctagctaatcgatcaggcagccatgtcggaggagaagcaccaccacctgttacacca

SEQ ID NO: 449477 - DNA, 163 bp, Triticum aestivum
ttttataaaaaaaaaaaaaaaaaaaaaaaaaaaaaaaaaaaaaaaaaaaaaaaaaaaaaaaaaaaaaaaaaaaaaaaaaaaaaaaaaaaaaaaaaaaaaaaaaaaaaaaaaaaaaaaaaaaaaaaaaaaaaaaaaaaaaaaaaaaaaaaaaaaaaaagggggg

SEQ ID NO: 449478 - DNA, 186 bp, Triticum aestivum
ggacgcgtgggcggacgcgtgggtatttttctcaagcgccgtgtatatacacgagatcaagttaaaaaaaaaaaaaaaaaaaaaaaaaaaaaaaaaaaaaaaaataaaaaaaaaaaaaaaaaaaaaaaaaaaaaaaaaaaaaaaaaaaaaaaaaaaaaaaaaaaaaaaaaaaaagggggggccgtt

SEQ ID NO: 449479 - DNA, 133 bp, Triticum aestivum
taaaactaaaatgcgtctagatacatccatttcctcgacaagtatttccggacggagggagtactatatagacgttgtaaagtaccgaagtctttttgtacataaaatttggcaaaagaacatcctcagaatt

SEQ ID NO: 449480 - DNA, 469 bp, Triticum aestivum
tttagtctcgagcagaggtagtaatcacagaagaatctgctgcccctgcgtgcttgtttggagcttggtgcctggaggcgaggctaggaagaagatgacgaggcggttcttgcctctttgcgcgctcctcatcgtgctgctctgcatggcggcgagcctcgcggaggggaggcgcggcggggggcgccccatcatcggcggcggcagcggcggggccagagggagagggtcaggcagcccgcgcggcctcagcggcggcacctgggcggcgtgcgtcggctcctcgctgctggtcgcggtggccatgctcttctagcttgcagcggcgagaagaactcaagaaggatggttgggcaatgtaaatgttctgtggattcgttggttctttactactactgtcgatttgattgttgttgtatatacgtacagatacattcgtgagcggattgatgaattcatttgacatgtt

SEQ ID NO: 449481 - DNA, 423 bp, Triticum aestivum
ttctttttgtgagtgagcgagcgagctagtctttcttcttctgaaaccatgtgcgagtccgcctccctactagctgcagccggagaccaagacggccaccaccaccagggggtgaccaaggcagccgagatggacacgggtggcctgctggaccattccccggcagccctcggcccgagccctcttcccacgccgcctccaccgctcgtgttctaccaagacgattaccggtactactacgacgacgacagttgcctccaggaggaccaggagggcgacgacggcgcctatcaactgctccaggacgaggaggaggacgtcgccgccaccagctcgcttgctgccaggctacgtgagctcgttcgccagaagctggccgaggtgaacgcctccagcgcggtcgtcgcggggctcggcctcgtc

SEQ ID NO: 449482 - DNA, 252 bp, Triticum aestivum
ttgtttctctgtccaccggccggagggaagggagaaaagagaaagctagctgcctttgtctttgggccatggcggagttcaagcacctttgcatggccaagttcaaggaaggcgtcgtggtggaggacatcatccaggagctcaccaagctcgccgcggagctcgacaccgtcaaatactttgggtggggcaaggacgtgctgaaccaggaggcgctcacgcagggcttcacccacgtcttcgtcatgacct

SEQ ID NO: 449483 - DNA, 466 bp, Triticum aestivum
tctttttcccacgcgtccgcccacgcgtccgatttgggatatggcatgaagggttcaagtggctattcacattggtaatctgtgatatttatactgcagaccaaatgcggaggtaaactctggtttgtggtgttctaagaagttcccaagctcgtgcatacagtgttgaccccttagtcacctgctacgtctgcatccagcacagcacacacatcaccatcaccatcaccaatgccatggcgcgcccctcttgctgcatgcggttgccacatatcatttcttctgagccttcctggttcctgttcgattggtggagcattttggactagaagcggctctttgtaaatttattgtaccgctttaagattagtaggggcatggttcttcttgatgtgtaagctatgattgtttgtgatcatttggagatgtgattgtatgttggtaaaaactaacaggttggatattg

SEQ ID NO: 449484 - DNA, 209 bp, Triticum aestivum
tgttttgcgtgggcgctcatgttaccatgtctgttccgtcagttttgagtcataagtgagacccttggaggaaccatgtttcatacccgccctagtttgttccctgacagtgttagaagaattgtttgtgtcgatctataattattgtttgatttgcactagggatcgctgcttgttaaaatttgcggagcctgctgctggattttcac

SEQ ID NO: 449485 - DNA, 412 bp, Triticum aestivum
ttctgttttcggacgcgtggggcgtctcccaacttttccttccaaacagcggtgacctccaccaccacccaagagccgagcgaggagaagagaagagatcggccatggctgcggacggcgagaggtgggtgggcctggcggtggacttctcggaggggagccgcgcggcgctgcagtgggcggcggacaacctgctccgctccggcgacaacctgctcctcctgcacgtcctcaaggaccccgactacgagcagggcgagaccctcctctgggaggcctccggctcgcctttgatccccctctcggagttctctcacccttcaactgcaaagaaatatggggtgaagcctgatgctgaaacgctggacatgctcaacactatagctaagcagaaggaggtctccgtggtttc

SEQ ID NO: 449486 - DNA, 216 bp, Triticum aestivum
tttccttcgcgtccggacgttgtgtaagactattgctgtttaatgtatggaacttctgtatcgaccgcgcttcctagctttgaatgatcctggggctagtgagccgactagataggaaagcgaggctggattaacaatttgaagccgataatgttgaaacagtgtatgactagctaactatgtacttatatatatatatacaaacaaggatgttaa

SEQ ID NO: 449487 - DNA, 324 bp, Triticum aestivum
tcacaaagcgcttgaggatgtgaggttttctgtttgtgtctttttttcttcttcttagattcgtttgtttcaaaatgatttatcactcgtaccgcgtgtccaaatgatgaaccgctttcacctttgtgtttctcgcgcctaggttttcaaaactcggtccactttggtaggttttgatgaacagttttctgcaaaatctatgctccaagctgtactaatccatgcttcaaaactgactaaaatgtgcttcaaactatactaaggtgtgcttcactttttttgggacgcacagtcgctttttcacatgagtagcacatgtgtgct

SEQ ID NO: 449488 - DNA, 189 bp, Triticum aestivum
cacatatccatctaaaccacaatgggcaaggccacgatgaacatcaagcggcagcgttccactagtgtcaccactgctgccctagcgtccgtgctgatgctgctcctggcggcggccggcggcgtagccgcacaaggaagaggaggaggctacggtggcggcggaggaggatatggtggtggtggcggt

SEQ ID NO: 449489 - DNA, 143 bp, Triticum aestivum
tttcttccacgcgtacgcagggactcgcagcctaacaggcaatcaattgggcagggaaacggaagcttgcatcaaggagcttgtcaagggattaggcatgaaaagtggatttgtatttttatttacttgtttggtttatgatg

SEQ ID NO: 449490 - DNA, 126 bp, Triticum aestivum
tttttcggcagcttttacatttgaatggaaaaaaaaaaaaaaaaaaaaaaaaaaaaaaaaaaaaaaaaaaaaaaaaaaaaaaaaaaaaaaaaaaaaaaaaaaaaaaaaaaaaaaaaaggggcggcc

SEQ ID NO: 449491 - DNA, 344 bp, Triticum aestivum
tgtcgttcgcccacgcgtccggtgcaacagcgcggtgtggcgcgcgctccgcgacgtgccggccgtgtcgcccccggggccggaggagaaggcctgcaacccgtgggcggactgcgtcgccaagtacccgcccaaggcctacgtctgacgatacattactacgccgccgccgcatgactccacacgaagattacatgattcttttctcctatactttttctgcatttcgtttcccgtaggtggctgtaccttaggttccatgggcgagcagtgccgttgttttcagcttttgtactttaagtgtgaattataaacgacaaatatatacgacgaggtttcattcc

SEQ ID NO: 449492 - DNA, 396 bp, Triticum aestivum
tcttggacgcgtgggcggacgcgtgggctttcagcacgtcagcagtccactcctttcgacatcttgaggagatttctctgcatcgcgaagtgggcgatgaaacaaaaaataagtggaaagaagcagcaaagaatcacccaactcgtcgtcccaagatcttgttcctctagacaccatcaacacgtccaggcagtacaggctgtgacttgctaatggcacagcattctcatatgctgcttattggttgatgaccattcatcaacatgatttagtcctctttgctctcgtgtcggtttggtggcttccccgttgttcgtacttttatgttgtgtcaccactaggatttatttacttgtaacagacctaagttaatgacctattaagctgagcaaacga

SEQ ID NO: 449493 - DNA, 212 bp, Triticum aestivum
ttcgttcgcgagcttgtgcatgtcagacagctcaagagagaatccctgataggaaatgtcttgttgcttgtgaaattgtaagatctgcactactgctcattgtggatcatgaacgatgtggcttcacaacagctcctgcgtcagtttcgcacttttttttcgcgaataaatgagattttattgcttaaaaaaaaaaaaaaattaaaataaat

SEQ ID NO: 449494 - DNA, 226 bp, Triticum aestivum
tcttggacgcgtggggtacagcgtagcaggattgttcatgttcatgagggcgatgtggtgcacttctgcactgaagcgccagtgcgcgagtgtgtatgggactatcatcggatttctggatgtaatgtaattttacataaataaacctggcttgctagttactctagcgtgaagcatgaagaggattatgccctgcttgcaagaattgtccgtaatgattcatcat

SEQ ID NO: 449495 - DNA, 170 bp, Triticum aestivum
cccacgcgtccgcccacgcgtccgcccacgcgtccgcccacgcgtgcgaaaaaaaaaaaaaaaaaaaaaaaaaaaaaaaaaaaaaaaaaaaaaaaaaaaaaaaaaaaaaaaaaaaaaaaaaaaaaaaaaaaaaaaaaaaaaaaaaaaaaaaaaaaggggggggccgtttt

SEQ ID NO: 449496 - DNA, 205 bp, Triticum aestivum
ttgttcagtcggtgcttccacacagacagcgatggagccgtacatggcgccgcggaggctgtggcacgtggtgcgcgccgtgctgttcatgctccgcaagggcatgtacaagcggaagctgaccatggacctgcagctcctgctccaccgcggcaagatcgtcggcaaggccctcagcaggctcatgagcgcccacagccaccac

SEQ ID NO: 449497 - DNA, 55 bp, Triticum aestivum
tttttgacgcgtgggcggacgcgtgggcggacgcgtgggcggacgcgtgggcgga

SEQ ID NO: 449498 - DNA, 351 bp, Triticum aestivum
ttgttgagcgctagctagacggaaaccatctctcccctgctcctgcttccgtctcaccaagtcagccacgatggccgtcgtcgccgacaggtcgatgctccggtcgtacgcttctctcctccgcgctgctccggcgagggcctcttcctctgcggcgcggccgtcccttcgccgcgcgctgggcgcgccccctcgtctcctcaggtagcccgtcgaggcgagcttctgcgtggagtcgctgctggcactgcacagcgccaccgcagcggcgcggatgacatctatgctggccgtgcctggccgaggcctcgggtggctcacggaagctgaaattgatggggtatgatgctg

SEQ ID NO: 449499 - DNA, 190 bp, Triticum aestivum
ttcgttacgcgtccgtacccaaccaaaaggatctatggtcatcatcctcaccttattaaaccaaagcccgtgcacctgatcctccagtgctgtccgcgatcacagcgtccgtgatagtgctgcgatccgctgatccttgggctggtagctcggggagcaggcgttgcgttcgtttcttgctgggagagtg

SEQ ID NO: 449500 - DNA, 289 bp, Triticum aestivum
tcgcggacgcgtggggccgcgcccaggtctagggttccccctttcttcttctccacgcgaatcagctagatactagcaccagcatcgatggcggtggcagcgccggcggacgcgaaggcggtggccgccaatatggacctcctcgaggacgacgacgagttcgaggagttcgagatcgaccaagaatgggatgacaaggaagatggcaacgaagctgtccagcaatgggaggatgactgggatgatgacgacgtgaacgatgatttctcactgcagctgaggaaagagc

SEQ ID NO: 449501 - DNA, 134 bp, Triticum aestivum
ttggtgacgtgaaacgatacgcggcaagtagatacgttaactctttctgtgtataccacgcattgtctctactctgtagtcttcccctaacttgatgtaacaacctatataatcctattctgtaatctttccct

SEQ ID NO: 449502 - DNA, 389 bp, Triticum aestivum
tcgcgtagctctcttgtgaaggatactccttttcacggcaaacgttgtctgcagtttccagccgaagaggatactgaggggttcgacaatggaacacagagaatgatatggttgagtcgacctccataggatcgccaccaataagctcatgcaatccttatcagtgatgatgcaagttttggacaaggatcttcattcattcgaagcactgatgatgatttaagttagatgtgtgtcagacgtgctttaaaaccatcatgcttattctgcgtgtaatgttgtttaatgcatattgatccttctagttgtgtatctatgccatgttagcatcggatatgtcagtaatatgatttaaaaccatcgtacttattctaatatgcatattgatc

SEQ ID NO: 449503 - DNA, 95 bp, Triticum aestivum
ttggcgcggtgctgggggccagctaccacgtggtggtgatcagggtcatcgcttttaagagccgtgactggtccttccaggagctgcgaatggaa

SEQ ID NO: 449504 - DNA, 447 bp, Triticum aestivum
tcgctcacgcgtccgcgtgcgtgcgtgctccatggtgaggtcgcttccgtctgtttcgatggaggggaggaggctgcaggaggaggagcaggagcaggagcagcgggaggtgctgctcatccacagccaggtgcggaggatcaagcgggaggacgaggagacccggaggcaccttctcaagctgcagctgctggagacgaggccggccgccgggcaggaggcctcgccgccagcctcccgctcgctgtcgccgctgcggcgtgccgggagcgccataccggtcggcgactgggcctagtcacctcgcctgcccggccaggcagcgtatacagtcgtatagatataggagagcgagcgagctatatatttgagagccttagtacggtcgatcgatgcctgtccatgctctctgcgtgcatggaaccagagcttatagctgatcgatct

SEQ ID NO: 449505 - DNA, 313 bp, Triticum aestivum
tgcggtccaggtcgctggtgcgctcttcccgatcacccgcaccgtgctcaagtcggagtcggccgtgatcacggacgagatgaaggaggagagcgtcttcgccaagctccgtgttgcccgtgccgatgcccgcatcgtcggcaagcagaagaagcgccttgccgacaaggccgccgccgtcgaataagcgaccgttgcgctgagccgaagcgagtgtcactaggaacttctaacacaccaagctcaatgtggaacaactgttgggtttaaaaaacaacgggtctaaaaaaaagatcaaaaaaaaaaataaaag

SEQ ID NO: 449506 - DNA, 207 bp, Triticum aestivum
tcgcgcattcatcagcgccaattctgctgatgtgtaaagaatgatctgtcgttatagtgtgcgttgggaggatattatgtgattgtacaattatgatgtaagttgtaggcaaagaaacgaccactggatcttgattcttgttctgacctgtacttgatttatcgttgtaccggccagtgtatcatggatatagccgcccattctcac

SEQ ID NO: 449507 - DNA, 399 bp, Triticum aestivum
ttgcccacgcgtccgcggacgcgtgggtctcgcgccgtttctccctcacaacacaaaccccgagcgaagccgtcgacgtgccgtcgtggtctccgtggccatggtcattcccgagctacgacaagatgcctagaggcaccgccgtcctcttctacgtcgacttcaaccatcggagcaagctgggagggcctcgcgcgtcaccatcgagctcatctgcgcctctgcatctagacgctcgccgtcttggattcggtctcaccggagcctccccaagcccgctttgctcatctacaggctcaacatgctggagtccaggagccagacgccactgtcgacgacgactcctactacacctgaggtgcctactactacgtgcagcccgctgatgacgaccaggag

SEQ ID NO: 449508 - DNA, 354 bp, Triticum aestivum
tcgctttcttaacatgtctctttggggtacatcaatgattgtcacatatgagctaataaaaagactttctgtgaaacctgagcaatgaaccttctggcttctgctccgcctatctggtcatcatttccgttttggccatctagtgaattccttttggtacagggattggcatgtaacactggttggaaattcttgatgcaagtccccttataaagtctgacatgtttctgtacggaactaccctgtaaatacctccaagtgcaagggtgtctcgtttcagatgagagccagaggattgatctgggtactggagcgccttgtagttgttgagcaaaaatttccctgtaagtgctg

SEQ ID NO: 449509 - DNA, 73 bp, Triticum aestivum
tcgcccacgcgtccgcgtgcgtgcgtgctccatggtgaggtcgattccgtctgtttcgatggaggggaggagg

SEQ ID NO: 449510 - DNA, 216 bp, Triticum aestivum
tgtgaacccaagttaggagcgagatccaaacacctaattagcaactccacgactggaagtactagatcatatatatacatgccaaacacgccacggctcgatctaattattcagcaactgacacgattgagaaaactatggatcggacggacggcaaggcgaccggcggatgaggcatcatcaccctagccccctaggacttgctcttgccggagg

SEQ ID NO: 449511 - DNA, 58 bp, Triticum aestivum
tcgctcacgtctgcagctttgttgttgaggcatacaacaatgtactgttcacccacta

SEQ ID NO: 449512 - DNA, 313 bp, Triticum aestivum
tgttcgggcgctcgggctggcgcagatggtgggggggctggccggcggcctccactactacgccgcggtgttgcaccgtgccggcgccggcgaggacccgtgcgcgaactggcgcgtctacgccgtgtacgccgcgtgctgagtcatcatctgcgcgtgcgcgcgagctgagaagaggaagaaggtctacctcgccggctgccgaggagtggaagaagagctgagggatgaaagctttttttaggggcttatgtgcaaacattaaatatagtgaaagccaaagggcttggctataagatgggaggagggggta

SEQ ID NO: 449513 - DNA, 198 bp, Triticum aestivum
gcgcttgcaaagtcaaagaccgcgtaaatcttatcgatatgtcttacaaaattcggtgtcacatcactgtgtttctcatttacgtcagcaaatcaaaagtctgttcttgttgggcactagattattaaactctctgtcatgtgaatgtggttgttgctgcaaaaaaaaaaacaaaaaaaaaaaaaaaaaaaacaaaaa

SEQ ID NO: 449514 - DNA, 399 bp, Triticum aestivum
tcgcaaaccctatcttgccgccccggggagcacgagcccgccgaccatggccgacaaggagaacgcggcccccgccgcggcggcgggcccccggctcacccgtgccgcggccaagcgcgccgccacctgctccgcgggcccctccggcggcgccaagcggaagcgggtggcgctcagcgagctccccatcgtctccaacgcgggggtcgtcctccgccagccctcgaagcccgccaagcccgcggctgcggccgagggggaggagcagcacgggggcttgagcaggggcgcgtccacctcgccgacccccgtcgggagggaggtcagcggcggcggcggcataacccagctcagcgggtcctacgcctgcgacatctacacctacctgcgcactatgga

SEQ ID NO: 449515 - DNA, 193 bp, Triticum aestivum
ttgtggacgcgtgggcacgaaccaacccaggcgctcatacatagtcagtcagcctttgcaaccatgaggccacacgtgctgctcgccgcgctggccgacgtggtcatactaacagcagctgttgccctcgcccacgggcaaggggcgaccccaagcgcctcgccgtgctgcaacaactgtggcacctgcacca

SEQ ID NO: 449516 - DNA, 142 bp, Triticum aestivum
ttgaaaagtttcatttttaaatttgtgcttctggaactgtttgggaatggagacttgattgttgttccctgtaatgcgtggcttatttctgtcaaaaacagtgcaaagtattcatgtgaatgaaggatgatagtctgtactg

SEQ ID NO: 449517 - DNA, 216 bp, Triticum aestivum
atcaagattatggcagacatgtcatcggctaaaggagcatgttgatatgacctggtttgcaccctgtatggagctttagtattcgtcagcagaaagaataattaccatacatgtatttccagctcgtaagcattgcttgtgtataatatttattccatcatcatttatattaccatttatatcacaagcaataagccctttgggcattcaagctct

SEQ ID NO: 449518 - DNA, 325 bp, Triticum aestivum
cttcaggcatcagtatcttgtgttctcgtatgctgccaggcgcaggcaaatgctgtcatccttcgctgcaacggtctgatgtttgtgatgaatatctgaattggcagcatgccgtggtcatattagcacaagcttgaaaccctggtctagcgcactgattgtacggccacagaatatgctgtgacaaatgagtaccatgtaaacttaaatcagtatactgtaatatattatttgctttttggggggttggctgccctgcctaatgatggcgatgacactgcgcttgcagaactctcttctatacataatacactagctttactgt

SEQ ID NO: 449519 - DNA, 221 bp, Triticum aestivum
tcttttccctactagcggccgcggcggcgggttcatgaagatggctcaggggttcatgaagtacaagtctggtttctgcatctacatgcatgtagctctcgctaagtatgtgcgctgcgtgctactgtataacgttgtgggtgtgcttaattatgttagctggtgatatctggctctgttaagtttaaagttccttaagtcatgtatgtctgtatgatgat

SEQ ID NO: 449520 - DNA, 340 bp, Triticum aestivum
ttttatccccaaatcgcaagatcaaaccctagactcgccccacagtttcttctaggtcgtcccaaatcggagaagatagaagcctaggtatcgaagatggcagatccagtagcggatccagctgctctgccaatcgtgccttgtccggattgcggcaggaacgtggtgacctacgttgctaggcgtgggcagaacgccggtcagcgtttctacaagtgccggaatcacaacccttcagcgggcggatgcgatttctacaggtggcagcaaggctatgtggcgcatctcgccaatcttgaaggaggagaagctgctgtgggtcaaatcggtccgggtcaga

SEQ ID NO: 449521 - DNA, 253 bp, Triticum aestivum
tcttttaattaaatacaagtaaacaaagaaaacatgcatcaaaccagtacttagtactccagttactagtaagtcgtgtaccaccagcaagtatgtctgtggatcgaggaggagtacgtacgtacgtgctagctcccggccggtcgtgtagaataaacggtggccaaagtgcatatcaatgtattagccaaaaaaatgctgctaaacttcaatatgaaataataaagtccaaggtttaattcctgttttcttt

SEQ ID NO: 449522 - DNA, 353 bp, Triticum aestivum
tctttccttactttttttttttggaaagaaaccaagcaacaaagcatttctcattgccaacacacgcacacgcatacactctcgaccgatcgatccagctctccaacaaattttacagggtcgtgatttaactagcggatgctctccttttcggagtacgtacgtagtaagactagtagtagcagagtgatcctgattatacttgagctagctgccgcatggcatttctcatcacggtgcgcgccaaaaagaagaagaagcagctggaacgaatgagcatcacacatctgagcgccatgcgtcgcggccgatcgaaatttcgcgggaacgtgggcgtgggggcgagcagaaca

SEQ ID NO: 449523 - DNA, 90 bp, Triticum aestivum
tactattgccacaccgtcaaccctacctccgcgtacacggtcacccttgagagcgtggatggcgcaatggcgccagaggtgatggaggct

SEQ ID NO: 449524 - DNA, 125 bp, Triticum aestivum
atttttatcgtttcttatttgttcgattggcaaggtgtgatgagttggttcttgatctagtagtaaagcttagctgtagcgactcataatcctcgtagctaatatatggaaagagtacattattt

SEQ ID NO: 449525 - DNA, 196 bp, Triticum aestivum
cccacgcgtgcgcccacgcgtccgcccacgcgttcggggacgcgtgggctccggcacgtgctgaaaataatgagcctatactgacattgccaaaacagacacctcaacggcacaatggagctggttcacagggccaccacaactataggggccgtggaaggggtagaggcagcgcgtggtctgaagcgtcaacaaa

SEQ ID NO: 449526 - DNA, 160 bp, Triticum aestivum
gttcgtactctcaagcaggtggctgctgcagctaagcaagtttacgaccaagtcctattatgtgagactgaaaacagctgcccaggttgtcgtccttccttccgccattgacggtgtaatcagtgagcaaatgttcatgaatggtgcttgtctacacagc

SEQ ID NO: 449527 - DNA, 400 bp, Triticum aestivum
cgcaaatcctaggctaggccaccggcgcccgagatggcggcggccttggcggcgggcgtcggcgtgctgctgccgttcccgttctactgggcgctgtggacgcgcccgcagcggtgggtggacctgtgcggccggggcgccgacccgtgccgccgcatggcgcaggtctcccacgtcctcaaggcgctccagctcctcgccctcgcctccgtcgcctgcttctgctggccccctcctctctgcgccctccccctactcgccttcggccagtacctcaacttcaaggtgtaccagctgctgggcgagtcgggtacctactatggcgtccggttcgggaagaagatcccgtgggtgacggagttcccctttggctacatcaaggacccgcagtatgtgggga

SEQ ID NO: 449528 - DNA, 175 bp, Triticum aestivum
tttgctatctccattgttgcgaaaactccaacagagtcgggatcatgaatgtaatttcttacaactcgattaatgtttgttccagaataagttgattgcagcagcagcatgtagccatgaatcggatggttaaacaatgttatggcatgcatatttcttcaaaaaaaaaaaataa

SEQ ID NO: 449529 - DNA, 177 bp, Triticum aestivum
tcggttgaatcgagaagctcatggcatgctatcgatgtgcttcagtcaatatctcgttggcgtctgttggaattactctcaaattgcttgcctgacagatttacccattcgaacgaaactaatctttgtgctcttgaaagcatgaaggaggatattgtaactggaattgcaccacac

SEQ ID NO: 449530 - DNA, 190 bp, Triticum aestivum
gtgtccacgcgtacggtcggtggtcatttggaggctggagactgaacccttcctgttcattgattgcgagtactgtcactatgtaatcgcaatacgtttcggttcgagaactgtgttgcaaattctcccatctgcggactatagtctgtttatgacccccatttcatggttatatgtttcactgtttctt

SEQ ID NO: 449531 - DNA, 106 bp, Triticum aestivum
ttttccacgcgtacgcccacgcgtccggtgattgcgtgggggacaaaaagggatgtattattagttgcataaatgttacgtgcacgcttgctctggataaaagatg

SEQ ID NO: 449532 - DNA, 279 bp, Triticum aestivum
ctcgcgttattcttgcatggtttgttgctccacacgttgtcaagagagcggctgcgatccttcttcacatgcttctgggaggcctttgctcgttgacgatgataatctcgctgagatttgacttcccaagaatccagtttgggtcgatgcgatactgggggatcctgctcgtgtcctggttcctcgtgtttggagtgcgggcctcgcgaacccgcaccatccgccgtaattcatgatgattacatcgagtgtgccctcagtcaggcgttatgaggattt

SEQ ID NO: 449533 - DNA, 133 bp, Triticum aestivum
actctcgcggacgcgtggggcaatacctgctatgttctccattgtgtatccagacctcttgtgttttatgtgaacttgtgtcctccctggtgttaaaaaaaaaaaaaaaaaaaaaaaaaaaaaaaaaaataaa

SEQ ID NO: 449534 - DNA, 186 bp, Triticum aestivum
tgctctcggacgcgtgggttcaaatgagaactttgaaggccgaaaaggagacaggtaacttgccatctgagatgcccttaattcagtttgacaacgtggtgaactttctgaaactgctatatatatgctaccttgataaatacaaaaaataggactccaaaggcaatgtatggaaaaattgaaaag

SEQ ID NO: 449535 - DNA, 286 bp, Triticum aestivum
tttcccgttctggctggatggtggccggagctcgcggaggactcgagatatgcatgtggcggcaccgagcatgaggcaacaactgcattacttgcggggaaggcgcaagtaggacacctgcattacttgcaaacaaggcgcaagtaagacactgaaatgtagtataattcttcatctcaatatgtataaccttaacgggtctgatcgtgacaccaagctattgttccacgactgaccattttcggcatgtattactgagtgttaacgagaatctcgttggactaaa

SEQ ID NO: 449536 - DNA, 279 bp, Triticum aestivum
tgtctcggacgcgtgggcggacgcgtgggttcggagctggtgccgccactaatgctcgtcgagatgcggctggagatggacgacggcgacggcgaggttcaagtgtttggttgggaccagttgagggtggagctaggggatgtagtaagagcttggcatagctgtgaagatttggaacaagttcagtaactttcttattcagaagaagttattttgcagcttagctagttaatggagagtgtaaacaggtactctaaaatgtcaatatatgtgaatcta

SEQ ID NO: 449537 - DNA, 393 bp, Triticum aestivum
actgcccacgcgtccgcgacgagcatgtcgacgtccgcgggcgccacgcctgttctgacgaatagctccacgatggcctcgtcgaagaaggcgtccatctcgtcgagcgcgtcccggtgggtgagcgagtcctcgcggcactcgaggatgctgcgcaggccgtagctgtgctctcgatgccggagcgcacgatgacgcggaggaggaaccggagctcgggaggccgaggtgcttgttgcgcaggatcacctcgtcgtcgctctggtggagttcatacagctcaacatctacggctccatgaccacagagagtcatcatctctgctcatgggcagccacgggacatgcatcacgacgtgcttcacaaggaccacgacggagtgagcggagtctg

SEQ ID NO: 449538 - DNA, 160 bp, Triticum aestivum
ttctcgcggacgcgtgggcggacgcgtgggattagatcttctttaccctgttgctcgccagaaatgacattgtcctattgccgcagtaattttgatgccatgcccacagggtttgtgaacctgcctagtttgattgtcaagggatgtatgtgttactttc

SEQ ID NO: 449539 - DNA, 56 bp, Triticum aestivum
ttctttcgcggacgcgtgggcggacgcgtgggcggacgcgtgggcggacgcgtggg

SEQ ID NO: 449540 - DNA, 317 bp, Triticum aestivum
tcgcccacgcgtccgggctgcctggttgagagaatccggcaccatcaacacgatactcgtcagcgacgagcgtgcgcagcgtgcaagcccatccaatctggtgccgaggctggaggcgctgcagttgtagcccgtaaagcaccgcataccctgtagcagccttgtctgtaagctctcccccgcctctccttagtttgtcttctgcctttcagaagactgtgtggtgtattataggctcgccgaataggagcttgttttgttgttgaatcctgttgttaattggcagtgtgcctttcaagttccaactcctctcatca

SEQ ID NO: 449541 - DNA, 136 bp, Triticum aestivum
ctcggtgttatctgagacttgaggctgtggcggctattgttctgcttccgcgtggtcggagttattccgtgcgagttgcaacattcgtggtcgcggatcaagggttatgatgtctcacgactacgtatattattag

SEQ ID NO: 449542 - DNA, 95 bp, Triticum aestivum
ctcgctgtccgcccgtcttggtcaatgtgttttctctctcgagaaaataaaaaaaataacaaaaaaaaaaaaaccaaaaaaaaaaaaaaggggcg

SEQ ID NO: 449543 - DNA, 83 bp, Triticum aestivum
ttttaaaaaaaaaaaaaaaaaaaaaaaaaaaaaaaaaaataaaaaaaaaaagaaagagaggacaagagaacaagaccatgatg

SEQ ID NO: 449544 - DNA, 320 bp, Triticum aestivum
  unsure (1)..(320): unsure at all n locations
cctcgatcgagctgcgttggctgactcgcgcgagcctcggtgaactggttggcactaataagcatgtcacgctaggtgtggtgggctcgtgggtcttgaaatgtgttgtcaagatcacttgctttcgtgttggggcgtggtccttgacagtgtattactcttgctgtcttacatggcatgttttacatgattctgttcgtgtnaaaaaaaaaaaaaaaaaaaaaaaaaaaaaaaaaaaaaaaaaaaaaaaaaaaaaaaaaaaaaaaaaaaaaaaaaaaaaaaaaaaaaaaaaaaaaaaaaaaaaaaaaaaaggggggggc

SEQ ID NO: 449545 - DNA, 367 bp, Triticum aestivum
tttctcgcaccaccatctcctaatcacaagtcatcttgcatacacggagagagaaagagaggacgagagatcagcagctgctcgagtagctcgcgtggaggtgtccaaggtgggagacccaagcccaggctagctagccgaccaactgctccaccggagccgatggctggcgccgacgtcgacgtcgggacggagctcaagctcgggctgcccgggggcggcgccgaggcggccaaggccgggaagaggggctatgaggacaccattgacttgaagctcacgcttcccaccggcggcatgcaggaagactccgcaggcaagccggagccggccgccgacaaggccaagaggcccgcagaggccgcgg

SEQ ID NO: 449546 - DNA, 424 bp, Triticum aestivum
atctcccacgcgtccgccgacccccccgatctggttgaatccgtccaatccaaggagcactcgcaatcgcaccggcggcggagatgggcggcgaccatggcggccacggcccgagcggcggcgacttccggcagaaggtgtggagcatgacgggcgggccctattgccggcccgtccactggcgccgcaacaccgccatcgccatggtcggcatctttctcgtctgcatacccatcgccatgaaatccgccgagctcgagcaacgcccgcaccacccagtccggccaatcccatcccagctttggtgcaagaactttggcaagaaggagtactgcaggatgtgccgactatcacagagaaagtcattcttttacctttgtgccttcttttgtcataaccggtcctcagcgatcgaagctggaag

SEQ ID NO: 449547 - DNA, 435 bp, Triticum aestivum
atctgattcgggcactggttcttcttcgaggtgttcttttcagttggtgaatattgcagcctttccactgttgccaattgttcggcatccactagtggagtacacctgttgcatccgatgaacgctccagaggaattgttctgattttgtttgccgtccctgacctgagctttgcaacgatgcaggggatactaccgctgcacgcaccgcaaattccaagggatgcgcggcgacgaagcaggtgcagcgcgccgacgaggacccggcgctcttcgacgtgatctaccacggcgagcacacctgcgtccataagacggtggcgaccgcggcggcggccatggcgcagccggcggaggagaacccggatgcgcgtaggcatctgcagaacctgagcacgagcctgacggtgaacaccgagggactcacggcgacggc

SEQ ID NO: 449548 - DNA, 102 bp, Triticum aestivum
gacttggtttctcttccgaatgaaaataccatagcacgctgttgctggtatccttctgtaacatgttctatttcaccctcattaatgactttgctattttcc

SEQ ID NO: 449549 - DNA, 70 bp, Triticum aestivum
tttcccacgcgtccgcccacgcgtccggaatagcctcttttatgtagtcactggtgctccttgctctgcc

SEQ ID NO: 449550 - DNA, 167 bp, Triticum aestivum
ctcggaaatggactctgcttttctcatttggccgatcaaaaaaaaaaaaaaaaaaaaaaaaaaaaaaaaaaaaaaaaaaaaaaaaaaaaacaaaaaaaaaaaaaaaaaaaaaaaaaaaaaaaaaaaaaaaaaaaaaaaaaaaaaaaaagggggggccgttttagagg

SEQ ID NO: 449551 - DNA, 121 bp, Triticum aestivum
tgctcggtcctgctctgatccaaacttttactggtagatcaaagtgttcatgtgaacgtggcgaatatctgtgccattgtgacatacaccttatctgaaaaggaaaaattgccctttttct

SEQ ID NO: 449552 - DNA, 441 bp, Triticum aestivum
atctggttgggttgccttgggagttttagtaggcagatgtactgaagtctgacgagggtggcccaaagtaaagcgaagccaccaagtgacagtcatatatcatcaccaacaggattgttgattacaatattacatggaggtctctggaaggagcagttctgtttcaccatcaggctacaaatgcagcatgctttctgattgacagatcaagtagtggcaacctaagtatcgttggtgggaactgtcgagagtcaggagcttctctccgttaactatcagctgacggcttgaagatttgaaggatatcagactctggtattaacttgcttgagttgcaggcacacatctttcttcattctgctgcttgtcatcagcgctgtactaccatcacagatacctaccacctgaagagttggacttgtagtgttgagatgacaggca

SEQ ID NO: 449553 - DNA, 218 bp, Triticum aestivum
gtttatttaaaccaaacaaacaaaaaaaaatgaatatgtatagattaaaaaagtgtttattatgattttaataagttgaataagattaataaattatcccaataacagaacaacttcaggtaattaattctacacaaaaaaaacattaaattaaggaaaaaaaatcaaaataatttaataaaatataaaataagaaggaaaaaaaaaataatcttttg

SEQ ID NO: 449554 - DNA, 226 bp, Triticum aestivum
tttgtcttgggctgagctagctgccatgccggctgctcctggactgctcgtgtgtgatcaggtcatgcttgccaaaatttgttcatgctgctccgatccatctaaaattgggatcttgagcttgtaaatagcacgatacagggaggaattcatgcatgtgtaatctgcttgtttcgttttactctcggctatgctttaaaaatcatgggttccatgatcattctct

SEQ ID NO: 449555 - DNA, 154 bp, Triticum aestivum
tttttgacgcgtgggcggacgcgtgggctgatatctgttttctaagccgtttaccttttcggttacagggatttactttagcagtaaaagggtttactcaagaacaaacagtaccaactggtgatgacattaataaatctgccctttgtgtttt

SEQ ID NO: 449556 - DNA, 339 bp, Triticum aestivum
tcgtttcaacgtccatcctggcgaggatcccctctcctcccaccagcatgcggcccgtcgccacgggcttccccgtgcatccctcgcggcagtcctcctctcttctcgcctttactgcgagcagtgcagtgcagtcctcggcgtcggaagaacggcggcctactccggcggcatgggatgcaatacttgggcacgcgatgtgcggtccgcagttgcggttcgtcggacgtttgtgtgtggctcgcactaaccagcaaggtgatgaagactaccctgggtcaacgctattctgcctcctctgttgcgtgcagtttgctgcctgctgcaccgtcggagatt

SEQ ID NO: 449557 - DNA, 226 bp, Triticum aestivum
cttcaagacccttcccgcttccccgaggcggcggcgcgagcgagcgagcgagcaaccggcggcgatgggtaaggcggctaagagctcgcggaaagggaagaaggcgtggcggtccaacatcagcaccgacgacatcgacgagttctacgagaagcagacgcgcgacgcccacgccggcgccgccgccattccctccctcccgtccggctccctcttcttcgtcgac

SEQ ID NO: 449558 - DNA, 268 bp, Triticum aestivum
ctttagtaacctcgccgagctaaggtccgcggcggcagcggcggccatggatgattactacgagttcgaccacttcgatgacggaagacagtacggtggcctagagcatgccatgaagcacaagaagaggaggtccgtcctacgcaagttcggagacttgtttaggaggagaagcctgctgcacaagtcagacgactttgctccggttctagctagtaggtagtactccctctctgtaccataatatttgtggggagtactaaatatt

SEQ ID NO: 449559 - DNA, 159 bp, Triticum aestivum
cgttggatgaaaattaataaaacctcaacaccagaaaacgcaacagacacgggaatgtacagtgcctagcctacaccaagcccgttacagagcccagctgtaagcctgcgacgacctcacgctaagcaaaagtcacgatggccggggggatgcaggggc

SEQ ID NO: 449560 - DNA, 114 bp, Triticum aestivum
cttacgcgtgggcggacgcgtggggacttgctgtgaataaggatttcggcactctcttcagacctgtgatgaccagagaagagtgggcattgtgtgagacgtatttcggcttcc

SEQ ID NO: 449561 - DNA, 103 bp, Triticum aestivum
tgcgttgatgcatgcaacgttctaccggagctagaggccattgccaaagattgcactctctaatacttgtcaatgtaagcgaaagggcacaaattttcatgtc

SEQ ID NO: 449562 - DNA, 103 bp, Triticum aestivum
tgctttgatgcatgcaacgttctaccggagctagaggccattgccaaagattgcactctctaatacttgccaatgaaagcgaaagggcacaaattttcatgtc

SEQ ID NO: 449563 - DNA, 186 bp, Triticum aestivum
gttattgttacgcagcagccaaaaagctagctaaacatagcccttcggcatgggttccaacaagaagcgcagcaggagtgctgcggctccctggtgtgtagtcctaggcatactcctgcttgtcgtcggggcggtggccaaggaccttggcaacatcttccaggactgcgaatttgattgccaaga

SEQ ID NO: 449564 - DNA, 136 bp, Triticum aestivum
gttgccgcaatcatcgccctccttgccgtcgccaccgccgcgcagggccccatgccggcgcccaggatggccccactaccggcgcctccggcgaggtccccggccactgcccctgcgcctgtcgccacctcgccca

SEQ ID NO: 449565 - DNA, 173 bp, Triticum aestivum
gttgactatgtcggcagggagcgagcgctcgaacgccgtctacgcgaccccggcggccgtcctggcggacttctcgcgcggatccggcccgtccgtctccggcggcgccgcgggtaccggcaccggcagcgggaggagccaggcggagggcggggcgaggaagaagccccctc

SEQ ID NO: 449566 - DNA, 67 bp, Triticum aestivum
tgattttagtctctctgtgactcgctattagcaactgttgtggtcaagtgcaaacctatttcaagca

SEQ ID NO: 449567 - DNA, 245 bp, Triticum aestivum
cctacttgtccggggggacgaccgatccatgggggccgttgattaaatgaggccagcagatcgcggtgcgccccccgtctccgtcttcgtcgccgcccccgtctccgttgcggtcttcgtctccttcttcgtcgccgccgccgacgtcgtcgtcttccccgaggttgcattcagcttccaatattgccgtgatccccaggaagagagagtacttggggcactctcctatgcttctccgagactcg

SEQ ID NO: 449568 - DNA, 122 bp, Triticum aestivum
cttacgcgtccggcgttgcctttgggccttggcgatccactccggctattcatttgtcgattaaagatgttctcttgtagagaacatgggatgatgcctacagagagagcatgttggacttt

SEQ ID NO: 449569 - DNA, 196 bp, Triticum aestivum
aatacttgtacgaacaggtggttctacaccaagtttcgtttgtaggcatgcatgccgtccgtgctgggcgttcctgtggcgctactacctgaacacgattacattgttagctgcttgctcttggaatccgcccctggtttggtaattgcccatgaagactctgtgtgtagcgtggatcttatgagatatgatggtg

SEQ ID NO: 449570 - DNA, 248 bp, Triticum aestivum
tggtcacgcgtccggtcggagaacacccaccacaatggctacgcccgaggcttactccctcggcgaaaccctagcgaccggagcgctcggtggcggcagacatggccgacgacgactacaatgaagtcgacatggggtactaggatgagcctacagaggctgatattgaggaaggggctgaagaagaccctgagaacaacgaggatgcccctgatgacgtgggagggggtgaaggtcaagaaaaggaa

SEQ ID NO: 449571 - DNA, 106 bp, Triticum aestivum
tgctttacgcgtccgaccacgcgtacgtccactgcgtattatttttcaagctgcacgttttaccttctggcatgactacgtaccctatgtgggcttttagaaatgc

SEQ ID NO: 449572 - DNA, 81 bp, Triticum aestivum
catagatgcccagagcagagcgagagcggccatggtgttgtcgagcttcaaggtgacgcggatctcggagggcgcggtgaa

SEQ ID NO: 449573 - DNA, 134 bp, Triticum aestivum
ctgtcactccgctctgctcaagcaagcagatccaagtagcagcagagcagcagcagaggcggccaggatgcacgccaagacggactcggaggtgacgagcctggccccctcgtccccggcgcgctccccgccgc

SEQ ID NO: 449574 - DNA, 202 bp, Triticum aestivum
tggtttagtcggagaagggctgacctgaggacgagtgatggaacgcgacggcgccggccgctcggtcggagccagcgagccgtcggacggcgactaaggagccggcgttggtgtccatgtccgcctcgccccttggcgccggcgtctctgccacctctacctcccgctactcgtcgctatccgcgcgacggcgggggtccat

SEQ ID NO: 449575 - DNA, 136 bp, Triticum aestivum
ttttcttgtgggcgcgccacgcgcgtgtgcgtacgttagcttatcgcctgagctggtggttctgtgtagtgatgctgtgagcgtggtgtgtgtgacgacccagtacaaaataaagcctacagctcgtactatatgt

SEQ ID NO: 449576 - DNA, 78 bp, Triticum aestivum
tacctttctaagactatagttgggcctgtaataatattgttttgtgagacatttatataatcgatctgggtttttttc

SEQ ID NO: 449577 - DNA, 216 bp, Triticum aestivum
gtgacattaatatctttgtatcctgcatgcgcctaatctatttgatcagattcaactactattttattttgtgtttctagttggaaaagtataaagggcatgcacgttcaatctcacgagtgttgtaagctacttgtttgtcaagtttcgcttgaccattgcgtgcttgttgtcgatgttgtgattgtcttccccaggaaaattggtgtaacactt

SEQ ID NO: 449578 - DNA, 333 bp, Triticum aestivum
tccacccaccctcccaacatctgtcctcctcgtgtcccggccccggggtgggttgatgatgcatgcggtgcaaatggcaagagcccggaggtatagtatacatgtactgagccgtatatacatgtgctcatcttgtcgtacgtactacgtatctgtcggtgtgtgaaagtgtgtgctgccacgcatgtcccctcttggcagtgactgtgtccgtgtgtaacattgccactacttcaaatgtgtgcactttagtacatgtgtatgtggtttctgtaaacaatctacttcggggttaattaacccaccgacagaactacagctatcttatcgctt

SEQ ID NO: 449579 - DNA, 215 bp, Triticum aestivum
gagagattgaaatcgattcaaaaaattccagcaagtgtacgtcgtcgtgtcatcatcagtaagccagtttagtttcattctctctccctctctctcacgtgtctttgagaaattcagggtaaacagtgtgagtcagtcagtcaggaataatctcttgtcttggtgtatgtcctcaattatgaatgcttctattccatggtcaagattgatgtttg

SEQ ID NO: 449580 - DNA, 202 bp, Triticum aestivum
ccccacctaagagcagtgatggcgcagtcaggcaacaacgacgccgccccgatcagcacccagcccgcggcggaggaggtgacggtggagaggacgcccgaggaggaggaggccaggctgaggtacctcgtgttcgtgcagcaggcggcggcgcaggcggtcgtgctggccgccgcggtctacgcctacgccaagcagggcg

SEQ ID NO: 449581 - DNA, 377 bp, Triticum aestivum
ggatacatcgcagtgcgagattatctggatacattgcgcaattatgttgttaatataagcagggatgatcccatcattgtgaagcagggttctctcatcgacatggctggccctaagcgagggatagatttgatttccactattctagtggaatatgacatgcggatcaaggtaggtgaggaagaaagggatgattaccagctgattgatggtgtaacagacatagacgacctgggcccatggaattgtgcattgaaaaatcgcatccaaggcgactgtggtgcggttgacttaaccatagcacgtgtcgatgacgcagtcatggcgaatattgaagttgttgtgttagaggtgcagagcagctttgatctatgctt

SEQ ID NO: 449582 - DNA, 303 bp, Triticum aestivum
agtcatatgcattttggcctcttgttgccaaagatctcaactcactggtcaacttctactctgctgttactggacaagaaccagttgcatatcttggtccacggaagtggaacacaaccgaaagaagcacacagtatgtgaagctttggaatggttcagtcagcgaatcagtgaagagcgagccctacctagcattcagcatcctctttattttcctaaggatattctcgttcttcttcccaaagttcttcgcctgcatcaaaggcttgtgggctcaatacttccggcacgccaactttggag

SEQ ID NO: 449583 - DNA, 196 bp, Triticum aestivum
taccacagaaacatccgtaaagcgtgcggggatgcccttgcagctctgagtttcagttatgtagttctgctgtcaggcactcgggctatgttgtggcgtcgccggtccaggactaagctgaattttgtttgttcgttgcaacagaagcttatctgtaaatagctgaactaactactgcttacaggacatcacagtt

SEQ ID NO: 449584 - DNA, 327 bp, Triticum aestivum
catcgctttgatataggtttttgcccctgcccttcctatggttgcagattgttctttagcccaggcctagctccccatggttgttatctgtactcttgatccctgtgctctctaggtcttctgtgagtgtgggttggcaagatataatagttaggagtttgggcccaaaccgctctgtacatggagtcaggtcagattcttgtagacagtctgtttgtttaatttgttatggtctctacaatttagcttgcaggactggatcttgatctggtctggaaatgaagcttcatatggtgtgtgaacatatggcgaagggtacttgaggca

SEQ ID NO: 449585 - DNA, 177 bp, Triticum aestivum
tcattaagacgtcttaaatacttgtgtatttattatcattttgcttagttcttctgttgtttttgtagctaagtagcctgttcggcgatccaatgcattggaatacttcaattttgtagcttggctgtaaagtgtatacacttttattcattgtttaataccaatgtgatgaagtaa

SEQ ID NO: 449586 - DNA, 93 bp, Triticum aestivum
tggtttcggacttgccatggcaagggaatgttgcaactgcttggttcgattcgtaatcatgaaccctttgtggtgtcctgtgtttgtccaaaa

SEQ ID NO: 449587 - DNA, 297 bp, Triticum aestivum
aggcagggcagaaggcatcacctaaaaagcataatatcttatctggtgtcggatcaaaggtaaagcaccaactagcaaaagtgaagaaagctatcataggcaagcctgggcacacaaaatctgaattaccaaaagcttgagactgcattcaccttagtgtgtgtatatttttgttactatttgtacatttgtatgctgtttacttgaggtgtagtatgaccgtgatggtactagtaaacatcaaggtttcgctatggccattgcattgaaatgttgtgtgattgaagaacgatttgt

SEQ ID NO: 449588 - DNA, 326 bp, Triticum aestivum
gcaccagcacaaccgatcgctgatctcagatcacctgcttctctccttgctccgtttggtctgctctgatcggcatggcgacccagatggacgcgtacgtgatgttccgccgcgccgcggagatgatgatggtggcgccgcccagggccgcctacgacgagcaggacgaggacatcggctccgcgtccgactccgagtgcacgtcgcggagctcgacgtcctcttgctccgacctcgccgacgacgccagctcctcgtcctcctcgagctccggtgaccacttcgagatgtccgccctcatgacgcagctccccatcaagagggga

SEQ ID NO: 449589 - DNA, 284 bp, Triticum aestivum
tggatggcacggactccgtggtcgatggaccagctcccgcgcctgcctctggcgcgtcagctgccgccccagctgttgccatggcgtccctgaccgcgctcgtcttcggctacttcttctgaggccatgtccttgtgcgcgcagttatttgggatttttctttggttcgtctcgtgttcatacatgatatgagtacatattgtaaattacatgttcttttctatttaaatagaaaaattgttgggtacacacatttgtttatttgataaaggatgctttttagt

SEQ ID NO: 449590 - DNA, 80 bp, Triticum aestivum
gttgttattacctagcgtgtgtgacgaatctcaagagttggttgtcatttggataaggggaaataaaacaaacaaaagca

SEQ ID NO: 449591 - DNA, 249 bp, Triticum aestivum
cccattctatcgcccacgcgtccgcccacgcgtccggaagcgtcagtctgggttgacgatcatacccggtcgagtagtcggcacgattaaccttatggttgtttgtcatatatggctactgttaggatgggcactagtataacttggtataattgttaaaaatgactatcgcctatctagtgttgattgcctcgtggtatatttgaagtaaactaacgacttggagcggacatttctcaagtttggccc

SEQ ID NO: 449592 - DNA, 281 bp, Triticum aestivum
cccattctaccgcccacgcgtccgcccacacgtccggcggcgctttttgagagggccggcctttttttttctttttgattgaaacacataaacttgttttaatcaacatgaacagaaaataatcttaggctctaactttggccatttggcatttgcgtgctaactagagacaaaggggattaaggaggtggtcgtgcatatatgtaggcattctcggacttgggattctacttgtgattacatcacgccggtccatggacacatcgctggctgtgctcatt

SEQ ID NO: 449593 - DNA, 246 bp, Triticum aestivum
gttgttgagtctgatgaacgcaacatgctgcatggtgtgatggaaggagctaatgtcagatgaaccaagcatatgcaagatttccccttaacatgatggaacaatggagtctcatcgttatccgtttttgttgttagttactactattactgtctagtttggtgaactgcaacattgtatatgcctatttgatggccagtgtatcagatatcacggtgtaaacaccacacttaaattcatttaccc

SEQ ID NO: 449594 - DNA, 275 bp, Triticum aestivum
tttatgcttccggaggaagaggaggagtactgggtggttgtatctgcagtatttgaggggaaaaaaacctccaccctgacatctgaatcgagcaacggtgatagatcaacttccgaccttccaatctctactcccttgagtgatcccatcaacaacaaggtccatttgctcaggacaatgcttcaatgggaggagcaagtacgccgtctagcatcggtagcggagagaagtctcggctcgctgaccgatccaattcttcgtgaggtggccatcat

SEQ ID NO: 449595 - DNA, 324 bp, Triticum aestivum
aaaatgcacagatgcaagggatagtcttcatgttattccagcatttgcagccagatatcctaataatgtactcgtaccatacaaacatttcctgagttttacaacttacaacaacaggcgggtggatcagcggcatatatccctcttaggtgcagaaacttcaagccagaccaaaatttaggggcggctgtctgcaccgacagtccggcgggctcattcaacgtgatcgtctactacggcttggttgttcgagaacaatgtctcccttttcttggggaaaccagggggctccatacctgggcctcggtacttcagctctggagt

SEQ ID NO: 449596 - DNA, 96 bp, Triticum aestivum
gcagttcttggaaccctccctccatgtgttgttgatgtgggtgttattgacgtcgtggggggtataaaaccaaaccgcaaatacttttaccgttgt

SEQ ID NO: 449597 - DNA, 413 bp, Triticum aestivum
cttttcattgcgaaaggtatcccggcggcgatggcggcggctgcggcaaggtccggatcccggcgcttgttctccatatccgccctggtgccaccgaagccaccgagccctcccccgaaggcagatcccttcgccagcctctttgttcccgggttaagcaagcgaacagtagctgatggacttaggggagcttttgcaaagtctggtgaagtcgtgcatggttctcttttgacaaaccttccagcatcatctgtaaaaaaatcaaggtggtatatgatcaatgcaaaccgttcaggtcctttgacagtgcgtaaagaataccgcaaagtacttccttctttcataaggccatctgcatcttactccacacaagcttcagaaaaaagaccaaaacaggagagaacagacttgac

SEQ ID NO: 449598 - DNA, 358 bp, Triticum aestivum
ccctttctatcgcccacgcgtccgcccacgcgtccggctgtttggttttgttgtgcagctgtgatggaaacagaagggtttaattacctggaggagacttgcccatccttgctgtctgatttgttagcaaccgtcgcagtagtggatgatgatccttcatctgttaaccggaaaaggggagtttgtatcaacgaagatgtgaatcccgttgaaagcgttgaggctagtgacaggcgcacccgcaggagggtttaggcggaggctgtcaactaatgtagctatttgctgtctcccatgaattttactatggctggagttatgtcaagtgctctgtgacaggaactttgatttgggtgag

SEQ ID NO: 449599 - DNA, 200 bp, Triticum aestivum
ctccctagctgtatccattttcccaaagaaatatgaggtggccttttacaggcctgtggagaatgagtgatatgtaactacaatgcatgtgttcctttgcaactgaatttggaatcttccaaagataaaactgtcatggagatttcgccagtagtctgtttagtgggtatctaagaaatatttgtaaattcttggtcgtg

SEQ ID NO: 449600 - DNA, 407 bp, Triticum aestivum
ctcatactcgccccgacaaatggcatctacggtgggggtgctcttcgtggccgcgctggcgtgcgtgctcggcggcgccgacgcgaagctcggcaggctcgtcgtcagcggcgtcatgccgtgcaacaccggcagcctcatagacatcgccacctcccccgtgttcccgaacgcggaggtggagctgcggtgcgcggggcaggtggtggccggcgcgacgaccaacaccaacggctccttcacgatggaggcggacctgacaagcgcgctggcggcgttcatcggccggtgctcgctggtggtggacacgccgctcatcaagtgcgacgcgcagctgccgccggcggagaagctggtctcctacctgcagggcccgctcaccaggctgctcggcggcatcttccacc

SEQ ID NO: 449601 - DNA, 174 bp, Triticum aestivum
tttatgcgtccgcccacgcgtccggcggactgcgggggcatgttaagagcagaacaggggaggctaacgcctaggatgcttcatgcttggaggagtcacaaatcacaattgctatgtgctccatttctgtagtgttcttgcttggatcggtaaataaatttcactagcgggttt

SEQ ID NO: 449602 - DNA, 336 bp, Triticum aestivum
ttagtacttccgtgaaaggcagtttatgcaaaggtgaagatttatttgcatgaaccacacaaccacacaagacagctgcgtatggttcattatgtagttctagatctatgtacagcatcatagctcctctgtaccgtgatagagtgatgtccttatccagaccattgtacagaacggagtgtggataggggtttaggttcttgatccgctctccacttatgttgcttcttttaatcatctgcgctaattctctccttgttcgttatcatcagtgttcttgtaaaaacagagctggaaatgcttattcgtgtatatcactttgtcggtcttcgcatc

SEQ ID NO: 449603 - DNA, 430 bp, Triticum aestivum
gtcttgttcagggtcaggttcagcgtccaaggatgggggggggcggtgggcaagaagggctcagaagcgagaggctgccgacaaggcggctgcagagaagcacctcaagcttctgcagaggctgggccgcgggaaaactcccgaagcgccacctgaagcactggaatcactggaggttggtcctcctgtgatcgagtgatccatcagcctctgtagataacgctgctgcggggaacgctgcagcccctgggagccccctccaataatcctcccggtgcgaagaagaggaaaccgggccttgtatcctggcaactttgtcgcgttgtacagtaatttagcttcgagtcactcgttaggtcggtcatcggagctgctacccagtctgctccagatgcagcaatgaggtcggtcggtcggtttatcccacact

SEQ ID NO: 449604 - DNA, 199 bp, Triticum aestivum
ggactagcatcgcctgaagaagaatggttgcgagggtatggtcgtttaattttgctatatacatactatccataagaccttgtaagaggtacccaggccccctgggccatcacgatgggtatctcgtaaaactctgaagtgtgtatgtatggtgtgagggttgtcagacactcgtttggataagtgaacttctgattgt

SEQ ID NO: 449605 - DNA, 465 bp, Triticum aestivum
ttgtttgcaaagacaatcctcaacagagacacaggacacactcacgccatgtcgtggacatcgtccaagccgaagagaggaggtggcctccggggccccaggccgcagccgctgagcctgtcggcacggccgtccaagaagccgcgcgtcggcggccacgccggaccagctgccgggcccgtgatcgtgtacgagcgcacgccgacggtcgtccacgccgacccacacgagttcatggccgtcgtgcagaggctcacgggcaattgcaagcagcggccgtcgacggcggcgatgacgttgccaccagaggcgacgtccggatccggagctagggacggcagggcctcgacgtggacagcagcggacgctttggttctcaggcttggccagcagcagcgtgcgccgtgtggtgctcatcatccggcaccttctgcttccccggctgctgcatcatcaccgctgctg

SEQ ID NO: 449606 - DNA, 289 bp, Triticum aestivum
gccttcgtcaccaccgcacggcgcggcgccatggatccatgatgattacgacaagaagctgcccattgatgccgctgctgctaagaataactagtagtaccgctggagggatttctccagttcctgcctctcattttattcggatgaatttgatcgattttgaatgaaattctcatttttaaaaaaaaaaaaaaaaaaaaaaaaaaaaaaaaaaaaaaaaaaaaaaaaaaaaaaaaaaaaaataaaaataaaaaaaaaaaaaaaaaaataaaaaaaaaaaagggggggg

SEQ ID NO: 449607 - DNA, 226 bp, Triticum aestivum
gattcttcttgggtacaattcagggccaccttctactgtgtcgagacttagtacttacgaggtacaaacatcataacaattgaaccattatcttttcctgttcgcaaatcagcctttctatttctgtaacctaagtatattccgatatttctgtgatgattcagaactggacctatgtatcttattgtactgggggtgccataatgcaactgtcatgcccaaacat

SEQ ID NO: 449608 - DNA, 377 bp, Triticum aestivum
ggatgctgcgtggccactcggaagtgccatcgaggggggatcttcattataggcaggaggcggtgtagcatcagaaacatcaacgtgggagcatgggcatgaccaccgtagaagaagttttggattcaggggtctacatttagccggttctgagtgtgcttccccctgaagtcactcattttgtctgccggacagctcgaccagcctcccctcccatacagtatcggatgatacactaggacatgaggattacggcaccaattgtactgcagccagacgccattggaaggcgcattattatttttgtactgatgatgagagtagacgagagcattccattctttctgacttccacttgagatgggcataaacacatt

SEQ ID NO: 449609 - DNA, 72 bp, Triticum aestivum
aaataataatataaaaaaaaaaaaaaaaaaaaaaaaaaagaaggatttaaaaaaaaaagggggtttaaaaac

SEQ ID NO: 449610 - DNA, 62 bp, Triticum aestivum
ttttttaaaaaaaaaaaaaaaaaaaaaaaaaaagaagagattattaaaaaaaaggggggttt

SEQ ID NO: 449611 - DNA, 67 bp, Triticum aestivum
tttagcttcatctatctccactatggatggagggatgaatatgtaagaatgaatgggttacctaatt

SEQ ID NO: 449612 - DNA, 195 bp, Triticum aestivum
acataattaagaaacctgttgtattcagaggaggtgggggtacataaattataactaccttgtcgctttgcaataaaaaaaaaaaaaaaaaaaaaaaaaaaaaaaaaaaaaaaaaaaaaaaaaaaaaaaaaaaaaaaaaaaaaaaaaaaaaaaaaaaaaaaaaaaaaaaaaaaaaaaaaaaaagggggggccgtt

SEQ ID NO: 449613 - DNA, 308 bp, Triticum aestivum
cagcatggtccagacttctgagactcggcttcatgcggacctgtacctgcaccctgcgctgaatgactttgctttgttgctgtgcgctcatgaactttgtttcagtagaccctgcttgagtagttgggaacatgaatgtaaaacttttgtattcaccttctagacagtgctttgtgacggttgactgtacaattgtatatagacctgtcttcgtatcaaaaaaaaaaaaaaaaaaaaaaaaaaaaaaaaaaaaaaaaaaaaaaaaaaaaaaaaaaaaaaaaaaaaaaaaaaaaaaaaaagggggggcc

SEQ ID NO: 449614 - DNA, 243 bp, Triticum aestivum
ttcatgcgtccgcccacgcgtccgggcaccctggccggaatacttaacgtgtcatggttgactctaaataaggggagtgctgacattggcgcttccacatgggatttatgacagtgcggtgagctgtgtaactgtgattattacaatttacccttcttttgatgattattgactattgctggatggtcagcggttggcatcttatgtacaatttatacagcggttatgtgtcctttccccttg

SEQ ID NO: 449615 - DNA, 315 bp, Triticum aestivum
tcttctcgtccgcccacgcgtccgatcgtcggtgaggggtggtaaacaggcataatagaaggatttcctcccaaggagagagatgatgatgttgtatcatgcttccaactttttgattccgatttgccgtttctcggtcttggcgccacctgagccgagacattagttaattagcagacgctaatgtcttcccctttgttttgacagtgacaccaatgtattccctaattatgctggtgggcaccatgttttagcctgacatatgtgtgtacatgatatacgtagcaacaaagtggcaaaagctcagtctgttta

SEQ ID NO: 449616 - DNA, 66 bp, Triticum aestivum
atcgcacactccctatactttcgggattagtgggggacctaaaataaatgtcattgtagtgttaac

SEQ ID NO: 449617 - DNA, 74 bp, Triticum aestivum
cttgtttattactcatgtttagatacatttgtatctggaagaatctaatacaaataattcaggacggagttaat

SEQ ID NO: 449618 - DNA, 324 bp, Triticum aestivum
gccgtctctgaacccatccccttccccccctctctgggtgtccatcatatccccgacggagccaaccaaccaacaatggaagttgctgcgcccaagcaactcctccccatggcgccgcgggaccccaactccccgtgctcctgcacctactactcctcgccgtcttgcgccgcgtggccctccagccaccggcccagcccgctgccgccgtccccgaggcccgtgccccgcaccatcgacaccacccccttccccaccaccttcgtgcaggccgacaccgcctccttcaagcaggtcgtccagatgctcaccggcgccgacatg

SEQ ID NO: 449619 - DNA, 117 bp, Triticum aestivum
  unsure (1)..(117): unsure at all n locations
ttatttagtaaacagagagctcgctctccntgaatggtgtcttttaagaggaggagggagaataaaaatggagcaccctgctgctacctggtcacgctctcagcagtgtgaattccc

SEQ ID NO: 449620 - DNA, 219 bp, Triticum aestivum
tttcggttacgcgtgcggtagttgtagctggggggggggttacctttagttacccggcgggattggcatccttcatacagtactgtcaggcagatcaccaagccaagaaacggaccaacagcttgctaatcggcgccgatactggtcatgggcgccgtgagggtcatcaaggcgcccggcggacagaatcccaggctggcaatccacgctccggggagg

SEQ ID NO: 449621 - DNA, 391 bp, Triticum aestivum
attcacattgaattgttcacaaggtcctggtttaaggggggaagaaatgaaaatttgttcttctaagcaaatgctagcaaaagatgggcaacctcagactagcctgaagcgcaagtgcgtcacttcctccttaccaaattataatgagcagaatgcaaatgatgaggaaaagagtaatcaagttctagagcctctcaacaagaagagggtaccagagaaaggggaagtggagcaagatgacagtaaggtcaaactcgccaacggtgaaagcaatcggtaaatactcgtttttcttgtgattctcggttttatactagtcttgtattctgatggtgttctatttggttcaccttgccttgaaggcctgcccagcagtcgatgaacgacatgc

SEQ ID NO: 449622 - DNA, 75 bp, Triticum aestivum
gttagcagtccatcaaacaggcgatgaggaatggacttctacatgcattcgacgtgaacaacctacacgtaaaga

SEQ ID NO: 449623 - DNA, 121 bp, Triticum aestivum
agcatggttactctatccaaaaaacacacaaaatctaaaaagcataaaagaaaaaaaaaaaaaaaaaaaaaaacaaaaaaacaaaaaaaaaaaaaaaaaaacaaaagcaaaaggggggccc

SEQ ID NO: 449624 - DNA, 302 bp, Triticum aestivum
tttaattgctctgcaaaatcgttggcataaaggcagagggagaagcacgggcacaaaggaaggcccaggtgcgccgagttcagaatcttgttgagacctttgacaagctgaaggcaaggaatgccaacccttctcagtgatagcgccaaatctgtttcggtgtctaccgagtgggagacgtttgaaaactgtgtgggcagcttgaatgctccaccgggccgattttcttctgacgcaaaatgacactgactgggagcagttcgactagcatgagaatgagcattctcgatgtattattatgt

SEQ ID NO: 449625 - DNA, 376 bp, Triticum aestivum
gtctgtgcgaagaggactgactagaagcggtgcctctgatggtctggtcttttgtctacggcggtgcatatctgagtatctgacgaccgcccgccgccggcgatgggctgctggtgggagcgcctcgtgctgccggtgcgaagggcgtggctcggcgtcgcctcccgcttcggtgtgcgccagtccggtaaggccgcccgccgctagctcaccgttcagccacatgctgcagaggcttccctcgtcggtccacctagtcctgggctgactccggcgtcgctggttgcttttttggttgcagggctgtggaggctccggcaggaggtgagcacgtgcgagtacgaggacgtgcgcgtgatgtgggagatgctgagcc

SEQ ID NO: 449626 - DNA, 57 bp, Triticum aestivum
ttcacgcgtccgaaaaaaaaaaaaaaggaaagggaaaatttaaaaaagaatatgatt

SEQ ID NO: 449627 - DNA, 196 bp, Triticum aestivum
agcgccagccgccgccggcgggtgaccgtgtcattcgagtatagctatagcacacgaacttggtgcgatgactgatgaggtgtacatatgattcctgtaatttgttttttttttcggtggcgagttttctttcctctgcccctgctcgcgtattttaagagcagggatgggcatgacataatgcaaaattgtacat

SEQ ID NO: 449628 - DNA, 124 bp, Triticum aestivum
ttacgtttaaacttgttgttcctacacatatggtttcctgatttgaaccaagcttattttaaatttcgagggtatgtgcatgtgtcgtacggatgtgattatttggaataatacgattttaatg

SEQ ID NO: 449629 - DNA, 265 bp, Triticum aestivum
tttcgtttcagaagagaggacaagagaagaggatccattgaacgagccggcggctatggcgtggcgggcgagcctatcccggaacgtgaaggagatccgcttcctcttgtgccagtcttcccctgccagcggccccgcccgggagttcgtgaagaagaactacagtgacatcaagacccgcataccccaccctccccgtcctcatccgcgagtgctcccgcgtccagcctcagctctgggcgcgctgccatatgtgcgtggagag

SEQ ID NO: 449630 - DNA, 432 bp, Triticum aestivum
tttttggtttgtttcacacgcttaaaaaacagcgaaggattggagagttgactgtaagtgtatccgatcttggagaagttattgcaagagatcctactgtctcatgaactcgctgccagaaaagggatgccaggctactagatgtttctgtgctgggcgtactgtgttggatacttgacctgtgaccatagccagtactctagatattagaaatgactttataatttctatatatgagtaaactgcacaatccgccggaaaagctttttgggtgtgtcgaatagcaacacaccacattgatccgttgcgtgttcttccacatcgcaagtggagctccgagtgcattcttcctttgtggtgtctctggtgggatgaacttgatcgacggcacatttggcagcttgaacttcgtctgccacacattcttcttct

SEQ ID NO: 449631 - DNA, 461 bp, Triticum aestivum
tgttgttatcagatcagctctgaacatcgacaagtctgaagcagatctcaccaatggaaccatgacagttagcaggaaaagtttagatacctcctctggcttcttgtcatgcattggcaatgttcttgggtataaggacgatggaattgaagtacaatgggctagtggtgtgatatccaaggcgcagcattttgaaataattggattagaaagacttctagatagttcactaggatctgtgaatgaggtgcatacttctgtcgacgacgaggctgagcaggaaacaattcgccatgagagtactaagaatgccctggaagagtctggtgaagactgcactggttcattgcgcaatgctttctacttctccaaaacagcttttaattttctgacgaatgtggcttctagtttctctggtgctcatgattctacatcatctagctcaattactgcagttcctc

SEQ ID NO: 449632 - DNA, 231 bp, Triticum aestivum
ttacgttcgctccgattcgtctgcccaccagtcagcagctggaacctacttgcgttcgccgtcgtcgatggcagggtttggcagtctggctcccacgacgactaacgtggaggaggcaggcgggctgactgggatcgcctttggggggtactactacaccatgtgggcagtgggcagtaccgaccagctgcaggtcaccatgaacaagtttgaggacctgatgaagaagga

SEQ ID NO: 449633 - DNA, 102 bp, Triticum aestivum
acggttggttttacattgtagcctagctagtgtaaggcaattgcaaaggatggcgcgagttggttgtgcactccgaacaaaattatcaaaaaaataatcgcc

SEQ ID NO: 449634 - DNA, 370 bp, Triticum aestivum
acggcttgctttccgcgacgtcactcttgcaggagcgccaaagcttgccgcaacgcccgagcttattgttggcaccgtcacagcagaaccagagcttccagtccaaggagtcattgtccgagcagcaacggagctcgcagtccacgatgctgccgttacaacaccaccaggacttgcggcaacatcagcagcagctgaggctccagttgagggaggagttgtcgcatcaggaacagaactcgcagtccgcggtgcatcgccgcagcagcgccggtgcttgaggcggcaacacccagattctcagcccgcgaacttacatcagcaccagagttcgcagcccgcactatcaccgtggcagcagcacaagagc

SEQ ID NO: 449635 - DNA, 64 bp, Triticum aestivum
tcgtttagcttcaaaaaaaaaaaaaaaaaaagaaaagttaaaataaaaaaaaaattagaaaaag

SEQ ID NO: 449636 - DNA, 374 bp, Triticum aestivum
ttagctgcatcatttctggatcttcagggattgggtacaatctgtacagattttattatttctgagctttggacatcaaactttttacaatatcagttgtttgcggaaagccaagactatggtagtcatggagagcgtgtcagaaatgcttgctggggttatctttgtcaaagtgctacactggaactacgagaggtgcttccaaaactttcttcacaaactttgcatgctctccttacgtctgacgaactgtgggtacctaatgaggagaaacggtttgaactagcattatttgcactactggcaaaggtcactgtttctgatgtagaagttggtggaaacgaaaatttggaccttatggcaagctcatcaac

SEQ ID NO: 449637 - DNA, 367 bp, Triticum aestivum
acggtttcgtttaggcgcatgacgggatgacggagctggcgatgagagacgagctgtacaagatgctgcccgtgaccatacgcgcggcagtgaatgagaagctgagggagaggctgagaggagggcaggtggacgaggaggccgccgcgacagcgatggacgccgtggacggagtgctgcggtggttggggccaatggcgcatgacacgctgcggtggcaggacgagaggagcatggagcggaagcaacggttcagcatgcagccgcgcgcgccgatggtgcagacgctgcatttcgcggaccgtcggaaggcggacgctgccatcgtcgaggtgctcgttggtctcagcagtatgtgctggtacga

SEQ ID NO: 449638 - DNA, 413 bp, Triticum aestivum
acgcgtacgctttcgcgcgcctcccctgacccgccgcagcagcggcgccagagcgatcggccgccatgagcggcggtggcgccggcgacacgctggacaagctggtggtgttcctggcgaagcgcgacggcatcgacaagctggtgaagacgtaccagtacgtgtcgaagctggcgcactgggcggcggagacgtctcacccggggctggccgggcgggccaagagctgggagacggcggccgggctgagccgcaaggtgttccggtcggggcggtccctcacgggcttcaacgcgctgcggcggtccccgggggagttcggcgcgctggccgtgctggccaacgccggcgagatggtctacttcttcttcgaccacttcacgtggctgtcccgcgtgggcgtgctggagccc

SEQ ID NO: 449639 - DNA, 370 bp, Triticum aestivum
gagcgacatgctcggcgcgcccgagggcgcccgtaccttcaagctccccgaccccatgtactacatcggctaggccggttgctgccaccttagattgctcctcggtcctgatccacgagtgaataaactccatgctcttaatcatatgcatgcttcgtcaataatcgcccccccccctcccctccctgttgttgtttggttaatttccattgttgagaacttgagatcaattattatgtacccctccactaatgggccaattttgacccgttggaggaagggatcgtaattggcggaccaccaaacaacggtcgggagagtcaaccaagtgcccacatagaggaacgagaagttgtgcccactgatagtg

SEQ ID NO: 449640 - DNA, 213 bp, Triticum aestivum
gtagattgttgtttcagaagacccatgtaaaattctgatttgtgtatgatctgcatacaggctcaaacaagatgttcaatgtttagttcccgtttttgttctggttatgagttgagattgtacaagctctgtttggtcctgtttgtattgtaatatactgatgtgttaatatagtttgtgccgtttattacccttgtggacttaagcatttcc

SEQ ID NO: 449641 - DNA, 223 bp, Triticum aestivum
tcggttgataggagctgtagcacacacgatcggggacgatcatagactcgttcaggacgaggttgctgatcggcgtcatggaggcttcaatggctgcgcggccatacatggcagattcctcaatttgatctgaagacggacctgcggaagatggcggcgaccacacaccagtgcctctgacctgattatgccccacaccaggcatgtggctcgactggggctt

SEQ ID NO: 449642 - DNA, 336 bp, Triticum aestivum
acgatttctcttcttcaccgtccgcccgtgaaggaaggaggggatcggccatggggaagatgtgctgcagccaggaggaggacgaggcggggttcaacctgctgccgctggtgatggccgacttcgtcatcatgctgctcttcgtcgtctgctcgccgccgccccggcgcaggcgctgcgtcgtcgtaccgtgctactgacctgacctgacctcatggtggccgggtggtgggagcctcgatcggcggcgctgcaggcaggcaagtggctggtgctgtggtaggcgtttgtttggtaggtgtctgaattttctgactgatgcctgttgggcggaag

SEQ ID NO: 449643 - DNA, 356 bp, Triticum aestivum
  unsure (1)..(356): unsure at all n locations
cttacgcgtccggtgcacctgtgccacgggcttgtgccaatgggaatgtcccaggacagatgcaacatgtcagaccgccgccgccacctgttggtcaataccctcccatgcagatgcatggacagcctgcctggcctggtcctccacagaatatgcaacaagtaccacctccgatgcaacagcagcttcaatacaggcttccagggatgcccccgccgccgcaaaacatgatgcccccaccgcaaaacatgatgccgccacctcatcacatggccaggccgncgccgacacctaccaatatgcaagctccacctatgtggaggccacccccacccccacaacaaggtggtggaatg

SEQ ID NO: 449644 - DNA, 252 bp, Triticum aestivum
gtttatctttatgatacatgctacaacactggactgtgtgaacattgtacaccatttcccaccctcatagaacagaagcatatatcataaggatgaacacgaacagtttgaaataaatgtgctctcatgtttggagaagttgttcatgtatagcagctgctacgaaaatttgtgcatgtatagcaactgcttggaagtcgtaatgtacaatttgtcatttgcccgttccaaaaaacattcggtactgaaaaa

SEQ ID NO: 449645 - DNA, 335 bp, Triticum aestivum
tcgctttctcgcagaacaatctcctcgacgccgcgaagcctgcaacagagccctacaactttcctcgccagcatctccgcgaaggacgaaagggtgtgatggctccccgcgccgccgtgctgctcctggccatggccgtggcctccgtcttcttcgcctccgcgtcggcgcagggcatcatggcgccttcgtcggctccttcatcggcgccggcgcccgcgccagacaccggagcggcagctggcctcgccccggtctccgccgtggcccgtggtcgcctccgcgcttggtgtccctgctcgcggcgatgctcctgcagtagagatgatggctgc

SEQ ID NO: 449646 - DNA, 403 bp, Triticum aestivum
gtttggtcttggacctggctgcctccgcgcgctgcgccagacagagcgccccggtgctcccccacctccgctagactgctgcgccgccgctctgagcgccggcccctctctaactccggccctgctcgactgcgtacgttccggtgctcccccgcctgtattagtctgctgcgccgccgccctgggcgccggctcctctcgacctgctgcgctgcccgcgattctgcgagcttgccattaacaggtcacgataagcaggggcacaagtggttttacgcaatgggtcatttcaagaacaggtacatggtgatggaggtcttcatcgacgctagcagaggagaggctgatcctgtcatcctcacccagttcaacataaccaaagtgatcagagacagcatccagc

SEQ ID NO: 449647 - DNA, 383 bp, Triticum aestivum
tgccctcgcgtccgcccacgcgtgcgcccacgggtccgcccacgcgtccgcttcccttcttcctcctcgtcctccaagccaagccaagaaactcctcgtctctccaccctccgtccgtgaaggaaggaggcaatcgggtatggggaagatgtgctgcagccaggaggaggacgaggcggggttcaacctgctgccgctggtgatggccgccttcgtcatcatgctgctgctcgtcgtctgctcgccgcagccccggcgcaggcgctgcgacgccggcccgtgctactgacctgacctggcatcatggcggtgcggtggtgggagcctctaccacgatcggcggctctgaaggcaggcaagtggctctgtggtggtaggcgttt

SEQ ID NO: 449648 - DNA, 213 bp, Triticum aestivum
tcgccctcgcgtccgcccacgcgtgcgcgcgcgacgggggctgccttcacaccccttgatttctcaggcgggtggtgggattatgcgccacctgctcctgccccggcgccttctcggcatgggtcccctctccgcttacgccgcgaccaaagccctactgctaaaccccgtccgaggccggctcccctactcgctcgcgtgcctctccgcccc

SEQ ID NO: 449649 - DNA, 307 bp, Triticum aestivum
ctctcgcgttcgaccacgcgtccgtcaacgcgtcggccaaggcgtccgccaacgcgtccgtggacttaaaaaaaaaaaaaaaaaaaaaaaaaaaaaaaaaaaagaaaaaaataaaaaataaaaaaaaaaaaaaaaaaaaaggggggggcccttttaaaggatcaaagtttacgacccggggaaggcaaagcaatagttttttaatggggaaactaaaattaaattaatgggccgcggtttaaaaacgtgggaatgggaaaaacccgggggtaaccaaattaaatggcttggaagaaaatcccctttt

SEQ ID NO: 449650 - DNA, 148 bp, Triticum aestivum
tcggataaactgtacctggagctgagtttttgtcacccctacttttttggcccctccaaaaaaaaaaaaaaaaaaaaaaaaaaaaaaaaaaaaaaaaaaaaaaaaaaaaaaaaaaaaaaaaaaaaaaaaaaaaaaaaaaaaggggcgg

SEQ ID NO: 449651 - DNA, 270 bp, Triticum aestivum
tttcgttcgcgtgggcggacgcgtgggcggacgggtgggttgactcgtgggcggacgcgtgggttgttgggttcatggcgagtctggtaaagtctgcggggatacggaaactccgttgatctttggtgaaagttacctaaaaaaaaaaaaagaaaaaaagaatgaaaaaaaacaataaaataaagaaaaaaaataaaaaaaaaatgtaaaaataataaaaacaaaagaagaaaatgaaaataagaatggaaaaaataaaaaaaggggggg

SEQ ID NO: 449652 - DNA, 196 bp, Triticum aestivum
ttgagtttatcagccacaactcctctccactgtttggggtgatataaggcacgaccctttttgttttgtatgatgagatatgcagcttatgtgtgtaaacagtctagcacttggacatcagctggttgaacttgtataatattatgtcgtggaattgccggccttcataaaaaaaaaaaaaaaacaaaaaaacaat

SEQ ID NO: 449653 - DNA, 493 bp, Triticum aestivum
tcgctgtcgcgtgggggccggtggactggacctgctggccctcgtcagcctctacgacgacgcgcaccggcacacgcagcagaacgcaagctacaacccctgggagcagccggccccggcttcatcggctccgatgatgcagcagcagtatcagcagcagccgatgcacaacccgttgtacgcctcggcgcagcagcagcaggccttcatgctccagcagcagcaggccttcgtgctccagcagcagcagcagtaccagcagatgatgatgatgggcgcgccgtcgctccatcgccaggcgtcctccaacccgtcgctccatcgtcaggcgtcctccaacccgtcgctccatcgccaggcatcctccaacccgtccttccatcgccaggcatcctccaacccgttcgacagatcgtacgtgccggcagccgccgcggcggtggtggctacccttatgctccggcgatgcagctccacaccggcaacgcctata

SEQ ID NO: 449654 - DNA, 321 bp, Triticum aestivum
aattaatttataaaaaaggaaagaaggaagagccgtcggccgtggcggcagcgtgggagagcctgtgcgcgctgagcctgtcgcccatctcggcgcaggccgtggccaagatcgtctcgcagctgcaggcccaataatgaactgctcgattcgattgatcgccgcgattctgtccgcgattcgtagtgatgcatgctatctcgcatgatctgctgccccatgttctagtagcctcaaattattggtgtttccagttccgccgatataaattatctattattattacaggcgaagaaaacatggttcccgtagtcacgggag

SEQ ID NO: 449655 - DNA, 439 bp, Triticum aestivum
tctattcacacgcagcacgcatccccgacgacgagcggcccgtagccactcctccttggtccggcggcagcggaacgcatcgagatgtccaagtacgtggagctgctggacatgggcgtgcgcatcgccgccagggtccactcccactgcccgcagacggcgcgcatgtactacaagccgccgcagtccacctcctcgtcgtcatcgggcgccgccgaggccgacacgactgatcggagggcagccggctttgacggtggcgaggacgtggcggctggcttccgggccttcgcagcctcgggagctctcggcgccggtcgtcgtacagccgcggttcggcttcgacaccgcgcaggtcgtcatctacgaggtcgtatgagttgaggctccgaacaacgagggcgggctcttctggggagagatctcttcgatgagaata

SEQ ID NO: 449656 - DNA, 197 bp, Triticum aestivum
atttcttttatataaagcacaatcggcgcaaaaaaggaagggtcaaattataacgtttgtgtgcgctaaagaactctttttttattattactaaaaatatgtataccggatctaacttatttgctatcattttctttcttctgtgtcacaaaaaaaaagatgaactgaaaaactaaaaaaaataaatgggtaaaaag

SEQ ID NO: 449657 - DNA, 225 bp, Triticum aestivum
tttttttttagtgctagcgaacatggtaattctggactgggtaaggtttgatatcgggggctgaccgcttgagattagagaatggtatttgttcaactctcatgtaaatgagattagctggggacttgtagatatggtcattgatctgaatcggggtgatgaattatttgattctttacagtttgggttatgaataaatcgtgaatgtggattggtcgggtattc

SEQ ID NO: 449658 - DNA, 277 bp, Triticum aestivum
gcatattttcgcttatttgattatcttgtcaccagggctggggttctttcctttgcaccagatgcttgtgtctggagtggattatgctgagctgatgcgatgaattctatgagagagtgtgtccatttttatgctcgttcgtttgaggttttcaagtcttattcacacacgcccatgtaatttcctttgaaaattcatttgtatgttacttgtgctacgagatgcgtaccgcatgtgtacagattgatcgcaattggcagttacaagattcactccc

SEQ ID NO: 449659 - DNA, 267 bp, Triticum aestivum
tttgtcttatggcggtctaagggtttaagctcgtacttggaataaaagtgaatcccacggctgcattcctccctggtgggtcacctgtaaggtgaacttgagctttatgtacgtactgtagtatattgtttcatagtaatgtgtttcagacacccgctcggcttccagcgtttagtaaataacatttgttgaggcattgcccaacgggtgctcatattatttaccaaacttggtatttctaaatgttacggccccgtgactatgaaa

SEQ ID NO: 449660 - DNA, 317 bp, Triticum aestivum
ttgcatttaccgaatccttgattgagcgattgaaaaagggtgctcaacctaaaaccaatgcttcaactttgaaccccaagccagcgaccgtggaccacccacggagaagaagcttgccgcaataaggtccctgtgctttggggggtatttatctagttttgttgactgattgatgagggcaacaattcggtttgtattgattaaattttttggtctgttgatttctagtacataatctacacattgttgtattatgacggaattgtttgtaagcagtttgtttgtataatctgtcctttacattgtcttacaatcta

SEQ ID NO: 449661 - DNA, 420 bp, Triticum aestivum
tctgtgtctcgtgggcggacgcgtgggtcggctgcgcggtggtgatgagcctcatcgcggtggcgctggctgtgctcctctgctcccgccgcagggagggaggccgcgaggacgaggaggcggtcccggccgggatgatgtctgtgcgcgtgctgacgccgttggacagggaggtgcccaaggtggtggtggtgatggccggcgacgacatgccgtccttcctcgccagcgccacgccgctcgccttcgccgaggcggccaaggtgcagcgcccgtactgccagtgcggcgccaaggacgtcgccgaccccgtatagctaactgtggctctctcgccgccgatcgacacccaagtatatatgtgtcggttaaatcaaacggggggagctaaattgtgcttcttttatgtagattattaca

SEQ ID NO: 449662 - DNA, 99 bp, Triticum aestivum
tctcctctcgtccggctatatctgtgcttattattgcagggatatggtcctctatggttattgctcaagaggcaacttggtttttgaattattggtttc

SEQ ID NO: 449663 - DNA, 91 bp, Triticum aestivum
gcctttcgtttcggtaaacagagagctcttcgtgaatgatgtcgaggaagaggaagaagaagaagtgtggagcacgctgctgctacctggt

SEQ ID NO: 449664 - DNA, 275 bp, Triticum aestivum
tgttatttctgaaagaaatctagagaattggtctgtagcgggtggacacttgcgaatggaaaacgggggaagggagatgagtttgcgtgtctttttttatatatagaaaaagagagtgtgtgttttatctgtaagtgaagtgtgtacttgaagtgctttttattggctaagcctaaataattaaaaaaataaaaagaatcttcccaaccaagcaacaaactctattgataaaaatccatggtccaagagaaaaaacttgaaagaggagcttgatg

SEQ ID NO: 449665 - DNA, 374 bp, Triticum aestivum
tgttgtgacctctgccaggccgccgccgacgccgtgctgcgcggtgactccctgcgctcgctctccgccgtgcccgccgccttcacggaacgcgacatggccggcctctacggcaacgtcggcacaaacaccggcagctcctcctccctccactcctcgccggagaactccacgtccgcgcccgccaggaagcggagcaagaacaaccctggctgcggcgccgcaggagggcagcaggtgaagctgccggggccggtgctgccgtcgtgcgatctggacctctgcctgacgcccttgtcgtcgccgctggccggcgggaggcgaggcggcgcgtcagacgagtactccaccacgacgtgctgcgaggacgccag

SEQ ID NO: 449666 - DNA, 434 bp, Triticum aestivum
cgttttctgttggcggacgcgtgggcggacgcatggggggcaatggtgtgagaacatctggagaaggggttagtcctatggcacaagagcttgtagaacctgcacctgacaatgtccatattgacgcggttttcattacagaagttagtggctccatgtcccagtctgatttccactcctcgctgatggcatctgaaaggatcgtgcctggcttggaagacggcgaggcagctctccgcaggacttcatccagagatgttttgtcaagtgaaagatcagatgtttctcaatccagcttaacatctgtgttgcctgctacttcaagtgcatcatccatcattggagaatcaattccagatgcaactgctagcagagaagatgttccaaccatattcagcgtgtcacatggtcagattggtggaagtacagtgcat

SEQ ID NO: 449667 - DNA, 462 bp, Triticum aestivum
ttgtttggctttcttctcggcggaggcggaggcgacaggaaggcgaacgacgaaccctagccgcgcaaggaacgcccagatccccaaggccggccacgatggcggcggttcggtgcgcggcgaggaggctcggtggctccctgctccagcaaacgcaggcggtggtcgcggaggagggacgcctgctcgcgccaggcaggctcatgcgctcccgccagctctccagccaggtctccggcgagcgatcacaggtggcggagcgacgactcctcgagccaggctggctcatgcgttcccgccagctctacagcaagacccccaagaagaagaagctgtctgccttggaatctgagttcctgtggacacaggagacgcttaatgcctcgtgtgataggttggaggagcttcaaaagaaagcagcaccagatgcctttaagttgggcgtgaagacctatggacgtg

SEQ ID NO: 449668 - DNA, 93 bp, Triticum aestivum
tagtaacgctcgtcaagcgcaactggttcgtccgtcgtcgcgtaccgaatcttcaccacccctgcgcggggtgaggtgtggagatgatggggg

SEQ ID NO: 449669 - DNA, 244 bp, Triticum aestivum
gtgtagtgatgctttagacctagtctaactaggcgttgcttggtttttgcccggttttccttaataaaccgagcagtccttttttcgttctttttttttagcactcgtctttatgcggtgcattcctcctttgagggtgttcttgtaatacctttttctgatcaacgaatttggcagttctcctgtcaacgttcaaaaaaaaataggacgacaagcggtctgtggcaacggactgggcggtccg

SEQ ID NO: 449670 - DNA, 270 bp, Triticum aestivum
cccttttgtccggaccagctcgccgccaccaccgccccgccgtgttccgcgccgtgatcaaccggcactccctcctcgcctctcgccggcggcctccccgccaccgccatgcaggcccgcgtcgtcgtcttccccatcaggggccgcgcctggtgcttcgcccgcccgcgccccgtcctacccgccacctccgcctccgcctccgccgcgggcagcggcgccctcccgccgccgcccaccctcaaggacctctggctcggggtctccgcc

SEQ ID NO: 449671 - DNA, 220 bp, Triticum aestivum
gtgtagccagtcttgccgaggagcgagggaggggttgcttgattgcttgcttcggggtcggtgtgcggggtgaggtgtgtagatgatgggggcaggctcacacatcaagacaataaatagagcctgtctgtttggggccaatcaaaccaaacaacaagttcatgtctgatctcgacgtccaggttccaactgcttttgatccgttttctgaggcaaatgc

SEQ ID NO: 449672 - DNA, 347 bp, Triticum aestivum
tcctcgcgtccgcggacgcgtgggccgcgagcaaaaaatctgtcctccgatcgcgccatagctcgccgcctactgctcctccttgtctgcgagcgaacgagcgtagcacggtagggagtagctccggggactgttggcctggtccaagaaaaatccaagcacagagcagaggagcatacagcctcgaggaaggaaagaaacagagcggctttgctgtttgggaggtggccggcgagagagatggggcagctcaggccggcggcgggaggcggcggggactgcctgatcaagctgttcgggaagaccatccccgtgccggacgccggcgccggcgccaacgcgggaga

SEQ ID NO: 449673 - DNA, 316 bp, Triticum aestivum
cgctcctctcaagggagaggagagctcggaaagcatcgccagcgccgcagccccccgcgaatccgcgcccggatctcccggcccggcggcgatggcgctctccgacctctcccgcgactcgctcctccccagcttcctctactccccgcgctccttcgccgccgccgcctccccgcgcttcccctcctccccgtcgccctaccaggcgcccgcctcgcccgccgcggccccggctgctggcctcgtcggcgctggcggggtcgggggcggcaggcccttcttgatccgcgcgcccaacgagaagatagagatgtac

SEQ ID NO: 449674 - DNA, 54 bp, Triticum aestivum
aataccattgctatcttctgctgttaaattatatactattgtaccgattgcttc

SEQ ID NO: 449675 - DNA, 67 bp, Triticum aestivum
tgttataatttgaattcttatattctgtactgtttgtcatgactggcaatttaaattagtgtgatcc

SEQ ID NO: 449676 - DNA, 161 bp, Triticum aestivum
tgtgcatcttctatcatgttgctaaagatggtttgtatgtcatcaatctattatatgttgttaaaaattatcttgttaaaaaaaaaaaaaaaaacaaaaaaaagctaaaaaaaaaaaaaaaaaaaaaaaaaaaaaaaaaaaaaaaaacaaaaagggggcgg

SEQ ID NO: 449677 - DNA, 297 bp, Triticum aestivum
ccttgttatagagaagaacacgcctcttcctcccaaccacaactacctccatctcggcatggtgagcccgtgactctctgtctaccatgattttttcctcctcgaaacccccgtgcgctctctggttcgcaggttcctcgtcgatcggcgggctgggcttgcggcgatcttggagcgagacgcgaggcggctgcatcttccgatctgcccgtccggcgactcagatctgttacctatctgatggcccgcggcggatctgggggttcccggcggtctagagttgactctgcggcgatg

SEQ ID NO: 449678 - DNA, 191 bp, Triticum aestivum
tgttatttgaaattgactcaagaagtgaaggaactgaactgtatcctgatgtaaagtataccacagttagcgagtatttggatacactggtttagaatgttggtgatctgtatgttgctcataagtaccaaccttttgtttcaattgacattttgaatgacgatgagagtgatgaatgtgttccaagttct

SEQ ID NO: 449679 - DNA, 377 bp, Triticum aestivum
ttgtatcacagccagcatacggtgatcagtcagctgaaaacattgcaaactatggttatcagggagccccagctgatcccaactatggaaatgcctacccacagtcaggatatgctgctgcaccgacaactggtcagcctggatatggtcaggcaggatacactcagccaccagctacaaacccaccaagttatgatcagtctgcgccaccagcagctcaaagtggctatgctgcacctgctgcaaacccacagcctgcggttgcaaagggcgtgtcacctcagcctgctgctgctgctggatacggcgggcagtggactgcctgacttctgttccaaagccctgctgacagcaagatatatttgaaagctatatat

SEQ ID NO: 449680 - DNA, 256 bp, Triticum aestivum
gcttattatgaactgcccaagtatgttttgtgtgagccaaccaacctggtccaagacagttgaagggcagctgcactatgatccattcatgtaaaaaactgtaaatcgcttcagatgctaaaaacaatgccttgctcaagtgtcctggtgacaggagcatggttgattaatgatttcaagcatgcttctggtaactgtcagcttacagtttcccccctatcgttagcatacaatgttctcttctatctcagactgt

SEQ ID NO: 449681 - DNA, 185 bp, Triticum aestivum
ccttcgtttccgctcaattgtgcaggtcaaagttcagtggtcttcgttagctcctgaatccccgacctgggaggattattctgtgctccgtcagcgctacccggaggcaagctgttgggatgaagacgctcgcgctcaaggggaggcaaatgtcacacctgatacatgagtatcggtggacctgg

SEQ ID NO: 449682 - DNA, 163 bp, Triticum aestivum
gtgtattccaattcgttgtagctagcagtgacattgaacactgggtgggttagtaagaataatgtatcatgctatgttttccagctgtagaaatctgctaccagtgtagactgacaattgtcaaaatacttcttagtctagttcagagcaataaattttttgt

SEQ ID NO: 449683 - DNA, 194 bp, Triticum aestivum
tttttgcccacctatggcaatattgccctctttatattctccctcgctcatcagcagcagcgatggtggcgtcattgtcggccttgcagcatgtggcataatcatgtccattgcctactctggggcagatctttgaaagttccaagttggttaatgttgatttttgctcatgcacaacccatcataggaattag

SEQ ID NO: 449684 - DNA, 51 bp, Triticum aestivum
tcctcgcgtccggcttgaactctgcccgttgtataatatcacaattgtgtt

SEQ ID NO: 449685 - DNA, 163 bp, Triticum aestivum
tgataaggttggagcagggtgctcggtcttatgtgaaccgaggtatcatgtctcgaggtgcctttgcagttatctatggactgcacttgaagtactacataaaggatcctgaggttattctgggaagagagacagaagacgtaaaagtagacatagatttagc

SEQ ID NO: 449686 - DNA, 268 bp, Triticum aestivum
tgctagacatagatgtggcgatgacaagtgaaattgatgttaaggagtattagcatatgctcacaggattactggaagcttattaaggtggaaattagcaagcaagctacagtcggtgcaaggatgtccaagtttacttattactttacgaagatgatgattcctgcatgttgattgtgcttcaaggtgttattaatatggggagaagagcagtccaaatggcggatggagtatgtgacctgttgatgttagtttcattttcagaagg

SEQ ID NO: 449687 - DNA, 200 bp, Triticum aestivum
cgtaatcatatacgccatttgattcagtcctgggtgccaatcatatcacctgggctggaagttttgttgtacttttggtctgtagcatcagtgtcgtaaacaatgcaatgatgcatgttttggctcattgttgatttcagcttaatgcttattgtttgtactacctacacctgtgatttcattctgaattcttagagctt

SEQ ID NO: 449688 - DNA, 295 bp, Triticum aestivum
tgctgctgtctctgctccgatctcccccgaatccaagggcaaattcaaatccaaatccaagtccgccgcggaagaagcgaggatgatctaccgcaactggtccctgctctcctccacggtcgccatctggggcagcgtcagcgccgacggcctcgccgggatcttcctcttcggcggcaaggagaaattgcagggctatctttctcgcgaaggctagaggctgaggcagcaggacagagccatgatgggcaagaactagtgcagaccacggctcactttcgacgtgtcaacatgt

SEQ ID NO: 449689 - DNA, 186 bp, Triticum aestivum
ttttcgcgtccgcccacgcgtccggctagctttgctttgttttcggtttgccgtgcttgttcaggatataatccagggaccataaacattgataactgggaacttgtatcgttgctggaccaaatatttgtcgcccttttgcgcatttggttgtatggtatgggtcaccaccacatggttctcgtt

SEQ ID NO: 449690 - DNA, 166 bp, Triticum aestivum
cttagtgaaggagtgttaattgaataactgagaaaaatgtgggatatagaaagagtgggtgatggcgatttttttattaggatcgatggatggatgggtggatttgtacattctttttgttgattaattcgtataggttttactttgtttcattcgtgtaggaatg

SEQ ID NO: 449691 - DNA, 206 bp, Triticum aestivum
gaataatagagtaattactaaaaaaaggtttctgaactgtggctcgaataaaagagaggaagaaagtttttggggtcaaaaaaaaaaaaaaaaaaaaaaaaaaaaaaaaaaaaaaaaaaaaaaaaaaaaaaaaaaaaaaaaaaaaaaaaaaaaaaaaaaaaaaaaaaaaaaaaaaaaaaaaaaaaaaaagggggcgccccttttaa

SEQ ID NO: 449692 - DNA, 234 bp, Triticum aestivum
  unsure (1)..(234): unsure at all n locations
gccgctttctctgctgttcaaatgcctatcaaacaccaccatatttggttttgctacgcccccgttcacccatggccgncgncttgcccgagttcttcaagccggcggacgccttctccccgcgcctgcacctcctcgccgccggcgccggcgcagaagcctccgacggcgacgacggctactaccgctgctgccggacgcccgcgggcgccgggaccggctgcctgggccagg

SEQ ID NO: 449693 - DNA, 196 bp, Triticum aestivum
acataattatagaaacctgttgtattcagaggagttgttggtacataagttataactaccttgtcgctttgcactaaaaaaaaaaaaaaaaaaaaaaaaaaaaaaaaaaaaaaaaaaaaaaaaaaaaaaaaaaaaaaaaaaaaaaaaaaaaaaaaaaaaaaaaaaaaaaaaaaaaaaaaaaaaagggggggccgtt

SEQ ID NO: 449694 - DNA, 275 bp, Triticum aestivum
ctgatgtttttgatgaggtagagtacacagtcagggagcgcagaggccgatatttatctgcaagagacgggaggaaatactctaggcaaggacgatagagcttcccaaggctttgttataggattttatttattcatagcgttgagttacctaactagctaccccaaccttgtgcattgctcgagtgcctttgatgcggactcatacattctgagttatgacattatatgaaacaattttacatgccaaaaaaaaagagctatggatccttacag

SEQ ID NO: 449695 - DNA, 372 bp, Triticum aestivum
caggttcgttacacggccatctctgagattgctcgaatgtgagcccacagacttgagcttgagcagcctatgaatgcgaaccaggaagagggcaaggtgagcatcatgaataatgatcatggcagagtgaagcagtagtttcaaaactgaagatctatcacagtcgcggacaacaaatatcagaagctgaactttgaagcttttatgtaaactgaaattttctgtatgggagggcaagcaatgcttgccatgatgaaagtttaacttccccgcagtagagcattgtattatgttcgagatcgataagaacgaacgatcgaaagagttgtaaagtgaatcaagtcgtctttattgatagtgatggatccttat

SEQ ID NO: 449696 - DNA, 313 bp, Triticum aestivum
cggacttgtgggcggacgcgtgggcgacccacgcgtccgcggacgcgtgggctaccacacacacacacacgcaccgggcacgaacgcacgcgcgcaccccctgaaggccagctgcctgtgcccgtgcgccgactcgccggagcttggcgttggaacgagacacggagcttgcgggcttccgggaacgttacacgagctcttagctgggtcttccggccggcttggtttgtttggccgtgcgcagcgcgccgagtgacatgacgacgagccaggacgtggttgtttcggagatgggcattggggcgggtggggc

SEQ ID NO: 449697 - DNA, 423 bp, Triticum aestivum
agttctttgctcatcacgacggcaagtgcaatgacgccgccagcggcccgcccgttacagtgttggacaaatgcgccagccagccaacaagcggggtttaatatggacggattccaagctcatcactgtacggtatgtacactactcgatgagcctcgatcatcagaccagatggatgccttatattgaataactcatccttccttcacgtcctaaacattacagatacgtatcttgtgttagggaataaaacttttatgtaatgtaagccaggaggctgccaaacggcgccctagcagtttgtgtacgagcgctactgtggccgagcgagccatcacatggtttgtcatgctaataagcacagggaactgaatgacgaccttatattgattgatgtgtgtgtgtgtgcgtgcgcgcgtgagt

SEQ ID NO: 449698 - DNA, 296 bp, Triticum aestivum
gatttattttatgtttacttggagaatcccataaaccatttttggttttgcaaaaaaaaaaaaaaaaaaaaaaaaaaaaaaaaaaaaaaaaaaaaaaaaaaaaaaaaaaaaaaaaaaaaaaaaaaaaggggggggggctaagggggaaaaaggaaataggaaaaaaagataagaaggaattaatattttaatgggggggggggtttttgggggttaaaggttttgtttgggggggtgggacggtttaatttttttttggggggcacttaatttgatttggggggggggggttttaa

SEQ ID NO: 449699 - DNA, 345 bp, Triticum aestivum
cgcacctgtttcccttccttcccttccttccctttacaccccccccccccacccccccctctatgtgtctctctgcctatagctgtaccctccctctaattgggtagtacgtactccagtagcagctagctggctagagatcagcgacgttccttccggccatggcgagcaccacgcgcaaggaggaggggccggacaagcagcagcagcaggggggcaccaagctctactccaggatgctctccaaggacgtggccatcgccgagccgtccttccgggtgtactacggcgtcgcctcggccggctccgtgcccttcctctgggagtcgcagccgggcacaccca

SEQ ID NO: 449700 - DNA, 205 bp, Triticum aestivum
tctaattcgctttcaggccttgtgctgatccataccggtggttttcgtgccttgtagtattatatgactttccacttttttctcttcatgctgtgatacagttcaggatgtgattgtgtatttgatgtagtccatattctgttgtcgtaagtctagtagaagctggtgaaatttatttaaagatcaatttcagtgggaaattagg

SEQ ID NO: 449701 - DNA, 163 bp, Triticum aestivum
gcctattcctcctcgtcgccctcccccctcccctggcgacctaccaccggcgcccagccaccgccgtgccctagcccggcctcgccgccgccggcctcgctccccatacccctccccgcctccgcctcccacgcgtctccgtcgcctcctacgcctcccacgc

SEQ ID NO: 449702 - DNA, 232 bp, Triticum aestivum
atatgcttgggttcacctggtgctcccactccgtgggggtcagtaattgccctatcgtttgacctgctgctgctgctgctgtaccctgtgtctgactttgatcaagtgatgtctcgtttgtgtgaagtcgtactgtgtctgctgctttaatggaccatcgagtcctgtggtttggtgcaaacagttgcaggtacatctgtaccgttaagtatgaataagtcaactttgaagt

SEQ ID NO: 449703 - DNA, 130 bp, Triticum aestivum
cccacgcgtccgcccacgcgtccgcccacgcgtccgcccacgcgttcgtccacgcgtccgcccacgcgtccgcccacgcgttcgcccacgcgtccgcccacgcgtccgcccacgcgtgcggccattgttt

SEQ ID NO: 449704 - DNA, 332 bp, Triticum aestivum
  unsure (1)..(332): unsure at all n locations
cagttttgttgcatcagtcatgtacggttatgctatcgtggtacctgctgcattctttttcctgtttcagtactttggatcacgcccaagccttatccggttttggtgtatgtggggctattctctgtttatcttcgtaccagcatctatactgctacttattcctgtggaatttcttcgctgggtcatcatagctggtgctggtggtgcatcatcttggttcatctttttaaacttgaaggaatgcaccnaaggagctgatatgatggctctgatcgcaagtgcatcagtgctgcagtttgctctggcactgttcatcaaagttttctttt

SEQ ID NO: 449705 - DNA, 412 bp, Triticum aestivum
cccactcgtccgaatccgcccatccatccccggcggctccaggagggacatcgcagccgccggcaccggcagcggcatgccattcacatcgccctcgcgcaccatcggcggccccctcaggtcctatcccaacttgcggccgtcgaccgcggcggccaggccaggcctctccttccaccggtcccgagaccaggggacaccaaccccgtcgtccagcgctgggtgcctcagatcggcatgcctcctcccgatgcagaactgttctgggaatactactgctaatgaatgtgtccaatcaagttcatccatgtcaaactctatcaactagaaatagagttgtgtcaaagagaaggaggagtgcgtgcagggggagtggcgggtcaaggtgctctcatcggagccgctactgacc

SEQ ID NO: 449706 - DNA, 69 bp, Triticum aestivum
attgttttgtgccttggtaggcgatttgctgaaaaagggaattttttataaaaaaaaaaaagagagagt

SEQ ID NO: 449707 - DNA, 280 bp, Triticum aestivum
agaggggctggagcgccaccgcgaatcccatcccatccccgcaccgccgccgatcccgcccgcccgcccctccgcagatctccccgacattgcccgctccccggccggattcgcccagatccaccgacgccgcgcgcggtgctcccggcggcgtggcccgggccgtctgatcggggaggctcgatctttttggttggtgctgttgtctggagggtggtggcagcggagatgggcgtcggaggggagaagttccagctggggacggtgggggcgctgggcc

SEQ ID NO: 449708 - DNA, 73 bp, Triticum aestivum
aaaaatttttaaaaaaaaaaaaaaaaaaaaaaaaaaaagaaaaaaaaaaaaaaaaaaaaaaaaaaaaaaaaaa

SEQ ID NO: 449709 - DNA, 322 bp, Triticum aestivum
attcccaatttttaccatcttcagaccagaacactatactgacaattaacatacaccttcccttcgcccccctcacattactacgaatttacaagcaagcatggatcactccttcttgggtttgttgctgtcaggggcggcggtcgcttcggattgaggtggtgcgccggcgacgtcgccggtcatcatcttcttgaactcgtcgaagccgacgcagccgtcgccgtcgacgtcgacggaggcgatcatcttctcgcagtcctcggtgctgcacccctcgccgatgcgggcgaggaccttgctgagctcggcgacggagatg

SEQ ID NO: 449710 - DNA, 409 bp, Triticum aestivum
gtactactcttttctctcccatcctgtgcgcccttcgcgtttcgcgcccagagtgctctttgttcacgttcacgttcacgttcacgtccgttgccttgcacccacccacccctcgacaggaaacaagaaagagaaggcagaaaaaaagctcgtctgccggacatggagagctcctcctcgtctctgttgctgagttcgtataccggcggcaacaagagggccagggaggccgaccttgacgtggcctcatccgccgaggcggaggccgccaagaggatacggcccgaggacctgctggacctgctcgacgatgacgccgacgccgcggcggccggcgacctggcctccgtcatgcgaagcctggaggaggagatatgcgccggcgacctggccgcgccgcagccggagc

SEQ ID NO: 449711 - DNA, 271 bp, Triticum aestivum
attatttttctttttctcgtccgggacctcgatgtcatgtattctttccccctactgccgatgtaacaaagccacccatgattctgtaagtagatgagaagtgtttcgaccgttctcccctgagctcatgtgctatgcaagtaaggatgcaccctatgtaccgccaatatttggtccagtatttgttcatggatcgaggctataattcatttgtactcatcaaaaaaaaaaggagcaaaaaaaaaaaaaaaaaaaaaaggagctagatgaa

SEQ ID NO: 449712 - DNA, 134 bp, Triticum aestivum
cccactttgtttgcgccaaactttgggttcggaaagaaggcacaggtgtgaagacaagaacgagcaccacccgcacatgttagaggaggtgtgtcaacatgggtcaatgttttgggttggttgtgttttacgca

SEQ ID NO: 449713 - DNA, 323 bp, Triticum aestivum
gtcagttttttgtgtggagaggtgcgtgcgcttggatggcttgacagaagcccagatcgacaagaagttggaggagctagccaaggcaggagttgcttaaagctaaaaactgtcaggctagccaagttttcttgcgttaaatcttcacaaataagagaaaagttaacatgggatgttacgttatcttgatttcagtaccatgactactcaagtgttgaatttgtacaactgattgctgagaaagtaactatttttcctatcgttcttcaaggactgttttcagcagataagttcaatttctaaaaaccatactggtcatactt

SEQ ID NO: 449714 - DNA, 239 bp, Triticum aestivum
  unsure (1)..(239): unsure at all n locations
aagttgttgttgccctcctggtaaatgttttggctgtttaggtgggtatacatggtcatggacctgcagttgtatcctgctgccataaccctctctgtctgcatatgtgagagtcaacagtccatgtacctgcagaagatttcctagctgtcagtcgcgttgaattctattccttaccatcgtcgtaaatgaagttttgacacccgcccnnnaaaaaaaaaaaaaaaaaaaataaaagg

SEQ ID NO: 449715 - DNA, 341 bp, Triticum aestivum
gtcagtttggaggccagcatcaccgcctgccccacccacgagcgccacctaccacccaccctccaccgccaccggccagagaaagcagatcgacggccggaggcgagctcggtaggtagcgtaggtagcggccatggaggccgccgcggccatccggagcacggccgcgccgcggatgcgcctcgcggggaggagcagcaggggatccggcgccgcggcggcgcgcgcgaccccggccagccacagcgactggcagacggcctgcgccatcctctccagcaccaacgacaccccctccccgccggcgccgaaggtgaacggccagaacaacaacaacaagc

SEQ ID NO: 449716 - DNA, 229 bp, Triticum aestivum
gccgtgttagcagtagtagtagcttgtggtactcgcccaagtgaaggaaaaggcaagaaaagggtccaataccgaacttggatcgttgtagctagtgctgtcggaaagcaaaagtgtagcggaaaaataatactcctaccactactgctccatgtacgtatgtatatcgtgttattcattgtacttgcttgcaaaggaggatcaatatatatatatatatattattact

SEQ ID NO: 449717 - DNA, 150 bp, Triticum aestivum
aaaaaaaaaataaggggggggccttttttggggttccaggtttccctccgcgtgcttgggagttttttttttttttttgggggcccttaatttaatttctttggccgtggttttccaccggggggttggggaaaccctgggggttcccca

SEQ ID NO: 449718 - DNA, 99 bp, Triticum aestivum
gatattatatatgcctgtgtcttgtgagcctgctggcacggtgctgcctagttgtgcaatttgcatcgtgtcttatttaagcattgaaactatcttcat

SEQ ID NO: 449719 - DNA, 279 bp, Triticum aestivum
cggacgtgtgggatttgttgcccctctcctccagcatgcccttccctaccatggcgccttctctctctccttcccctcccatggtgcccatccctccattcccatgacacccctccccctcccttcttcatatggcgcctcattaccctctattctggtgtctgtgagtctgtccctctctcttcttgaaccctagaacacaagcagatctcaaatcctaactctctctgttattggataggttcatccgggttcagttttgcagatctgtagcaatca

SEQ ID NO: 449720 - DNA, 237 bp, Triticum aestivum
acttcttagtactactggcggaaggactataggcctgaaaaacatacggcaattggatgacaggccattcctggcggcatgcctgaagaagctgcctgacaaagaagctagagaaaaagctaaagaagtacaccgtgtttggcacgggcatatacagaacccagagcggaatcccttcaagactgtcacagttgaaggtataccagaggagattattgatgtcaatgatgacaagct

SEQ ID NO: 449721 - DNA, 399 bp, Triticum aestivum
gcgtgtattgaccgaaggcggcgcagcaggtatgcattaggagcgggcgcctctttttaccacgggaatcaaatgctgctggcccctgatctggatgaccagacctgcagccaactcttgatatggaagcatgaatagtgcaggagctagcaaagctgccgctcgccgtatggaacaccagtaccaccgtgggaaggtggaagcacaaatagaagctgctctttcttcctggccgagtatggatcaagcgtctcggtcattagcttggcagctatgcaacatgccgtctcgccagcacaacttcaacccatctgcacaggttcagcgacgccccccttcccatgtcctctcgatggcaggattacctcgatctctggtgcagccgtggcgttctggttc

SEQ ID NO: 449722 - DNA, 228 bp, Triticum aestivum
  unsure (1)..(228): unsure at all n locations
gatcacttaacacttccttgaggaagcagaggtggatgaggtgatattgccaattgcttatgttgcattcgaaaaatctgacctcgatgtatctaaataggtagttaccgcaaagaacttctatctccggagtgtaattcattttgagtgttattttcggtggcaggatatttgtgaaaatttatattttataagtctatttatatttaataaatgttttacatgtnt

SEQ ID NO: 449723 - DNA, 272 bp, Triticum aestivum
  unsure (1)..(272): unsure at all n locations
ctccaattgagtctggtctgtgtctgtcgttgcctgaactgtctttgtttctataccgtactgtgatgcagtgttatcgtttgcatgtttaaacttctgctggtgtgcagcagctttgatgaacttcagaataagtgagccctgcnaaaaaaaaaaaaaaaaaaaaaaaaaaaaaaaaaaaaaaaaaaaaaaaaaaaaaaaaaaaaaaaaaaaaaaaaaaaaaaaaaaaaaaaaaaaaaaaaaaataaaaaaaaaaaggggggggccgtttt

SEQ ID NO: 449724 - DNA, 55 bp, Triticum aestivum
aaaaaaaaaaaaaaaaaaaaaaaaaaagaagaaaaaaaaaaaaaaaaaaacaagg

SEQ ID NO: 449725 - DNA, 362 bp, Triticum aestivum
tgccatccagttacaggaggggactggtggatcctgaaatgattcaacagatgcaacgtatctagatcttttggtggttgaaatgctatgaagtctcttcagtgtcaataagataatctgaatgttcttcatccaacttccagctttcttttttgtgtacaattccaaagtagcctgtggtttctctggagcagcactggagttgaaatctccatcgtgatttaaaggaggcggagaatttttctctatctttaggggctttatgtacattcataatcagtcgctttacattacaccatttttttgccctattataggaggctgatttgaaactgcacaaatagtattgtgtcaattttgag

SEQ ID NO: 449726 - DNA, 297 bp, Triticum aestivum
gtgtggttcacccgggcgaggcggtgccgatcatgccgcccatgttctactgggggccatggagggtggtgaacggagaggttccccgcttcatccagacgcccgaggaagctaagccggcatagagctccttcgagttcgaaggggtcatgggagtagtttgctcttctcctttttcttgatcggaggcctctcataagtaactcactgtttgctgtgtagctatggcattgctgcatttcttgtaatttacattctggtgattgggcagtgccgtggaatcataatggtcttttt

SEQ ID NO: 449727 - DNA, 359 bp, Triticum aestivum
tttttgcgtccgaagttggtttgtgaaataccaccaagggcgcatactgtgatcattatttttttacactgaggctgattaaagcaaagggtcaataactcgaaaccaatggcaggagtgcacgttgggagttataagagcttgatctactgggcaggtgctacaggatagctgacggtgtagaacatacagctcggatagttatatgaggttgttgacaaggaacttagttgagatttcgagatcctaaatatatttgttgttcacatattagagcaattgagtgtatcatctcttactgatgatcatactctagaagtcaactatatatgctgatgcatgctgagagaatgatctga

SEQ ID NO: 449728 - DNA, 170 bp, Triticum aestivum
tgtttttatacatatatactcctaaggtgatgcacgcatgatcagtaccagtgtgagatatcgattcatgtatccgtgttcggtgccatattcatgcacctcgtcgtgtgtaattattcggtgtgtacgagaccgacgatatatacttacaagtactgtctactgtgatt

SEQ ID NO: 449729 - DNA, 320 bp, Triticum aestivum
gcgtatgcccgaaattttttcaggaagttccacgccgcatacgtggatgccgtctcgaaccctttccacgtcccagggaagaagatcgcctcgagaagcttcggcgcgagagtgagcacgatagtgaaatccttcggctcagggactgtcggttaaaaaccacatcggcctgagcaccctccgcaatcaatcgtcatgcgcgctttccaccttaactggcaacctatctttacctccgttgtgtatcactacatgtatgttggacaagaactagtttgatactcgaggaagaatatatatggctgttattgattactaca

SEQ ID NO: 449730 - DNA, 394 bp, Triticum aestivum
gtgttgttcatccgtcagaggcctaattgttggagaggcagggcggacgcaggctcctcgcgaggctgtgccggcgggtggcagccacggcgaggctgggcggccgtccccggcgtccggcggagcccttcgccggcgccggcgaagcagaggcgaggcagccggcgacgcggcggcgacagcggcggcaccggcagatgggggcgcgcgtcatggcgtggtggcgggcaagggtggtcgcgcccatgcgccgcgcctgcaggctcgccgtcgccgccgaccgcgcccgcgtccgcaagggcgagtgcggggtcctgaaccttcaccaggacgtgcagacgtgcggctaccacgacgtgcaggtgatgtgggacatgctcagctccgacaagga

SEQ ID NO: 449731 - DNA, 424 bp, Triticum aestivum
tccttgcgtccgcccacgcgtccgttttttttttttttttgaggcaatcatgctgaatccatttacccagtcaaccatgtacatacaacaatagtctcttctagtatgaagtgagtactaacccccgccttattacattagaatcaaagaatgaatgaatggaagtaaattaagtacataaagaatggtattccgaaaagagtcgaatgcttgcaaaatggtgcaaccacacctaaaattttgcttgcaaattaacatatgggtatcagtctatcctgcccggcccgatacaccactctgttagcgctacttcctacagtttgagtacagttcctccagcaatggcaagttaagaagaacctgagaacttctgcaattgtatgatcaaaacactgatgtcatcggtagaccccctggaacccgc

SEQ ID NO: 449732 - DNA, 102 bp, Triticum aestivum
ttattgcccgcaatggcggcgaggcggtgtcaccacctgatgctacggcggacggtatggaggtggaggcataggaggaggcgtgcgaggaggggaacgagg

SEQ ID NO: 449733 - DNA, 245 bp, Triticum aestivum
ccctcttgtacgcccacgcgtccgcccacgcgtccgcccacgcgtacgcccacgcgttcggctccaggctcagatctgggagaacaaccacaactaagtgaaatgttggctaattacacggcggaccagtgagcaaattaaggacatgtttgagttagtagatatgcatcctaatctataaaataaatggatcatatgtcatcccattgatgtgtgtgtaatgagtgaatgtatttataccttct

SEQ ID NO: 449734 - DNA, 55 bp, Triticum aestivum
ttttgttcttgttgtgtttattcgtatatagaagaagatatgattcaattggtgc

SEQ ID NO: 449735 - DNA, 365 bp, Triticum aestivum
tttttatcttgcaatcacaacaccgcacacgagagaatactatctctcactagtgcaaccgctagctctagccatggcttccagggcgagcatgttggccacgatcatggcgtgcgcgctcctcctcgccggaagcacgtgcgacgctgcccgcaacctggccgacacgacccccacggctgccgctccggctgctaacgtagtacctggcctgccggccgagcccacggacacggtcaccctgatgccaccaatgccgtcggtcaccctgcccaccgtgccacaggtgacgctgccgaccatgccggccatcgtcgtgcccaaggaggtactgccacccatgcccaaggtgaccctacccaccg

SEQ ID NO: 449736 - DNA, 299 bp, Triticum aestivum
  unsure (1)..(299): unsure at all n locations
gcatcttggtggtgctatacaagtcagttataaatgatgggcttcagctggacatgaaacatgcccgagctcttgaaaaggaaagagctgtcaactattacaatggcatgacaaaggagcaatttgcaaatatgcagaagtttatacaaggccggagttctaaagcaccatcgaagttgtagatgcggtgctctgtgtgtatgtgcctttttattatatggctccttttattataaagcttgtggaaatgtcaaattgctactcctattactggaagacccacgttgttntactttgaa

SEQ ID NO: 449737 - DNA, 215 bp, Triticum aestivum
ggtatgtttaccaaggttgcggaggatgaggactaaacccactgtctgtcgtatcgatcagttataactcaatacatatctgctgagagcatattgggaagtcttgctttagcttattgctatctactgttcatgatgttccatgacttcttgatagacgatttgagacgctggatattttgttcaagcgcttgaagttttgacttgttgtttga

SEQ ID NO: 449738 - DNA, 142 bp, Triticum aestivum
ggtactcgtgggcggacgcgtgggatcaacccctagggtttgttatcaacagaggagttaatcccccacgtctagtggggctgttatttatttcgggaagtggattggagtgttatgaacgtggtttctggacgagagacag

SEQ ID NO: 449739 - DNA, 121 bp, Triticum aestivum
gatctatttgtgttttaacacaacagtgatgtagttgcgcgttgaaattgaagtgtacattcgatcgaaaaaaaaaaaaaaaaaaaaagaaaaaaaagccaaaaaaaaaaacataaagaag

SEQ ID NO: 449740 - DNA, 70 bp, Triticum aestivum
cggtcttttgggggaatgagtacagtgtaaatccctaaacaaggatccatgggagggcaagtgtggtgcc

SEQ ID NO: 449741 - DNA, 89 bp, Triticum aestivum
tttatcgatgctgagcgggcgatcaagggaataacgaatgacgatcgatcacgaggaaaggtaacaaactccgatgataacgctgaagc

SEQ ID NO: 449742 - DNA, 387 bp, Triticum aestivum
cactccgcggcagccgctgcgatcgtccggcctccggtgatggcgatgcaggtgcgccactacgccataaagggcaggtcccgcgcgccgaccacgcccaccatcttcaaagtcaagaaattcaagatgaaggccccctcgaagctccatgaagttccgcttcagaacgatgaaggacggacagatccgcaggtggagggccgtcaagcgccacaacgcacaccaaaagtccaaggaagcaaagagaagactccggaagcctgctttagtgcatttagcttatgccaaagttataaagaagctcaacttctgcggttaggaaattgatggatggaggatggtgattggcacatgaatctgatcaatgaatactgattgccaacttat

SEQ ID NO: 449743 - DNA, 55 bp, Triticum aestivum
gctgttgtcgcacgctctgagaaatcctctgataatatatgtatcccgttctagt

SEQ ID NO: 449744 - DNA, 52 bp, Triticum aestivum
tttgttgttcacacagaaatgaattcaattccggcacagaataaaatatacc

SEQ ID NO: 449745 - DNA, 139 bp, Triticum aestivum
tttcacgcgtccgaaaaaaaaaaaaaaaaaaaaaaaaaaataaaaaaaaaaaaaagaaaaaaaaaaaaaaaaaaaaaaaaaaaaaaaaaaaaaaaaaaaaaaaaaaaaaaaaaaaaaaaaaaaaaggggggggcctttt

SEQ ID NO: 449746 - DNA, 296 bp, Triticum aestivum
ttcacgcgtccggtccccgaagaggaagaagtggaatacgacggcactggagcatctagcagcagcagcagcagcagtgtaccaaagaagcaagaagtgatgagggtggatccactgggtaggcgcactcagttcattgacaacctcaagacgctgtttgaagatcttctgatggagttcaacgtgaagggcgctgacactaggaagttcctggaagacaaggtgaagaagaacctgcccgcagcctgaagactgcggtaggagataatttgcctggtaatgggggtgatagctgc

SEQ ID NO: 449747 - DNA, 72 bp, Triticum aestivum
ttcacgcttccgcaaaaatgtaaaaatgtaagacaaccactcgatcttacatgaacggttctgcgtttttcc

SEQ ID NO: 449748 - DNA, 308 bp, Triticum aestivum
ttatcaatacccacacaagcaaacaaaccaaagtgacgattcagaggcgtcgctttgacgacgatgactagttggtaagcttgatgtactagcgaatgggtgcagtagcgtctgttgcttgattcaacaaccgtcagaacctgacaaactatttgattggtcttgggttgtatatgatctggatattatttggtggggtttttcattgataactgttggatgcgtcacttctacccctgaaactctctgcgaaacctttgagttgtggtcgatttatcaagttctatcagataatgttagtgctgtag

SEQ ID NO: 449749 - DNA, 57 bp, Triticum aestivum
tttaagttctactctcttaaaaaaaaaaaaggggaaatttaaaaaaaaataggggtt

SEQ ID NO: 449750 - DNA, 96 bp, Triticum aestivum
ttaaccctgccgtctactcaccgcgcctcgacctcgacctcgccggcggcggagccagatggcgtcgacgacgttccggcgcttcggcgtggcggc

SEQ ID NO: 449751 - DNA, 160 bp, Triticum aestivum
tgttgccacgctatatatgatgatctctctctctctctatatatatatatatgtatgtatggatttgcttattgttatctcttctcaccaacggtgctgcctgcctgtgtaactcgaatccatccatcagtaacagaggctttatgatcttaccatcttc

SEQ ID NO: 449752 - DNA, 168 bp, Triticum aestivum
tccacgcgtccgtggactcgtgggcggacgcgtgggatttaattcaaatttccctattgtataaaaaaaaaaaaaaaaaaaaaaaaaaagaagaaaaatgacaaaaaaaaaaaaaaaaaaaaaaaaaaaacaaaaaaaaaaataaaaaaaaaaaaaaaaaaggggggg

SEQ ID NO: 449753 - DNA, 300 bp, Triticum aestivum
acgtttacgtatccgatgacacgtgggcagacgcgtgggctttatttccagcatcacataccaccacttgaattgaacctcaagcgcacagaggaggagcggtgcaacactgccacccttgcaacagctccagcaacaaggagaagaggcctcctctcaagaggggccagatcaaggtgcaaatagccaagaccctgggcagcctcgtggtgccgatcgccaggaacagttttagaagatgagatggctgatggccaaccaagctagaagtgtggtgtggtgcttgatatgcatagggat

SEQ ID NO: 449754 - DNA, 132 bp, Triticum aestivum
tttcgaatgggaggagttaaattttgtttcttttatgtagattattacagtagtttacatcattttcctccctaattactggagtagttttggtgcaacgatgcgaatgcgatgctgtggccttgtcgaggt

SEQ ID NO: 449755 - DNA, 186 bp, Triticum aestivum
tttgtctcgccgacggatggtaatctgtgatcacacattgtgtggcgtatagggaaagcacgggctgttcacggtgtgttgtagagttgtgcctttgtaagattttttctacagtctgtacatgagacagggcagggcagggtcattgatagttttggacatctctactgcgaactgttcacagcc

SEQ ID NO: 449756 - DNA, 321 bp, Triticum aestivum
tatctgtgttccagtccaagggggcgagaggggcggcacacccatccaaggtcatactgtgtcaccacttctcttcgcccctagcaatccatatgtgttgtgttgccacttctctttttttcacatattcgtgaccaacattatcatactgtgcatcgctcttcttctatccttgtccctggcgaggctatcctggaccaatgcttgtaattccacaaacttgtaatgatggtcggtgccagccttgtctcatctacaacacccatgtttcgaggaaaaaaaatgatgggttgattgagaaaaaaaaaataaaaacataag

SEQ ID NO: 449757 - DNA, 306 bp, Triticum aestivum
ttcaaagccaattgattgagttgaagcaaagttacagagcgtgcccgcaagaaagcatcggccaccggagcatccccgtctccaaccaatcaagcatggacaaggtgttagccttctccatcctgagcgcgtcgccggccgacatcgcggccggcgccggcgccggggccagctgggctcggttctcctggcaggggaggaagctgcaggacgacggccaggccagagcagggcaagaggggaagcagggcggtccaccgtcggaggcggagcagcagccggacaaggggagatcgccgacgttgc

SEQ ID NO: 449758 - DNA, 399 bp, Triticum aestivum
gctaggcttgaagcgaaagaggaggaaaatgtgcccgctgagggtgatactcatcttcctctccgccaccgtcgccggattcttcctcctccggggcctcaacgccgaccccgactgtttccaagacggcgacgacggctcggaatctcccagggccgccgttcccctccattccaaggttggttcagctgtgaaaaccgggttctggacaacggtagacatggcgagcgggcggtacctttggcggacccttgttgcgccaccagcgaattctgaatccgacaaggcctggtgacgacgaacttcatgttgtctgtttgacatttgtgtaatgcgggagacaagggatgtgatgtgcgatacggcggtgattgtaaatatgggttttctttgtttaag

SEQ ID NO: 449759 - DNA, 107 bp, Triticum aestivum
ttcgtttttgcccccgttgacagcagtatcatgtagacgagacaaaataaagcaaatccatggcttgtgtgtgtgatatactatatcagattctgaaacagattacc

SEQ ID NO: 449760 - DNA, 164 bp, Triticum aestivum
gttgcatttcacaggattgaagatttgaaccatgcttgagagtccttgttcctgatctttgcatttccctgcatttctttcacgtttttttttctttctcaatggttcctttcgttaaaatggaccaacatggactgaaataataaaatttatttccaagtttc

SEQ ID NO: 449761 - DNA, 423 bp, Triticum aestivum
ttcaggcattgagaaatcgagcgtcaatctgctgatcactcgcatttgcgttgagcagatcacttgctgtgtagattgcaggtacaggttcctgagcttgcatgcgcatggccaaggcttgcctactccgcggtgtggggctggtggtgtgcgcactcctgcttctctcgccctctttcatggcggctgaggcaactggccggaaatgggatcacgggagagaggccacggtggccgtgatgccgatggcgggagggcgttttgcgaggaaggtgttgcgggaggagatggtccaggcagacggcgacgtcgacattgccggctctaagaggaaaagccccggtggcccagaccctcagcatcattaactgatgtcgaggtctcctcgcatgcatatttctctacaaaggcagcatatacatg

SEQ ID NO: 449762 - DNA, 217 bp, Triticum aestivum
ttcctcgcgtccgaagatttgttcagtttgaacctgaaagagcttttgatcggatttatctctgttgtgtcaagtattcacctgagaagtctggcttgaatgttaattagtctgttgctaagtgtgagcttgtgatgaactggtgcgtgtttgccattttttttctaagcattgctgagaggccaaactgagctgcaaatatgcagttgccatgaac

SEQ ID NO: 449763 - DNA, 357 bp, Triticum aestivum
tatggaggtggctgtcaacgacttcctccaggccgatgatgcccgtgctgccatccagcactccatggatctgtacgcggaatacattatgcacagcctaaggcagtagagtgtgtactattactatttttcctttgcccttcctcctatgatgggatgcaaagaagatcccctcggaacatttggggtctgatgaacaaccaagcgagcctgtatttctacattcttgctttgtattagccatattttcccattactgtggcactatgtatctcaaatttgtattcgagaccttgtggtttggctcgtgtattatcttcagttcttactggacggacaataatataacaatttatc

SEQ ID NO: 449764 - DNA, 335 bp, Triticum aestivum
tgttaatggaattatctattgattgtagtattaagtttgcttgtgttttcagctaaaagaaaggaaaaaaaggaacaacatacatttctgcattgcttcatccttgcggctgagagaggcatgcgttctcctgtgaagagtgcataaattgtttttattcgcttgatatttatttatgccagctaatttgcaggtcttacaattaatactaatctttaggcacaggaccaggaccacatggattgcatcatctggtttatgaaatactgaataatgttgttggtgaagctcaagcaggctatgctactgagattaatgcagcccttcatgatgac

SEQ ID NO: 449765 - DNA, 72 bp, Triticum aestivum
ccctcgcgtccggtttgaattgcttttgagtttttggtacaatctaagacgcaatgaaatctaccttatatt

SEQ ID NO: 449766 - DNA, 238 bp, Triticum aestivum
ttctttggagcagcgggcgaggacatctcctcgtcgagctcctctttccgtgggcgaggacatcccctgtatctcactgcaccatgacgaacagggggaggcgcttagcgcaccggcggcgagtttctagagctgcaaattgcaagtgagctttccaatccaccttttagttgatcctcttcccgtgagcagttgcaggtctatgcatggcgagactgcttatatatgagcacgccgc

SEQ ID NO: 449767 - DNA, 169 bp, Triticum aestivum
tctgtcgcgtgggtgtttattcaagtgtttggaacaaactgcattcgccattggtgcatctacctgctccggtgaattcttttggtggaattgaagtgtaatttgattggatccatgtaggcgttgatgatctcatctgttgattgtaactgtgattaaagaagaaact

SEQ ID NO: 449768 - DNA, 357 bp, Triticum aestivum
ccctcgcgtccgcccacgcgtccgcccacgcgtccggttaatattgggtgcagcaatttcacaactctgggaaaagcttctgctggaggacatcacctgcggcatcacctgcatcgacctctcgctgattaccatcccaaggatgcgcgaccgactggcggagcagggcaccagtgataagttcaccgatttggtcgactcaccgttcccttcctctgtccacgcaatgccgctcgttgttgttaggttgttaattcatcaagccccttattgcgctacatagtttgttcatctcgcatgccttcttaggagaaatcatgtaatgaagataagctattcttgatttacattttattt

SEQ ID NO: 449769 - DNA, 51 bp, Triticum aestivum
ttcttcgcgtccgcccacgcgtccgcccacgcgtccgcccacgcgtccgac

SEQ ID NO: 449770 - DNA, 216 bp, Triticum aestivum
ttccacgcgtccgcttctcccctgcttctctcggccgaaacccccagcggagcgagcggcggcggcggcggcgatatgcagttcctccgaggcgtcggcggcgggggtggcggaggagcgggaggggcggggtcaatggcgtgggaggtgttgaggaggcatttctcgcggaagcgggcggtggacatacggcggatcaaccccaaggtgcccaag

SEQ ID NO: 449771 - DNA, 183 bp, Triticum aestivum
ctcactcgtccgatccacctcaatgtgcctgtggacatcatgatcctcctcaaccactgcggcaagacgtgcccgtctgagttcacttgcccatcccattgacggatgcgtactgctgcacgggcgccgaataagatttgctttcagattctaaaaaaataaaaattatttgctttcaagccg

SEQ ID NO: 449772 - DNA, 59 bp, Triticum aestivum
  unsure (1)..(59): unsure at all n locations
tgagtcntagtgggagggaaagaagagggagatcaggagatggggaagggagggaaagg

SEQ ID NO: 449773 - DNA, 307 bp, Triticum aestivum
gtttctgcatatgaggtttatatgataacttctgcagctgttgtacagtatagaattgtatatatatggtataaagtcaagtgaatagttgataacgagtgtctgtagagtaggactaatatttatctggctgatagctgtgaggcgtctggtgttctcgtgtgaccatagtaggagatggtataaagatcggtctccttcggtccttcccggaagaaatggatctggcattctggctggaaaacttgctagtgagttcctgtcttgtcttcgggtggatgcactgaacagtccccccccccccccc

SEQ ID NO: 449774 - DNA, 200 bp, Triticum aestivum
ctgacgcgtggggttctgggataaggttaagagcgctgagaaggacgaggttacgttgcctgatcagccggaggatgaggagtcggtgatggatgaactctgatgtatcaataggagtgaagggttgatgtattcttaggcgtttgggatatggcattggcaaggcatcgaagctgcaataattttatagtatttaccga

SEQ ID NO: 449775 - DNA, 98 bp, Triticum aestivum
atcccctgtatctcactgcaccatgacgaacagggggaggcgcttagcgcaccggcggccagtttctatagctgcagattgccagtgagctttccaat

SEQ ID NO: 449776 - DNA, 102 bp, Triticum aestivum
ccttcgcgtccggcaacagctgataataatacaatgattgaagatttgttctacgctgggaatctacttgacacaaggaacatatttttaccaaacttaaaa

SEQ ID NO: 449777 - DNA, 396 bp, Triticum aestivum
  unsure (1)..(396): unsure at all n locations
gcttcgtattcttgagggattctgatcagtctcggcctctcagggaaagaagagactgcctactgaactcgctggtttcgtgtgatctagagctcgggagttactctagttagagcatctccaacagccgcgctaaactagcgccgcgccgcaaattagaccgtcttagcgcgcgcgcaacgcggcgggtcgcttcagcgggcgcgcaaaaccgacgcgcgcgttataacgggttgagcgcgcggttgaaaatacttacccgcgcggtgtattttgggcgccagctacagcgcgcggcacactcgatcgctcgcgccgcactctcttctctcctcgtnctacgccccgcgcgcgccggcgccggcgccctgccacccacccatggacgcgcacacc

SEQ ID NO: 449778 - DNA, 287 bp, Triticum aestivum
aattcattctccttttgaggccacccgccgacgccggctgcttcacgtggacatcagtccatccacagcatgtgtacacttcgtgggtgtgactccgctgacctagtagccgggatagacgaagctatcaaggatggggttgatgtgctctcactctccctcgcccctgtctgttttttatgttaaattcagtcgagacatgtctgtaactagtagggtttccatgtctgtaaaataattcaagtttggacatgtagcatccattcctctataactctgttactttg

SEQ ID NO: 449779 - DNA, 333 bp, Triticum aestivum
ccttcgtttccgcatgtcaagctggtccaaaaggaagcagctgaacttggttgccaggaccaaaaccatatttttgaacataaacaccttcttcacctctgatggagagttatccttgaagttgcgagagtcgcgctggatgcaataagttaagcctttgctttgcatccattctccgctcttgcgttgggagctcgggagagtttagtcatgtcttgataatctgagagtggacatgtagttcatcctgtatcggctggttaatttttcttccaccttacttgggaaggaagctgtagatactcagatagaataattatcaatattctcggt

SEQ ID NO: 449780 - DNA, 245 bp, Triticum aestivum
cggttcgcgtgggcgaacggcacgagaagtggatggccgagtttggatccgcttaaaccttggttcccattgaagattgctggatcttgtccactcttttttgtttgtttgtgttttattcctggcatttgccttatttccaccttcccgtatattgtttcaacggtggcagtatgtatgtatgttcaactatgtttcctgagccggtagtttatgacaagaggcagaccgtaaactcggaacct

SEQ ID NO: 449781 - DNA, 324 bp, Triticum aestivum
  unsure (1)..(324): unsure at all n locations
gtttatttggatgtattttcagtagttgttctagtacttggcgctgctttggcatgttatggtgcattattgttctcgaagatgagcaaagtacgttctgaaaccgtgtcaactgagaagtggaaggttgccagtttagctgctgtctcacttatctgtttctcgtcttctgctatactagcacttgttactaatattccagtgcttttgtattggtactccactgaggcggagatcataaaaaatgctgntatattatttttatattatttaataggctcatcggtaccatcaggatttgttttatgggtcatgagagatatg

SEQ ID NO: 449782 - DNA, 280 bp, Triticum aestivum
tcgctgacccctgtcgggtgtactcaacttccaccactagctaagctccatctgcatccatccatccatcctcccatggcgtccgtgaagctcgccgccgccgcgctggccgtcgtgctcgcgtgtgctgcgctcgccgcgacgccggcggcgacgtatgcggagtaccggccggagcccgagccctgcaagacgcaggccatgtacttcaagaactgcctccgcctcggccactgcgagaagtgctgcttcggggtggtggccaacccggcgtgctact

SEQ ID NO: 449783 - DNA, 56 bp, Triticum aestivum
tcttccacgcgtgcgaaaagtggatatgctatcctgaacttcctgtatattatgaa

SEQ ID NO: 449784 - DNA, 92 bp, Triticum aestivum
aaatttatttaaaaaaaaaaaaaaaaaaaaaaaaaaaaaaaaaaacaaaaacaaaaacaaaaaaaaaaaaaaaaaaaaaaaaaaaaaaaaaa

SEQ ID NO: 449785 - DNA, 218 bp, Triticum aestivum
gcgtggtgcaatggggcatgaagaggcgcattcagcgggagggtgaagtgtcggctgcgttatgatttgtctgtctaccgtagttttcatttggtctggtcgtggagtgtgtgcaatttgatgtctccggcacatttgtgaggtcctgggcagtgcttgctggttcttgccagcggcatttgttgttgcctctgaataaacgcctgcccatattgttc

SEQ ID NO: 449786 - DNA, 206 bp, Triticum aestivum
ttagcctctctgatgaagaaggtagtctcgagtccagacagtaaccccgagtagttcagccagggttcctccctggacgtggcgctgtgcctcttgcttagatttgggtttagtattgagatttctcaatgttgaaatatgaatgtgcttttgctggaacaacatggtctttctgaaaaaaaaccagctcagaactgcaaatactc

SEQ ID NO: 449787 - DNA, 200 bp, Triticum aestivum
cgcaaaatggtctgctggggctctacttcaaagtcgtggccgtggacaatttgggatttattaagccatgttttgggaatttttgtaactgctaggctgtggttctatgtgctgaggagggaggcgctgctgctcatgttgctgctgctggagtcctcactttatttgttcagactatgtaatgaccgaatgatgttatt

SEQ ID NO: 449788 - DNA, 286 bp, Triticum aestivum
tccacggagtccagcgtgagcgctcggcgcggcaagtcggccaccatggccgcggcggctctcaccctcctcctgctggtcctcctcccggcgggccgtgctctcgccacggcggccggcgacgcgcacccgggctacgcgggcgcggaggccgacacctgcgagccggcgcccggcggcgctcccccctacggaggaggcgcggcaggccggcgccacggcccggcgctggaggagtacgggggcgggcacatcgtggacattacgcacgcgtaccgccccagca

SEQ ID NO: 449789 - DNA, 144 bp, Triticum aestivum
tagtctcccgggtgaaaaccacaacactgttgggcggcggcggcgcccttggcagcggcgatgctcgagggcgccgttcccctccttggaggcgaacctggccgtgtggacggcagatgaactggaggacgggtggcatggtgc

SEQ ID NO: 449790 - DNA, 187 bp, Triticum aestivum
ggagctcagccggctgctcggcggcgtcaccatcgccgccggcggcgtcctgcccaacatccactccgtgctcctccccaagaaggtcggcaagggcgccggcaccggcgggtccgcctcccagtcccaggagttctagagcgtcagagatctgatgagtggtgtcgcgtggtggtgtggtgctttt

SEQ ID NO: 449791 - DNA, 290 bp, Triticum aestivum
tccgccctctctccctcccttgtccgcgctgcccaggtgttagctgatcactacttcactaggagcgaaaaggagctaccatgggtatttcatccaagtggatcaaatcacttgttgggataaaaaagcattggaaaagctcaaaatggcgaaagcagcagagaaaggagctctgctgctcagctgctacacaaacggaaacattctgtggatactgaaggctcccttgcagttgcagaacacacagtgcaaattgaaccattggctagtgacaccaatacacagacaat

SEQ ID NO: 449792 - DNA, 263 bp, Triticum aestivum
ataatatgtgcatcaagtcgaaccaagtcctactacagggtgggagggggtctataaacaaaacatgaccgacacacttgagctccaagcctaccaaccaagtctacgaccaccgggagtgaaaaacaaaaggcgataagttaaattaaaatcctcgcgaaaaggaacaaaacatacgaagcccaccaaggaatagcacgatttgcaaggtgatggggtcttcttaacatgggcctagtcccacaagaggttgatcatcgagt

SEQ ID NO: 449793 - DNA, 285 bp, Triticum aestivum
gaaaaaacttgcctttgcaggctgccttctcggcatttccgccaccactttcttatgtcacgttaagattctatgacattgtatatagtactctcttttacaaacaaacgctgttagggtagccaagaagctatttagtcggtggccagaggtcagaggtcagttgagttgttgattagtcgtcattgcgcaattctgctacaggttggcgaaaaatgtgtgaactctacagactctagtccatgtgtcatgtgcgagttgctgcaaacagaacaagacactcgt

SEQ ID NO: 449794 - DNA, 157 bp, Triticum aestivum
cgccgcatctcccccgcgccgccgccttgacgctccgatttgtccgtccgacggtcagcagcagcagcagcagcagcctagtcgtcatcgtcgccgatggcagggttcggcagcctggcgtccaagactaataatgtggtggtggcgggcgggctga

SEQ ID NO: 449795 - DNA, 242 bp, Triticum aestivum
ccgccaccaaagcagatccagcacgaagttctcctggcggaacaaagtgcctctccagcaaagcaggcagagcccgagccgcgcctcgaggaggaacagagcgttttttctccaatctctcgcgtcccgcactggttcagccgccgcacggatgcctccgagctcatggggttcgcggcgcgcggcctgctcgggaatggcaggtccatgcaggaggggtaccggcagttccaggagccgtc

SEQ ID NO: 449796 - DNA, 233 bp, Triticum aestivum
tgcttgatgaaggggactttcttaggatgcagagtgtggtttttgcaatcaaggaaggccggaataacggcggtgctgatctctcttctcttcactcccgtggagaagaggtttttgtttttggatgaagaagaaaatgtacccctaatcagcatgcgcgcggttgttgtagaaggagaagatgtaagttgatgcagatgtaatcaatggaagttggttaaatttcgtagtaa

SEQ ID NO: 449797 - DNA, 371 bp, Triticum aestivum
gaggagcagcgattgcctccactcgagcccgatggcggttcctcgcgctgcccctggcgctgctcctcgcgatcggctcgtcgcgcggcctcgacgcggcgcccaagccccccgtccccaaggccatctccgacctgagggaggcgatcgtgaaggggctggggctccagtcggaggagctcaaggtgtccgggttcgacgtgagggacgcgctggtggggcacgcggtggcgtacgagttcgacatggaggtcgggaggaaggccgtgccggtgcggctgctcgaggacgtcaaccgctgggacttcgtcgacctgcccatcttccggtcccaggccgacgccgacgacacggcgctcgccgagattggg

SEQ ID NO: 449798 - DNA, 102 bp, Triticum aestivum
catcatcctctacatctaatgagattatagttcaaatcatacattcagaattatccaatgtggaacttatatgcattgaggttacatttaaaaaaaaaaata

SEQ ID NO: 449799 - DNA, 258 bp, Triticum aestivum
aggatggctggaaggagtttttttcggtcggatgtctatttcttcacctatattattctctcctgtctttcttgaagagtttttttttttcgcttagcttttttgataggtttcactgaggagaccactagagaatgtaatacgctggtaacactagaagaaatatgaatgctattttttgctagttttatgttactggtgaatgaatgcagtattttagtggcaaaaaaaactaactaaagctgaaagattaaataa

SEQ ID NO: 449800 - DNA, 303 bp, Triticum aestivum
ctctgcctatctagctcgctcggattacggccgtgggcggctgcgcttccagaggtgagcggtatgtcgggggcgggggcggaggaggcggtggtgggcgagagcttcgagttcgcctttgacaaggaggccttctccgacaagaagctgcgggtcgaggtcgtcggcagcgacgacgccgccacccgcaagcgccgccgcgaggacgacaaaagtgatgaaggagaatgtgtcgattcttcttctatagtgatggctgcaccaattttacgagttactaccatgaatatcaattcggcgatt

SEQ ID NO: 449801 - DNA, 360 bp, Triticum aestivum
  unsure (1)..(360): unsure at all n locations
gccagaactaaagagnggggccatggttccatccgaaggccattccatttaggacaatctctctgatgttttccgcggggtcaaatgtcaaaaacccggcaagaagatggaaacatccaaatgttccaaagctggtcctcaagccgttaaatctacagcgagcaattcacctcctgaggcaaagtcctgcaaatcatcagatatggtaaatgttgcttcagacataaagacatcaaagtcccttccttcaacaccacccctagtatccagagcagatccttcatcctctaggtgccattctcttcatgtggactcattctcaatgaggaaagcacgtcgatcacctggacatcaactatg

SEQ ID NO: 449802 - DNA, 289 bp, Triticum aestivum
cctttgtttcctcggcgttcagcccactgatgatgatcgtgttggccgtgatgggctccttcatcctctccgagaagatatacctggggggcgtcctcggctccgtcctcatcgtcatcgggctctactccgtgctctggggaaagcacaaggagacccaggcggagtccgcggccctgcgggaggcgctgcctatggccatggcctcctacacctccaaggtgaccggagacgccgcgtcggccggacgatccggagtgcgagaaagccaacggagcagccaagccat

SEQ ID NO: 449803 - DNA, 430 bp, Triticum aestivum
ccctcgatcgccacgcgtccgtccttctccacctgcggccgttgccacggtcaggccggcgtggtggtgcgcctcccgcctcatcacccatctccatccaccacaacaccatcaccctgcaccaccagcgccaccagcacccccaccatcattccgcgccatccatccaccatctccagccaccgccgcatctggcgcgacccaccagacccaccagactgcccgtctggtgtccggcgcgagcacgccatccaccacttccacccctccctctctgttgttgctgctcctccctcttgcttcgtcctgctgcttctcttcttcccctcgccttcctcaactgctgctgctcccttcttaccccaaactctactgctgcatcttcctttcttctccttgtccctactactgctgctgaaccgctcctcct

SEQ ID NO: 449804 - DNA, 295 bp, Triticum aestivum
tacgtagcctctcggtctgggagacatcggctgaaagattgctggagaaatggatacgagcgtgatcgtcgtgtccgtcgtggtgggattctttggggtcggaagcgccgtgctggggctcatcgccgagggcaccaagctcgagccgaatgacatctcgatgtccaggaccgagtgcgtgtaccccgccaacccggcgttcgcgctggggctggtcgcggcgctcctgctgctggcggcccagatcaccgtctcggccgccggccgctgctgcggctgctgcaagccccggggc

SEQ ID NO: 449805 - DNA, 231 bp, Triticum aestivum
acgttaagtataaagaggcggcagcccccccaccggggaggttaacaagaagtgagggcagggcacgaggcgcacccagaaaaccacaggagagggagcaagacagccacggcggcggccactcacgcagcacgcgagacctgggctcccagagggaaggtcacacgctaaaagacaaatacaggagtgacccagagcgagggacaaaaagaaacgaaagccagccattgc

SEQ ID NO: 449806 - DNA, 213 bp, Triticum aestivum
gccgaggacacgggactcggctgcaccgatgggggcgcacgagcactcttactacggagccacgtacccgcgggcggcggcaggacgatccagatcgacagccaaagctccgaggccaagcgccgcgccggcgaccgagccacatcgaccgacgaggacacgtggcgcgacgtggcgtcgctggcgtgcgacggctcgccggcgtgcgtgcgg

SEQ ID NO: 449807 - DNA, 196 bp, Triticum aestivum
ccgcgcagcaaccacccccgggaccgagaccaccggcgggcggcgggcaaggaggcggcaccgatggggaagaccccggccaagaggcacaagaccgcgcccaccgggaagaagaccaccaggactggccccgccaaggccaaggacaaaacggccgggagcaacagaggagacgccgccggcgggaaggagcccg

SEQ ID NO: 449808 - DNA, 181 bp, Triticum aestivum
  unsure (1)..(181): unsure at all n locations
cggtaagtacacaaccgcccacggccacaggaaagagggggaggcaggaagacacgcaggcacgcacgcacccanggcagcggacagcaagcagcanagcccgcagcagccgccgccggccggaagcgagggcggcggcgacgacgaggggcacggggcggccagcaagcggcaggagagc

SEQ ID NO: 449809 - DNA, 323 bp, Triticum aestivum
gccctaagtactaaaaagctgcgggccgaccaccgggctggcttacacccttccagctcgcgacgccacctgagacctaaccacctcggctgctagtgctagacgggcacggcctcgccgactccttcttccatcagggtttggtctcatctgtgggagctcacgctcttggatccaagttcaggtttgatctgtgaggaagttcgatttgcaactctgcagtgctattccgaaccggaagcttgatcatggaaggggccactcccactcccgctgcctcaaacacaaggattgctgtggtcaccggcgggagcacagggatc

SEQ ID NO: 449810 - DNA, 395 bp, Triticum aestivum
accttgagtaccatctgacaaacagcttgctcagagccatcttttatcaaatggtacagttcctgtttccaactcaaaacaggcatcccatacagggttatctcctgatccttttgatgggaatggacctcataaaaagacaaagaagcctaaagcatggtccaacaaggaggatgcagacttaatggatggtgtacataagtgtggtgaaggaaattggctgaacattctgcgtaaatataacttcgatagcacaagaacttatgttcaattgtctcagagatgggcagtcatttgcaggcgtcaaggaacaaccaagcttgctaaagttaaatcagtcaccacggagttcgatataaaagctactcaaaggcattctctatggctcttgatat

SEQ ID NO: 449811 - DNA, 358 bp, Triticum aestivum
acaacatgcactatttaaatgatggcctgtgtaaggtactctctgcttttccctctaccttatgaaatactccctccattcctaaaatataagccctttcagagattccaatacggactacatatggagcaaaatgagttacactctaaaatatgtctatatacatctgtatgtagtccatgttgaaatctctagaagggcttatatttagaaacggagggactagttgctgtaactgaagcgcatatcaagtggctttgccagatttgtgacaattagtaccagacggtgattgccagccctttttacccttgcaatatgttcatgattgccgcagcaagctcactccttggggagc

SEQ ID NO: 449812 - DNA, 268 bp, Triticum aestivum
gccactcacaccgacctccgggccggcttacatttaatcctggccaccgtcaccagctccatcgactacggctcacccacctctgctgcctccctggaagccgccgccctcctcaacctctccgtggcactcgctgacccctcgggcaacctttccgcgcactggacgccggccacgccgctctgctcgtggccgcgcctctcctgcgacgccgccggctcccgcgtcatctccctcgacctctccgccctcaacctcaccggcccca

SEQ ID NO: 449813 - DNA, 379 bp, Triticum aestivum
  unsure (1)..(379): unsure at all n locations
tcctggcgannacttcgncggccgggcgtcaatccacgagcagaacacgtcagcgccggcggctaaaccgggcttcttggccaaattctgtccatgcctcgccggcggtggagccaccagctagaccgacaagcccagccaccgtgcgccgtgcgcgtgaccacgggaggatttgaagtggaatcgggtccatgagtctcaattctgtattggaactgtgcgagttctcttcatctttggaagctctgctctgtttttcttgctttctctagcatttgattcctgcgtattcattcgtgtaatgccgacagacgtaaactcgaccaaattgccacccgtccatgtgaaatgaaaatgatgttgatttggtcaattgtat

SEQ ID NO: 449814 - DNA, 433 bp, Triticum aestivum
ttcatacctaaacgaaatgaaaaaataaaggtagcgcacaatgcactcactctctctctctctctctctctctctctctctctgatatgatattacagcctactagtatacagaaatgctggagctccagcttgacaacgatcagttgtcgcagaaagcgcggagggtttcgtccagggctttcctgtcgtactcgccggtgaaaacgcagcctcccagaggtcctttcagaaggatgagcctcaacaatccgtccgcgaccttcttgtcgaccgccatgatgtttctgaacttctctaccgtcatgccctttggtggtgtcacgggaagcttggcttgatctagtatgtcaaatgtccgtttcttgatggactcgtctatccagcccaggcggtaagacatgtcagctgccataaccgttccagcagcaaca

SEQ ID NO: 449815 - DNA, 296 bp, Triticum aestivum
cctacatgcgaccgcagccctgaaatccccatggcctggtttgtatacctcctctctcccgtccctctccccctctctcctccctagggttcgggtctctcctcccccgtcgccatgatgcagccaccgccgccgtcgcagccgcagccgggcatgggcgcccccatgcccccgcagggcgcgggagggcagccgccgcactggggcgcgatcccgccgccgatgccgcactacgcgcagccgcccccgcagcagcagccgccgccgcaggcgatgtggggccagccgccgcccca

SEQ ID NO: 449816 - DNA, 192 bp, Triticum aestivum
cccatgcgttcggcagcggcgaccgcgcccatcacggccaccacccgcctgacggagcccttccctcccatcggcggcggagatggtggggtggctcaaggcgctggtgtacggcgcagggggcatggcggtggtgggcctggcggcgctggtggcgctgcaggagcgcctcgtctacgtgcccgtgctccc

SEQ ID NO: 449817 - DNA, 246 bp, Triticum aestivum
gccgtcgatgacttcgctctgtagcagctctcgcgcggatcataccatatggcgacggctatccaccagctctccttcgccgcgccgagcgcgggcgccaggcggcggctgacccgggcgtccgcgtccgcgacggaccggcacgaggtgctgtcgcccaagcgccggctgccgctgcggaaagtgccgggcgagcacggcccgccgctgccgggcgcgctcaaggaccggctggagtacttctac

SEQ ID NO: 449818 - DNA, 446 bp, Triticum aestivum
ggatttggtccgctgaaactgctgcgagtagcttggttgttgtgcaagtggaattaaccctgtttgcgtgcgctcttacagtttgattgagaaactcatattttcctgtagattgggaaggatgtcgagtacctcctggtggcaaagctttctgcagcagtttagtattgttcccaaattgttcagatccgaaggtgttgccatttatgttgcgcggcttgcttgcattggtttctcctcaacctgaactgaacacattttctttcttcagtgtgtaatggagaaaggaaatggttgataaaaccaagaggcacagacagagatgtgctgcatcagagtacttctctagattggtgcgctggaaatgttcaacgatctatgatcgactgcattgatcaaaaagaagagaaaaaaaaacagggactcagcagctgcttggaatctgc

SEQ ID NO: 449819 - DNA, 247 bp, Triticum aestivum
aactccacgagacggggccaaattgtgacaccggagcagtccagtcccaaatcccccttttcggccggccacgacctcttcctccacaaaatcctccccggaattccgccgagtccccggtagccggccgccgatcggtcgattcgcggggggcgggatgagcttccaggacctggaggccgggaacggcgtccgtgggacgccgcggaggaacggccgggcggcgggggccggcgccggctcgtcg

SEQ ID NO: 449820 - DNA, 139 bp, Triticum aestivum
taaccttcgcccttcttcttccccatttcggcaggggggcagcccaccaaccacccccacccggcgccatgagggagtgcatctcgatccacatcggccaggccggcatccaagtcgggaacgcgtgctgggagctcta

SEQ ID NO: 449821 - DNA, 407 bp, Triticum aestivum
ttgcattgtcgactacgccactggcattaccatccatggttcctacctcattgattagccggaaagtctctacaagatggccagatgataacaacttctatgaggccactataacccgttacaatcctgctacaggcgaacatgctcttgtctatgacatgggcaaaacaactgagtcatgggagtctgtcaggctttgtgatatgagacctgaagatataagatgggaacgtgatgatcaaggcatctcaaatcgagatagttggggcccttctggtccattgttgaacaggaaccaaaacaacaatggtagagggagactatctcagaatgagcatccaaataaatatggtccacctcaaaatggcatcaacaggaatattggtgaaattgacgtgcctaacact

SEQ ID NO: 449822 - DNA, 140 bp, Triticum aestivum
cggtcactccactctccactcagctcttctctcgggcgcaattcttcctatccgcctcggctcgggctccatctccaaggattctgttcccgagtcgtacgtgatcctgctgaagcgtgagctcgagccacagccacaca

SEQ ID NO: 449823 - DNA, 114 bp, Triticum aestivum
tactctcgtacgctcgcccggagcgaaaccgacgcgacttcgttaggggaaaggctcccggtgttggcagggattccgcctcttatacgcctgcccgcctcgccagattcctca

SEQ ID NO: 449824 - DNA, 313 bp, Triticum aestivum
ttgctgtgggtccgtgttgatccattcactacccgtctcgctgggccaaatatgcaaacctgtggcatcaactgctaggaaagggggagtttgtagagacagaaaatataacagtgatcgagcaacaacccgcggagccagagaatatttatgttggggttgtgaattactacgttcgagaaagctgtcaaaattgagaaaacacatttggaaatagatgtaatagaccatctaccgttttcatgaggttaagctcttttttttttggaacaaaggactctcattggtaaacctataggaattttgctatgag

SEQ ID NO: 449825 - DNA, 211 bp, Triticum aestivum
tttttggaatcttcagtggagcatatagcttggcatatcaaaaattatagagtactaattagcacatattcttccctctttatcttttctctcttctctcttatgttttctttctctctcatctctcttttctctcttctatcttaccccctttgtaaaaaaaacattaggtcaaatttggacctaaaaacttcagaatgatgattatctg

SEQ ID NO: 449826 - DNA, 80 bp, Triticum aestivum
gaaaaccaaggaagggagggttaatctaactttgcgacagaatccaaaacgtatacatatggatcaggtcaggcttgccc

SEQ ID NO: 449827 - DNA, 205 bp, Triticum aestivum
ccggaggctttaaagctactgcacttcatgtagttaggatcaattctctgtttcagtttgaaatattccccatttcctcctatttgattgattcatctgatggacattttgtcaggcaaataaacaaaaggcatatgtattgttacgagtgaagccatccatactcccatgtggaattcaagaaatagagaaatgttattgttct

SEQ ID NO: 449828 - DNA, 244 bp, Triticum aestivum
aagagagggatgagaagaggaagctcgcaaggaaatcagtgttgagactgaaaatggatcttcaactagtatcctggagagatgcaatgatatctcccaactcccttccaagatgaggccttttttttgacaaaaatggtggtgtaagaatagatgtgaggtttgtgttgtttattcttgatatcggcggattgagatattgtattacgggtcccttttaatgtctcgtgcttttgtctttcaa

SEQ ID NO: 449829 - DNA, 316 bp, Triticum aestivum
ccacagatgaaaactttgttctgctcatgttcatttttcttggctgccattgtgacggctttgtagctcaggtaggaaggggggagtgacacggccgttgaacgggagcaaaggagtgtagctggttcgtcagattcggatcggtccgtgtaggcgcttgtgtattttgtatatggcgtttttcgtatgtgcaggtgagtctgggggatatatatacatcaggggattggattattcatggatgtttggtgcgatgatgaacaataatgtgacgattctttgtagggtaattggaagaactgtgatgttcttgtgc

SEQ ID NO: 449830 - DNA, 283 bp, Triticum aestivum
ccccctggcacatcggcgtagcctatgatgatgccaaattttcgtgtaaactgtggtaactgccgtcgtcgaattacccaccgttgaccttggttgtggtggatgttgtatgtttgggatgtttggcccaactccaacctcaccctggtgggtgaggagtagatgctaactatggcaaagcaagcgtatatggaagggaacgggtgttccagatccacccagttaaacttgttgttgtgcaaggagcagtcttcatcttgggcgttgcttactcttttaattt

SEQ ID NO: 449831 - DNA, 402 bp, Triticum aestivum
  unsure (1)..(402): unsure at all n locations
agcctncgagaagcctcggccgcgaggccgctccggccagccgtcgacatgcctagcgaggtgctcaaggaccaggtgatcgtcaacaagtacgcgccgcttctgctcgccatgctgccgaggggccccgtgacgccgtccggccccagcggcggcacgaacgaggccgggaactggttgagcaagcgcagggtttcccttaggataatagatccatcgatctaaagaaatctttaggcatgcagtggtagacggtatgctctgttttgcagtacaaaatacttgtacatacatgattgttagactgggagacttgggcatatagtgtaggatataccccaaaattataccttcattctttaatttgtcccttgaagtaattgattgaaagagttttgtctt

SEQ ID NO: 449832 - DNA, 414 bp, Triticum aestivum
ggcacgcgcatcttcgggccctccgggaagtactcctcccgcgacctcgccgcccacacctccctcaagcccagaaaagagggtcagcaaactcaagaggaggtacagaagaggaatctcagggacgaacttgaggagcgtgagcgcaagcacttctcatccaaggataagtcctatgttgatgagagggaccggcgaaaaagttcgagcctgctcttagaaggttcaaaacgggatgaggataagatagttccacgtgaaattgatgcagacgactctgacgtggagctcaaaagtgatgatgaaagcgatgacgacgacgacgatgatgacactgaggcactcatggcagagcttgaaaggattaaaaaagaaagagctgaggacaggcttagaaaggagcgtcagcaagca

SEQ ID NO: 449833 - DNA, 71 bp, Triticum aestivum
cgaaccaaaaacttgaaagcaaatgtgacaatcatctatagttcaactgacaatcgtttggcttcagactg

SEQ ID NO: 449834 - DNA, 211 bp, Triticum aestivum
atacagttttctaatctattgacgcttgtttagtttctcatgaattatagttcacgtaaacaatacaaacttcctattgtgctgttgaattgcttgttcactttaattatcaacaagtcatctgattgataccacaataaactgcatcaagatgagacttttcttaactgtctataacgcatggtgtgatgaccattaggaaaactttggc

SEQ ID NO: 449835 - DNA, 365 bp, Triticum aestivum
tgaggagtcgaagatttgttagcccgctttgttcacagggaaccgtagtttgtacgcccatcggtcgattagccatggccccctgcgattctttctcaagaaaacctaccacccgttggccagatcaggagaactcctgcatgcgcctgctccgtcagcagccgccgccgccgccgccgccgctccggcggccggacctatctcggtcaggagctagttatcgaagatttttgaagaatgttaggctcgtcgcctatggtttgagcttggtgtgggcctttacgctataatctgcatggtcaaaccagcatagatgttcttgcaatggtcgatgtggccattcaaaatcctctaatatgaaaaga

SEQ ID NO: 449836 - DNA, 170 bp, Triticum aestivum
caagggcctgccaccgctcccggggccgatgtgcgtgtaattcctattaatgtatcttatgttgccaaacaacaacatgctcctgtcaatgctatatcattgtgggcgtggcatttttcttcctcaggtgatattccaatatacaataagttccatcaagaattgcatgt

SEQ ID NO: 449837 - DNA, 287 bp, Triticum aestivum
cccttgcgcaggtgcatggcatccccacctctgagataagtgtcgtctcgtacaaccagtgtcccggcgcagagccgatgcctacgcttgtgctatcgctcaatggcgatgactgcgcgctcgtgacgcaggcgctcggctcgctcaacgccgtcaatcagaccgctggcggtgtggttgtgggcgccacgaacaactcagtgacgcgcgccaagccctctaagaagagtggcatgccgacttggctaatcgtggggatcgtcctcgccgtcctgctgggcatcgcc

SEQ ID NO: 449838 - DNA, 61 bp, Triticum aestivum
gccacttgtttttgtcacactggcaaaagtgctccctatcccacttttactagttttaggg

SEQ ID NO: 449839 - DNA, 274 bp, Triticum aestivum
cccacgtgtccgctttccccttccctccctccctctcccggcgggccgacagaggcaatttcgccctcgattcgaccccgattcgtccgcccgcgaccgggattccctacggcaagcgcggatctgaacgctgcgctccgtgtcgccgctcgaatccgccatgaagggggccaaatccaagggcgccgccaaggccgatgccaagctggcggtgaagagcaagggggcggagaagcccgccaagggcaggaaagggaaggccggcaaggacccc

SEQ ID NO: 449840 - DNA, 69 bp, Triticum aestivum
atctcttataccaaagctcatattcttctgcttgaaatgtttttgggaccacagatttggaggatgtct

SEQ ID NO: 449841 - DNA, 198 bp, Triticum aestivum
cccacgcgtccgctccagctgaaaagcatcatccccttcctcctccccaatccccaatccccttccgctcccacccacaaccctagctcccccgaatccatggatccaaccaaatccagcaccccaccgccggcccccgtcctgggcgcgcccgtcggctacccgccgggtgcgtaccctcctccgccgggcgccccc

SEQ ID NO: 449842 - DNA, 154 bp, Triticum aestivum
tccacgcgtccggtacaattgtactgtactgtatatgtaagagagtgatgatgttggcttattctttgtcgcgagactatcaggtataattggctatgtatgaagaccacccatgggcatatcttctaggaacaaagacggacgagttcttcaa

SEQ ID NO: 449843 - DNA, 445 bp, Triticum aestivum
ctccttttcctcatctcctcttaatatctttcctcgtctcctccccttggcgaggaacaacagcagcaacagcgtacaggaggaggagaagcaaggaagcagcggcagcagcagctctggccgccgttgcgacgggaggagcacgaaaaacggcagccccgactgccgttgcaagcttcggccatgacgcggtggcgcggcgcggtgcagcagcttggatgcgtcgttagctccccgccgacgtcgacggcctgcaaacttctggtccaggtgtaagaggttggtcctcgagctgcgtggtaagggtagtgctcgccaacgcggtcagtgcggcactacggcgaccagcacgggtgcatggcggggcgcacgagatgggagcgccggcgactggatttgaccacgattggatctgggacgggtcgggcggcgcaacttttttttg

SEQ ID NO: 449844 - DNA, 99 bp, Triticum aestivum
gcggagcgcattcggccctcctccctgtggtgctggtttgattgagcactccagatgtgtactttagaataatttggtaataaagggcggttatataaa

SEQ ID NO: 449845 - DNA, 114 bp, Triticum aestivum
tatatatttggctctgcccaaaaaaaaaaaaaaaaaggtaaactatagtgaagttagtaccgtaagggaaatctgaaaaagcaactttattgttttgaaaagatattaaatttt

SEQ ID NO: 449846 - DNA, 60 bp, Triticum aestivum
tccacgcgtccgcccacgcgtccgcccacgcgtccgcccacgcgtccgcccacgcgtccg

SEQ ID NO: 449847 - DNA, 124 bp, Triticum aestivum
aaaaaaaaaaaaaaaaaaaaaaaaaaaaaaaaaaaaaaaaaaaaaaaaaaaaaaaaaaaaaaaaaaaaaaaaaaaaaaaaaaaaaaaaaaaaaaaaaaaaaaaaaaaggggggggccgttttaa

SEQ ID NO: 449848 - DNA, 263 bp, Triticum aestivum
cctcgacgcctgcttctgatcgacttcatcccatgttgttggacccacactatcaggcgcggcatatagattatagagtatcgtcatattttgcttctttctcgtaacgtggtacatgtgttgagtactgtctcagaacaatatttcttgtgtaatggtgtgcgtttttttcattcgtatgatccagatatatagatagacatgtcagattgatctgatggccttaccgaatgcatattttctcggggttcccttttttggat

SEQ ID NO: 449849 - DNA, 102 bp, Triticum aestivum
cctccccttccggctcgggttctggttcggttcgggtccgagagtagctagcctagactagggtttccgaagatcggagaggagagaaagggagagatccat

SEQ ID NO: 449850 - DNA, 460 bp, Triticum aestivum
cctccactgacctccagcgtaggcagcaccgggaagcaacctctctgctcaggctagcatggggaaggtgtgctgcagcagcgagtcggaggaggaggcggggttcagcttcctggggctcctcgtcgcggccgtcatcgccctggtgttcatgctcctctgcaccccgccgaagcggcgctccgtcaccatctacccgtgctgttgaggctgaggagtctccaaggatctctggttgctgggaggaaggttattcggttgttcatgggagagagcaggccaggcaatggtccctggttttcttcggttcagaaaataatttctactactgaattgtagggctcgtcgaaactgtaagccatgttttatcggtatattattaggctgtccatctccatctgtagcatgaactgatacatctggggaaaatagatatcatcagactctgtatgttgttttc

SEQ ID NO: 449851 - DNA, 351 bp, Triticum aestivum
gttattctttacagtgaatccaaaaagcgtagcagaccctaagttccccagaaaaccgtacatatggccgtcctttctcagtccggtcggtgcccagagctaatatatgacggggaactacatccggggcgattgcaacagattctgtgctgtatgtaggccggataacaaggacagagaagtccaataatacctgtagttttcccttggatcgcagaggcactttgttttgctaatggaaatgatcaatagaatacaattttttgtgtttttgtgagctgtggctcacactgccagcattggttgatgcgcttagttttcggaaattggtttccgttattcatcagttat

SEQ ID NO: 449852 - DNA, 375 bp, Triticum aestivum
gtcccgtcaaacgcaaagaagacaagcgcagcaagtagggttaggagagccggcggcggcggcggcggcggaaagcgagagctccagcgggccgtcgggagggaaccaccctcgtcgtcggagatgacgggcaaggcgaagccgaagaagcacacggccaaggagatcgcggctaagatcgacgcggcgacgaccaaccgcggcgggggcaaggccgggcagaaggaccggctcgggcaggagaagggcggccacgccaagatggagtgcccgctctgcaaggtgacggcccccgacgtcaagtcgatgcagatccaccacgaggcgcgccaccccaagctccccttcgaccccgagaagatcaacaacctgcac

SEQ ID NO: 449853 - DNA, 171 bp, Triticum aestivum
gtcataatgtacatctttttttcttttaccttctttgctgatagctagtataccatagagcttcatcccttttttttccctttcttctttttatattagttgatgaaatgtgtcaaccattgtgcagtttgttcgttatatgtggatatgataatggaaattgcaagattt

SEQ ID NO: 449854 - DNA, 193 bp, Triticum aestivum
ccctcgcgtccggaagaaagggccatccatgcaccctctccctctatattttggcaatttcatagaggcatggcattttacattggcaaagactgaactcctatatgtagcttaagcttgtatcactaggcttgtaatctgtattatcgactgtaagatacagttaattaaatcatatttcagtatttccaaa

SEQ ID NO: 449855 - DNA, 91 bp, Triticum aestivum
ttgtcatgtgcggtggtcgcgtgtgtttgtatcggtgtgtttgtatggtcggtgctttatatataaagcggggcgaaagcctttttcggta

SEQ ID NO: 449856 - DNA, 254 bp, Triticum aestivum
tggctaaacttcaatatgaataataaagtccaaggtttaattccaaaaaaaacatgcatcaaaccagtacttagtacttactactggcttaatttacgatgtggtgtagttactagtaagtcgtgtaccaccagcaagtgtgtttgtggatcgaggaggagtacgtagtactacgtgctacctcccggccggtcgtgtagaataaacggtggctaaacttcaatatgaataataaagtccaaggtttaattcca

SEQ ID NO: 449857 - DNA, 257 bp, Triticum aestivum
cttggatgcgtccatggcggcgacaaggctcaggaggttgctgacggactcacttggtggccatggtgtctaagtaaactaattggtcaagtattaagctcggctggaagatctgcagaagaccaaggggatggctggctgcgtctttgttcttcttaacataaacttaaattgtcacccgcaaaaaaaaaacttaaattgtaccttggtacattgtaatatcatacagtatgcatgcataaacacttttaattttt

SEQ ID NO: 449858 - DNA, 392 bp, Triticum aestivum
gagatccgatccgatccgatccgccggaaccctagccaggtccaccaccatggcggcgacccgctcgctcctcctctgcgccgccgtcctcctcgccgccctctcctgcaccttcgccgccgacgcgcccttcctcgtcgcgcacaagaaggtggccctctcccgccccaagcccggcgtcgagcgcctcgccgtctccctcgacctctacaaccagggatccgcaactgcatatgatgtggccattaatgatgactcgtggccaaaggaagcatttgaacttgtctctggagaggtctcaaagactttggaaaggcttgaacctggtgccactgcttcgcacgcgtttgtattggagagcaaaacacagggcaggttccaagcttcacctg

SEQ ID NO: 449859 - DNA, 180 bp, Triticum aestivum
gggatatatttgtttatttcttctagcgcctagccgagagaagagtggaggaacagagcagaattggtgtccggttctgtcagtacatatcacacacaggtttcgcttgatttattatacctactaagtattagtgctgtttggctgtgacatgtccacaaatcagcattggtgccatcc

SEQ ID NO: 449860 - DNA, 480 bp, Triticum aestivum
gagaaatcctccgtcgcggtcgcctccctatcgtcctccgcgccaaccgccgtgccctcgggcgagcggtggggcgccgcgatcggcaacctgggagagctgggcgccaacgtcgagtcgctgcagaagctgctcgcccggaaggccgtcttcgtcgacgacgacgtcttctccaaggcctccctcgcctccgaacaggcccgctccatcaagattcttgaccagagggtgcagtctctggaacgtgaactggacgctgccatttctgcagctgctcgagcccgtacagaaaaacgccaggctgaagctgctcaacgggctgcagagctgcgtgcacaggaagtcacgaaggagctggagaacaccgcaagagttttccagctgcacatggaagagctgcgggcaaaacaagaggagatcgccaagagagatagtgatataaggtgttggaagcaataatacgaaccctgagtagcaaag

SEQ ID NO: 449861 - DNA, 83 bp, Triticum aestivum
cccacgcgtccgcccacgcgtccggtagaatattgttgtttgttcaaaggctataataaaaagtgtttctctttttactagta

SEQ ID NO: 449862 - DNA, 99 bp, Triticum aestivum
tctgtggtcgaggaggtgaaggaggaggcggcgcctgctgccgagccagaagtggcggccgtcgccgaggaaacaccggctgcagcggaggaggcccca

SEQ ID NO: 449863 - DNA, 213 bp, Triticum aestivum
ggtgcagatcgatcaatatattgatctgcacacgactatcggaccaggatcaccgcgggcttttgattggccccttttggggtttgggtggtatggtatgagaggggagagcacgtgtgcaagagcgccgtaattgtgtaattatgcaaggcaatcgatgtaaagtattactccaaagtgtgaaggaaatccgatcatgtgtattattcaaaa

SEQ ID NO: 449864 - DNA, 247 bp, Triticum aestivum
tcaagccgccacccccgctcgcctctccctcccacctgccaagccgccactctcaagcctcttgctcatccgcgtgcagcatctctctagcttccccctagagagatctcacagccgaataagcagcagcaagaacccctccggccctcctcccagcaccaccaggaaccaagtcaagtcgccaatggccggtctcaggatgaagttcgtcgccgtcgccgccatggccgccgcgctcgtcgcctcc

SEQ ID NO: 449865 - DNA, 311 bp, Triticum aestivum
ggagctgtctggtgttaagatctctgagccagagtttcagggcactcaggtgccaatggtggcagtggtagaaaatggcatggatttggatgaggcaaaggtggaaaagaagaggaagaagatgaaggcaaagagggctgcattagttgaaggtggggaggagggtgaggtcaatgctctgacgcatgagaagaaggtgaagactgacaggaacaagaaggagaaaaaagaatagaagaagaaaaataaggttgaggatagtgatggaggggatagcagtgagcagagtatagatgccacatcagaggacc

SEQ ID NO: 449866 - DNA, 333 bp, Triticum aestivum
cccacgcgtccgaccgaccacgacggcgccgtcgtgcaccacgagcgcaagaggtccaccgagctgatcactcagcagtaaccccgagtaatctacgccgtacgttcgtacacatgtcgtgtgcttgtgttgagtgtggccggtccaaccgtcctggacgtgaatctctagattctggacacgttggtcagatttccaggctttaggacgtagggaccgacacccatggctctacggggagaaagatcacatgatattccgcacgcgtgatgaatccatgtagaaagggtcggttcaccggccgcttgcgctgcttgccgtggcgcgcactgc

SEQ ID NO: 449867 - DNA, 262 bp, Triticum aestivum
tgaaataccacaccttcatctcaaagctgaaagtggaaggctactcaacggaacgacttctgtcgcattcgattgtatggaaggctcattgggtttatggtcccttggatgagaagaccaagtaggaggaaagagctggagatggccatatccacttgactaagtagttggttatgctagtggtaaattttgtgagaaggtgcatgcgaactgctgtgtaaacggagatcaccaaatcatatcaaagttgaaacggacatac

SEQ ID NO: 449868 - DNA, 432 bp, Triticum aestivum
tcccacgcgtccgcccacgcgtccgcccacgcgtccggccagagagcttgtcgagccgtgccatgtcagggaacccagtggccggcgcgccgggtgccgtcgagccgtatgtgccgcaggcgacctacaacttcagcgcccgcctcgcgctcaccgtctctttggtcctcctgatgatcaccgtcgtcgtcgtcgtcatccctctcatggtttacctgatgatcactcgctcacgcagaagcggcggccacggcctcgccggcggcatcctccggtccgttggcatgatcggcagccggcggcacgggttggacgcgtccgctctctcggcgctgccggtcacccgcgtaccggaaggagagcggcgcagccgcgagggctgagtgcgctgtgtgcctggccgagctcgccgacggagaccaggctcgggag

SEQ ID NO: 449869 - DNA, 367 bp, Triticum aestivum
ggaaagagtcgaaaattccaagacatgtacgatgtggaaaaatttaagatgaacttggatggtgttgtcaaagtagtagataaacttcctgctgaattgaccactaagaagccagccgttattagagtaccaaacagggtgacagaagacttcatcctggacaccatccagcccgccttccaaaagaacagtttcctacgacttgcaattattttctcttcagtaagtttgaaaccgaaagggacgaataacaaggacttggattcaactgcttgccatgcaatgttcactgggctcaaactgaacgctgaatattcagaagtggctgaacagatgctgggcaggcttaaagagctaagcaagaaat

SEQ ID NO: 449870 - DNA, 86 bp, Triticum aestivum
tgtctgaactgctaagtgttatgtagttcctttccggttgaattgttattccctgtcgaggacgaaatgaaaatttggttgcccac

SEQ ID NO: 449871 - DNA, 269 bp, Triticum aestivum
ttttttttttttttattcgaggcacatagcaggagggctttcgatgagggaggttcttcgtatgacaacataaggctattaattcaagaaatggaaatcaagacgaatgcatgtcgttcagtggttgatacagatggtaataagctctcttttttggtgtaaacataaagtaaaagagcctatagcgtatttatcattataaaggatttcttttacaaacaaccggtagcttgtatcaggatcactgtctattctgttgcgcagatttc

SEQ ID NO: 449872 - DNA, 139 bp, Triticum aestivum
taaaaaaaaaaaaaaaaaaaaaaaaaaaaagaaaaaaaaaaaaaaaaaaaaaaaaaaaaaaaaaaaaaaaaaaaaaaaaaaaaaaaaaaaaaaaaaaaaaaaaaaaaaaaaaaaaaaaaaaaaaggggggggccttttt

SEQ ID NO: 449873 - DNA, 421 bp, Triticum aestivum
  unsure (1)..(421): unsure at all n locations
tgtagctccatgctagagcgactgacatacaagcgcggcagtctgccgaagacgcgggctcgcgggctgctcggcccaccagaatgaggcaagcccaacagcagggtccacaggccagagtgggtgtagccggggagccaccccagcgactacttagtcgtccacacacgcaagagaaggggatccagtggatcaatgaacccggcgtcggcggctccctgttctttcttatccccaattcccctttctccaattcttgtatccccggcttgtaatcgatactagcatgcccgcgcggcagcacgccgcgtcccatcgatacattatgtgtatgtatgctatttttttcgtgtgatgaatttaggcctgagagttctatgagcataaatttttagtacaaaaaggcaaattgtgcccccna

SEQ ID NO: 449874 - DNA, 176 bp, Triticum aestivum
cttttccctcgtaaagagcttttagctacttgagagaggtaaactttaagcagccagagatagcaggatacgggtaagttatttatgagatggcggtgccggttggagttttgcccgcacactctgtaaagaaacacagttgcatcagggccttgtacgcatgagtgctgttgttt

SEQ ID NO: 449875 - DNA, 244 bp, Triticum aestivum
tttatcgatatgttgggtttttgtagatagcttatcaatacattggaaaatgactaaaaaaaaaaaaaaaaaaaaaaaaaaaaaaaaaaaaaaaaaaaaaaaaaaaaaaaaaaaaaaaaaaaaaaaaaaaaaaaaaaaaaaaaaaaaaaaaaaaaaaaaaaaaaggggggccttttaaaaaaaacaaagttaactaacccgtaaatgaaaataaaaaattttttaaaagggaaaccaaaattaa

SEQ ID NO: 449876 - DNA, 460 bp, Triticum aestivum
  unsure (1)..(460): unsure at all n locations
ggatgtcccgccgtctgaatcgctaagccagctggcgtatgggatgaatacagcacaggcttcccgcctattctatcaaacatgtgtcttggcaacgcttgatcgcatcaaggtcacgcaggtggaaccatacgggcccatcctgatctcgaggggggccaacatgtgatcatctccctgttaatcttaaatcacacggaagaaccgggagcctcttgcacatctcatgtttatatatctatagtgttttaagtctgcacaggaagaagtcttgtaggaagctgcttagttggatctgctggtgggaagcaagcgagtgatggtgctgtgttattgcggtagtttggtcaggccacagggaaattctgtaagatatgccacgctgaaagaattgaccggcggtgtaggttagctgcttaaactatgttcatcggngcgatatttatggtacctgagattt

SEQ ID NO: 449877 - DNA, 151 bp, Triticum aestivum
ccataaactcttttttatactgggtttttgctcttatgtagacaatattatgtgacctggaacttatcatctttttgtctgtaatgtaacacctgaagtttagctttgattcagtgtaacatgatgcacacgtacgttattgtgtttttgt

SEQ ID NO: 449878 - DNA, 469 bp, Triticum aestivum
tcggtaactgccatcgcaagcacacaaagaggtggtgtgcacactaaagctcattcagatggctgatgttttccggacttcaatttatcagatagtctcagccttcttggatgacatgcgggcaaatgcaaaagcttcgagtttggagaagaattggatcagtgaaggaagaaaacctatacatggttcacgtgctgtgttggttcagaagttgagcttgtttattgaataccgagctgtctgaactctgtgtgatgtctctcaaatcgacagtctgttgggatgaaggaattttgttattggccaaaatgcttgtttcagtgaagtttggagctgctgacactactatcatctcattgaggtcaaggaatatttgtttcggcactatgatccactggcgaaaaatcattttccattccccatcttttggagaacaagaagggccatgacctgttattattatgatttc

SEQ ID NO: 449879 - DNA, 315 bp, Triticum aestivum
cccacgcgtccggggagctctcaaggtgcctggaactgatcatgggtgacagggtggagggcgccgccatacgggcgagctcggcgacgtggaaggcgaagttgcagcaagcgattgcggccggcggctcgtccggtcgtaatctgaggactttcctggaccaatttgcgaatgatgcttagaagcatttatgtactatgcgtcctcgttttgttctactaaaatagccttgtttccgtatgatattctcccactaaaatgagcaactcagctcctgtaaaaaccttccgtccatggaatagtatattttaggag

SEQ ID NO: 449880 - DNA, 135 bp, Triticum aestivum
cgtgacgcgtgggttcttgtccgagtgactacatcagactatcaaggattgttatttgttatgtaccaatgtggagtcacataggttatttgtgcctgtagagtaagaattatattaatgtgatggactcctgtc

SEQ ID NO: 449881 - DNA, 231 bp, Triticum aestivum
tcgctcagattgggtttgagagtgtgtgttgtgcctgtccgtgcttggcttctgaattttcttctcagctgtaattctccctatgaatgttcttgattgggtttgacgggtttggccatacacctcatgtttggtctgttttttgggggctcgtctagtctctagggcatgtaaaatggttctattttaagaatgtcacgtaggataaatgatgagatgatctcttagcac

SEQ ID NO: 449882 - DNA, 433 bp, Triticum aestivum
tcgcccacgcgtccgggtcaagaagatcctgcacaggatcgaaggggtgtaccaatccagcatagacccggagcaggggaaggtgacggtgtctggcatggtggatccggacaccatcatcaagaagctgaccaaggctggcaagccagccgaactctgggggtccaaggctggcatggctaaccagttccagaagctccaacttgacggtggtggcaagggccaggccaaggacgccggtggcaagggccagtccaaggacgccggcggtgccaagggccagaaaggtggtggcggcggcggtggcgccggaggtgctagcaaggacgcaaagatgatgatgccgccgccgacggcgcagcagcttcagcagctgcaacagcagatgcagatgaagggaatgaagctgccgcagttcatggacgggaagatg

SEQ ID NO: 449883 - DNA, 410 bp, Triticum aestivum
tcgggaacgatggcgctatcacgcagtatgagaacatgcttgcatagcggaagacttgccgccctggcaatacttgtctctggtgggatcgtattgcagattttggcatgtgctctttataacaactggtggcccatgttgacagttctgatgtacctcatactacccatgccgctcatatttttcctgggctccgattctccatcgatcatgtcaaatgagaatgatgggtgggtgaacttcaccaagttcctgacgggcgcgtccatcgtgggcagcatcgccatcccgtcgatcctgaagcacgccggcgtcatcgggtggggcgcgctgacgatggagctgtcctccttcgccgtcttcgggctggccatcgtgtggttcctccagatgaactccgaggacgagta

SEQ ID NO: 449884 - DNA, 60 bp, Triticum aestivum
cctacgcgtccgcccacgcgtccgcccacgcgggcgcccacgcgtccgcccacgcgtccg

SEQ ID NO: 449885 - DNA, 114 bp, Triticum aestivum
tcgcacctttgctcaaatgttttgtatgtggacctggaaagtattcaccatgtaaatgaactaacatttcaattgtgcttcgatgaggcgcaaacttgtgttcaaacatgtctt

SEQ ID NO: 449886 - DNA, 83 bp, Triticum aestivum
cccacgtgtccgcccacgcgtccgcccacgcgtgcgtggcgctcgagcgatctgaaaagatctgctgtcgagccagttcctcc

SEQ ID NO: 449887 - DNA, 352 bp, Triticum aestivum
cggacgtgtgggtttttttttttttttgatggagagagaaaatgggaaattctgactgcgataaaccgagttatggttcttggctagcagtccctatattatgatctcaaaacattaggcgaagtgggtgagattacatgcccggtcgaatcccaagcaaagaatgtacaggagtcacagtacaatgctctggttcctgtgacctgaccgctagtgccacagcgccgcccggccgagcccagcccagccggcacaaaccgtagggcggggagacctttgcacttgcaggcacgcccggcgagaagaacgatcgaggagaagcgcctacaaggcggcgtcggcgacgcggtcg

SEQ ID NO: 449888 - DNA, 105 bp, Triticum aestivum
tcgcggacgcgtgggcttttccgacttctttggtggcccgccattgtatacattctttcttcgagctcatgtatgattactttcatttgtatgcatagtgtatgt

SEQ ID NO: 449889 - DNA, 283 bp, Triticum aestivum
ggggaaaagaatgggtagcacactttttgattcgtttgtagatcggtggagatgcaatagaatcatagagagggtgcagtgatgcatgcgattttatgttcaaacaagcggccaaatggcccgaaaatacactcttgaataaaagaagtgaaagtccaaacaaaaaaaaaaaaaaaaaaaaaaaaaaaaaaaaaaaaaaaaaaaaaaaaaaaaaaaaaaaaaaaaaaaaaaaaaaaaaaaaaaaaaaaaaaaaagggggggccgttttaaaggatccaagttt

SEQ ID NO: 449890 - DNA, 297 bp, Triticum aestivum
cctatcgcgtccggacaggcttgatggtctggaagttgagtcaggaatcaactgaaagcaatgtgaatgaacctggatactgtgtagtcatcttctattgtgaaatccatagctctggcaaggatgtaaaaagtcggtgtagaccacccgtccgaggtgaagaccgagcagtatgtcaatttgagagtaactggtgtagcaaacattgtattatataccatgttctgaacagaagagcggagttattgtaaaaactatctaatgtttagttgcttgtataaaacacaagttttgaag

SEQ ID NO: 449891 - DNA, 71 bp, Triticum aestivum
ggtttctaaaaaacgaaaaaaaaaaaaaaggtgagaaaaaaaaaaaaaaaagaagctgatgactaaccatg

SEQ ID NO: 449892 - DNA, 395 bp, Triticum aestivum
tttctttgagctcaggaggaagctatatggggggcggtccaggaggagccacgggaggagccgcagcccaagcccacagcacaggagggacaaccgtgaccgtggtggtgacttccgccgtgatggccgggatgaataccgtggcggcggcggcggtggcggttaccgtggaggcgatggaggtgatggtggcggttactgtggaggcggtggtggtggctaccgtggaggtgatgggggcggctatcgtggtggtggcggcggcggttaccgtggtggcggcagatgaggtggtggcaggcatgataggtatgatgatggaccgaggcgcaggtatggtggcagcccgccacgacgtggaaggagccctcctgcaagggagaacagtgaggagc

SEQ ID NO: 449893 - DNA, 317 bp, Triticum aestivum
cttttatctaatattcttgttaatatgctagttaagattggatactgtgctacttggtgctgcccatcacggcatgatcgttgccatcaagaacatcgatggcaagagcttgaataacaacctcgatagtttatatgttctgttgatgtaaaatggattgtactggttcataactctgttgtgtgatatattttgtcaatctatgttgtatgtcatcactttgtagaggattttttaaactgctgtgttgtagatacatacagatggctgtgttaaactttgtaatgtttcacaccttgcaaatattttttgttggg

SEQ ID NO: 449894 - DNA, 99 bp, Triticum aestivum
  unsure (1)..(99): unsure at all n locations
gtttctgtnctttattgggaacgatggctgacgcatctgctcctgcccctgagggccatcgcgaggagggtggtcgcggcttcggccgtggccgtggcc

SEQ ID NO: 449895 - DNA, 119 bp, Triticum aestivum
atctctgcacactttcatgaatttgatgcaatcgaagtgacttgtgttgatgctaatttgagctttgcgtttggtcttaccatattggttggtttctttaccatccttcgacttactgt

SEQ ID NO: 449896 - DNA, 357 bp, Triticum aestivum
gttggaatgggtggcggcggtggtggcagcaacaatggtgggttcggcaacggtggaggtagcggatctggatccggcagtgccggatacccctaaatttccttttcgaacaagctagaatcggagcccatcacacatttctagtctcttcatttcactattccacgtcatttgtgtttcttttcattcgtagagttttcactaggcgcctcctaataaagggctccatgattccagtggatgtattaagtagttagtggagcaatctactaacacgtaatcgctacctacgtacgaatacgttatgttatgatttctgatatgtttcgctgctagtgtgagtgcttggttactcct

SEQ ID NO: 449897 - DNA, 146 bp, Triticum aestivum
gcttaagaaatgagtccggctacccacagctggctagaaaagtcagcggccggctgtccaaaaaaaagagaagaggctgactgcctgctagctgactggtaaaaaagagagaagtcaagggctgtgtgcccagccagctggctaag

SEQ ID NO: 449898 - DNA, 252 bp, Triticum aestivum
gatgtaaaccaacagaggtgtggtgcacctgcccggggaagctttggagctggtcgagagcgtcatgttatgctgtacttaggcttacctaatggcgtccctctttcagcgggatcctcaacgcgtaattccccatgttgacagtagctcgtactggtcctccatcacctgcaacgtcaaaataatcaacactgtaggtacttgggctttacctaatgacgtttcaatggcaatttcggcgctccgctgctg

SEQ ID NO: 449899 - DNA, 365 bp, Triticum aestivum
ccttcgcgtccgcccacgcgtccgcccacgcgtgcgcccacgcgtccgccgacgcagcacgcatcccccatagccagtgctcctcctagcttgcttgttccccggcggcagagaaaggcagacagaggatgtcgaagtacgtggagctgctggacatgggcgtgcgcatcgcggccaggttccactcccactgcccgcagacggcgcgcatgtactacaagccgccgcagtccacctccacgtcgggcgccgccgaggacgcgccgacggatcggaggaccgccggctttgacggcggcgaggacgtggctgctggcttccggcccttcgccgcctcgggagctctcggcgccggcgtccagccc

SEQ ID NO: 449900 - DNA, 221 bp, Triticum aestivum
gatcttctgaattccaaactgaagctttcctcagttatgttgtatccagaattgacagtacatgggaatatgggactgttgtatttaaaaaaaaaaaaaaaaaaaaaaaaaaaaaaaaaaaaaaaaaaaaaaaaaaaaaaaaaaaaaaaaaaaaaaaaaaaaaaaaaagggaaaaaaaaaaaaaaagaaaaaaaaaaaaaaaaaaatggggggggcccttt

SEQ ID NO: 449901 - DNA, 462 bp, Triticum aestivum
ggttgtgttggcatgggtgctagtgacgaggctgaaattcatggcattgatgtatctgtgcaaagaaccgagagtggtgtaggtgatgcagaacctattactgaccttactgagacaatgggccataccggtgaatcagttccagggcctggattgatggatgagtttgtacctgaagaagttgatcgggaagaacctcatggagacagccaagatattgtgttccgttcagcaggccgtgctgacagtggatcaaaatattttggttctaataaagctgattctggtgagagtggaaaaaagataggacatgccattggtcatgaaagcagcatgcatccttctctctcttgcaatgctggggtgtatgccggcttcgatgcatctaaagaggaagtgacacaggctggcaaagcagtgactactgatgatcaaggcttgcaatatgatctgcggaatgga

SEQ ID NO: 449902 - DNA, 72 bp, Triticum aestivum
tttacgcgtccgcccacgcgtccggccacgcgtgcgcccacgcgtccgcccacgcgtccgcccacgcgtccg

SEQ ID NO: 449903 - DNA, 267 bp, Triticum aestivum
gttaggtcaatggcaggggaaaggaaatacgaggatgagaaaaagatcagagagaaggccaagaagatacgatcaacaggaaagtctccccgtggatgctgcttttgagacattgccattctacaaaatttgaaacaaaatgaatggtgcgacttgaatgcgatatgagtctcacaacagctatgtattgtattataaaacgtatttggtttgatgagtgataagagtgtacagttgcatccaacatgcaattgcattgtatcagga

SEQ ID NO: 449904 - DNA, 124 bp, Triticum aestivum
ccctcttgtccgtgcatgcttgataagtttgtgattgatcacatgatcagtgtatctcattatggcatctaaatgcatgattcatgtatttgtaaaaggattgtatgtgtatgaggaataaatg

SEQ ID NO: 449905 - DNA, 360 bp, Triticum aestivum
tttgttaaaggcagcctcaagctgttccagaggcggaccatcaagcaagcgcatcaaagggagcgctgggggagcaatgtccccttgcaaggctggacgtacaagcgacaacaccggtgcaccatcttggcccgacaccggcaccagaagcagcagcaccaccgcattcatcggctctccagcctcccatgtcttctacggtaccggatctccctactcttatgataggtcagctgggcacgccctctactggggccagagcccacttccaatgagggagccatatgcatacccacctggtgagccggagcccaatgttggccttggaatgccataccaagcccctcccatgacctaccc

SEQ ID NO: 449906 - DNA, 488 bp, Triticum aestivum
gttcatcgtcttccagccgcttccttccccatgcgtccccggcgtcactcaccgtgcacacacacagaaagtagtgagctcgtcgatccgggagagatcaggatgagcgaccccaagtacgcctacccctaccccgcgcaaggttactaccagggagggccataccaggggccgccggtgatggcgccgccgcagtacgccgcgccgccgccgcgcccccagcccagcttcctcgaaggctgtttggccgcgctttgctgctgctgcctgatcgacgagtgctgctgcgacccctccatcatcttcgtcggctagatcacccaaggccaagccagggcatccggcctggcatgctgtcaactgtacaaagagatgccctcatcaaggatatttaccacgttgttgccacgctatataatatatcatgatctctctcctccatatatatgaacgtattcccttattattgttatctcactagtcactac

SEQ ID NO: 449907 - DNA, 212 bp, Triticum aestivum
tttgtatgttgtaaatacagagccatatgagcattagctaacttttgctgtgccgtgcgtattgtagttgtaaatcttaggaagggtgtctcaacttgtaacacttacactgtatcggtgcagacgtttgattttacgtatgatgtgtactcaaaacaacaatgacgtaaatacacaaaaaaaaaaaaaaaaaaaaaaaaaaaaaagggcgg

SEQ ID NO: 449908 - DNA, 133 bp, Triticum aestivum
ctgatcttttggtgtagccgtttagactccggaattcaacaaccctgtgccgcgggctgcgcttgtttcatgaacctatgcattgccgtgttctcccgtgttccaagcggggaggagacagatcattcgcctt

SEQ ID NO: 449909 - DNA, 325 bp, Triticum aestivum
tttattcgtccgcgcaactcatgcaaagggtggtggatctcgccctttggcaaatcgtcggaaggaaggggatctcatcattgaaactggtgaagatgtgccagaatatccccaaatgtacttcaagttctctgaatctggagattccatcatccccttggaatgaatcattggagaagcacacgatacatgaataggagaaatgcatcacactcgagtttggagaagaaaaaaggatacaaggacaaagatagatcagtattctgctctaaagctgaaactctttgtgggatccatgttacttgattctattatggacgtatga

SEQ ID NO: 449910 - DNA, 200 bp, Triticum aestivum
  unsure (1)..(200): unsure at all n locations
gtgttctcatggtcaggctcagccccgacctcatggacgagccccgcaggtggctcgacgacgccgtcgcgcaggcatcccacttcctcttcaccagctaggctgctgctgcatcgatccgataggaaaattaatcttcttcttccttgtcgnttcttcttctctccgctgttcatagagtcaggattcaagaaaagaaa

SEQ ID NO: 449911 - DNA, 133 bp, Triticum aestivum
tttgtaaaaataagaaataaaaattaaaaaaaaaaataaaaaaagaaaaaaatctaaaaaacacacgaagaaaaagaaaagttataaaactaaataataaaaaaataagacaaaagaaaatagaataacggat

SEQ ID NO: 449912 - DNA, 214 bp, Triticum aestivum
ttgctcacgcgtgcgcccacgcgtacgcgggaggtggtcgcgggcgtcaagctgcggaggacgaagagcctggtcacgttgacgggcggcctccagggcagcatgcgccgcgccctccggataggccgcggcggcagcgacgggagcagtcgccacggcaggagcgtgccgttgggccagtccgggcggtggccatcgttcctgtcgcggacct

SEQ ID NO: 449913 - DNA, 130 bp, Triticum aestivum
ttggttaaaaaaaaaaaaaaaaaaaaaaaaaaagaaaaataaaaaaaaaaaaaaaaaaaaaaaaaaaaaaaaaaaaaaaaaaaaaaaaaaaaaaaaaaaaaaaaaagggggcggccgttttagaggaccc

SEQ ID NO: 449914 - DNA, 51 bp, Triticum aestivum
tcgttcacgcgtccgcccacgcgtccgcccacgcgtccgcccacgcgtccg

SEQ ID NO: 449915 - DNA, 71 bp, Triticum aestivum
ctcattcgtccgcccacgcgtccgcccacgcgtccgcccacgcgtccgcccacgcgtccgcccacgcgtcc

SEQ ID NO: 449916 - DNA, 93 bp, Triticum aestivum
tctgtaatgctatgtggctcttatgggcctttatctatatgagtttgagttatgttgtgatgccatgttgtacaacacatactatggtaagac

SEQ ID NO: 449917 - DNA, 209 bp, Triticum aestivum
cttattttgcacggtccgcctcctcacgcactccacacaaacagacgcagcagccggcatgacgcataagatcgtgatcgcggtgcagatggggagcagcaggtgccggtccaaggcgctggcgctggtggcggccacgccgggggtggactcggtggcgctggccggggacggcaaggaccaggtagtggtcgtcggccacggtgtcg

SEQ ID NO: 449918 - DNA, 302 bp, Triticum aestivum
tttttcaaaggccgctgcggagaagtcaatggcgatgggttgtttgctgtgcgaatacacggccgagacgctggtgtggatcaagggtgacacaagcgaacttcgcctcgccaaggaagcgctcgagacgatgtgctttgtgctgccgccccttgcgcgctgtgacgtgctctcgtccaagtttgacaaccttgaggaactcgtgagccaaggcaagagcccgagccaggcatgccacgcgatcagcctgtgtgacgcggcgtttgtggagaaacccgccccttcgaaccgcattgatgatc

SEQ ID NO: 449919 - DNA, 228 bp, Triticum aestivum
tttctcacgcgtccgatcagaagaaagaaatcgatggacacgataattctttcgctcgtggcgtccgtgtgcgcgtttcttatgttcatctactggttgtcaaagtagtaggatgttggccgcagcgaaaaggcgtcatagtgttgtaagtttggatcacagtgccggtacagataatgatatgattggtgtttgtacaatattgattcaatgctatattactttttt

SEQ ID NO: 449920 - DNA, 94 bp, Triticum aestivum
aaaaaaaaaaaaaaaaaaaaaaaaaaaaaaaaaaaaaaaaaaaaaaaaaaaaaaaaaaaaaaaaaaaaaaaaaaaaaaaaaaaaaaaaaaaaag

SEQ ID NO: 449921 - DNA, 135 bp, Triticum aestivum
cctttgcttccgaaaaaaaaaaaaaaaaaaaaaaaaaagaaaaaaaaaaaaaaaaaaaaaaaaaaaaaaaaaaaaaaaaaaaaaaaaaaaaaaaaaaaaaaaaaaaaaaaaaaggggggggcctttttaaaggat

SEQ ID NO: 449922 - DNA, 130 bp, Triticum aestivum
tttattataaaaaaaaaaaaaaaaaaaaaaaaggaaggattaaaaaaaaaaaaaaaaaaaaaaaaaaaaaaaaaaaaaaaaaaaaaaaaaaaaaaaaaaaaaaaaaataaaaaaaaaaaaaaaagggggg

SEQ ID NO: 449923 - DNA, 133 bp, Triticum aestivum
aatacatttactctatcttttcctccgggcctgtgtgtgatgccctgccgtaaatgttctgaacctatgtattggaaggtcacatataagaatctgtatttgttgtcctaaaacctgcttagtagtttgtgcg

SEQ ID NO: 449924 - DNA, 389 bp, Triticum aestivum
ttgggtcaaactgcaggggagcgccgttgagggggagtgtgccgctgctgcgggacgacgaggggaggatgaagcgggagctggtcgcctgggccaaggccgtggcatccatggccatcagggaatcgatgcggtgctaaggagtacacgcgcagcgcgaggcgatggaggagtcatgggtcgatgcatttcttgtttgcttcgtgcacgcagctacacacccgcggcaccgagcgtggccggtggccgctggcctgcatttcgtttcctctgaatccctttttcacggagcgatcggtcatagtacatcgatcattcgggatgtaaatgtttctggaaaggatggaggactaatccataatacctaaatagttgaacccattactttt

SEQ ID NO: 449925 - DNA, 114 bp, Triticum aestivum
tcgcctacgcgtccgggagggttgtgtatatatcttgtctgttctttgatatgtatggcagaccattatatatgtaacagattattctggagttatttatttcatattatattt

SEQ ID NO: 449926 - DNA, 241 bp, Triticum aestivum
ctcggtttaatgcaattgcaaatcgtctacttagcaaggtctactttacatacaaaaaatgtatatgaaggagcaatatatgtgcaaaaggatagcagcagagcacttctttggctgttggaaaaatgggcaccaagcttaaggatttacacaattttctcaaacaagtaatcaatctatctatgtatctatcacaaaaaaaaaaaaaacaagagactgaaacaaaaaaaaaaaaaacaag

SEQ ID NO: 449927 - DNA, 243 bp, Triticum aestivum
tctttcaggatggtgtcaatccactccaggcaggtgatcttctccagggcgacaaacacctgatttatcattatcaggtggtctgggtctgtttttagtccagtagactgtggtgttgctgttacattcatggtcactatgtcacaggggggcacactgtgccaccagtaatgtcgaattgtttttgagttttggcacactttaagatcgttttgtcagcgcaatgaaatctacctcatagat

SEQ ID NO: 449928 - DNA, 93 bp, Triticum aestivum
tcggtttaaaaaagcatagaaaagagggagggatatgagaaaataaaataaaagggaagaaagaagaaaaagtcgtgcgaggaaaatagacaa

SEQ ID NO: 449929 - DNA, 422 bp, Triticum aestivum
ttgtgttcgccagccggtgcttctgctgcgggcgcgggctcaagccggggggctcgcgcgcctgcgccctcatgctcttcctcttgtcatggttgaccttcctcgtcgcagcggcgtgttcgctggctggatcagtccgtaatgcataccacacccggtacagggggatcttcaacggtgacccgctctcttgcgagacgctgcgcaagggcgtcttcgctgccggtgcagccttcaccttcttcacggccatcctcagcgagttctactacatcagctactccaaatcccgggatgccgccggcggcgctccatacggcggctccagcatcggcatgggcccttataattaaggagcttggttctggaggtttatggaaaggttcagtccgtttcactttcagggcggatcatgcatatgt

SEQ ID NO: 449930 - DNA, 262 bp, Triticum aestivum
ttggtcgctgaatcagacgcctgcgccactgggctgccactgatcagttcaatggacgaccatagatcgatgcctgctcagtccaccgctgtcatctactaccactgtcggcgacgtttgtcccgttagtttgagaagatggattgttgcgcgcgcagtatgtttatgtctatgagttttgtgtcactttgtacccaaagatatgttttgtaagctggtaattcttgtgaatatgatttgattacttttcttgaaataaaaa

SEQ ID NO: 449931 - DNA, 440 bp, Triticum aestivum
ctttgccgctccttccctcgcccctgctgctgctctcccaacctcctcctactgcttcttatcctatccccacgctgctcctattccctttccttgctagtgttcctttactgaagaaaacaacctgctggtgttctttacctgttgctgatcctgtacttctctgaatcccaaactgctgcttctctctctctttttcttgcaaaaatattgtacgatgccttgtaagaattggcgaactgtccagtattaaagcggtttagtaatattctgttgatatgcgagtactagtttagtggctcgcgtaatttcgtttgtgttgtcactcgtgtaacctgaaccttggtgtagtaccttgtgcccatatgtgtggctatgtgtgtactgtagttccaacgtcaactatgctcatgtgaaaatatatatgtttgtgctgcgat

SEQ ID NO: 449932 - DNA, 225 bp, Triticum aestivum
tctcttacgcgtccgcccacgcgtccgcccacgcgttcgaccacgcgtccgtgctatttggtgaaaaaaaaaaaaaaaaaaaaaaaaaaaaaaaaaaaaaaaaaaaaaaaaataaaaaaaaaaaaaatatataaaaaaaaaaaaaaaaaaaaaagaaaaaaaaaaaaaaaaaaaaaaaaaaataaaaaaaaaaaaaaaaacaaaaaaaaaagccggctgcctttt

SEQ ID NO: 449933 - DNA, 95 bp, Triticum aestivum
gttaaccgattgtggctctggccgtgtgcgtgcatagggatgcaaatttgtagcgttctggggtgcctgtgacccttagttcaactggatgaagt

SEQ ID NO: 449934 - DNA, 152 bp, Triticum aestivum
tcgcgaggtgttgtgaactcaagtttatgtactatgtatcgtctatcagttatagctagtgatagtctacttagcacatgtcacttatgacttgcgatggttaaacttttttcttttttgcgatggttaaactatagtagtgtttaccgctc

SEQ ID NO: 449935 - DNA, 290 bp, Triticum aestivum
ggaagatggcgcacaaggccgagtgcacgcccatggaccggtggctcgacggcgccaacgcgaaccccaaccccaatgccgtcgcaggcgcaggcgacgccgcggtggccgctccggccctgtaaccgccgccgtgtccttgcacccgtttcttttatttttctggccagttctttcctctttttcttccttggtctttttccggacccttctctgtacatggtcgctgcggtaaaggttagccgagtctggttacttgcgaattgcttttagtaagaaaaacttttatt

SEQ ID NO: 449936 - DNA, 218 bp, Triticum aestivum
gcccaggtctagggttccccctttcttcttctccacgcgaatcagctagatactagcaccagcatcgatggcggcggcagcgccggcggacgcgaaggcggaggccgccaagatggacctcctcgaggacgacgacgagttcgaggagttcgagatcgaccaagaatgggatgacaaggaagatggcaacgaagctgtccagcaatgggaggatgact

SEQ ID NO: 449937 - DNA, 95 bp, Triticum aestivum
tttattttttgagctaaaaaaaaaaaaaaaaaaaagggaaaaaataaaaaaaaaaaagggaaaaaaaaaaaaaaaaaaaaaaaaaaaaaaaacag

SEQ ID NO: 449938 - DNA, 225 bp, Triticum aestivum
gtttactggcgccgagctcgctctggcggagcaccaggggaagtacttcgccggcatcgctaagaagctcaagtccgtctgaaatctgatttactacaccgtaattcatgcaatgcagtgcaaagatgaactcgtcatatatgtatggagcaggatttacacaattctgtaacacgttcccgttcctttccactcttgtttaataataataataatactccctcc

SEQ ID NO: 449939 - DNA, 372 bp, Triticum aestivum
tcgcccacgcgtccgacgcgctgctctcggcggcggcgccaccaccggccctctcgtcgtcgctgcagtcgccgtcgccgacggaggtttcgtcctcgggccaccgctcccggtcggcctcctcgtagaaccccagcaccatgttcgacaggctcatctcgtcgccggcctccgccacaaccatttcctcgtgcttggttgtaaatctggtgtgcgtggctcacgttgctccgtggtcagctgcagggtccttcccgccggcttgtatacccggagacgcggcggacgtggcgaggcggcaatggatggtacggtgctcgcgggacccgcgcggagtggatgaggcagttccagatggcgtgggccccccgg

SEQ ID NO: 449940 - DNA, 158 bp, Triticum aestivum
tctgcctaggttttcggtcgccgccggtgaaactgggtagtagcggctcgcgtctggtctcttctgtgtgttggtgttgatatgctgtgtcgtcttgtcctatgtagcctgatgctggaatgaaatggcaatgaaaggttcagttatcatctggtgct

SEQ ID NO: 449941 - DNA, 462 bp, Triticum aestivum
tttctttatgctggttggtgacgtcccatgggagaggttcaccgagtcttgccggaggatcagggtcatgaaaagttcagatgtgattggacttggagttacaagggcaggggtcaagtccaagaataagaactaagacggtcgctgcccacggtttgaagacgaggtcgcacatatcgtctgtactactgcatggttttcctatcccgcaagtaaaatcacccgttactctactgtttaagatttgcgatatctcctagagacttatgctctatattttgttgtgcccacgttgttgtacgcgtgttatttccatccgtgtaaatggttggtatgcagtgcgagagctactgctgtgtttgatgacccctatgtattttgccactcttgtcctgaaccggtcgttcgtcgtaaatgtgaaggttgcaagactattatttacctgacgaactttgcttgggc

SEQ ID NO: 449942 - DNA, 410 bp, Triticum aestivum
gtttcgcgtccgttcctcctgcccttcttccaggggtctccgaatatgaagttgaggatcgctctattcattctggcttcgttcaccgctcacggccacccaagcgccgaaccgggcactgccgcgtttggttcttacttcaccactgtcattcgtgttccccacggctgcactggctcatctaccacaaaggttgacgttaagataagcgaggacatatctcatgtcaaagcacacagagtacccggttggaagctggatgtcgtctatcgagacaacgacaacgccaccgctctaaagttgggcgaaaacagaaccgttgataccctgacctggacagcactaactgaagccgactatctccccgataacatgttcgaggacttcggcgtcaatatgaagcttccaca

SEQ ID NO: 449943 - DNA, 436 bp, Triticum aestivum
ttggtctgcgaacagggtagctgacgcgagaggtggggatggcgtcacgattcctgggccgatccaaaaccctagctctcgccctctcccgcgcggatgcggcgccggcgcccctggctggatcccgcgcgctctcctccctcccgcgccaccccgccaccgccgccccgtccccggcgattggatcccctcctggcctcagcaagggtctgggacatgagccaacatcacacctcagcggcacacaatttttaccgggttgggtttctactgtagcatccaatggatctcccatgcagaatacacaggtctcagagacatgcaagccagttgctggaacgggacactctgatgcactaaaagcgactgaaggagccttccctaaattcacggcattcagcccactagaagcagctgctaaacctagaagcagtcc

SEQ ID NO: 449944 - DNA, 265 bp, Triticum aestivum
gatcatatactccatctactgtagaaggtgtggatgttaatgaggaatctgatggcattgcccaggatgaatttgaatgtcctgactcagaattctatgaatttacagaaataaggtcgattcagaagttctaacctgggcagatctgggctctctatagtgatatggacaagttccccaattactatgccatcataaagaaagtcgatctcaagaataataaagtacaagtgaaatggccttgatctctgtcctcggggagagg

SEQ ID NO: 449945 - DNA, 220 bp, Triticum aestivum
tttcgatcggtctagatatgcatcaacattaatacggctaaataagtggaggagcacttgaaaggtcttattgttgttgtatgatttgaacgtgtgtctatctcattaatctatcgttgaacgatagtatgtatgtatactggacgtgtaaggagggcaaaagtgccttaagcgtcccatgatttaatattttaagttgtgagtttgttattgcccaaaa

SEQ ID NO: 449946 - DNA, 438 bp, Triticum aestivum
ggctaagagcctcctcgcccgtagcatcaggcaaaaacgctcccctcgatctaggtcacgtcggcgccgccgccgccaatccgctcgtatgccgccgccgccatcccccatcgccactggtcggacgtggagttcgtgtgccatgacctccatggcacccatggccgacaagacgggaccctcggcctcggccatggccgcctgctcgggagatggggtcgccatgtttgacgccgccagcgcctcatggacctcagctccaggtccaccgccatcgaactcaggtggataagtggatggcacatgtgtatgttgctgttgagggattatattcgacattttatttttatcccaacactagattgaagtggtggttcacaaaggattcttagtggggcacaagtgtagattgatacaaaagcatgctgaatattttgg

SEQ ID NO: 449947 - DNA, 156 bp, Triticum aestivum
ttatgaacacttgtcatcagacagaaaaaggaagaaaataaacactgctgcgtgagcttatgtcaaaaaaaaaaaaaaaaaaaaaaaaaaaaaaaaaaaaaaaaaaaaaaaaaaaaaaaaaaaaaaaaaaaaaaaaaaagggggggccgttttaaa

SEQ ID NO: 449948 - DNA, 120 bp, Triticum aestivum
gtttatcgagattgtagcttaagaccatggtttatgggttcgtttgtgttagaatgagctctttgatattaagacagatgttggtcgactgagaatctaaagatggtcaacttgctattt

SEQ ID NO: 449949 - DNA, 329 bp, Triticum aestivum
gtttaatccaaggaggaggccatggctgactacatcaccaaggtgaagcagctgctggaggaggctgccgccgcatctgcttgatcccaggccacaaaaccgcaatcgctattgttatcctggtggtgcagccatatgtgccagcaaacacaaataagtttcaagtactagttgttgtcaagcttatcgccgccgtgggtgtaattacgttgaacaagccctgtgatacatgaaagtgcaatctcagtttacaccatgattgattaatactcctacatgtcttctgttgttaagatgttttttttctttggggaatccctgttcctgat

SEQ ID NO: 449950 - DNA, 231 bp, Triticum aestivum
gctttttccagactagcttctacttcggctacacgttgatgttctgtctggggctaggcatactttgtggtgctatcggctatctggggtcaactctgtttgtcaggagaatctacagaaacatcaaatgcgactaaactactactccgattctgtaggctattagcacttagcagatcatgtgttgttgagtaacgcttctaagattctaattaacttttggaaactata

SEQ ID NO: 449951 - DNA, 183 bp, Triticum aestivum
tgcatcagtataggcatctgtgcttgtgagggggcatccattactcccggcactcttatatgaagaatctgcagaggatgcagtagcaggtaggtgtaggcttctgtattttgcagagaatgcagtatatgtggaatctagcttttccaagcatgatgaatttaattttgttttctttattat

SEQ ID NO: 449952 - DNA, 321 bp, Triticum aestivum
gttgtggtgacccttccggctttgcccaccccggcagtcacggtggacggggacgtgctccggctcccctcccaccgccgcccctgccacctccaccgtcacctctggtgggcgcgccaccacggcctctcacaccaccgcggcgcgttctccggtccgggcgaggcgcgtgtccatcccgccgtcgacgtcgtactcaccgagcttgcccgcggagaagagcaagagcccagggaagctgagctggaggcggtcgcggagcctgaccccgactcacgcccggacaccgacgccgcagagaagctgtttcatggcgaggag

SEQ ID NO: 449953 - DNA, 103 bp, Triticum aestivum
tctattcgtccgaaaaaaaaaaaaaaaaaaagggggatttaaaaaaaaaaagaggtgaaaaaaaaaaaaaacaaaaaaaaaaaaaaaaagggggggccgtttt

SEQ ID NO: 449954 - DNA, 196 bp, Triticum aestivum
gatctgcgcagcaggggaactcagggttaaggatcaattacttagataaagtagtagctcacatctctaactacttttcagtgaatattggcgacctggtatttaccggtacgacaaaaagagaacaagaaaacacggtaaaaaaagaaaagtgacaatatattacacacaccaaaaacgaatctaaaaacattac

SEQ ID NO: 449955 - DNA, 245 bp, Triticum aestivum
tacacctaaagaatccgtagctagcttgtctataggccttaagcgtgctggttcacgttgcggccaagtgaagtccttttctttttcttgtgttgtgttatgagtcatgtgggaggttattgtcgcgtagttgaataaaaagaaagagtcggaaaagagatacatatagggttaatacgtcgcaaaccattatctcttcggtgaattgagcatagcacagttttttaaaaaaaaaaaaaaataaa

SEQ ID NO: 449956 - DNA, 165 bp, Triticum aestivum
tccacgcgtgcgcaaagacaagtcaacctgaccgtttttaaggaaggagaagggataagatgccgcgcccctgcaagggaggcacgggactcggtaagggcggcaccaagctccaccggaaggtgctccgtgacaacatccagggcatcaccaagccggctatcc

SEQ ID NO: 449957 - DNA, 354 bp, Triticum aestivum
tgcttttgacaatcgaaccggagattctcgtggtttctgccatgttgatttcgaggacgatgaatcgctcgagaaagctgttgggatgaatcaatctgaactgcggggaagacctgtgaagatagcgtatgctatcatcaacagggcttgaaggctggctagctggtgctcaacatttcgcattattgagctagtgagattcagttgtaaggtcttgcccccttcactgtttccattatgtttctatagaccaaacatgccatatattggccagaagtaatgatcgtgtaacaaatacttttgggctgcatcttatcaatctatcttaaaaatcatgctgctcgttgttctgtc

SEQ ID NO: 449958 - DNA, 63 bp, Triticum aestivum
aaaaaaaaaaaaaaaaaaaaaaaaaataaaaaaaaaaaaaaaaaaaaaaaaaaaaaaaaaaaa

SEQ ID NO: 449959 - DNA, 412 bp, Triticum aestivum
ttattttctggataaacgcaaaaaaagaagaaaaatataagtatttatgctactacatggaccaagtttttcatgttgaagcccgtggagatgtattcaagatctctgctgtatggatgcgtatggacaaaggttctgcatatccttgtgtgaaaattgtctgcagcagcgcgaaggtggtgctgaagaaagcgtagcgtgttagttccaagtgaagaaaatgtggcgcaacacgaagtgctctgtgccatggtaaataattgttcagttctgtatttggagcagggtgggggttgattctgagaatcagaattcactacaaagataggatcttgatttttgttggtttaaaacagaaaatggaaaggaaaaaaagggaaccaaaagttttttatgttcgtgaaaaatgcag

SEQ ID NO: 449960 - DNA, 451 bp, Triticum aestivum
tttctcactgcataccatcacgatagttgcgagacatggcgatgtgttgccactcttcctgtagcctcatatgcatcgtcttccttctcgtttttgttgctgtggcagcggagggtgcaggatatgtgcaggcgcggcagcggaaattacagcaggtgccggcaccaccgctagtgccgttgccaaatcctaacccgcagccagacccaaacccacaacctttgcctatgccagacccaaatccacagccattaccgcagcctttaccgcaaccactgccaggcccaaacccgtagccacaaccattaccttagcctctgccgcgcccaaacctgcagccacaacctctgccacaaccgttgcctgacgcaaacccacagccaccgccattaccacaacctctgccacgaccactaccggggccaaacgcacagcctctaccacaaccact

SEQ ID NO: 449961 - DNA, 159 bp, Triticum aestivum
tcgtttattcgtgcgcccacgcgtccggaacaaaccttcacaccaaaagcaaaagatgcggagtcagtgtacagccggcctatgagatcctttttgctgaatccacgcagataagcacaatggcggcgccggcgatgtttgctaaggcgaccaggaagg

SEQ ID NO: 449962 - DNA, 192 bp, Triticum aestivum
gatactcggcctctgtcgcacggcttagctgctcgttttcgtcctggagatcgtcggtccctttttgtacagctagagaagcaaaacaacccagccagccatagctcgtagtggtggtgtgttgtggggagagcgactcgcctgacctgacctgttgcgcctggtggtgtgctctgaagttgtaacgacacc

SEQ ID NO: 449963 - DNA, 127 bp, Triticum aestivum
tcgtcggctcaatgcctccttggaactccaccctgtttaacttcttcctcctgattccttccactctaaattaatttagggtctgggtgtgtagtttttatggtgggtgtgacggatcttggggagg

SEQ ID NO: 449964 - DNA, 247 bp, Triticum aestivum
tcggctcgccctgtcccttgctttgttgccttgttggagcgccggggtggttcgctcactcgcagccctcagggaacataggaggttctttagctgttttggccgtgtgtgcaaggttctctgagatgatttactgaaacagcctgctccatcgtcagacttcatcctcgagtaatttggaattcggtatcaaacgtgtgtgtcttggatgcacaatctgctttaatggctttgacaatcaattaaa

SEQ ID NO: 449965 - DNA, 319 bp, Triticum aestivum
tctgaatgcacacgaaaattacaggacggttaactcaacgaaggaggaccggaaggtttctgggaatgcaactggggtgttgtcctgggatagcccccttacataataattgtaatcccctctgtgctgttcatctacacttgttcttcctgggcgtgccagggacgtaaaatttcttttggttatatgatgcccatagttttcacatgcctaaaaaaaaaaaaaaaaaaaaaaaaaaaaaaaaaaaaaaaaaaaaaaaaaaaaaaaaaaaaaaaaaaaaaaaaaaaaaaaaaaaaaaaaaaaaaaaaaaatggggggg

SEQ ID NO: 449966 - DNA, 257 bp, Triticum aestivum
tgcgaagtaagggatgcaaattacccgtggtggcttatataaggtgcatgtgctgcaacaggtctatgtgcagcctgcagctcaaggaataggtcgagtggcactcgcacttgcttgccggtgctgatttttctgaactgtaatgcgttatgtatgaacaacttctcgtcttttgtctttgtaatatgtaccggtgtacatttgtttgcttcagtagacgtatacacaaacctggaagcaggcagaggttttcttta

SEQ ID NO: 449967 - DNA, 366 bp, Triticum aestivum
tttgtttgtaacctttctcccttggttttggaggtgcacgcaccaactcgatgcagggggacgccatggagcaagtcgagttcgtggaacaagtcatggacgatgccatggaagatcatgattcagagagtactacgacgacatcccgcaatctaggattcgaagatagcagtcgtgcgagataggagttatcctggtcagctgttcttgtgggaatggagtcccatcaacgttggagatccacgagtcactttcatcatccaccactagagatacttgttatattcatttgacctttgtggtcttgtactcaatttcttgtaatttgacccataggccgtgcgcccgtggctgacacttgagttg

SEQ ID NO: 449968 - DNA, 268 bp, Triticum aestivum
tttttcaaagcaaccgagacagcggaagacgcggagccaccgcgtgagacgagcgagccagcagcccaggcagctcaacgtccgccgccacgatgtggagctccggctccgacctcgacgagtccgcctcgacggcgacggcggccaccgcatgctccctgcagccgcagacgccgcctccgcctcgccgccgccgcagccgcaaccgccgccgcgcccagcgccgggtcaagaacggccccgaggtggaggagtctgaggcggaggc

SEQ ID NO: 449969 - DNA, 128 bp, Triticum aestivum
atattaaaaaaaaaaaaaaaaaaaaaaaaaaaaaaaaaaaaaaaaaaaaaaaaaaaaaaaaaaaaaaaaaaaagggaaaaaaaaaaaaaaaaaaaaaaaaaaaaaaaaaaaaggggggggccgtttta

SEQ ID NO: 449970 - DNA, 435 bp, Triticum aestivum
gtttatatgcttagattgcgagggtcgtggagaggcgccatgtcctacttgcaatgctggtcagcagcatgggttttacaaagcaaatcaaatgactcggtgcagtatatgtcatggcaggggtttgcttgctcaccaagatggatctgattcggtatgtgggatgtgcaatggtcaaggaatgttgccctgcatagcatgtgcatcccggggcctagtgacatgccagacatgtaatggctgcggttcccttcttgcacaaagcactgctcatgttcgatggaagacgcttacagcaaggaaagttagtgcaacaacaggagctgcttctgtccctgacgaagttttccacagagcgcaaggggtgcaactatgcaacatacaggcttaccaatgcactcctgctttctttgccgattcatacccactcaacca

SEQ ID NO: 449971 - DNA, 337 bp, Triticum aestivum
ttttgaataacgaaacctccccagcggctgaatctcggaacctgtcttcggtgaactcagttcagtgttcagtcgcagcaagaaagaagcgaataatagcattccgtagtttagggttgcctcctggccctggacaatgggtggtttgttgtacttctgcatcgggctaggaaatctactaccaattgttatcagactattgtctgtactcctctaagatctgtacatatgctatcttaggaacttcctggtgtgagataagttaaggagcacaatttatcatgtgctgctggtaatgcaagtgtgttctaaaccttaataacaagtggattctctt

SEQ ID NO: 449972 - DNA, 261 bp, Triticum aestivum
ttgtcagaagtttgaagaatgcactcccatgatatgcaattaacatagttaattatttagcgtggcgagccatgatggtggtcaatgtttcaatgggcacacagaagcatagaagctatttgcaatttttgtgtcaaaaaaaaaaaaaaaaaaaaaaaaaaaaaaaaaaaaaaaaaaaaaaaaaaaaaaaaaaaaaaaaaaaaaaaaaaaaaaaaaaaaaataaaaaaaaaaggggggggccgttttaggggacccaagtt

SEQ ID NO: 449973 - DNA, 285 bp, Triticum aestivum
tggagcccgagcgcggcgacgcgccgcgggggcgagggcggccgtggttcacggtggtgagcaacaagtggggccgcggcccgcgctgcgagttcaggagcgacggccaggcggtgcgctacaagatggacggcggcaggcggcggcagcaggcggcgcgcgcctcgtggatcgtggacgacgccaccgggctggcggtggcggaggtgaagaggaagctgacggcgactggggtgtccctgggcgaggacgtgctgacgctggtggtggagcccaacgtggacc

SEQ ID NO: 449974 - DNA, 146 bp, Triticum aestivum
tctccacgcgtccgataaagagaaggcagcagggctattttacttggccaattatattgcctatcggcagaactaaggtgatggttattctgctgtttgttgttgatctgtaactttgtaagaccatcaagtctgggatttgagga

SEQ ID NO: 449975 - DNA, 433 bp, Triticum aestivum
tgtggatgggaattgccagcttcgagctggggcagatttgatattccgcagggctgattaccacagacatgtgaggaaggcagtagcgaagcagctaaaggaattcaggaaacactatgaaggctatgtaccattggactacaaggtttacttgaagaaaatgaaaagatctggggaatggggagatcatgtgaccttacaagcggctgcagaccggtttggtgccaaaatctgcttgctgacatcgtttagagacacatgcctgatcgagatagtccccagggatgccgctcctacaagagctaaatacttggtgctcatcgaaccccgtcaccttctgcagagctttggctaagtttctggtgtgaagtacactacaattccttgtatgccaatgaagatcttccgactcgcaagaccaaaaagaagcact

SEQ ID NO: 449976 - DNA, 404 bp, Triticum aestivum
ggcaccgagataatcaacgtgcaggggtgttttttttcaagtgcatggtgtgtttcaaagtcacctgtaaacgtggcagataaaccacaccgaagcacagaggaaggatcagattctgaatctgacgatggcttgccccctctggaagagaacatgaaccacttggacctcagcgagggcgaagaaagcgaagaggaaagtgaaactgaaaacgaagggattaccgacgcaaaatgatggttgtttgtctgatcgaaataagatccaggtctcttgaggtttttatcgtggatctgaaaacaatctatctctgtacacttgtattgcttgcttgcgtcgtgtaccagtcatatgtatttttcttttgagggattcgtgtatcagatcagtatatgtaagtgtag

SEQ ID NO: 449977 - DNA, 193 bp, Triticum aestivum
gatgaccggcgccccaagcccgagggaggttttgttatgttaacacagtggttacatcgagacggccatgctaaggaaaaaaagtctagtgcaaagaaacatagctgtatcctatatgtgaactctgatcattccgtattgacattgagatatatccttgattcgtcaaagcaagtgattgtaatggattaaa

SEQ ID NO: 449978 - DNA, 319 bp, Triticum aestivum
acgcgtccggtggaatgggaatgccgggggactgtttgaagctcatgtgtttctgaactttgcgatcgttgtttgatgtttttattgctgttgctatacatctgtaccaactttgcttgatttgtaacatgcaaatagtcgcttcggtcgaagaggttaggattatatatttctgtgtctgcctcatgcttgccagcttttatctacattgagaacgagttacctatctgcgtctgggacaaaatgtcaatgatttagcagcagattatgtactatgaattggaactccatagtggtattctcatcagcttgaataaaa

SEQ ID NO: 449979 - DNA, 166 bp, Triticum aestivum
tcttatttgctgcgtgacaccaagttctacacaatcttgaggaggacaagcgtcgcccgaagaaaaaatggttgcgaaagtatggtcgtttaattttgctatatacatactatccataagaccttgtaagaggtacccagcccccctgggcatatagcgatgggta

SEQ ID NO: 449980 - DNA, 134 bp, Triticum aestivum
ataaattataaaaaaaaaaaaaaaaaaaaaaaaaaaaaaaaaaaaaaaaaaaaaaaaaaaaaaaaaaaaaaaaaaaaaaaaaaaaaaaaaaaaaaaacaaaaaggggggggccgttttaggggacccaagttta

SEQ ID NO: 449981 - DNA, 85 bp, Triticum aestivum
atcacttgtccggcacacagtgccagtaatctacgagaagtatgaagatcagattgatacctatggcgagaaggggtggattgag

SEQ ID NO: 449982 - DNA, 317 bp, Triticum aestivum
tcgtttctacacagagagccggccagagcactccgttcgttgtctgcgaagctcagccagctttccttccgcccaccagcaccaaccaaatggctcgcttcgccgaggtcgccgccatcgtcgcccttctggccatcgccgccgccgcgcagggtcccatgccggcgcccaagatggccccgctgccggcgcccccgacgaggttgcccccgaccgtattcgcgccgaccccgatggcctctcccccggccccggccaccgacgcccccaccggcgctccttccgcgatgacgccttccgcggtcgacggagcaccc

SEQ ID NO: 449983 - DNA, 354 bp, Triticum aestivum
tttcggtggttctcaaacttctctgaagcagaggaactattaaaactggctgctgctcgtcaacaggtgcaggctcacattgctaagctgagaaggcagctaagcatgatagagggaatgccccagcaatccagagttatctctggtcctggtcaacagtttgggcacggctaatggaacggtagctgctgtaaggaagatgctgaaacctgataacaactcgctaacagaatgtgatgaatgtgtcttcattgacgtcttaggctcgcaattgatgtttagtgctggccagtgtgcataaagcgcaacctatggattgcaccgcctttgtgcattttgaaatcaacgggagca

SEQ ID NO: 449984 - DNA, 106 bp, Triticum aestivum
tgtgcttgatcgcaagctatctattttccttcatctaaatcttgatggttggttttgcccttcaaaaaaaaaaaaataaaaagtaaaaaaaacaaacaaaagtaat

SEQ ID NO: 449985 - DNA, 126 bp, Triticum aestivum
gtgccgagtcggtgtggccggccatgctcggcaccaccggccacgccacgccgcagtcgggcggcttccacctcggccccggcgaagagaccaccttcgacgtgccggtagggtggtcggggcggg

SEQ ID NO: 449986 - DNA, 195 bp, Triticum aestivum
ttcgctcccatattactcactcccctcctcccccatcctcccatcgactcgcaagccctcaagctacagcgcaaggtcgtgatggctccacgcgtcggcgtgctgctcctggccgtggccgtcttcttcgcctctgcgtcggcgcaggacttcatggcgcctttctcagcccccgctccggtgcctgacgccggc

SEQ ID NO: 449987 - DNA, 219 bp, Triticum aestivum
tttattttccacccgtctccacccagataaccacgtgagatattttgtccgccccgactaccgacgaacggtagagaaaaggtaagcatgaacgtcgggaattggccgagatgcacagatctgtggtggccatggcgtggttacagtaccgatcgatatgatgatcggaagctgattggtttgctcctgcgtgtagtgaggtgatcatgagcaccatgg

SEQ ID NO: 449988 - DNA, 425 bp, Triticum aestivum
tcgtgtgctcctcccaggtatataccccccaacaatggcttgatgctagccactgccggcatgcagctcgtgctgcgctttacctctcaggttcaccggcggcgacggcggtgcgcggcggaggtatctagctagctaggcgggtgttaggccgtgtagggcaactatacatctttggcaatgtcttcttcttcctcctccatgggaggattgtaatggagtgtgtaaactgtgcgtgcatcccctgggctgggctctcgttcgtggaaactcaccgtcttgcatttctacgaccaatactggtgctctgttgcctcgttgaaaagaaatactatactagtgctcttgttgtggaggctgctgtattcctgtttgtggcgagctggtgttattgtcatgtcaactttttaccgttgatcttttaa

SEQ ID NO: 449989 - DNA, 78 bp, Triticum aestivum
tctttgttggcttctcctccccactcagtcctcggttcccggaccggttcggttcgttagggtttagtagtggggaag

SEQ ID NO: 449990 - DNA, 380 bp, Triticum aestivum
tcgctcacgcgtccgcccacgcgtccggcggctggggcgaatcagccaaggaccagcgaagggggagggagttgacaatggggcagtgcggatgcttcggggcggtgcagaaggagcagcgggcggaggccgaccgcctcgaggcgcaggaggcccgcgcaagggccgccgaggccgcccagaagaggcagcaggaatatgaaaagtcagctgctggacgagcagcacgagcacatattaaagctatgaaggaggccaagacatcatcaaaccaaggagagccggttctgaagtggcagatggggtaaatcatcgtatgtgtccttgcaactttcagcgtgttgttgatggtgtgtggaagcttgttttcttttgatcat

SEQ ID NO: 449991 - DNA, 377 bp, Triticum aestivum
ttttgaaattgcccgagcagccgccatggccatcgccgtcgacgcggacactggcctccccgcggatggagctcatgtccaggaggacctccggcgtcgtctccttcgccacgtgcaccggttcgatctaggaccgctcaaagcctcgccatcgagctcttctccgccgcggacgtcacaaccttgccgtcgtctgctgctcctggccctcaccgagcctttcttgagctccccgatgccaccgccgacggatgctactacgtggataccgctgacgacgaggagtagttaggaggtcccaggcaggaggtcttgcctcttcaatcgttgttgcttttgtgtttgccttctaaaagcagtcttgtttaagttatgtc

SEQ ID NO: 449992 - DNA, 308 bp, Triticum aestivum
tcggtgcggcccagcaggacggaggaggaggatgaacggcggcagtggcaagaagaagttctgcggcgggcggctgccgacggggaccccctacctggcgtggacgcagggggcggtggtcgcctccctcctcgccggcgcctccatcgaccacaacatatacaagcccgacatgaccctcccgccggtggaggccgcccacggcaacggagccggagccacagacggaggcacgcgcacggagagctgagctaaatgtgacggctggcgggcgcccgagctctgctcgatgcccatgaggatggatt

SEQ ID NO: 449993 - DNA, 320 bp, Triticum aestivum
tgtggttggtgcgcagagcttagcgaacgccattgatcgccaccgaaaccctccctctctctcgtctcggctcggctcgcctcgcctcgcctcgcccactagcccgcacgtccgtccaggcgacgatgccgccgatggcgaccacgacggcgacggcggctgcggccgactccgcggcgcgccgcttcgcctcggcctgcggcgtgctcagccagtacgtcagggcgtccggcgtctcggcgcccggcgtgctgggggccgccctccaggagcccggctcgccggcggacggggcgcaggagctgaccatcttctacggg

SEQ ID NO: 449994 - DNA, 94 bp, Triticum aestivum
tatcgataagcatgcgtctaaatcatgctgatatatagagttgtaatatgaaagacttggaggtgaaatgcaaatttcattcttgtcttgcctc

SEQ ID NO: 449995 - DNA, 187 bp, Triticum aestivum
tttacgcgttcgcacacttccactctcgcagcagctagcctcgccctcgcaagatgtggagcggtgtgggctcgcgccttctgccacaggcggtggccatcgccatcgccgtggccgtcgcctgctgcatggccgcctcgccgtcgtcggcgcaggggacgacgacgcccgcggatgccaccggcgc

SEQ ID NO: 449996 - DNA, 132 bp, Triticum aestivum
ctgacgcgtgggcggacgcgtgggggaaaggcgaacacaactacctgcctccttcgggcaacaccgttggtccctgccacctccgtcgtctgctccggcgactagcgggtggggaccctgggggttcggctc

SEQ ID NO: 449997 - DNA, 154 bp, Triticum aestivum
tttgcctatcccgtcgccatgccctactgttatcgtatggtctgaggcgacgtttcatggttttgtctttgttgagcaaaattaggaggctaggatgaccttgtaaagtaaaccctgtatatatggcatcccatggcttattacaggttggctc

SEQ ID NO: 449998 - DNA, 67 bp, Triticum aestivum
ttgtcgtcgtcgtcgattcttttgtcagattgagttaaacgagtgtaatagtttgatgatttgtgtt

SEQ ID NO: 449999 - DNA, 135 bp, Triticum aestivum
gtatttgttttagaaactcctagtggcagaataataacatgcctgcaagagcatggggttgtagctttgtagttgccatttgatacaggagagggggtatagcaggaaatgtaatataaagcgtaggtggtgggg

SEQ ID NO: 450000 - DNA, 163 bp, Triticum aestivum
ttttacctttttcttttactatgccagccgattgtggcttttgggccttgttttattttgcttgctctgtgtgagccagtatcctttgttgcagtactttgcaagacattgttgaactagtttatttatttataaatgtggccatatgcatcttgtctgatgc

SEQ ID NO: 450001 - DNA, 120 bp, Triticum aestivum
ttcacgcgtttgcccacgcgtccgctcctcttcgtcctgcaagcagcgccgccgcctttcaccggtccgagctccagccttcccttcaaccatggctgacgttgatgtcgaccccgaggt

SEQ ID NO: 450002 - DNA, 74 bp, Triticum aestivum
ctcacgcgttcgggcgcggcgaggagaaagatggggaagatgccggtgcggatgaaggcggtggtgtacgcgct

SEQ ID NO: 450003 - DNA, 392 bp, Triticum aestivum
tttgtcctttgacgcgtgggcggacgcgtgggcggacgcgtgggcggacgcgtgggcggacgcgtgggcggacgcgtgggcggacgcgtgggcggacgcgtgggcggacgcgtgggctgaagcttttcgtggaaattttagtcaactcagcagcttgattagagtcattgccgataacaatggtatttctgaagagcaagcaccagctgctggtctggtagctgatcttcctctgcaggattcggtgctaaccagacgtcttgttgaagatggggctttcaccacaataatatccaaagtgataatgatcagacaaggggagagtcgtggggggcgtttcgtcaacccttttcttgaaggtctagttaggatagtctcccggatcacattta

SEQ ID NO: 450004 - DNA, 223 bp, Triticum aestivum
ttatctctttcacccgcctacctcccctccctggctcgtgccatccccacgcccgccacgaaagccggaaagatctgccccggatagcggcggggagcgctcccggtctgctgggatttcggccatgagctgcggcggcgtggggcacggcgggtggctgctggactacggcctcgtggaggaggagatccaggcctccgacttcatctacatggtcgacgac

SEQ ID NO: 450005 - DNA, 158 bp, Triticum aestivum
ttagcaccttatgaaggaaagtgcaatcggtgtgagccccttagatcttccagaaagtgattcatctcataaactggcattatatcagtactcgttttgagcgtcctgtcgatcttatatatcatgtaaaataaaaacaaactaagctggccttattt

SEQ ID NO: 450006 - DNA, 179 bp, Triticum aestivum
ttcacgcgttcgcccacgcgtccggtttgtctgtgctacacatatagtggtggttcatatctgaggtctggcaaatagattggatccgtcaaacatgggctcattgcaccctaaggatatacacaatgtgataatgtatcggatttacttcccctttaatctgcatgctgtttaggatc

SEQ ID NO: 450007 - DNA, 284 bp, Triticum aestivum
tttttccgtttacaccctatctcgcagcggagaaaattatatcgaagaaggcctaggcagcaacacgcggtctgaaggattggattatgcatggcgactggtcggagagatccatcaggtgtgattctgtgtgcatgtaattacgggtgttgtggcatcgtgttgccgaggtgcgcagtgatactctttccagttttgtcgtgttcaataagtgaaatctttcggattgctggctagtttcagtattcccaggatattgaaggatgtgcagtcgtaagaggcca

SEQ ID NO: 450008 - DNA, 467 bp, Triticum aestivum
  unsure (1)..(467): unsure at all n locations
tttcccactcctaccagtacctcctctccgtggttgtggatctgtccgggcgagaccggggtcgatcgtgctgcatctcgcgcggtgagagggagctctggagtctggactggcggcggcgatggggtcgtctgcggtgcagaaggaggccgtcgtcctcaacggcggcggaagcggagcgggggaggaccaccggctgcgggcgctggcggcgaggacggtgacagactcgctcagggcggccgtggccaggtccagcgcggcggacaaggcggccaggctcgaggagtgcgcccggagcctcgaggccgagaaggccaagangggaggtcttccgccgcgagctccccatcagcgtccacctcatcgccgacgtgatcgagtggctgaaagatgaaggtggcgcagcaccggagacccgcgccggatcagctgctcgcaccggcgccgtcgccgtcacctgcacc

SEQ ID NO: 450009 - DNA, 305 bp, Triticum aestivum
tttacgcgtccgcaaactttctgtatcactttgattggacgcttcccggcggagccagctcagcgtcccttgatatgtctgagaaatttggggtaactgtacgtaaaaggtctgacctatggctcaaggctattccacatgcacgctccaaagctacacatatatagatccaccttaacagagtggatgtctgttcttgtcgcattttgtacctttatgtttacattagaataagaggagctcttggaaaaacatgtaacaatcgggtgtgactacggccaaaataaaatttcaaatttttgaaa

SEQ ID NO: 450010 - DNA, 62 bp, Triticum aestivum
cttggttttgtttcagaaatattgagcgttgaggcggtggaggctttaattacagacttgat

SEQ ID NO: 450011 - DNA, 159 bp, Triticum aestivum
tttagcctctctgcgcacctctgcttcacctctacccggtggccttggcttccccggcggctgtcagcgagcccccgacggagcaaaagcgccgccagcttggcttctgagctctgacctcgcttctcacccaccccgcacctacctaccccgtacatt

SEQ ID NO: 450012 - DNA, 312 bp, Triticum aestivum
tttcgaatccagtccgcctgctgcgccgccacctccgggatgagtgccaagcggaagaagaagaggatgaggaggctcaagaggaagcgccgaaagatgaggcagcgatccaagtaggtgaacaacgaggagaaagctgaaccttgtatcattgcaccagtatgctgggatgatagggtgttctggttcctgatatgtctgggttgctgtgatatttgggtgatgccaacccttgtaacatgaggataattatatgctttccatcgaggctggatattcagcttaagaaatattatcatctatttttgattt

SEQ ID NO: 450013 - DNA, 117 bp, Triticum aestivum
tttccggtcgcctgatagtaatatccttgtatctcggtgctcctgtagtttgcacgttcagtctcaccagtgttgttaagctacttgtctgtacaattccttcctaaagtttcgctt

SEQ ID NO: 450014 - DNA, 212 bp, Triticum aestivum
ctttattgattcatgatctatcttgcattttggcgccttatgctgtaccttcattgtgttttttgggccttccacgcgtcaccctgctggcgtacgcctttttcttacaacttggcattatttgtaccaattttaatcagtttgcctttatagttcagccctgtaaatatagatgattctagtaggtacaaatgttacacatccagggaaca

SEQ ID NO: 450015 - DNA, 202 bp, Triticum aestivum
ttggttctgggatcgaattggcgcgcatacatgtgatgtgtggatgcgatccatggccgattccatttgctgtacttgtaccgtgagcttatctacttgattcattgttgccttcggaataaacattgctacaattagaccttaaaaaaaaaaaaaaaaaaaaaaaaaaaaaaaaaaaaaaaaaaaaaacaaaaaaacaaaa

SEQ ID NO: 450016 - DNA, 360 bp, Triticum aestivum
ttacgccttcctcttcgccgaccagttcgccttcttcaacggcggcgcctacgagtccctcgacagcctcttcagcgccgacgccgtgcagagcagcgccaccgccaccgccgtgaacgaggcggccctggggctctggaccttcgacgacgactgcctcgtcgacgagtgcagcctgtcgttctagatcttgttccgtgtgcgtccgttcatgtcatgagatgcggtggtgtaaatagagtagcttgccttgtgatgaaatccgttcgtccgtcgtcgcttcttggatcagcaagcgatgatggattctgtgtaagagtttggcatcgtcgtgaaagattttgcctacgccttcgatgc

SEQ ID NO: 450017 - DNA, 441 bp, Triticum aestivum
cttacgcttttgcccacgcgtccggccagctctaagaccagtagggagagcatgcctaagtaagcgccgagcaaaagttttgacccttggagccatgaatttgtgcttccagacctgctgcataatacctttggttgattgatttacctgcctcggttgatttgcctgcacagcatgaatttgttctgaacacaacttgcaagtgctctttgaattgcatttaccaggagtgagcttccagcaaaggatatccctgcaatcatcaagtactacaggagtagcaataatagccgaagcggtaggttcctgaaaaaggttagtggcagaattataagtatgtatccagtttactggcaattacctacagaaaacctttcatctcaaaactactagatgtactactatgataagcaaagtgcagcagcgagcaggattcacaat

SEQ ID NO: 450018 - DNA, 52 bp, Triticum aestivum
tttccgttcacgcgtccgcccacgcgtccgcccacgcgttcgcggacgcgtg

SEQ ID NO: 450019 - DNA, 414 bp, Triticum aestivum
cttacgctttcgctctctccctctacttctcgtgccagcttcagaaaatagatacgccgacgaggaggagagagcgaaagaaactgtagtttgtttgcacttgagcagcggcgccggcgatcgacatggcggctcacaagcggctccacgacggcttcgagcaggaccccgaccagcccgagaagaagcggatggagcgctcggtctccttctccacgtgagcttccttccagcccgccgcctcttggttcgtcgtgtgtcctgttcatccatggaggtctttgctgattccatggcgtgcgtgcgtttggggttccagggtgatccgggaggccatggtgatgaagcaggtgcagagtgtgttcctggtgctggagcctctcctgcgccgagtggtgcaggaggagatccagg

SEQ ID NO: 450020 - DNA, 272 bp, Triticum aestivum
ctctgactttcttgtgctgtttctggtcctgggagactttttttttcattccattggttccattttagttgaaattcgttgtaatcccagttgctgatttttgtagacacgatccctgggttcctcccacccgtttgtttcgggttcattttctgcgtgcgtgatgtgtcgcctgggattatattggggaactgggaggggcttcctcccagaataccgtgttgatgttgttgggactgactatttctgtcgtgagaacagtttgaatttgt

SEQ ID NO: 450021 - DNA, 358 bp, Triticum aestivum
tttttggacagtcaactcatacttgggaacacagcaatgttttgatcttgctcggtacaccggagtacagaagattcaggaacagcttccttctgatgaggtcaccacaccacctgaaacatcccagttagagggtggtagaaccgatgtacagaacccggatgacagcagcagcagcatgcggaccgatcgagtgatccgaccaagtgatttggtcgctttccgtcggcttcaaagtccacaaccatatatgtatatatgttcaagacagcgaaaggagtctggttgctacgatgctgagcctctcactctttggtcggccaggaatgggctatttcatatgggaaaaacataaatt

SEQ ID NO: 450022 - DNA, 64 bp, Triticum aestivum
cgtccgaacgcaagttgcgggcgagggcacatttcaaaggcacgcctgtctgggcagccacgcc

SEQ ID NO: 450023 - DNA, 321 bp, Triticum aestivum
gtttaccgttttgccgactgtggccgctccggggtcagggaggaggcccccaagtcggcgccgtggccttccgtgcaggagcatggtttgattcgaccgaaaggccccggtgtgtcaggaggatcggaggcgggagtcaattagacgaccgcaagtgctactcgctcacattcatgtggcttcccttgttctgaaagttgaaacaaaggctttgtttgctggtgattttgaatgtgtgaagtgtgcatgtgcgtgctgtgttttcaagtgttcaagacgattttttgttcatgccatgacatgacacattgagtttgataa

SEQ ID NO: 450024 - DNA, 274 bp, Triticum aestivum
gccatttctctcaatcccgcaaaacccacgcgaatccaccaagctccttccttcaactggacttcctgccccttctagggtttcgccccccaccaacccctgccccccgggttactgctcgtgctctcagccatggcgaccacggccttccccacctcgacccccttcttcgtccaccacggcacccggcgcccctccgtcaacctccgaacgaccgctggtggtgtacggcccgtggtgggcggccggctggcggccactgtcgcgtcgcctg

SEQ ID NO: 450025 - DNA, 326 bp, Triticum aestivum
tcccggtcgcagtgaaataatttctttaaactacactgttatgttaaaaaaaaaaaaaagatagataaacaaaaaaaaaaaagagaaaaagtacaatcatatggcattctcctgggccgttcatgtaatttgttaataaaaaaaaaaaaacaagggggggggccgttttgggggtcccaggtttccgtccgggggctggcgaggtcttggtttttttttgggggcccctaatttcatttcctgggccgcgtttttccaccgttgggccggggaaaccctgggggttccccacttttttggcttgggggcccttccccttttggccg

SEQ ID NO: 450026 - DNA, 355 bp, Triticum aestivum
tttacgcgtttgcccacgcgtccgccctcctggagtcgaccgatcgatctcgaccgcggcggcgatggatttctccggcggggcggggggcgcgacgctgtcggagatgtaccagagcgcgcggcggctgctgctgtcggcccgcgacggcgtggcccgcgtggagcggctcgcctcggtgcccgcctcctcctcctactccgcctcggcgccgctcgtcggcgcgccggacccggcgggcgccgaggccgtgcgcagggaggtggcgcatatccagggcctctgcgcgcagatggaccgtctctggcgctccatccccgccaagggccagcgcgacctctggaagagaaaagtg

SEQ ID NO: 450027 - DNA, 197 bp, Triticum aestivum
caagcggagacgatcaagaccaaggcggctatggatgggttccttgcgaggaaccgcaagaagtgatccatcttccgacttctccttttttatttagcacagcagttcctttatactgtatttttttgtccgagaatttatgtaattataaattcggattaagacttacactaacaaatacgacctttattttctct

SEQ ID NO: 450028 - DNA, 351 bp, Triticum aestivum
gtttgatcgttttcacctaaaagagaaaagaaaggcaaatcgcagattcaaggcgatggcggcggcgatccgacttgcggccagtcggctcatcggcggccagcgaccccaggcggttttcaagtccgtcgtcttgccgctggtcgaggtggggcgtcgccggctgattccaagtctaatcaacgggggccgacctgcctctttttctctcagatctatggcctccggcggcgcaggttgcaaagagttcttttccggcgccgccgtcgatgcccacccacccaacggcaaccgtgccctgaagcaaccctctggagaacctgtaccaaagctcgacccagagagagcatg

SEQ ID NO: 450029 - DNA, 398 bp, Triticum aestivum
tttccgctttcgcgtccgcttttttggatgaggaacgctcactcactcgctcaaagcagaaatcaggcagcctgtatacactgaaatttgaaatgcttgtgtttggtgttttttcaaaaaagtgacgtaattgtttgcttacaaccatgcgtatcatcatcactgtcaatcaataccaacaaaatgtgagcgacgggcgtaggtcaagcgttcgtttccatgtatgccgccttattcttattcggtttgacaaagaagacggagcagaaaaagcttcttcgccaggcgtggaaatggtcctcacgcctcggcctccatcttctcgcactcttctctgatggactggaacagcaccgacgacaggtacctttcgccgaagctcgggaacaccaccacta

SEQ ID NO: 450030 - DNA, 307 bp, Triticum aestivum
ccctacctctcgactatcacctcacgatcatgggcagttcacgggtggaaggcctcatccccttcatctacaaggccatcaaggagcaccgccggagcagcagccgggccgcctaccggggcgcggaggcggaggacgacgtggacctcggcgacacggaccagaggcggcgctggctggagcaggagctgcggtcaccgctcaacgccgccgccgccccggcgtcgacacaggcgcacgggcggaaccggtcgctggaggagctggccggccaggtggggctctcgccgggccggcggctgccgct

SEQ ID NO: 450031 - DNA, 334 bp, Triticum aestivum
cctgtatgatatgcgatgggtgccaatgttaatacctacggcagtagtgctgattgccaaggttggtgcaactcggtgtagccatgggtaaaacgatcgtatacatgggagcatggacaattgcacagaagacacatgccgcattggatctgctcttcaatgtgtggatcatggtgctgctctatacgtttgcattggcgatcatgggacggtgggcaaagaggccagtcatactgctggtcttgttgccggttgcctttacaatagtttgcctagtatataatggtgctcatattttacttgttagttatcttacattttagccaagtgatat

SEQ ID NO: 450032 - DNA, 215 bp, Triticum aestivum
ctttgcgtccggcaatatctgtacctgggtgcactgcacacttgttgcacatttactatatattttgtatttcagcatgtaagctcggttctagctagttatgttttccagatgttgccttcataatgagtagcagtggaagactcggtaggcgtctgaaaactgaaactgcgtcgcaggttttgggcaggctgcaaaactctattgtgggagtc

SEQ ID NO: 450033 - DNA, 294 bp, Triticum aestivum
gtctacggacgtaagcttgagcgccgcccagagcaggctcgtccgtggccgtcgagacctccatgagaggatcgctcgcgacccagcgctagcgcggttctttcaactcccggaggtcgaatgaacgcgccccgctacgccgtagccgcggccaagttgctcgccaagcacttgccggtagcgccttccgagccgccggctcgcgagcgtggcttggagacgatagagcgcgccatgcaggcgcgcgcttttcgtcgtcgtcgccgactcctgctcggcggcggaggcttcggt

SEQ ID NO: 450034 - DNA, 290 bp, Triticum aestivum
ctcacgcgtccgctcgaaggtcggcattgctattgctctcaagccttgattgcgaaatcaagccccccattctctaaagctctcagtcaggggtgttcctcggtttcggatgaaatcggggcgggttgacaatacttcacacgccttgggcgcgttgttgcagtctgttagatttgaagaactgccgtgtttcattcctgaggaattttgtctttgctcggtgtagtgcctgtccgttgagccacacttctcagtaataattcaagctctgaaaattccgaacttgattc

SEQ ID NO: 450035 - DNA, 203 bp, Triticum aestivum
catagggcgagccgaacaacccagcggcatcagatccctcccaccggcgccgcgctgcgcactgcagacggaaacggccaaaggagagcggcgtggggcggagcggggggcgatggggaagtacatgcgcaagtgcagggcggaggacgtcgcggtgggcggcgtggaggtcacgcaggccgtcggcgtccggacgcggtccc

SEQ ID NO: 450036 - DNA, 435 bp, Triticum aestivum
taccaattcatgccaatgtgtcagttcaaggagcatcaaagggaatgcaatgcaagtgaagaccatgcacaaactgacttctagttctgttgatggaaggagtagccctgctggtgaggaaattcatcatgcgtgtccactagggaactacccctgccaagggatgttccacagttccatggagagcacagaagaagaaggtggaggaaactaactcccgttattatcattgaaatagctgaagataagtcatagtgcgagatcatgcatgtgcttgctatgtaacttttatcttgttttgaagacttaatgttcaagtacgtgtatattgtacttctaaaattattatatttataaataagagtcttaaaaactctattgtaaggctacttttcttgtggtgaagtgatgttaaaaacttttggatgctaggac

SEQ ID NO: 450037 - DNA, 271 bp, Triticum aestivum
tgtctaactctcagtctcatcatctcgatcagcatttgggtgatctgcgcatgcctagcctgaggcagtgcagcaccttagagaggcagctgctcggccacctctcagccacgaagatgaagatcgccaaggccccggtgctcctgaagaaggcggtgaccatgtgcaagagcaagaccggcgtgctcgcggccaggctcctcttcctcgcctcgctccggcgcaggatggccaccgtcggcgtgatgtctcacaagatacacgcgctcat

SEQ ID NO: 450038 - DNA, 325 bp, Triticum aestivum
gtactgcaaaaaggggtgccactatcacatgaaggtgagcggcgtggagatcgtcccctgaccccgtcgtgcgcggcgagcccgccaccttcaagatctccgcctccaccgataaaaccatcaccaaagggaagctggtggtagatgtgcggcacttctttgtccacgtcgattcagagactcacgacttgtgtgctgggactccctgtcccgcaacgggcgaattcgtactagccagcgaacagactttgccatcttacaccccaccaggttcttacagtctccagatgaagctgctgggagacaagaacgaggagctgacctg

SEQ ID NO: 450039 - DNA, 74 bp, Triticum aestivum
tttttacgttgtggtcgaggccgcgctgggcgcgctctgtacgctcatggacgaaggcgtggacgtggtgggcg

SEQ ID NO: 450040 - DNA, 191 bp, Triticum aestivum
ttcacgcgtccggtttcattctgcagctagtgaatgttatcatcgggaacttgttctaaattttgttttggggctggaaaaagagaccagcggatggctttgatacctggtacttgtttgcatgatatgctgttcagtgttacccttgttggcataattcgtggaggtcaaccagtattattctctgattt

SEQ ID NO: 450041 - DNA, 187 bp, Triticum aestivum
caagcactacgacccgctcttccccttcgggttcggcctcaccaccgaggccaacaagtgagtcgggtactcgggtgagatgggatgtactatctcggctgggctgtgagagatgggatacatacatacattgagttttgtggttgatttgttatgttagcaataaaagagcgatgcgttcttgcgg

SEQ ID NO: 450042 - DNA, 278 bp, Triticum aestivum
ttcacgcgttcgcccacgcgtccggaaactgggaaggggaagttgagatgtacatttcaggaactgaattcactgatagatactgtagtcaggagcctactgtgtagataatcggagctgttattttttcctggaatgctgtaattgtgtcttggtgtggatgctgcgctgcgttggcgggattattggtggccgaataatattggctgggtgtagggcaggagttcttcctggaattaatatgctgtgattgtgtctcgagtaacattttgctcttt

SEQ ID NO: 450043 - DNA, 246 bp, Triticum aestivum
ggggcgtcgaactgcccgcgcggcgcgaggagatcgagctgcacaccgccgacggcctcacgctggtgggggagctcgccacgccgctcgaccggacgcccgtcgcgacgctggtgaccctccacccgcttccgaccggcggcgggttcatggactcgcacatcctgcgcaaggccgcggggcggctgcccgcgctggccgacatcgcggtgctgcgcttcaacacccggggaacggcctcaccgc

SEQ ID NO: 450044 - DNA, 419 bp, Triticum aestivum
gtcgttgctgccgcgccatcatcgtcctcgcggccactggtctccccggcgcccgggaggatgtccaggagcttcagcatggacgactccttcgtctgcttacttcgattcgagtaggggcgcaccggaagctcgccatcgcccgtcttcttcgccacggccgccgacgttcgtcgtcagatgcgccgcctcccgaacgcccccgaccacctgaccgcgtccacgagctccgtgatgatggatctcaggagccagacgacaccactgatgactactgttaccccgagggtgcctactactacgtgacgaccgctgacgacttggagtagttaggaggctcccaggtaggaggccttgccttttcgatcgatgttgcctttgttctagccttcttaaggcaaaaacttgtctaacttatg

SEQ ID NO: 450045 - DNA, 158 bp, Triticum aestivum
gtatgaaaccttaggttctattctagtgaaatatttattctgcgattatgtattagtcagtaatgataccactgttgcccctacggagtgtttttctggtaccatgactattgctggttgtccctaattattcttgaccttcaatcaataagaacacg

SEQ ID NO: 450046 - DNA, 191 bp, Triticum aestivum
  unsure (1)..(191): unsure at all n locations
ctgacgcgtgttcggacgcgtgggcggacgcgtgggcggacgcgtgggcgagagtggaggattcaaattttgccgaacaatgaattatgtccatcgatatataaatgttgtatgattaaatttgtattgctgttnaaaaaaaaaaaaaaaaaaaaaaaaaaaaaaaaaaaaaaaaaaaaaaaaaaaaaaca

SEQ ID NO: 450047 - DNA, 388 bp, Triticum aestivum
ttaagagaaggactggagcgagatcttcaccaaggcggttttcagtggctataagattgtcaagaagctgggagctcgagctgtcattgaggtctacccgtaaggttgtgctcccaaagtaaagatgcttacatatgttgtggattgttgtgtgctcgctctaaggatgcataaataaaggagcgccttgtcattttccaaagagaagtcctgggtagatcatagaatagcaaggcggttatgtcttgttaccttatgatgatacctacggaactttcttttggaaaaaatagtatgcatttagagtgcttttcatatgcagctacagcgatttccatatgtgtaccgtgtacaatatcatataccataagataagatcacaccttgt

SEQ ID NO: 450048 - DNA, 96 bp, Triticum aestivum
tactactgtactacgcacgtgtcaacatcctgtaaatactttggtgttcagactacttgcccctgttatatctgaataaatccggagcctataggt

SEQ ID NO: 450049 - DNA, 408 bp, Triticum aestivum
tttgtccgcttacgcgtgggcggacgcgtgggctgatctctgtagttatctgtactgcatgccatcagcaccaggtgtcgatatctatgtcgccatggaaattaaggagagcatggaccacttggcgtgtcagttgccccttggatacatgaccattattctttcatatcagagtggaccatgcttgcttgcattatcattgaaaattgagtccccatcggtggtcgagggatagccatgtttgaaccagtcttttccttcttggagtgagaaatagccgagttccctatttttagggtggaagcactcatattcatgttctggttacgcttactgtcaatcttatcatattggttaatacatcttgaacaattgatcttctgcaagattggggttgctctttatgac

SEQ ID NO: 450050 - DNA, 146 bp, Triticum aestivum
ataaaaccggcgatcatatcgcttgcatttgcgtgcatgcatgcatgcaagtagtacagtattcttcatctccgtgtatcgattgtatccctacatatgtatatggtgtacatgcatgtaatacgtaatggtgtacattttgcttc

SEQ ID NO: 450051 - DNA, 351 bp, Triticum aestivum
cttaggcatcgccggcatatggctgaaaatgcaccacatcgacgcaaagcgcgccatggctctgcccggcaagtgcggtctcaccatgcccaacaactgctcgtgatgattggttcagatgtactacccatgagcatctaggagtcggttgctctacatctgcatcaacacttatatatggctaaataagtggagaagcacttgaaaaagcattgtcctactcggtcttattgttattgtgtaatttgaaagtgtgattatctcattaagctcttgataaaatagtatatgcatgttaagtgtaaggatggcaaacgcgtcttgcatgttgtcccatgaaattaatatctt

SEQ ID NO: 450052 - DNA, 393 bp, Triticum aestivum
  unsure (1)..(393): unsure at all n locations
cccacgcgttcgcccacgcgtccgaccgccgcccaccactgacgtagcacgctagtacgtagctcgtctgtgcactgcactcatggcagcttcgctgggacttaccggccatgagaccagctacccggcccacccggcggcctcctccttgtacaacttccaagccggtgatcccttcgcggcagcggcgggcggtgccgcggagctgagcttcccggagctcgtggacgccgctcggccctccgactactcgctgcttccggcgttcggcgccgctggaggcgaggcgatgaacatgtacgagcggagntgtcgtcttccctatgacgacctcctactactgcgacggcgcggggatgttcgacggcgacgcttcggcgagggcgagaggag

SEQ ID NO: 450053 - DNA, 237 bp, Triticum aestivum
ccggttccaattcattctcttggcaaatcgtccagttcatcccaaattaccagctctcatccgcttctcttcctccaaatcgtcggcgtttcttgatcgacgagggcatggcgacgacggtggactggcgcagctataggcccgatcttccggcggcgatgtaccacatggtggacggcagagaccaggtaatgcacgcgttcgctccgccgacggcgcagggcgcggcgccgacca

SEQ ID NO: 450054 - DNA, 84 bp, Triticum aestivum
cccacgcgtccggctgcgtctgccacaatgagcatactgtttggggaaaagttgtctcaacttataaataagcattttttttct

SEQ ID NO: 450055 - DNA, 291 bp, Triticum aestivum
cttacgtcgattacgagctctcccctctcgtcccgtcttctccccctcgcgacgccaccgccgcgtcgccggtcgcgggctcgccgccccaggtaggacgtagctagtcaccccgcccggccccgatggctgaggagctggtgctcgacacggcgatccgggactgggtcctcatcccgctctccgtggtcatggagctcatcggcgtgctccgctacttcgtctccaagctcatgcgctccccgccgtcggcctcccccttccccgaccccaagaccgttaaggaggggc

SEQ ID NO: 450056 - DNA, 308 bp, Triticum aestivum
gtttgaagcttaccgtcgccaaggcgccgtcgaaggcgccggccgccgtggaggccccggagccgtccgcggtcgtcgacgacgcgacaacctcgtccccggcggtgaccaccgtcgcgcgcgtgtgccaggtcaggatccgagtcaagatctggaagtggaccttctagtgacgactcaaactcccagggggcacattgtgaaagcgaaccaaagccactttacttttcacctgggacgcgtcggtagtagagatcacaaccgactgttgctgtaaaaaaatatcccatttgaattttacgaaattt

SEQ ID NO: 450057 - DNA, 144 bp, Triticum aestivum
tcggttaaacatagacctggggtaggtgttttaatctttatctgtttgaatgttaagattgttcgttggcaagagtatggcactgaaattgttctctggctccctcccctcacgcaacgcgcccgcgcgcgccggggggtgggg

SEQ ID NO: 450058 - DNA, 51 bp, Triticum aestivum
  unsure (1)..(51): unsure at all n locations
cttacgcgttcgcccacgcgtncgcccacgcgtccgcccacgcgtccggac

SEQ ID NO: 450059 - DNA, 202 bp, Triticum aestivum
ctcacgcgtccggagagcgccgccgccgcgtacgagcagcggctggtggctcacggtggctgcgtctcaggcaaggctggctggcggccagtcgctgccgaggggcgtgctgctggctcatccaccaataagctcgtctggtcccctgttctggaggctctccgctacttctctagctcgtggcgtcgccgtggtggtgaag

SEQ ID NO: 450060 - DNA, 188 bp, Triticum aestivum
ccccacctttttgattgacataccgccttagcagctaagccaagccagcctcgccgtctcgcatcccagcagcaatggcgtctcgcgcagccgtggtggtcgtggccgagaccgcgctgctgttcgcggcggcgtccgcgcaggagatggacgcgagcatgccaccggccccggccccggtcacgggc

SEQ ID NO: 450061 - DNA, 408 bp, Triticum aestivum
tttccggttggtccgggcgttcccgacgaggacccgagagctgtccctgttgcttatctcttcagcttatcgagtgggactatccagttggatataaattccgacacaacactcctcactcctcagtgcaatccatcgtagctagacaccggatcgaagacaccaatatcgcaatggctgcgcgccgctaccgacgacgccgatgccggcttgacgggtaccgcagcgttgccgctcgacggacgcgtggccatcgtgaccggtgcgtcacgcggcatcgggcgcgccatcgcggcccacctctcctccctgggcgcgagcgtcctcctgggctacgcgtccagcgcggccgaggccgacgcgctcgccgcggagcttccgcgggccgtggccgtgagggccgacgtg

SEQ ID NO: 450062 - DNA, 327 bp, Triticum aestivum
cccacgcgttcttccacgcgtccgctcatccgctgcggcatgtccgttctgctcgttgcttcatcgctgacgctattattgagatatctaacctgatgcctcacatagctcagaacacccagtcggaactgcaggagccatcttcaccttaatctgaaaatagaaggttttccttttgctagacctctgaaaaatctgcagtggagtaaccgctcacattacctattgctctggttttttaaggaggcttagcaggcctgacttaagatcgaaccctgacggtgtttaggcatggtccggctggagagcttatttccagcgttggag

SEQ ID NO: 450063 - DNA, 140 bp, Triticum aestivum
tttccggccgtccctctggaagctctctgcacactgcgagccggcatggatactcttcttcagaagctgtaataaacttaaaaaatggtactgtactagaaggaataatcggcacaacgatataaatgtgggtgtttact

SEQ ID NO: 450064 - DNA, 349 bp, Triticum aestivum
tacgccatcttcgatgagaagtgcctgtccaagattcccaagggcccgtccaaggataagaagcagcattagaacggtagagagtaccctgcgcagatttatcttcaaagttgatcactactcgtcggttttcaaggatggttgtgattccatgtccgtagttgatagtagataccactatcttgtcaaaaacctctggcacggtcagtagtcgtgacgtgcaacttctacgaacttaaaaagtcatgccagcttttgctgaatatcctctttccaatgctatggttaacgtagcatcctcacttgcaagttgtgttggtgtaatatggcattgatgtttgtgacctta

SEQ ID NO: 450065 - DNA, 101 bp, Triticum aestivum
gtccgaaaaaaaaaaaaaaatgaataaaaaaaaaaaaaaaaaagataaaaaatgaaaataaaaaaaaaaaaaaaaaaacaaaagaaaaaaaaatgaaaaat

SEQ ID NO: 450066 - DNA, 92 bp, Triticum aestivum
atttaaaaaaaaaaaaaaaaaaaaaaaaaaaggggcggccttcctagattactcacggctgcatacgcatgcatgaaaagaaattattgttc

SEQ ID NO: 450067 - DNA, 137 bp, Triticum aestivum
cgtaactgctgcattgacactgaaaaaccagctggcatgtcacatgtcaactgttatggcagctgctgtatttggcgtcagattctcacttctgctcatcacataatgtccttgagtctcgtagtgaagctatggtc

SEQ ID NO: 450068 - DNA, 229 bp, Triticum aestivum
tatttttgtacgggagtactattgcctgtgttgagcattgttcactactgtatctttcatgtgcacacataagaaaggcttaagctatgtgcttcggcattttgcctcctgttaagaatgaatatcattctagtccggaaataaagagcatgttaatctgtcctgcatatgtgtactcgctggaatttggacgatcaactttgtatgaataaaacatcgcatgaataaa

SEQ ID NO: 450069 - DNA, 265 bp, Triticum aestivum
ctacctagcctgatcccgagggaagggaagggagaaaccgttgagctgttagtgttgatgcgtttgttgttgaatcgaacaaaaaagccgctgtgattcggaattggaattggttggtggaatgctatggtcaaaaaaaaaaaataaaaaaaaaaaaaaaaaaaaaaaaaaaaaaaaaaaaaaaaataaaaaaaaaaaaaaaataaaataaataaaaaaaaaaaaacaataaatatcggggggggcgttttaggggatccaagtt

SEQ ID NO: 450070 - DNA, 273 bp, Triticum aestivum
ctttgttgggctcgcggcacagtgagatggtaagactatgggtccttgatatgcatgtgtggatgtgatcacacataaataaataatcttgggaagtactttatgaccaaataaatggatgaccagaccttccacgtgtgtaatggtacatttacgtcgatgaacggagaggaatcacctttattaaaaaaaaagttatagtagtttatgctgaaaaaaaaaaaaaaaaaaatgaaactacataagtaaaaaaaaaaaaaaagaaataaaagg

SEQ ID NO: 450071 - DNA, 334 bp, Triticum aestivum
tttacacggtcgccctaatgtcacccatgccgtcggtcacactccccaccgtgccgcaggtgaccctgccgcccatgccggccatcgtcgtgcccaaggcggtgctgccgccgatgcccaaggtcaccctccccacagtgacgatggcaccgatgcctgggattgtcgtgcccaaggtgatgctgccgccgttgcccttcgtcccgaatgtgaacgtgcctatgccgatggcggcgccacccccgtcgacgtaggcgcgcccatgtgagagtggcgccaggtcactccgtggtcacgacgcatatatatgttctttacatgcaaagctctgcgt

SEQ ID NO: 450072 - DNA, 170 bp, Triticum aestivum
tgttataggacccgattgcttttcttatctggttgttggggtcctctttgtaaaagacagggaccagtgtgttatttgcagttagttctgggtccgtctgtaaaatgctgtgtacttcatgttcagtgttaatgcagcatcagggtccttctggacccgtcttttgttca

SEQ ID NO: 450073 - DNA, 324 bp, Triticum aestivum
cttgtaacaaagtaagcaccacatccacctcacctcagccacctcgccagagaagaagaagaagaagaagaagaagaagaagaagaagaagaagaagaagagaaggagatcccgtcatgggcaaggggaaggaacctgcaaaggatgcccctaacaagaccaaggcaccgtcaatcagtacccagttgacaaaaccaccgtcgttcaagaagaaccaggtgcagtccaggaataacccgatgctgacttagaagaagaacaggaagctgccgcctaagaataaaaagtgagagtaagcctccaaaggggtgagaccacctgatc

SEQ ID NO: 450074 - DNA, 99 bp, Triticum aestivum
ctttctcgtgggaaaaaaaaaaaaaaaaaaaaaaaaaaaaaaaaaaaaaaaaaaaaaaaaaaaaaaaaaaaaaaaaaaaaaaaaggaaaaaaaataaaa

SEQ ID NO: 450075 - DNA, 92 bp, Triticum aestivum
ttttaaaaaaaaaaaaaaaaaaaaaaaaaaaaaaaaaaaaataaaaaaaaaaaaaaaaaaaaaaaaaaaaaaaaaaaaaaaaaaaaggggcg

SEQ ID NO: 450076 - DNA, 456 bp, Triticum aestivum
tcttgaccgcggccccttggccgagcgattcggggtggacgacgacgggacgctgccccctctgcggctgggaggagagcggggtcaccgtcgccctcatcttcgagcacgcgtcgcgctgccgggagaggcgattcgagatgctgcagcgccaggcggaggagcggattgccggtgagcaagcaaagaaaggtcgccgccatgcgcatatcaagcttcggaagaactagtgtgctggcgcgtcaacgaggaggatcgacccaacaccggagtggaagagttccagaggaccgactgcatgagtagtttaggttttatattagccctgtcccgtaggactttgttgaactcacgtagagttttagcaaaattggcttaggaagccatatactagaacaaaaaatgcagattttactgcacatatgccactatactggaatcattgatgcccataaa

SEQ ID NO: 450077 - DNA, 218 bp, Triticum aestivum
gtttaatatgtcgtcgtcggtcggaggcggagggggaggcggcacggctttggccggaggggacgtcgctggccttctggacaaggccaaggagctggaccagctgcggaaggagcaggacgatgtggtcaccgagatcaataagatccacaagaagatcattttctccccagagatggtggataaatcagtcgatgccatgatggctaggcttcgtg

SEQ ID NO: 450078 - DNA, 79 bp, Triticum aestivum
acagtttgtatggatgttatccaaaaaaaaaaaaaaaaaaaaataaaaaaaaaaaaaaaaaaaaaaaactgaacaaaaa

SEQ ID NO: 450079 - DNA, 404 bp, Triticum aestivum
tttttcgcgttgccgttcctcccgcggccgtcagccgtcgtcttcgccgccccggttttcctcccgtggccgtcagacgccgtcggagccgccctaccccacgccccgccggagccgcccccttcgccgcgggagccgcgggccgctggagccgcccttcgccgccccgccgctcagcttgccggagccgcccgccgccctacgccacgccccgcgggagccgcccccttcgccgtgggagccgcgggccgttggagccgaccttcgccgtcccgccgctcagcttgccggagccgtccgccgcacccccttggccacgggagccgagtgccgccgagccgttcctccacgaccaccacaaccaaggtagggagcgctgctccaaccttctctcctatgactcc

SEQ ID NO: 450080 - DNA, 402 bp, Triticum aestivum
gtgtgctgccaacctccagccaagtccccagatgcactctggggtggcagccattgccggcgcccccaaccccgcgatgcacgtgctgggatcatcgacggggctctggctagacggcggccagcccctcgacgatcacccgcggttccaggtcttcgagcgcttgggggaccatgacagcgagctccagctcccaaagccttcctacgaccatgcctcgcacttcgaccggatgcactgatgatggctccggtccactgggtgcgtgattttgtcacgcgatcgacgccgtttcttcggcctgaaactcggaatgctgaatttactttgctttgacgccgctgcctgcctagaggcctaaggttttggcaatgcctagaataaaggcgcacaacaacagac

SEQ ID NO: 450081 - DNA, 231 bp, Triticum aestivum
catcagaccaaacttatccattcgagaaggaattgaaattatcgtttcaggaggaatgaccatgccacaggtaattgcatcgctagatcccatgccaaggaagagccagagcatccgcctgaatagaataatgacatgagaacgtgtgagtcatcaaaacaatgggtcgcgaatgggtggatgggactccagtgctggtctgtttgtgctgctcgttattacatgtaaaat

SEQ ID NO: 450082 - DNA, 158 bp, Triticum aestivum
ggccggcggaaggcgaggcggcgcgggggacgagtactccaccacgacgtgctgcgaggaagccagcggcgacgcggcggaggccggggcgcccccgctgctgaacctcttcaactgagagactgagtgtaaactgtaattgcgcagttcgtgtgtgg

SEQ ID NO: 450083 - DNA, 210 bp, Triticum aestivum
ccttcttttacggcggccctcagtgatcgaagctggaagaagttcgcgaccatagcgttatgtaactcttgagacttcttattatcacatacaaggagtgcctgtttgtttgcgattcaaataaactcgcgatgcatgagcgcctttatggatctactttaggatcaaatcctatggttatagacatcgtttgttctcctttttggtttc

SEQ ID NO: 450084 - DNA, 278 bp, Triticum aestivum
actatattccatcacgcaattccgatcaatctcttaagcttaattagctttccagagctacaggcgatcgaactcaacctagctagcgagcacctgccatcaaaaaccggccattagtgaaccttcggtcatgaggtcgtcgccatggatggtgttcgcgtcggcagcggttgttctgctcgccttggccgcctcgtcggcggtggtggacgcgtcgccgccgtcgaagtctttggaggtcgggttctacaagcacacgtgcccgcaggccgaggaca

SEQ ID NO: 450085 - DNA, 179 bp, Triticum aestivum
ggatttgccggccaggtcggcgaacgtatgcgccgcggtgcgcgcgggatgcaggatcacctccaccacgtcgccggcggccgtggtcaggtcctgctgcagcagggcgcgcaaggccgcggcgctggccagcggctccatgaacgggaaaaaaaaacgaaacaataagaaagaaaaac

SEQ ID NO: 450086 - DNA, 132 bp, Triticum aestivum
tccacgcgtccgaagaaatccaaggacatggaggagattccagcagctgtcaccgacgctagtgagaacaagaaaaagaagaagagcaaggagaccgaggagacccctgcagccaacaccgacggcgagaag

SEQ ID NO: 450087 - DNA, 153 bp, Triticum aestivum
cttcttaatttttttaataataaagcacggattgggtctccggattcaccgtcaaaaaaaaaaaaaaaaaaaaaaaaaaaaaaaaaaaaaaaaaaaaaaaaaaaaaaaaaaaaaaaaaaaaaaaaaaaaaaaaaaaaaagggggggccgtttt

SEQ ID NO: 450088 - DNA, 210 bp, Triticum aestivum
tttgccgccgccgccgcgtccaagtgcgtctggcagagccgccgccccgaccgcgcccgcaactccctccccggcctcgtcctcgccctctagccgcccaagccaagccaaagccaagctggacgacgcccaccacttgggcttgggcgtacgcatgggctgacgttgcttcttcaattcttcttcatcccctgctctgctctccctagc

SEQ ID NO: 450089 - DNA, 133 bp, Triticum aestivum
tttatcgcgtgggagctagtgctgtttttgagcaaataaggcgcctcaactcaagcaggaaggcgtcttatgttggttcaaagggtaataacaagaaatgaaagaggaatgatgatgatgagaattttccagc

SEQ ID NO: 450090 - DNA, 218 bp, Triticum aestivum
ctttgtactcgccacccggggtcgtcctggcgctcctgctgccggccgagatcgcgctctcgttcgtccgctccctatccgcgctggcgcccttcagcatcctcgccgacgcctgcaccgagctggccgtggccgccgacgtcaaggaggacgtccagctgctggccgagcgcgggcgcccgttcgacggacggagcgcgttcgctgggctctggggc

SEQ ID NO: 450091 - DNA, 143 bp, Triticum aestivum
gttcagtctatcacagccgccgccgccgtcgaggaagaagaagaagaagaagagaggaagctaccggaccaagcccggcgggcgaagatgaagacgatcctggcgtcggagacgatggagatcccggaggaggtgacggtgaa

SEQ ID NO: 450092 - DNA, 88 bp, Triticum aestivum
ttgataattattgctggggatcttgctcaaagtgaactggtcaccaaattatgaatatattgattggcttagcatacaggtcacccaa

SEQ ID NO: 450093 - DNA, 102 bp, Triticum aestivum
tatgctggttaattcaacatcgcttccccaactgtccaccttggaaatagaggtggaagaactgcaagcggatgacattcagatcattgggatgctgcctgc

SEQ ID NO: 450094 - DNA, 120 bp, Triticum aestivum
tactggccgaccccgcggcgatcacgacggtgaccgtggcggccgaagaggaggaggagagcttctacttcgggtggttcgaccagcacccgacgtggcacctgacggcgctatacgtgc

SEQ ID NO: 450095 - DNA, 75 bp, Triticum aestivum
ttgctacagaccaaagtttttgccgctggaccgttgttacatacatcctagcttggaggcaacggtgtgggtggg

SEQ ID NO: 450096 - DNA, 226 bp, Triticum aestivum
cttggttcaaatcccacaccttgttcgtttttgatttgctctcttctttagattttgtttctagatctctgggggcctccaagtcgtccgcccgcgagggggaagcgaggggaagatgggcgccatggggttcgtcgagggcggtatcgactgcatggtcgcctgctgctccacccacccgctcgacctcatcaaggcccggatgcagctgccgggggagtcctcc

SEQ ID NO: 450097 - DNA, 75 bp, Triticum aestivum
gtacttttgggcggacgcgtgggacctatcgccggagcctccaccgaagccaagagaggagcagggccaaaggag

SEQ ID NO: 450098 - DNA, 167 bp, Triticum aestivum
tttattagctggggatactccctggagcacattgcccacaatttgcaatcgcagcgagggcctgggtgatgcattgttagggaacatcatattcacgggcatgttactcctgggagtacgatatatgctcaaattttcttgagacattacacggtagtcgagagatt

SEQ ID NO: 450099 - DNA, 155 bp, Triticum aestivum
tctgtattacaggctgagggtgctatccaggctctgaattgcagcgggatgattttgggcacactgccagtcagggtgagcccttcaaagaccccggtgaagccacgtttaaattgggtggtgtcaaactgactgcttgggctacacactggatt

SEQ ID NO: 450100 - DNA, 393 bp, Triticum aestivum
cttttagttgaatcaggagaagtgaccgatggagaaagacacggtggcgacggcgacggcggcggcggcggcgagggtgtgccggcggtgcaagtcgaagtactcgccgtcgggaaacacgccgcagtcctgcaggttccacccttccttcttcgtctgccgccgccacgacgaccagaagaggtactacgagcttaaggacggcgaccctccctacgccgccaagttctacgactgctgcggcgccgaggaccccgacgccgccggctgcgccaccagctttcacctcttctacgacgaccctgagtaacgaacctggactagtatgcttgcttgttcctctgaagcaaacgcactgttctgttactttgtacagtcagtagaacaaacacc

SEQ ID NO: 450101 - DNA, 338 bp, Triticum aestivum
tttcaacgtgttggaagcggtggctgcggagctccactccctttcgtggatgacagtaagcccggtctacatggaaaggcgcagcgctctccccttccactgtgatatggttctgaggttgaggagacttctccactacgccgatcggcatctctctcagccaacagacaagggagatgttagctagcttagagaggtgattgctaattcacatgattgaaactatagctgtttgttttacacaggtaaaaaacaaggggtagatgccgcttaaacccaagtgcctgtctctgtgtatctagattagggtaggcaggtgaatggtgcgttgatgagcc

SEQ ID NO: 450102 - DNA, 94 bp, Triticum aestivum
ctcatcgcgtgcgaaattattattatatgcatgacaagcattcatcaggatgatacgctactattttctatataccccacacaagttcatatct

SEQ ID NO: 450103 - DNA, 334 bp, Triticum aestivum
ttttttacgcgtgggcggacgcgtgggcgagccgcaccggtgcctggaggtgccccacatcgactaccggcagaactgcatcgcaggtcgccccgaccagcggcccggcgagcagtgcatcgagttcctccaccggccgccggcccagtgtgccgcgcacgggcaatcgtcgccaccgccgatgtactgatacgtggcagacggcaatactgcaatttgtaactgtttgctgcctttgtgccgcgagaaaggataaaaatgtacacatttggtatatactgtaatctttatttttcggaaacaagaaataacaatggattgatagatttgcgtt

SEQ ID NO: 450104 - DNA, 116 bp, Triticum aestivum
ttatttgaagagttgaactttctggaggggtcggtgttagatcgacaggggctagtagcagctatagtggactgtaacagcagcagcaatcagcctttctctagatggaaaatttg

SEQ ID NO: 450105 - DNA, 94 bp, Triticum aestivum
tcgtttacccctgggataggcccttgtgtgaagtgatgactggagcagcgaccgatgatgtgcgcttccttctcaatatacatgagaaaatgac

SEQ ID NO: 450106 - DNA, 224 bp, Triticum aestivum
ttttctcgcccgctccgacgcctccgggcccacccccaccgccaccgcctacgacgagctccgcctccgtggcttcccgcgcggcctactcccggccaacgttcgcgggtacacgctcgacgccggctcgggggacttcgccgtcgacctggactccagctgccgcatcgtgctgccggcggggagctacctcgccaacttcaacgaccacctcaccggccacc

SEQ ID NO: 450107 - DNA, 381 bp, Triticum aestivum
tttttacgcgtccgcgcgatgcacgcgtcgagcgccaaggaggagccgagggaggaggacatgttcttccagaactcccagtactgagcgacgagtgtcagaaatggcaaacgacaccactagacgtatctttatgctgtcatacgtaatggtactaggataggcgtacacacattcgtttatttgctggggggcccatggatgcacagggctgcacagaagggtgccccttccttaacacagcggagtaaagaaaatatttagggctgtagcatacacacaagataggtggttgaagcagttctgctttgccattgtttcacacttgcacacagaagtatgttgttgaattcaaattttagtaatagcagatatttgtca

SEQ ID NO: 450108 - DNA, 234 bp, Triticum aestivum
tgtatcaccatctgagagccagcctacagcatcgatttgccatggtcttcatcttcatcctctgctctcaaatatgtccgagaagccgcggatgacgggcagaacgccatgctgaaaagcctcaagctcgtagggcaaccaagcatctttggcagatattacaacatctcctgaactcatctgtattttttcatgtaaacttctatgctggagagtgatggctacttgttggtt

SEQ ID NO: 450109 - DNA, 87 bp, Triticum aestivum
tgctaatcagagtggtgtcgatcggacatggagcggcttaattctcatcatgggctgcatgtctaactatccgcttagacttattat

SEQ ID NO: 450110 - DNA, 151 bp, Triticum aestivum
cttttcgctcctctcctctcctgccgcactccacggctgcacgcctgcacacgtacaagagaaccccaagcgtcaggccccaagtggactgggctctcccatcggatccaagccgaatatgtcgtcgtctgtctgaagtggagggggaggc

SEQ ID NO: 450111 - DNA, 60 bp, Triticum aestivum
ttttctcgtccgcccacgcgtccgcccacgcgtccgcccacgcgtccgcccacgcgtccg

SEQ ID NO: 450112 - DNA, 309 bp, Triticum aestivum
cttctagccagcttggttcagtggagttctgtctctgacgattcgatttcggtaccgcgacggctccgaaatggagagcgactgccagttcctgctggcgccgccgccgcgcatgtacgccgcgccgggggacgacggcctgttgctgccttgtctagctggttgatccggaccatgtagatcatcaggtcgatcggaccgtcatgtagaatcgtagaacagataggtaggatcccacatgcaagcagccacgaaatctacatgcgagaaatcttcccgccggccggccggcgatctgcttcgtcgact

SEQ ID NO: 450113 - DNA, 247 bp, Triticum aestivum
cctgatgggggagtgcttagcgaaggccatcgagcgccactgaaaacctccctctatctcgtctcggctcgcctaggccactagcccgtccgtccgtccggctgacgatgccgccgatggcgaccacgacggcgacggcgacggcgactgacttcacggggcgccgcttcgccttggcctgcggcgtgctcagccagtacgtcaaggcgtccggcgtccaggaacccggctatcaggcggacggggc

SEQ ID NO: 450114 - DNA, 160 bp, Triticum aestivum
  unsure (1)..(160): unsure at all n locations
tgggtgnatcaccaacgtatcctaaagtctgcagtgtgaattgtgttggagtgctggtcgcactgaaccttaagggcctgtttgatcatacattcaatttgtatagagaaatcatgtgttcttcgtgtggtgcaaccaaactactattactgactaaaaa

SEQ ID NO: 450115 - DNA, 160 bp, Triticum aestivum
ccctcctacgcgtgcggacaagctagtgagagaccagctgtgtaaaaatgtgtaaaagagaaacagctatgagctagtatgaacgttcttaggtgtagcttgagttgttgcaagctttgttgcgtaatttgctgctattggtttttgcagactaaataaa

SEQ ID NO: 450116 - DNA, 115 bp, Triticum aestivum
ccctctcgtccggtggtgatcagacttggggggctaacacagctgagtacacagattaagtaactatttatcttctccaattgaatctctcgtttccaagggtgttccttgtgtg

SEQ ID NO: 450117 - DNA, 189 bp, Triticum aestivum
ctttctcgtacggtactattccgaccatgcataggccacgcgtgaacagctccgagcactgacccatgacacacacacacatacaacgccagggtcttattctgcactgtgcagagagaagagcagagagcagaggatgcgcatagtaatgccacatgaacggtgagggctccttggtgtgagaagatg

SEQ ID NO: 450118 - DNA, 320 bp, Triticum aestivum
accttcgtcatgaattactcgtattagatttttttagatacagatgtacctagacatgagtaataaacaagaacataggagtaacactttttgcttgttgatgaggaaaaggagtagagctcgtgagcagtactactgcaaggatcttggtacgtgctagaccacatcctcaccctttatttcttgtttggacggcttaagacgcgtatacgcatgccgaacgtttattctacataagtcatgcatgttctctgcatgcccatctcgatcaggcgcaaagcacctagcaagtgaggctgctccccgggtcgacgccgaac

SEQ ID NO: 450119 - DNA, 95 bp, Triticum aestivum
ccatcccattgcccgccgggacaccaccacggcaatggcgtcggcgtcgcggatcctgctcgtggccgcgctgctcctggcggagtcggaaatga

SEQ ID NO: 450120 - DNA, 250 bp, Triticum aestivum
ctctgtgtccaacccgtttctctacccctgttttgtattcctttttcatcttataatataggtttgtggaatagtaagtaacctgatgttacctgaagtggataagtatatgtgcagatggttcctgtataagatctgcttcttgcatatcagcttgagttgttcttggctcaagaatggcctagagcagtagatcttcatggcactgaaatcgacgatgttcttattttattaatgctggccagaacat

SEQ ID NO: 450121 - DNA, 167 bp, Triticum aestivum
tataatgacagtgccaagattactctaggggtcagggaatgaattgtccatgcaaaatgcacattgtgtttgttgattaatttgctcccgtcaatcgatcgtcctaaatctcgcaagatggtcatctgatgctcacataaatcaagtgttcgacattatttaaggat

SEQ ID NO: 450122 - DNA, 146 bp, Triticum aestivum
gcctgtagctgttcgagagaggagaaaagggaggcgactcgaggtgcgagttggggctcagcccattcccgggcgctcgccgccggcgttgccggttggagagaagatgggggaggcgcccgcagctgccgtgaacatactagttg

SEQ ID NO: 450123 - DNA, 117 bp, Triticum aestivum
cactttttcttccaacttcctctaattatcgtaaatagataatttcttcacttgcatttactgtacaacaattctacctcgtatttatatgtatacaaataaataattaatttcctt

SEQ ID NO: 450124 - DNA, 174 bp, Triticum aestivum
gatgaagagaggagagacgtgaggggagccacagacaaacccacatgcaaggcgcactcaccagcgcgcaggctacatgggaggaggcatgggacggggcaccgggctgtacatctggggctgcgagtggctctgcgagctgctcatcttgttcgtcgtcttctcctgctagat

SEQ ID NO: 450125 - DNA, 317 bp, Triticum aestivum
cattgaggcaaaagatgttttgctggggaaaactaaaggaggtggttcagccttttgatcatatatcatgcaaaatgtgctcacccaatgaagatactattatttttgcacctccagtctctgcacctagaactagaaggcagacaaaagccttggtgtatcactgaaatttctggagaaagaacattagatgtcttagacgtagcaggttctttgactgtttgacacttccaagaccaaagttgtgctggttaaggaataaatgatgtactacatgaggttggcctgtgttgagttttgcataacatttgttcatc

SEQ ID NO: 450126 - DNA, 180 bp, Triticum aestivum
tcttcatcgtccgcggaccccccttaaacctctcccccttgtaaccattattatcggttcaagaaagttgcttctctttctgcaaaaaaaaaaaaaaaaaaaaaaaaaaaactaaaaaaaaaaaaacaaaaaaaaaaaaaaaaaaaaaaaaaaaaaaaaaaaaaaaaaaaaaaaacaaaa

SEQ ID NO: 450127 - DNA, 113 bp, Triticum aestivum
tttcacctacctgactgaattcaagtgtcatattgtgaagtgatggcagaaggcctctatgggtctatgggtgcacccatccaacaaattaatagagatgggaactgaaacta

SEQ ID NO: 450128 - DNA, 244 bp, Triticum aestivum
ggtgaagttcaaggaagccatggtaaggatgggcgctatcgaagtcaagaccagggacgattttttcaatggtgccgctgttgagatcaggaggaattgtcgcatcgtcaactcatactaaacttgttgatcttatcgcatcatcgctagtttttcaacagtagattgagaataagctcgtgctttctcgggtttccattgatgtttattttgattacttttgtaatgttattattttttccct

SEQ ID NO: 450129 - DNA, 196 bp, Triticum aestivum
atacgcgtccggcgatgaaggacttcaagcgtttctacaccaccgtgaggatcatgaagccacaggtctaggatgagctgctgcggcctggcctcaatcccggaagagttagtcatcttgtttaggctcaccctcccgttgcaatgtacattcaagtgtacagtcagtttctgttaactgtaggttccttgtgtcg

SEQ ID NO: 450130 - DNA, 51 bp, Triticum aestivum
ctcatgcgtccgcggacgcgtgggggatgctctgggtcctttcagaccaat

SEQ ID NO: 450131 - DNA, 233 bp, Triticum aestivum
gatacccaaaccctaccgagctcctcctccccccatcccctcgttgcggcggcgacagagaggagagagagagagagagatggcgaagtctctgcggtccaagcgggagaagcggctgcggacgctccggcgggagatcgcggagcccttctacgacaagaaggaggccgccaagcaggccgcgcaggccgccgccctcgaggcccccaagcttcccgtccgcgtgcacccga

SEQ ID NO: 450132 - DNA, 234 bp, Triticum aestivum
atgtgtatctggtaatatcacggacgcagctcctctgacgtgctgtcagcccactgacatgtgggcccggccccacgcgtcagtgagccaacggcagggtgcagtacggcagaggagccctaatatcactgtactggaacatggttaggtgtttatggtgtgctggaaatgctgcatgttgttggcattgttccatttgagtctcggatgatgtcgcttgttgcttatttgttt

SEQ ID NO: 450133 - DNA, 214 bp, Triticum aestivum
ctactcgtgggcggatatctcggctctcgcatcgatgaagaacgtagcgaaatgcgatacctggtgtgaattgcagaatcccgcgaaccatcgagtctttgaacgcaagttgcgcccgaggccactcggccgagggcacgcctgcctgggtgtcacgcaacctgattgtttgttctcaaaaaaaaaaaaaataaaaaaaaaaaaaaataaaaac

SEQ ID NO: 450134 - DNA, 120 bp, Triticum aestivum
tgataagatgcaatcatcaagccgctcttcaggaggcgatgcctggtggaatgcccggtggcttcccattcccaggaggcatgggtggaatgcctggtggcttccccggaggaatggggg

SEQ ID NO: 450135 - DNA, 243 bp, Triticum aestivum
cacgcgtccgggaagcgtaagaggcgtgtctactgctgttactatgcgatcagggtgatcttgttctgcgttagactaggggtcagtgtgaacctgcagactgctaagtaattatctgtgtaataatgtccgctggcttgaggccataccttgtactctgtcagtggtttgtgtgccgttgcactcgatcgcctttatgccacacatctatcgaatgaaatgcagtagtgacttttcatggtg

SEQ ID NO: 450136 - DNA, 375 bp, Triticum aestivum
cccatgtttccggtaactcttccagggggtccagttccacccagagagcatcatcacccctgaaggcaagaggatcatcctcaactttgcgagatacgtcgaggagtttgagaagcagacctccgaggggaagtagatgattcaggaatcagagcagttagaggaagtagagactattgttgagagatcaggcaggcaggaaggggcctaaaagccaagcagattcagagaggaataagggaacagagctttccgttgccattcgtttggttcattgtaatatatcattgtggatggagatcccgtatgaacttcattcggtcagttatgtgcgtcgtggtgctcttcctcaaataataaatcggtggaagctga

SEQ ID NO: 450137 - DNA, 75 bp, Triticum aestivum
gcgtttttccggatgccaaatttcaatagcgttcactcggagtcggaaacaacgacccaaccagacacaccacac

SEQ ID NO: 450138 - DNA, 412 bp, Triticum aestivum
caggaggcctcagatgaagaagccttcatcaagtagttctggaatggaatccacagacgatgatcatgatgctgacttctctcagcgcaggtccgggcaaagggggtctaggcagcatgcttctaggccagaagcatcacctttggactttggcattcgtccacagtccaaaattgaccccgaacagatacgggctcgtgctaagcaacaggtacaagaccagcgccggctgaagatgaacaagaaactgcagcggctgaaagcgccaaagaagaaaaacctccaggcttcaaagcttagtgttgaaggccgtgggatggtcaagtacttgtaagctagacacccccgacagccttgcgatgcatatgatggtgtgcgctcagcagtgggctgctgaagcagtatcaagcac

SEQ ID NO: 450139 - DNA, 411 bp, Triticum aestivum
acgactatcacccacagcccggatccagatcttgttctagtagcaaccttcttctgcgtcggccgctcacagggaagggaaggactccaccgtcgagccgattttcggagcggatcgttcgtcggtcatcaggcgatggctcgcgcggcgaacgttgacgcgcccgctgccggcgcggcgcagggcggggcgaggaaggcggaggggttggcggcccgggccggcgacggcaggagggtcgaccaggccgtggcgtacctgcttatggccgtcgcgctcggcgtcacctacctcgtgcactgatcggtcgatcggtcgacggacgacagtcggcagctaggagaattcatgttcgtgtggcctcatctttgtgtagatctttagcgaggaaaagaaaagggattctattac

SEQ ID NO: 450140 - DNA, 456 bp, Triticum aestivum
  unsure (1)..(456): unsure at all n locations
agcatatccaatagagaagagagaggcgcaccggccctttccaggccacctggccctcttgccctcgagttcagctcggatgaacgatgatgtgaggaagcagcaagagaagcaaaagggaagaggaggcggaggtggaagcggaggaggaaggctggcgaggatgctgcgggagcacagggccaggctctacatcatccggcgctgcgtcgtcatgctgctctgccaccatgactgatgctcgctccaccgatcgatgtttacctgcgaccctggcccctgctacatcgtctctgcctgctactctgtccggccaccatgtatctaggttaggtattgtggtttcgatcttggttttgcttgtgcaggctcgacagattaactccttggtgtacatataggcaggggatgtaggtagttgttttctgaattctgacggntactctgggtttcgag

SEQ ID NO: 450141 - DNA, 275 bp, Triticum aestivum
gtctatgcgagcacacgccttggccaaagcccattcttttcttttcttccttctttggttcgtgtgtcaaagcattgatttgaagagttgaattttttggaggggttggtgttagatcatcagggggtagtggccacgcgttagtagcagctatagtggattgtagcagcattaaatcgttctgtaatttgaaaatttggagggagaaagaaaaagccaaggtccagtggttggccctaacaaaaaaaaaacataaaaaatcaaaaagataacac

SEQ ID NO: 450142 - DNA, 276 bp, Triticum aestivum
aacctgtcctatgcttaccttgatagtatctgtttgcaccgtcaaattttgctaccttcgttctgtggctgaacctccaggcatgtctgttgaactatttgctatgtgcctgtgttacctggaattcgaatgattgaagtagtcctcgatgtgtgctaaaaaaaaaaaaaaaaaaaaaaaaaaaaaaaaaaaaaaaaaaaaaaaaaaaaaaaaaaaaaaaaaaaaaaaaaaaaaaaaaaaaaaaaaaaaaaaaaaaaaaaaaaaaggagggggggg

SEQ ID NO: 450143 - DNA, 413 bp, Triticum aestivum
ctcgtgttagcagctatggagttcattcacaagggtggggtttggtggttcctcctgctcgcaatggtgttgctggctccggcgacggtaggcgccgagcaggaggatggggccacaaccattaccaccttgcacgtggaggaggaggtcggctcgcgtgccgatgaccatggcaacgacgattgcgacatcaagtgcgcctattaccaagatctggccaggagacagttctgtgtggaccagtgccacagccagcagcatcatcatcctagcagagaagactgcgagttgaaatgtcaacactggcaagacccaacaagaaaggaactatgcgtgcaacagtgcatgagcttcggcctcaacctccatgtgggtggcagcagcagcgtccatgagcgccctcatgccttgga

SEQ ID NO: 450144 - DNA, 442 bp, Triticum aestivum
cccatttgtccgccaagagcgaactgagatcatcctaggaccaggcgcgaccacacaggacaagatgctgctgcttaatccggcgtccgaggcggcggcggcggcgctggacagcatccggcagcagctcctggaggagccaatggcgccggcgcggccggcgtactgccggagcgcgagcttcggcagcctggtggcggaccagtggagcgagtctctcccgttccggcccaacgacgccgacgacatggtcgtctacggtgccctccgcgacgccttctcctgcggctggctccccgacggctccttcgcggccgtcaagcccgagcccctgccctcccccgactcctacgacggctgctgcctcggcagcttcctcgcgtcgccgcccgggctggacgcgccgtgggcggaggaggccgaggtcgcagcgacggcgtca

SEQ ID NO: 450145 - DNA, 114 bp, Triticum aestivum
cccatttttccggcgacgctgtggccttgtcgaggtggcttaatgttcagagcttcagagcatgtagcgagtgccgagtgcgcaattaatatgctaatttggttgcatataaaa

SEQ ID NO: 450146 - DNA, 111 bp, Triticum aestivum
aaattttataaaaaaaaaaaaaaaaaaaaaaaaaaaaaaaaaaaaaaaaaaaaaaaaaaaaaaaaaaaaaaaaaaaaaaaaaaaaaaaaaaaaaaaaggggggggcccttt

SEQ ID NO: 450147 - DNA, 211 bp, Triticum aestivum
cttttatatctgtaaatctgatatacaatgctgggttacagcattttgaggacagaagatgtgtgtagactttgacattgctcagtttgaaaaaaaaaaaaaaaaaaaaaaaaaaaaaaaaaaaaaaaaaaaaaaaaaaaaaaaaaaaaaaaaaaaaaaaaaaaaaaaaaaaaaaaaaaaaaaaaaaaaaaaaagggggggccgttttaaa

SEQ ID NO: 450148 - DNA, 443 bp, Triticum aestivum
ctgtacgcgtgggcggacgcgtgggtttgttgcggttgcagagaggtgcccgagcggcgagctggagagggctctgtcggaggccgaagcctacgcctccaaggtacaagtacgtcataacaaattcgtgtcccctcgtgctctaagggaacatatcaagaatattgaaaaggcagctgctaatgctctaccagacacttcggaggccttgtgtccgcaacatccaaaatcagatgaaaagcgtgacagcatacaactttggtgggctggaaaagagctagctatgcataagaagctatctgactatattggtgttaatgacaaaacaaagattgtcatcaggctaagcctcccaacgagcctttagtgtggtcctgtccgtcattgatatttcctagtactccctgtgtatcaaaatacataacgttttggatactcccttt

SEQ ID NO: 450149 - DNA, 520 bp, Triticum aestivum
  unsure (1)..(520): unsure at all n locations
ccggtttttgatcgtctgcttgtttgtattggtttgcagagagagggatctacatcctgtacgacgacgtcaagtcgtgccagtgcgaggacttgcacgtgctctggtccatcctcgtcgagtcccacggtctcccgccgcccacaccgccggtgctccggctcacgcggtgaccggaacgcgccggacggcggatcgctggcatcggcgcggcgccccccggaataaggaacggccggcgcggtgccgccgtggctggctccatgggaggtgaaccagtaatagtatagtagtagtagcatatgatttctgatgtaaagagcacataggagcagttgtttacagttcatctggccttcgtccggcgcctcttttggagctgctgctgggacgggagagcgaggctgctgcgtttgcggcttctggacgcgtgtggtgatgggctttcttcgagcgcacccctcttttgagtttttgattgattcacgcgtcgntttctgtcgagactgcacttggatgc

SEQ ID NO: 450150 - DNA, 59 bp, Triticum aestivum
tcatgcgtccgcccacgcgtccgcccacgcgtgcgcccacgcgtgcggccacgcgtccg

SEQ ID NO: 450151 - DNA, 252 bp, Triticum aestivum
gtcacagcaaccaacaagctttattcacaaggcacataatatggacatacaatacatcatagaaaaagaatgccgaacaaacaaaagaggccagagccagcaacgcccatcaaaccaccgcctatttctcaaaggaaaaactctctgccctcagccatccaatcagaagcagcagcgatccatctactgcatcatcgccgccgcgagaagggacaccagtgccgaggagaccagggccaaagcggacacgct

SEQ ID NO: 450152 - DNA, 89 bp, Triticum aestivum
gttgtttccctcataatgccctttcttccagagtctaaagagccatgtgtaattctattgccctattgttcccaaattgtcattcttct

SEQ ID NO: 450153 - DNA, 177 bp, Triticum aestivum
ccttttcgtccgcccacgcgtccggttgaaaaaagatgagccacatgaatgcccagtctgctcacaatactttgtgcttaaggtcattggtgatggtggaaatccagatgggcatgatgatgatatgatggtcatcaccactaaggatgcctcgtggttctgaaaataagaatttta

SEQ ID NO: 450154 - DNA, 217 bp, Triticum aestivum
cggacactcatggcgctctgctgtaggagagctgtacgtactatggtcgccgctcgccactcggcacttgtaaaatcgagctgaatgccacagttccatcgcttcttcccttctcattattttctttcgagggatgacacaggacagtgcttacagtcgtgtacgtaattgggtataattctttatgcataataaatgaattattagtttgctctgc

SEQ ID NO: 450155 - DNA, 336 bp, Triticum aestivum
cccacgtgtccgcccacgcgtccgcccacgcgtccgcccacgcgttcgcggacgcgtgggcggacgcgtggggccgaacagctcccctgtcgcctgcccctgctccgccccttctcgtgcccgggctccgctccgctctcggtaattggatggcctcgcctacgacgccgacgaagttcaccggcgcccaggaggaagccgcggcccgccagtcgctcatcgggatctcccagtccatcccggcggcgggagaggccctgagcgtcaagtcgccgaacggtcgtacggaacacgggcaggacgacagcggggcggccgacaagtccaggtcgatgc

SEQ ID NO: 450156 - DNA, 377 bp, Triticum aestivum
aaaattttggtgcaccacgtactgtccagttctagtgccaggttcgagctagcagagcagagagactcacgccatggcgctggccaccccgacagccgtggtgctggagctgatgacgatggggcagcagtccgcggcgcacctcagggagcttctccgggcggcgtccccgccggtgcaggcggagcaccaggcgctcgccgcggagatcctccgctgctgcgaccgggtgatcgccgcggtgagcgcgggcgccaccgataaaaagaggaaggcgacggaccctggcgccacatcctgccatcttcccctcgccatgatgccgtccaaaaaaagggtgcgtggggcggaagcccacagagaggtccatgccgaca

SEQ ID NO: 450157 - DNA, 433 bp, Triticum aestivum
ccgtctacgacgaacgaagaccgacgcgcgaccgacctagggtttcgcgcattcccccgccccgctcccccgtcggcatcgaggtctgctgaatcttgagcaatggagcggtcttttcagttgaatccgcatgccactcctttcgtgcctgccttcaagtctccgtttgcggaaagcttgagaggaaagaaggaccctgagaagcaagtagatgagactgaaaagaatgagactgctgacaagtctgccgggtatcaactcccagagtccctttcttttgatgactatgctgaaagcctaggaaagatcaacatctctactgagtcatcatcaaaaggagaaggtgctgaggcaagtcacgcgggtaaccatctcgccgtggtggaatctctctcgctgatgttcccagatgtgtctgctgacttcattcttg

SEQ ID NO: 450158 - DNA, 417 bp, Triticum aestivum
ccgtgttttaaggtatggattaggcgctgggcttgctgtgggtgcagttgctgggggcgttggggcacttgcgattgatgaaggtgtgaagtataaggaggaaaaggcggcagagagggtgggagagaaggtggctcctgccgcaagggacgattacagcgagtatcgtcgagagtattgatgggagttcatgtgggtgaggatgcgctgtgagtcggttcttctcaactcctgttaatgtgggaataagttgcagtgtgattttgtggtttgctctgtatatgtatatatttgcttgagagacatgaattactatggtgcttgtgcttatggcctgcgcatatttacatatttggtctgtaccataaacgttttgtgattacctttgaagctgtacccgcaacttgatgtctgcat

SEQ ID NO: 450159 - DNA, 422 bp, Triticum aestivum
agctctctatctcgcactcacacagcgagaagcagcagccaggctagctaatcgacaaaggctagcacatcgtgcccgcctgcccggctccggcgggaggaggatcgatggcgttcatgcggtaccgtgcgctgccgcagggggaggtgaccgcggaggagttctgggcgtggctggggcagttcgacgcggaccacgacggccggatcagccgggaggagctgcagcgcgcgctgcggagcctcagcctgtggttcgcgtcctggaaggcgcgggaaggggtgcaggccgcggacgccaaccgcgacggtgccgtcggcagggaggaggccggccggctcttcgcctacgcgcagaggcagctcggcggcaagatcacccagctcggttcctatggatcaaactgggcatgagttgatctg

SEQ ID NO: 450160 - DNA, 136 bp, Triticum aestivum
atttttaaaaaaaaaaaaaaaaaaaaaaaaaaaaaaaaaaaaaaaaaaaaaaaaaaaaaaaaaaaaaaaaaaaaaaaaaaaaaaaaaaaaaaaaaaaaaaaaaaaaaaaaaaaaaaaaaaaaggggggggccgttt

SEQ ID NO: 450161 - DNA, 319 bp, Triticum aestivum
gcttttgggcggcatgggtggcctgcaggctctgatgaagcagatgggtggcaaggacatgagcaaaatgctcgggggcatgggactgggtggtgattaaatctggcaaatataggtagtttcttgtggcataggtggtgtgcttgctgcgctgtggagtttgctatatttatatagatctctaaagatttccatcctgacaaagatacttcccaactcctcaaaaagttatgtgaaatttctctgcaactaacatctgctaggtcatcaaatttacaggtactatggcttttgtgaatttttcgtgtcattgcgttaa

SEQ ID NO: 450162 - DNA, 134 bp, Triticum aestivum
cccatgcgtccgcccacgcgtccgcccacgcgtgcgcccacgcgtccgcccacgcgtccgcggacgcgtgggcttggatcctgtcaagcgatcgacctacagcatcttgaggagaatgtcaaggatgccgtcaa

SEQ ID NO: 450163 - DNA, 435 bp, Triticum aestivum
ctcgctttcgtccggcagcccgaggctgctcaagagcggcagcggcagcgagtggagcgtggtggcgcagaggaacgtcaagtcctcgctgctgctcctgctggccatctccacggtcgtcgccttctccatcctctactcgtcccggagcttgaccgtggccaggacggccggcgaggcgctgacgcagagccctctgctcgccgccctcgacctgagcagcaggatgccagaggatgacgacgatcaaagcgatgagccagcgttccctgcggacgacagcgtgacgcctgagcagagcacacctgcggaggtcgtctccttgccagctgctgctccgagcaccggtgaggcggccatgcagctcgaggagaaatgcgacatttccagggggaaatgggtgcgggagccgaatggcccggtgtacaccaacct

SEQ ID NO: 450164 - DNA, 353 bp, Triticum aestivum
gagcgtctgacgctggttcacgccttccatgcgttactactgagggagggagagcgcatgcatcgcgtgagtaacccggagatgaggatgccccggagatccgcctccctcttcgccctcgccttcttcgccctgctgctctccacttccctggcagggagacagcggccgagcttcattgtagatcgggaggagtctcttggtcagcaaggagaggcccaggacgaagcagctatggcacagcctgtgcactcccggatgctcaaggacgtcaccaccagtgactacggcacctacgacccaaccccgtccatgcagaagccccacttcaagctcatacccaactgatcgaa

SEQ ID NO: 450165 - DNA, 205 bp, Triticum aestivum
cccactcgtccggttaaaagggcagcgtgtgtgttaacttttcatgataaatttactgcctccattttttgggatcaactggtcctcgtgacgatagtccaagaaccaacgattggaatttcttatggtgtgtgtacggcgattcagaaagtaaaactcatgcctaggtggtcaccggtcagtaataagttctttgaattctctg

SEQ ID NO: 450166 - DNA, 405 bp, Triticum aestivum
ctcttctgctaagcattcgctcgccaccgtctcctctctgaatcttctcaacaaccagatggctcgcttcgccgtggtcgccgcaatcatggccctcctcgccgttgccgccgccgcgcagggccccatgccggcgcccaggatggccccgctccccgcaccgccggccagatccccgggcaccgtccctgcgccggtagccaccccgcccaccgccgcgtcgccgtctccgatggcatctccccctgccccgaccaccgacgcgccgaccgacgctccctccgcgatgacgccgtccgcggtctctgccacaccctccggcgcccccatcggcgcccccaccggcacccccgcgagctccgccgtgtactcatcggccgccagcttcgtcgcggtcgccggagc

SEQ ID NO: 450167 - DNA, 431 bp, Triticum aestivum
ggaagtgtatgatgcagcgggagctgaggttgttctcgatgatgatgaggatggcgaaggctggctcgcaacacatgggctgcaaggttgatttctcagtttcagtgctgctttgttttacactgccgactgtatgggctgaactcttttttgtttcttctgttggtaatgtttagcatcagagtcaaaagaggaggaggacataccatctatggatacattggacatagggaaagtcgaagagatcaaatctattccctcgtactttggtgctggtgaaaagccagatgacgaggaggatatacctgatatggacacctatgaagacacaggagatcattccacagctacccctcagccttcatattttgtcgcggaagagccggatgatgacaacattcttctgaccagaacatatgatgtcagcatca

SEQ ID NO: 450168 - DNA, 211 bp, Triticum aestivum
ggcggttctgtgatcccaagtggtcacgtccccggtgatggccggactggatctacgctggagttgagtattggacccgattgtaatcttaatcatcaggatggggtcctcctttttagtttcagggactatgatgtaatttccttttcttttgagtccaggtatgagctctgtactgcatccgctgatagttaatggatgctctggaaaa

SEQ ID NO: 450169 - DNA, 124 bp, Triticum aestivum
gcagttacagaaacttgtgtatcaagttggagcgctctctacaaaggttgtatgcctgacccatgtagttactgctgatgaattaaaagatgatgaagaatatgaggacattatggaggacatg

SEQ ID NO: 450170 - DNA, 66 bp, Triticum aestivum
gtctgtttgtaataaaattgtgaagatgtgaaaatatcaaggactactattctgattgttctcttt

SEQ ID NO: 450171 - DNA, 123 bp, Triticum aestivum
aaaatttttaaaaaaaaaaaaaaaaaaaaaaaaaaaaaaaaaaaaaaaaaaaaaaaaaaaaaaaaaaaaaaaaaaaaaaaaaaaaaaaaaaaaaaaaaaaagggggcggccgttttaaaggac

SEQ ID NO: 450172 - DNA, 292 bp, Triticum aestivum
cccacttttccgctcctcgctgaactcttcctcgtctcatcccaatgcttccaagatgtcggtggattcctctacatcgtcgactccatcaagcaagactcatctgatgttgccaacgacatcatcggtgccatcattgccggtatcatggccaagaaagccatctcagactgcggaccaatcccagccatcatcaacgaaatgatccacggttagatttgattagtatgttcttcatattgtatcaaatacccctcgaaccctatatctaaaatataagtattgaggaagg

SEQ ID NO: 450173 - DNA, 359 bp, Triticum aestivum
ggctttcagtgcacctgaaccactagctacctagctagctacatcggcaagtcggcagagctcgtgatcaatgggggtcaagctcacgctcccgccggcggcactgatctcccaggtggccaagctgagctccctcctcgccctcctcctcctcgcgctgctgctgcccgtcttcctcagggtcgcctacggctacctcctcttcaacggcatcgtcctcgcgctcggcatccaggccttcgtcggcggcggcggcgcttccatcgccgacgacgaagaccggcacgggtctccgagtgccggtcaggccgtcgaggcctcgccgttccagagggctggagctgaatcagtccgtcccg

SEQ ID NO: 450174 - DNA, 228 bp, Triticum aestivum
atttttttcctccacagcctctgaaaaccccagatgatgagaagagaagagaaaaaggaaaaaaatccatggaagctctaggtaggaaccaaataagcaccctccatttccacccatccttttgtttgtgtgccctgtatttttggagtcgccggccggccaatctttcggaaatgcatataggctgagctctgtgatgagatgagatgaggggagctgttcatcatc

SEQ ID NO: 450175 - DNA, 106 bp, Triticum aestivum
ctattctagccaccaccttgagcagctaccaaatcctcagccaagcaagcatggccagcgtgaattggagccgtgcagcggcggcgctcttgctggtagcagcgct

SEQ ID NO: 450176 - DNA, 356 bp, Triticum aestivum
agatatttcaccggccggcagcacacggcaagaaaaggacggcgagcgccaaggagatcaccgagactcgacgcaccatgccgtgcatcccggcgtccagccccagcatccagcaccacaaccacaaccaccaccaccgagtcctagcgggcgttggcgtcggcatggggtgcggcgcggaggcggtcgtggccgcggccgggacggcagggatgaggtgcagggagcacgactgcgaggtcccggcggaggtggcgcggcaccacgagcacgcggagccggggtccggccagtgctgctccgcggtggtgcagcacgtggcggcgcccgcggcggcggtgtggtccgtggtgcgc

SEQ ID NO: 450177 - DNA, 352 bp, Triticum aestivum
tggatgcgtgggcggacgcgtggggttcgactcaacccctctgcgcctctctccgtcgcccctctgtgcggcagcggtggccgagcggagaccgcgatgcctctgccgcactacggcggcatcctctacgtcggcacccaagacggccgacgcccaggcctcgcgcgggaggcgctgctgcgaaggcacggcggccccggcggccggttccgaaggcccgcgagacggggaaaactctctggatcgaaaatgctttttctggttctggaatcatctgtcatcatttaatcgatctaggaacttgtggtcacgatttcttttctttagactactcgaaaaatctagagcctag

SEQ ID NO: 450178 - DNA, 93 bp, Triticum aestivum
cccattcgtccgcccacgcgtccgggcttgtaccttttacttttatttacagctagtaataataacgaaagaatccagcgttttctttgttct

SEQ ID NO: 450179 - DNA, 165 bp, Triticum aestivum
cccacttttccgcccacgcgtccggctagctagtaaccttttgagtgattgagttgtcgttagagcttaagtctgtcaagcttaatctggatcatggaatcgtatgtttattggatacaaagttgcactatcaattttgccttgtctgttgggctgacctgcatc

SEQ ID NO: 450180 - DNA, 300 bp, Triticum aestivum
tgcctttgtagccggtggtgacgttcacttcgctgaccagggccaaggcggagtgacctatagcagagcagtactgtcctactatagtgcagccggtgccaagtggcggcagcgctgccccaatccacaataattgctagtgctactggccggatgtctgttgcatctctggtcaaatctgcatgatttggcttttagtttggaattgcatgtgatgtgcgtgtgttggcgattatgtaaagttctttgggggtgtgatcgtttgaactgtctaccaataaaaaagctctatttacattc

SEQ ID NO: 450181 - DNA, 110 bp, Triticum aestivum
atttttggcccagttgaaatgctttgcaaggacatgattttctggtgggacggtggtatgtgcaccatgaatttactgcaaataatagcaaactggtaatttgtttgtgc

SEQ ID NO: 450182 - DNA, 277 bp, Triticum aestivum
ggaagctatgtcgtcctcctaagaagtgggtaattctataggtcttctcttaattttcatataggttttgcagtagttgcaaataggctggaacttggaactggttatatacatgtatgtccatccagctggtgaacctcttatggaaaacttaattttattcctagttgaacttgttagttaaatgctgttcatatgactggctggttgtcaaattgtttgtgtatttcttgattccgttccttgtgattggtgaatgtatgaactggtgctctct

SEQ ID NO: 450183 - DNA, 359 bp, Triticum aestivum
cattttataaacttcgtgcaacagctcataaatggatcgccagagcttgcgagtcggtggcgccggcgacgcgcaggagttctgctacgtcgggagccggcagctcgaggtcgccggcggggcgttcctgatggaactgctggaggacacgccggcgcccgccgaccaggcaccggaggccgccgacgaccggctgaggcgcgtcatgcggtccctcgaggccgagctcggcgtcgcggcggtgccggcaccctctgcggcggaggacggcgggagcacggcggacgggccgatgagcgactacgacgacggggagctggaggagatgctgtcggagttgggcggtagcctgggggccg

SEQ ID NO: 450184 - DNA, 101 bp, Triticum aestivum
gctgtatagaatgttagtctgctgctgatctagcggatcatgatttggaggagctttgtggtacaacccttgcagactcttacgttgctggagatttcgcc

SEQ ID NO: 450185 - DNA, 131 bp, Triticum aestivum
tttcttctcttctgttgtgtcgtttgtttcagagggttgcgctgtgctgttgtatgattacatctgttttctgtaaccgttgttggtagtgacgctgtggataaaatataagtataactacacttccatat

SEQ ID NO: 450186 - DNA, 83 bp, Triticum aestivum
gagactattgcccctgatttctgtgcattgtttaaggagttttaccatggttcaatcaatatttagagcattgactcttcttt

SEQ ID NO: 450187 - DNA, 53 bp, Triticum aestivum
tcgttcattcgtgcgcccacgcgtccggccacgcgttcgaccacgcgtccgac

SEQ ID NO: 450188 - DNA, 192 bp, Triticum aestivum
gtcgttcgaagggaatatttctcacttggttaatttgtgttcgtcaacgtcgctccaatggcgtctgaccgcctccgggacatcaaggccttcgaggacaccaaggccggcgtgaaaggactcgtcgatgcaggattgaccaccatcccggcaatcttccgccacctgccagacacgataccggtcgacgcg

SEQ ID NO: 450189 - DNA, 414 bp, Triticum aestivum
ctttttcacttctcgtcagcttaactcttcgatctaaggaagacatatccatattaactctagaagcccagcaaaaccgaagtcaaatgcctcttgaaaaacttacgagtttgactctggaagggcccaacagcttgatcagaagctccggattgtcaagctcacaacttatggtttggaaatgctttccgttcgtgagaactttgacgattagcaaatgcagcaatcttgtccgctggccaacaaaggagctcgggtgcttggatggcctccgctatctatgtatccaaaattgtgaaaacctgggggggaacacttcatcgcctgaggaggaaacccttccactgtacctagaggtattaaagatttcagagtgccgcagcgtggtggcactgccttcgaaccttggaaatc

SEQ ID NO: 450190 - DNA, 189 bp, Triticum aestivum
ccctcgcgtccgcccacgcgtccgcccacgcgtccgcccacgcgtccgaaaaaaaaaaaaaaaaaaaaaaaaaaaaaaaaaaaaaaaaaaaaaaaaaaaaaaaaaaaaaaaaaaaaaaaaaaaaagaaaaaaaaaaaaaaaaaaaaaaaaaaaaaaaaaaaaaaaaaaaaaaaaataaaaaaggggggg

SEQ ID NO: 450191 - DNA, 348 bp, Triticum aestivum
gcttgtctggcctgctgatggagatgaggtgattcctggagcggaggaggttgctgctgctgagtagaaaatagaagtcgctattttgctgcttcatatctagaagatgatatatgtgccacctgggtgtcgtgaactttgtagtcagttttgatggctgatttcttgagtacttctgtcgacattcctagccagcgttcagttatcttattttgttcgtgttactttctggatggaggttatgagtttaaaactaaatatttagtttattcctgccgtgtgtgttttatgtttgaatggaacttatgctctgttgttttgctagctgtatctcagtaccaacttttt

SEQ ID NO: 450192 - DNA, 64 bp, Triticum aestivum
ctcttttctgtgctcgtgtccctgccctcgatcggcaatatacaatacatgctggatttgttgc

SEQ ID NO: 450193 - DNA, 197 bp, Triticum aestivum
cccattcgtccgtagcgtttagctgtgctccttccagatcgaagtcgttgtctgtctgtgtaatgtttacctggtactgattcagtcatttggacatggtgtttatgttcgtcgttgactctgtgattggactctgaatgcaaaaaccttttaaacaaaaaaaaaaaaaaaaaaaaaaaaaaaaaaaaaaagaaaaa

SEQ ID NO: 450194 - DNA, 214 bp, Triticum aestivum
ggataggggcctaccatggtggtgacgggtgacggagaattagggttcgacgccggggcgctggtggagcagccgtttgccggggggcgtggcagcagacgcatacaaaagcaaatataagatagagccaaaaggtataaaaaagagaataaaatacacaaaaaaaaaaaagaagaaagccgtaaaagaaaaaggaataccacagaacggtgat

SEQ ID NO: 450195 - DNA, 438 bp, Triticum aestivum
cccatttttccgcccacgcgtccgcccacgcgtccgcccacgcgtccgtgacgacgacgatgatgatggtggcgatgatgataatgatgatggtggcgacgatgatgacgacaatggccgatcccactcggaccacgactgtgactcgggctctgactgtgatggtgatgacgctaactcaaagggcaggaagaagaagccctcagctccagagaagaagggagtcctgggaggtaaccggtaagaagaacgacaagctgcctaaagtgacaatatatatgggcgtgcgagcttccatcgcccttcaagtcattacttgcttcaagatcatgagagcgagcttatctttaaacatgtattagccataaaactctgtacgcgcatgcactttaaagttatgtatctggctatagcctacagacaatgaagtccgcatac

SEQ ID NO: 450196 - DNA, 85 bp, Triticum aestivum
aaatttttaaaaaaaaaaaaaaaaaaaaaaaaaaaaaaaaaaaaaaaaaaaaaaaaaaaaaaaaaaaaaaaaaaaaaaaaaaaaa

SEQ ID NO: 450197 - DNA, 370 bp, Triticum aestivum
gtatttacctccttcccgcgctcttcgaccctgacacgtccacctgttcgaccttggtgtaatttactatggtgcaatttgtaaggatacgttgtagcagtactgtgtataggatgatcgatgagatatgatgctctgttttgttttgaaatgctctgcttcttgcgtgtgatcttcgcagaggcgttgctgcaacttttgccgcaccgcgtacaggcctatcggttcagaaattgcaacaccgcctgttcagagacaagaaaagaggaaattgctgcactggctttctgcgcaataatgtaaaggatacctgaaaatgtttgtattcgagcaataatgcaggcatatgccaatttatcatcatggacaa

SEQ ID NO: 450198 - DNA, 461 bp, Triticum aestivum
cgttttggtgatgggggtggctatcgcggtggtggtggtggcggttaccgtggtggcgggaggggtggaggtggtggcaggcatgacaggtacgatgatggaccgaggcgcaggtacggtggcagcccaccgcggcgcggaaggagccctccagcaagggagaacagcgaggagcgcagggccaagattgagcagtggaaccgtgagcgggatgagaagaagtgatgaaccgcgggtagttttactgcaagcattatttaccttttcattcatgtgtcgttagtttgctcctatgttggtttgctgtcagacattagtgtgtgggtcgatatagtactattgcttggttgagtggcctgtcaagtgcaggattctattagaggcgtacaagctgctatttgtgctcaatattattgccggacctgttcttgtattatctgaaaagtttaccgtgttctgct

SEQ ID NO: 450199 - DNA, 441 bp, Triticum aestivum
gttgttgacgacgatgacgactgccctgctgaccccagtggctttgggacaggtggcggcaccggatctggatccagcgaggcgaataatgatggtgatgcctcctacacaaatgcaaatgcttctggtaatggtggcggcgagggcggaggtaaaaatggtggaaccggcggtggtacatgcagtggaaactgatacggtgacgcaaacccttgaagcctattcgtgcaatcaaaacagagcaagagcccaagctattggcgttcgcttatttctatgtgcatttgttttgctcttacgtttccatgtattagggacaactaataaagggcttcattacataggtgtgtgctatgtaatgcggagactatgtattatctaaatgttgctccaacctttcattccatacttactgtgtcgatgagataacacttaactatc

SEQ ID NO: 450200 - DNA, 200 bp, Triticum aestivum
atgataactaatatagcaaaaagcatactctcacttcattgtataacttcaaatatgtcttattctgtattatatttggacatgtataaaatactaatgctaaaatctataaaggggtagtagtgaagcaataaactaccctcatgttttaaacaacaaatctgttgagagcaccgtttggctattgagcttcttttttt

SEQ ID NO: 450201 - DNA, 453 bp, Triticum aestivum
ttttcgcgtgggtgacgttcgcggatagtctggatggccattcccggacaactttgagtctgccacatacagtatacaccaagagaggtttggtgcaaggatgtgcattggggacattccgaagcatcagtcctgtacgtggctctcacacccgtcgaagacccaagacggcgcgagctgagccatctcacagcaagtaaatgaaccattatacaatagttgtttcccctgttgttgttgtatcgtactgcgactgccatctactcaaaataataatcgtagcccatctcagatacacttctgtacgggccgcgattagtccattggattgttgaaatggatgtttaaggggccacagttccctgctaataaattatatgagttcatgtcagccaaccctgttagacaacgctgcctatgtatgtttgctactctgctgctgctgtattagtc

SEQ ID NO: 450202 - DNA, 93 bp, Triticum aestivum
gcggtgtttggtaatggcaggtcctaattaaacatgatcatgagatagttacgaagaaacaacaccaccagtaaatattttctgagttctttt

SEQ ID NO: 450203 - DNA, 102 bp, Triticum aestivum
tgggatatgattctctgcttgatgcttatcaaatacagagtaaactagtaggtgggaatggctgtaagtgtacattttagaacgcgttggtatagtgctctt

SEQ ID NO: 450204 - DNA, 375 bp, Triticum aestivum
accaatcttaagcaagcaagaagaggaagcggtcggtggatgagcgtgaggtacatgatgagccgggtgggcgcgcgggcggcgcaggccgcgcgggacgccgtctgcaggtccgccggcaaggccgacagggcgcaggcgcaggcgcatcagcagtccatggccagagccggcagggcgccggcggagtctgcacgggcgaaggcgccgatggccaggaaggccgccgatgagcggcggaggcgggcggcccatgaggagtcgctccgcaccgtcatgttactctccatgtggggccccaacgcctagcagcgcgtggattagtaccgatgattatagttagcagtgtgcgtgcgtgcacatggtttacgtgcc

SEQ ID NO: 450205 - DNA, 353 bp, Triticum aestivum
ccttgtatttttccatacggaacgggtcgaacgcgcggggatacttcgtgtggtcgttcctggacgtcttcgagttcctcttcggctaccggctgaggtttggcctgtgcggcgtcgacatgggcgacgcggcgaggaggaggtacaagaggagctcggctcgctggtactccggcttcctcgcgggcggcgagctccggccggctgcttggccccagaagtcctacgtccaatgagaaaacaagagacgctcacatgtggctctccggtctccacgtctttgttttcctcaagctgctctgcaggacgaaaatacctgtaccgggttcacgtgcgcgcgcgcgcacacacac

SEQ ID NO: 450206 - DNA, 202 bp, Triticum aestivum
ggcaccgataaggtggcctccgacgacctggacccggcggcgcgggagagcctggccagcctgtggcgcgtcatgtgcccgaccaccaccggggaggacgacccgctcatcaacccgttcgtggacggtgcgccggggctggacgccctggcgtgccggcgtgtgctggtgtgcatcggcgagggcgacgtgctccgcgacc

SEQ ID NO: 450207 - DNA, 248 bp, Triticum aestivum
gtttctatatgcttctttgtatgttgtaaaatatgctagagatcacgagcaagcttggactaggttgtgggggtggtgtgtaaaatacaattgatttagtttgtattaggtggttgatttaggttttttttttagtttggtggctgatttagttgagccaacatctcatgtgtcaaatgttgaaagttacttcagttcagaatcactataaacctaactgcggctgaaactactccgatcagctcaaa

SEQ ID NO: 450208 - DNA, 192 bp, Triticum aestivum
  unsure (1)..(192): unsure at all n locations
cccacgtgntcgcccacgcgtccggatgtaggttggtggtgtgtagtttaaccggaaataagctccccgattcggggggttgggtcgtgattggatttggtgggaaacgccaccaactaactaatccttcgtggaatgtaagaatcatttgtgacagagataaatacacttgtggtcactgtacttgnggcc

SEQ ID NO: 450209 - DNA, 102 bp, Triticum aestivum
atccatacgaggcgtacacgagcttgatttagagggggtcgggcagagctacaagagtgggaggcggaggggagctggtctacatcaagatattgggaggcg

SEQ ID NO: 450210 - DNA, 238 bp, Triticum aestivum
atttttgccatcatcacaaatccggatccatacaacccacttgtggagagcattgcacgtctgtacctgactgatagagctaagcatgatgaaatagctgctgaatggacattgaggtttgcaagatagggagtcctttgtgtaactaaataagaaaaattgactctgtaaatgaataatcttgtatgtatcctgagatataagttggaaaatgaccaatacattaatctgagttgtg

SEQ ID NO: 450211 - DNA, 443 bp, Triticum aestivum
ggccgttgtatcccaagcgagtcctcgtgttcccgtgcacacacgcctaagctcgaaccatgtcgtcgcagcggatggggcgtcaccagcgccgggcgtctcagagcgtgttcgcgctgccggagaacttcgcggccctcgacgacgtgccggcgtccgacgagcaccggaaggcggacggcggcggcgcgaccgagcagcagcagcagggggcggggcgccaccggcgggccatgtccatggccgtcgcctcctccagggacctcgagatgatcaaggaggacgtcggcggctacagcaactacaagattggcgcctagattagtgccaccggcggcgcgcacggccggcgcggctcagagcacgcacgtgtacggtgttcgtaatacgtgcgtgcgcgcgtgctcggtggcgctctcggcggagctggggcctcgcgcgcg

SEQ ID NO: 450212 - DNA, 68 bp, Triticum aestivum
aaaaattattaaaaaaaaaaaaaaaaaaaaaaaaaaaaaaaaaaaaaaaaaaaaaaaaaaaaaaaaaa

SEQ ID NO: 450213 - DNA, 326 bp, Triticum aestivum
gacttttacggacctggtgcagcggcagaaggaggcgatcaagcagcggaaggccatcaggatgggcctgcagtcggacaaggactggaccggcgacgggttcgtcaaggagaccgagagcatggtctccaactgatgccgcaaccccgcctgatctctcggtctccaactgatgatgcaactcagtctgatctgatcccctcacgacgaccttcctttccaccatacttccttccacttgtgattaaacccggacctataaacgaaacgaaaagaacagtgggaacttttgctgcacctcatcattcaataaagcattgtagtgt

SEQ ID NO: 450214 - DNA, 221 bp, Triticum aestivum
ctcactcgtccgcccacgcgtccgcaagtatgttttcttgtttctttctttcaaagtgcgtgtgttgcagcaactgtttacactttgatggtctcgcacctttgtggctccagccgccacatcagatgtataggtttcagatgaacattactccattattagtatcactctttaaaaatagagcatatactgatgctaaaaaaaaaaaaaactggaagaac

SEQ ID NO: 450215 - DNA, 300 bp, Triticum aestivum
atttttaggcatagcgctgctcctcgtggtggcggaggcacgcggctgcacattctgcaaggacatgccgggcatctcatcccgcggcggtgctgtgcttcgggtggacaatggggtgacagaagggcaagaagcaagcgaaggagttgcgctacaggcagtgccggctgaggggcccaagaagaccacgctcatggctagctgctatcagcagtgcattgcttatatccactacccatatatttttgaatcttgcatgagtcagtgccacccaaccgctggaatcgtcggcgtcttggg

SEQ ID NO: 450216 - DNA, 115 bp, Triticum aestivum
tctatgcgtccgcccacgcgtccgcccacgcgtgcgcccacgcgttcgcggacgcgtggcggccgcgtcctgcccgcccggacgcttccgggccgtgtcgccgtctacggcggcc

SEQ ID NO: 450217 - DNA, 138 bp, Triticum aestivum
ttttccaccagcccactacacacacatgcccgcgatggggatcttgaccggctggacggcgagcggcgcggatggcgactggcgccagggagctctgtggcggagcgcggctgggcgccggcacggcgagcagggcat

SEQ ID NO: 450218 - DNA, 77 bp, Triticum aestivum
gtttagtttttatatgtaggtcatggagacattttgcttattattactattgaaattgaaattgtgccacgcgtcca

SEQ ID NO: 450219 - DNA, 161 bp, Triticum aestivum
ttttgctcttgaaatgtattttccaacatacaccttattttctagttttggaagcttttcggtcacgctttccggtgcaaatttgcaaaacccggtaaaagtagatgtaaaatgtgtgtggattgcagagggctctatgcccatacaaggaataattcctg

SEQ ID NO: 450220 - DNA, 205 bp, Triticum aestivum
ttccacgcgtccgcgcaaattctgcacttcccaccgggattaggattcgattgctctttctaaattgtaacttgtcaattgtcatgttatccaccactgctaccaattcttctttgtatgcttattagtccatgtcctagtactattcaagagctctcttatcatctctaatggacagagtaacatgatgtttgttttttcggcg

SEQ ID NO: 450221 - DNA, 243 bp, Triticum aestivum
tacctccgcgcgcgcgtggcggccgtgtcggagctgcgcgggaaggacgccaaccctctgaaccggctggagcggcgggtgcggtacctgctggagtcggacggggagctcctgctggtgaagaagctgtacagcgtggtgcgggactcggcggacgtggaggtggaggtgagccggttccggccggaggggtgcaagtgggagtcggtgacggagctccccgggagggcggtgtttctgggg

SEQ ID NO: 450222 - DNA, 418 bp, Triticum aestivum
ttaatatttcagctgatcctcttctgtcatcatttggccttagcttcccaacattagatgctgaggaaacatcaaaattgtctactcccgctcagagtgatgtaccagtgctaaaagaggcagctgctcggccgtggcggtcaagtatggactcgtcgctcacaagggaagaaagggagcaagccagcgtgagagcggcatttgtgcaagacttgctgctctccaccctattcagagaccaataactcagaggcgagccgatgttaccgctacccgggtgccccctggaccctgatgcagactccgaaaggtcggtgcccccagaccaagttgccgaatgtgacatccatggaagatagatagggtttggcaccccagcaaggaaggaaggaggtgcatcagagtcgatgtgggcatg

SEQ ID NO: 450223 - DNA, 75 bp, Triticum aestivum
ttgattactgtaatcttgtatgtttctgaacatttggattcgagttcagtaaagtgtctgccaagatttgtttga

SEQ ID NO: 450224 - DNA, 91 bp, Triticum aestivum
gtttgcgtctgcttagctggagccttgttacggtgtgtgtcacagtgtcagttccacctatgatcgatcggtatcctaaccggtttgcgtt

SEQ ID NO: 450225 - DNA, 324 bp, Triticum aestivum
tttacgcgtccgggcgtccctaccaccgccatgacagagatagagctccagtatgctgcaaccttctttgcaaaaatgctaccacccgtccatggcaaggtcttcgtggtgaccggctttgggtacaccctgggtctagatttggccacggcaacgttcgtgatactacagctaccagctggagtgcggtacaattacatgctctcatccgcggagggttccgggatctatcttgtcactgcggaccggtttcagctcagcgtgtggcttcatcggatgacaggtgacaaccatggtgcaggcggttggctcttggtggacacg

SEQ ID NO: 450226 - DNA, 401 bp, Triticum aestivum
caggaataaaattattctaatccacaaacagatcaacatatatcatgcatgtaacaaccagaagcaagagggaggagaaccggagaggaatatagagctgtatgtgcagatgctataagacgatggcacctagggcaggagagtgctggctgtgtgccacgcattgcctcttgaacaactcctgctccgccggcgcagctctccccctcttctctccggcgatgtcgacgccaaacagcctcacgacacggacttgttctccattagctgcctccgccacaggcggagacgccgttgcagcgccgccgtcagcggggcagctcgccatcgtcttgttcttcttgcagtcgatgaagaactgcttcttttgaccgtacgccgagcacgagaacacgatggaa

SEQ ID NO: 450227 - DNA, 73 bp, Triticum aestivum
tagttcttcaacaaattttagtgctccagtcagtgtgaaaacacacgtgcaatattttttttcttctgatcaa

SEQ ID NO: 450228 - DNA, 68 bp, Triticum aestivum
tttatgcgtccggcgatgctctgctatgtgctttggatgactagatgtttgttaaattgcccagttat

SEQ ID NO: 450229 - DNA, 318 bp, Triticum aestivum
atatatgtgtcttgattccaagattcacttgtgctgattgtcagatagtgttggtagattattttgataactttaggccttcattttcttatcttccattgacacaagcacttttatcatgttagtaacgtctgtaaatagcatgattactgcctagctgctatgtgcctattttctctaaaaaaactgagacatgtttgagctgaaaaaaaaaaaaatcttaaaaacaaaaaaaaaaacaaaataaaaaataaaaaaaagcaaatgaaaaaaaaaaaaaaaaaaaaagaataaagaaaaaaaaggggggggccgttt

SEQ ID NO: 450230 - DNA, 65 bp, Triticum aestivum
cttcgtcatcgcgtccgcccacgcgtccgcccacggggccgtttacgcgtccgcccacgcgttcg

SEQ ID NO: 450231 - DNA, 51 bp, Triticum aestivum
tctttcacgcgtccgcccacgcgtccgcccacgcgtccgcccacgcgtccg

SEQ ID NO: 450232 - DNA, 182 bp, Triticum aestivum
ttgttgcgcttgtgtattggttatttgctgggcattatgccttgatattaaagatttccgcccagtacaaaaaaaaaaaaaaaaaaaaaaaaaaaaaaaaaaaaaaaaaaaaaaaaaaaaaaaaaaaaaaaaaaaaaaaaaaaaaaaaaaaaaaaaaaaaaaaaagggggggccgttttaaa

SEQ ID NO: 450233 - DNA, 51 bp, Triticum aestivum
cctacgcgtccgtatcgatatatgtctatgctgaatgcggcatgcttcaac

SEQ ID NO: 450234 - DNA, 229 bp, Triticum aestivum
ttttgcaggtgctcttgtccctccaggccttcacactcagggtccagaagaaggattgaagcagcgcatgaacgtgttattattttgcaattcttatttggtgttttgtgctgcgagtgttgtataatatgccttatttgatgacatttttacttcacattcaggtaatgtgttgtcagcagactgaaatctgtaataaatctgctgctctactgtttgtggagtgttt

SEQ ID NO: 450235 - DNA, 407 bp, Triticum aestivum
tgtctgttggcgccaaaccgggcggggtcatcgtggagagccgtggagctcatcttcctgtacttgggatgtaacattgagctaaggtctgagggtacgtagctgcctgcctgttggtgaaataaatggccagcttgtgttcttgtgagcagaagaaagaatgctagctgctcatctcatctggcttgcttcaagtcatggtattcagttattttttggaaaatgatattccatgtgcctgcttactggagcacacggcgtcgatcatggccaaattaatgcagtgaagttccaagatgtcatcatcaccagagacagaaggagaggagcagcattcactgcactctacaccatgcatcgagcagctcaagatgctcttcaaatgatgagcgcttcttcgccatcga

SEQ ID NO: 450236 - DNA, 166 bp, Triticum aestivum
tcgtccacgcgtccgcccacgcgtccgcgcaacgcagagtccagtagccgagagcaaagcaagcatcagagagcgagagaaaagcaagggttgcatcgggagaggagaaaggagaagcgggccaggatgtgtggcggagcgatcctcgccgagctcatcccggggg

SEQ ID NO: 450237 - DNA, 332 bp, Triticum aestivum
tcgtttgaagacggccacgccgccgacacgatggtgcagagatagtcctcaactctgaaccgaaagaaaaaaaaaggttgccgattgcttctgtttcatgtttttatgtatttatagaagaaaagaaagggaacacgacgatttgtagaacagaattggtgttgtacataggagcagagcaacatctgctatattagttacaggggagagatgtccactgtgattctgaatcgagcatttggaacctaggtgatgaattgctttgttggtactagcaaacaatgtgtttgatgatttttgattcatttaattcaatttggcctggtctttac

SEQ ID NO: 450238 - DNA, 322 bp, Triticum aestivum
gctggcgggcggggcggcatcggcgcccatcgtggtagcggcgccgcctatgccggcgtggacgtcgatggactcgatgtactcggtgtcgccgccgccgagcagcgtcccgatgccgacgtcactgctgctggccgccggcgccgggcggaagaagatgccgaccccgtgcgccgtgcaggtggctggcgggggcgtggacgtcggcgccaccgacgagctccgccgcctgctccggctctagccaccgctgctgttgctgtgtgatgggccgatggcaaggcgagggagctgcggatggatgtagcccgtttatatggat

SEQ ID NO: 450239 - DNA, 395 bp, Triticum aestivum
tgtatgaaacagcaggatttgaattataatcagttacaggcaactggcacgattgatcctagtaggattcagcagggaattcaagctgctcaagagcgttcttggaaaagttgactgcaggtggatgaatgatgtgtcagccaagactcagtctcaggaatgagctccagcaaagcctgccgcttccgtctgactttttttgccttcgagcggatggccatgttgactcttgcggtcattgtaactctgaatttagcttagattagtgcctagattgtagatcctatgtgtgtaaaatgtttgcagtctaggccttgtatcgctgtaacattgccgattagaatggcagctgtgtatcgctgtaacattccgtgtttttatttaccttttttatg

SEQ ID NO: 450240 - DNA, 265 bp, Triticum aestivum
tctctgaggtggaggagaaggagtcgggcaaggcggaggagccggagcacgagcagtacgacaaggacgagctgtagttgctgatggtcttgtcatcgcccatttagctctcactagaagtgttggactggaaatgtgatggtttcgagggacgtccatttttaccgcgcgaaaacgcatatcatcgtgatacgaggtttttgtcagtgtaatgtactgtacctagttttgtttttaaaaagttaaatgataccctagctagttc

SEQ ID NO: 450241 - DNA, 97 bp, Triticum aestivum
cttttgcgtgcgctcctcctctccaacctcgtctgcaacgtaccaacagtgctgctgatggggaacgaggtggcgaccgcggcggctctgatctccc

SEQ ID NO: 450242 - DNA, 221 bp, Triticum aestivum
ttctagcgagccaacacgcatacggaacggggctcgtctccccctccgttccctccccccgccttatcctctccggaccggagcgagcgagcgccccaccgctccctgctccccccttcctcccgatggcgtccctcaccaccaccaccgcctcctcgccggccgccctgcccgcggcggcctccgccgccccggccacggcctcgtccgtctcgcccacc

SEQ ID NO: 450243 - DNA, 238 bp, Triticum aestivum
tatcttacacgaggagagctacgccgcgctagcatgctaatgctacaagtcaagtggccatctaacagaccgagagatggcaaaggccttctctcgtattcttttttcccctttttttgaccatgtgtaaatttgctgcctctttttcatgtatttttgagcgatgaaagggcaattgaacccaaaaatatggtggacaagtgattaatgaatcaaggagattcatcatttttttgtc

SEQ ID NO: 450244 - DNA, 63 bp, Triticum aestivum
ttgtgactgatcgttttggcatgccaatgcaagcataatcggtcccaaggaaactagctgacc

SEQ ID NO: 450245 - DNA, 301 bp, Triticum aestivum
acgtgaactactaccaggaggagtccttctacagcaccaccgagatgagctcctcccccttcatccgagccgaatgagaccgtcgccccctgcccctgccgaaggccagttcctactaatgatgcaccattttttccgccagtcggttccgtacaaaaaatcattcattgattgttggtctgtaaaaaggttaatctgcaggttttttcttcttctgatggatgggatgttttccatgtttgtgccatgcttcttgagacagatagagatggagcatgatttatctgttggtgtgtatcta

SEQ ID NO: 450246 - DNA, 142 bp, Triticum aestivum
tttgttcagaagttactttctggcatcttatttagtgctgccgttaatatggtcactactatattattggctgggcatatttattagactaatacactaggcaatcattgctgtaggaccttaacctaatgtataatatcag

SEQ ID NO: 450247 - DNA, 195 bp, Triticum aestivum
gatggttctaggctgtaaatttgaaatctgggttcgggtgcacctgtgatccggtgcacccttgtgtgtgcgtgagaaactgtggcgacgatcgcgttgtactaagcttatgtatttgtgtaactgaattggggtaattgaatcttcattttagcaaaaaaaaaaaaaaaattaaaaaaaaaaatagaacagatg

SEQ ID NO: 450248 - DNA, 264 bp, Triticum aestivum
tcgtccacgcgtccgggcctggcggcgactgaggaggtgctacgcgccgccacctccacctcgacgcgccgccagatctccacctcgacgcgccaccggtcatctgcatccacgcgccaccggaaactccgccttgaacttcggtttttgtggtgtttccctccagtttgtcatgaaccacagaaggacgcacaggagcagcatctggcattcagagcctgacaggtttcatggttgcacacaagcgatgggtcaaaggagcct

SEQ ID NO: 450249 - DNA, 141 bp, Triticum aestivum
gtgagagtttcttaaaggtgaaaaaaaaggagaggaaggtgaaagattgcgatggggcagccacgacgaagaaacagtgcgatgataacgttgttgttgtagcggtggttggcggtggagaggagatgaggaggatggggt

SEQ ID NO: 450250 - DNA, 128 bp, Triticum aestivum
tgtatattttgttaggatcatgtacaccaatctgattgataaagattcggttagatctctctctttcttgattcccaaatatgtaaacctaccaaccttgtattcttggcctacatggctttgcccct

SEQ ID NO: 450251 - DNA, 93 bp, Triticum aestivum
gcgtccggtcagctgcgcaaacctcaagtacgtgttcttgcacgacatcatcattctagcgaatacgacgtacgttagcgtcgtgacggtgca

SEQ ID NO: 450252 - DNA, 295 bp, Triticum aestivum
ctcgtgggcgctcgtcgcggacgtcccgtgccctgaccgcgccgtggtgctccaagtgcaccacctccccgccgtaccgccgtgcggggcgttcgcgtgggcgccgtcgctcctgacgctccaggaccgtctcaccgaggagggaaagcgcacggacaggcgcaatccctgcgggctactcaaggacatccacgcgctcgtgaagtgcgcgcagaggctcgccgctgtgtgcagcgccatgaaggacggtctggagccgttggaaaggcacgtcccggagggtttccaccgtatt

SEQ ID NO: 450253 - DNA, 261 bp, Triticum aestivum
gtccgcccacgcgtccgtgtactgagtctactgtaccagggcagtcccttctccctcccctcccctccgttcgctcgccgtcacgtccccggccgacccctcgccgccggaccgcatctcctgccctaacctaccacctgcagatccgcgcgctccccgaccagcgtcggcgggaactttcctgcgagcttgatccatccagtggccggcgacagcgaccgaccgccgcgcggatcgatccagcgaccaacctggagcacg

SEQ ID NO: 450254 - DNA, 275 bp, Triticum aestivum
gcgtccgaaaaatctacacaaagatgcggaggattatcctgcccttatcccccacctcccgtttctgctcccgttcccaccccaatcccctccaagaaaccctcgcccccctcgcctcgccgccatgggcagcgccgcctcgccgccgcgggccctcgacgcggcgacgcaggaggacctcaagcgcgtctccgtgcaccgcgccgtcgacatggtggagtccggcatgacgctggggctcggcaccggctccacggtcgcgcacgcgctcgacc

SEQ ID NO: 450255 - DNA, 301 bp, Triticum aestivum
ctcccgatcctgtcctgcggctcaccccctcctctcccctgaaccaaggacgacggagatccagtcctcaccccacgcgggaacccttcctcccacccaccgccgacctcgccgtcctcctcacccaccgcccacctagtccctccctcccctgaccatctctccctaccctctgcctgcttcccctgcctcatccccagatccaatcgacacaaccccgctgcccccgcaccccgtactgtccaccatggccgactgctcctcctccccgcaccaacccatcaccccgtcgtgggggcgc

SEQ ID NO: 450256 - DNA, 407 bp, Triticum aestivum
tttctcaggttattgggtcaatgttaggccccgggcggcgatttcatatgagcgaaatatgaaatcaataggtactctattttcctttaacattagtttctgtgactggttcatgtgtgctgagctcctgtatgtgaacatatatgcaaaccatgtgtattagtttctattactactatgttaatgatggcagtttagatatccctgtgttagataattatcatatctagaagatgatcaaattttcttgattcatttgtagctcattgttggattatgctgctgctgctggagatggacatgctgttaaatattttcctggagcttgaaatccttgaagtgcttaccatgtttttttttgaaatggaagtgcttaccatgtactctcttttataaactaaatacct

SEQ ID NO: 450257 - DNA, 393 bp, Triticum aestivum
tgtagaggcgagacgcgaccgaaagaggagagagccatcttccatgggtggttggcgtcatgcgcaccgccgcgaaggtcggcctcgctgggggcgccgcggcggcggcgggacgcttccgcaacgtcgccccgtccttcgccacggcccccgccgccgaggccgccgcggcggcgccgctgctgtccgcggccggggagatccccgcggtggcgccggccgggtcgcagtgggcgtcctgggaggtggacgactgggagttcgcggactggaggtccgagtcggcgtccgaggcggacgtggcggtggtcggggggccgaggctggtgttcgccccgccgtcgcgggaggaggccgaggaggccaccgccgagctccgggaagctattgaca

SEQ ID NO: 450258 - DNA, 424 bp, Triticum aestivum
cacgcgtccggacggttgggaattcaaggccgcgccctcctctgatgccggccaggatggagccggacaagcggacggaggtggaattgagggtatgccaaaatcattgggcagcgaccagaaagattggtcactatttactggtgtcaataatgaactgaacctccagactacagatcatgtcagaaatcatgagtccacaggacaaagtgtgaagaccttcagctattctccagataatagttcatccatactcaacttgtacaaagaatctaaatttgtcgatgctgttcacgttcctcaaagttgttccgaaagtgtagtcagctcttctgatatgttctctagcaatgaagtgatgaaaaccattccattaaatcaggaagcgacaatattttggttgatttctaccataagctgagag

SEQ ID NO: 450259 - DNA, 382 bp, Triticum aestivum
tttttcacccgcgccatctcctggcgccgctgaccgcctcctcccggcgcgcctccgccccaccttgccttctcctggcgagtccttgccccgactccccccaatgaactgcccccgcctcctcctagcgtcgccgcccctgcatcctcctggcccgcagctgatctcgcctctttccgacgagagtccaacccgcaactattcgtcgcgctgccttttccatgtcggccgcctccttctcccccctccactacgcgccactgccgtcgcccatgcgcggcctcgatccggtgccgtcgcccaccactaccaagaccccggcccatcgccgcccaccagcacaatgcccctctgcgcacgaatccgaccttccctctgctcc

SEQ ID NO: 450260 - DNA, 407 bp, Triticum aestivum
ttgtttcgcgtgggggaagcgcaggtgcctccctctgtcttcctctgcgactcggctgcttcttgacttgcaggacgaggtcggacgacttgggttgcattggttttggcaagaaggaaggaagaagatggtcatgaggccgctgtggcacgcggcgccgcctatctagtctctgccccttacgtacctccgtgatcacagcagcttcatgcctcggtgaggtccctaatttgtaggaccaagctatgattctttcttacctatgtctgcaagctgttcgatgaaaatacaagcgagctacaaggaaagattcatctatgtaatatccaagctttgttgtctgcttaataactttttctgagatttagttacattcaacgatgacttgcatgtactacattataata

SEQ ID NO: 450261 - DNA, 360 bp, Triticum aestivum
ttacactaagattatcaggaaaggattcagaggtttttcttaatccatattaccactcatgacgcaaaattaacaaccacgagtttgaaatacggataatggtgcttattatgtgctagaaatcaaatatgaaaaggagaagataatgtttgcgaaggagaggggagagacatacaggttgattctgggtaaactttgcttaatttgttggagaaaatgctcgatagatctcatggatggacgaggttgtggcactagttctcggctgcaatatctatcttgatcgattagggcacattagaagcggaagaagaggaaacatttggggtgtgtatggcattgaacattgagtgcttctgt

SEQ ID NO: 450262 - DNA, 351 bp, Triticum aestivum
tcttttcggagggtcggccggcgaagccgcgccggaccccatgatggcggtggccgggcggatctgacgcactgctcggcggggcgcctcgtcaagcttcggctcccctgccggccgccctctgccagccgtgccctgcgccagcacgtccccggcggcctcgtacaccccagcccccgcctgacctcccttccaccggccgctgcgagctcctgccgccggcaaggtgcctccgccttcccccgtctccgcgtcagatctgtctgtcctgccgccggcatcctctctgctgacggcgccggacccgggattggggatggcgtgctcctttgctggtgtcgggcagtcctt

SEQ ID NO: 450263 - DNA, 385 bp, Triticum aestivum
ccggccaccataggctcgcctcgccggcttgtttccaagagctttgagaaggttcgcgcttcttggggcttacttcctgggtcttgctgccgtgccgtcctccattccttgcttctcttctctcgtcgatttcttcgcctggactttcctctctccacctcggtgatttgcggcggagcggatcgagagcaggagtgaacaggggcgcataagcatcgtcattcaacccaagggtgtagagagctagctaactcgaggaatggatcgccggagctggccgtggcgccgcaagtccatctcggacaaggcccccgcccccaccgaaaccgacagctccgcctcctgcccatccgagactttaactgatgaacaggataccaccctc

SEQ ID NO: 450264 - DNA, 348 bp, Triticum aestivum
ttcctctcaagctcctcgcttgctcgcctccctttttgaccggttggcagctgctggagcccgaaaatccaagaaaagcagcgggtcaagaaagagggaaagcaagcgaggagggtgatgatgatggctataagtcgccccatgattcaccgtatcatcccgtcgcctgcgcgcctctgctaaaagggcctcgccgtccgtgtacgctccagtgagcggtggaagagcgtgcggttgcttcgcgcagacggtcggacgccgccgctgcaatgccgcagtaccaggagctgccctgcggcgggcaggtgctcgacatcaacgccgcgctcaaggatggcatcctggggt

SEQ ID NO: 450265 - DNA, 384 bp, Triticum aestivum
  unsure (1)..(384): unsure at all n locations
ctcaccaacctcctaccagccggcgaggttgtttctctcagtgccggagcttcacgacgcggntctcttatctgttcggggtcatccatccgacccccggatccgccgcaaagacggtgcctttctggttgttctcggcactatccatggatgagggtttagcgcgacggcagtgaggtcagcgtgtggagttcctgggttgaattgttgcagcgagaggctttgggaaagggcgcacggcggcgagatgcggggttccgagatgcggaggcgggcaccagagtaccggcggcagtcgcggcggcggctgccgggatggatctggtggctcgctgggatcttccttgtggttgggctcatgctcttcgttctgcaccacaacca

SEQ ID NO: 450266 - DNA, 445 bp, Triticum aestivum
ctgttgctggcagcacaactaaagattgtgagtttcctgctctccagttgaagagaccaccaaagcctgctagccgaaaagatgaacggcaagtgagcgtagcggaacagactaatggccgaaccaatgcagctctcagtcaaggacctgtagctgaaaatgaatctgagaaggtgagcaaaaatatgagtagtgaaactgctgatgggaagccctttctacagatcgggagcaacatggtgccagttactgttggaaatgagactaaagaagctgctcaaaccgtacaacagtttgtagtatatgtgggatttgagcatgagtgctcgtacggtcaccgtttcttactgtcagagaagtatctcaaggagattgattatggaagatcttatcaaaacaatgaagcagaaagtaagcacagttcacaaaagttgcccccaaatgc

SEQ ID NO: 450267 - DNA, 278 bp, Triticum aestivum
tgtctttcacgcgtccggcggcccagggcccaagattgaggtggtcgactaattgatagatttagatcgcctactattctgcttgaataatgtgtctctcattgtacggtggattctattatcgttctgcagtttttcgttcgggcatatatacattgccccatcttatgtttaagttgatattgaaacatgattatttagtactagaagacagtatacttggttatctgcagttatttcacatttatttatctttgattgaatgtctggttgctcaa

SEQ ID NO: 450268 - DNA, 409 bp, Triticum aestivum
tcttcacgcgtccggttttgcatatacttatataggtagtgtgcttagcttgtgagcagaagatacaccacgatggctccaccggcgaaactgacccagtatacccagctgatcctactcctccttgcagcagcagtagctagtgatcacttgaccctgcagcaggctgcggctgccgccgatgaattacaaggccgaccgcagcaggggctggggcgtccgggttgccgggacaagtgcggcgacatgagcatcccgttccccttcggcatggacaagcccggctgcttcctacccggcttcgaggtcacctgcaacacctactgcactccgcctcgcgccttccttgcctacaaccacagggagccaccataccaggagatttaccagtatgcattcggcactgaga

SEQ ID NO: 450269 - DNA, 60 bp, Triticum aestivum
ttttctttgtatccaatgagcttatagcaatttgagtattcccaacttttttcctctcct

SEQ ID NO: 450270 - DNA, 332 bp, Triticum aestivum
ttttcacgcgtccgcccacgcgtccgagcactgctatctgcttcgaggagcccgtgttcaccagcggcgatgcaaagtattcgacgagcctgcgtaccggcggcaagtcgggccgcaggaccggggacaagtttgctcggggcatcaaagaacatcttaagtcctccttcagtccttctctagtccatctggataaatctttgtagctctggttgtgaattagacactgaacatatgtttctgcagtgactctcggcccaaagctgtacgagaccgtgaggggaaagctgtcgctgggcgccagaatcctccaggccggcggcgtggagaaa

SEQ ID NO: 450271 - DNA, 60 bp, Triticum aestivum
cacgcgtccgaaaaaaaaaaaaaaaaaaagaattaaaaaaaaaaaaaaaaaaaatataac

SEQ ID NO: 450272 - DNA, 422 bp, Triticum aestivum
cccacgcgtccgattatatcctctgcaccggtgctgatctgaatttcccctttcctcctcctcttcttcttcttgttcttcttcttcttgatcctcgtcgctcgcagctcgcagttgagctgccggagatgtcgttctcctccttgtccaaggccagattcgagggtaaaggaggcggagccgggagatccatatcgctgcccgcctccagggccaagctcgccgcagccaccaagaaagctactactactagtacagccggaggcgggcggggcaagggcaaggcggccaagaaggtcttctccctcaccggccagaagttcgaaacaccagatgagagggagcccctgaggatcttctatgaatcgctctccaaccagatcccatccagcgacatggccgaattctggctaatggagcac

SEQ ID NO: 450273 - DNA, 315 bp, Triticum aestivum
gcttgtttttttctcacctcttcttgttttactgaccagtctctgatgttcgcaggccactacccacaagcattcgcatctggctgctcaattcggtgttcttcgtgaaagcaattgctcaccactctgctgcaatccaatttcttgtcctttcctgcgcaccaatttccccatttttgcgcggaaaggttcaggcggccttcgatcgatttgatgttcttgcccaagcgctgaatttcttggggtttctgaggctttagaagcttgttagatcgacggagatgcacctagctctcagctccgatcactcagctg

SEQ ID NO: 450274 - DNA, 289 bp, Triticum aestivum
tgggcggagccgccggtgtccccggaggtgggggtggcttcggcagagggggtcatgcgaggatggccgctggggcgaggaggcggagccgatgaccccggcggtggcagcgacagagggggtcggcgatgatggtcgatggggcgaggaggctgagccgatgaccccggcggcggcggaggggtcccaggggctcgaggaccgacgtctgatgcagtcgtggttcctcgtcgtcaagagctagatcgagcgcccgacggtgtagccgtccagaggaagaggaagaaca

SEQ ID NO: 450275 - DNA, 302 bp, Triticum aestivum
tcgtcggtcggttcctgccctgcctgcgacgccacctctcgccgaccccggcgtcgctccgccgctcgcccacatctgccagccgactcgcgcgcgccggccgaaaagggtatcccatcatggatgcagcaaaggacacaaacccgtcatgtaaactccacacaagactgagactctgggagtttgcagaccggtatatattcgaaccaattgatggtcttgctgacttatatttgacagctagcccggccagtggatcaatgaattcagctgaagagttggcaccacgtagcccctccata

SEQ ID NO: 450276 - DNA, 355 bp, Triticum aestivum
ttgttcgacgagcagcagcagtgcgtcaaggtccagttcgaggtggacgagccctcgtcctccgtcgactgcatgatcggggccctcacgcgcctcaagagcatgaatgtcaagaccagggggatccactccatcttgtccggccagcggttgacgacggagatgaatgtcgaaaccacgattgcggcctgcgaggtagaaaaggcagtggaggaggctctccaggaagtagagaggaatcagctgcctgacagcgaggccccgtttcccggaagcaggaccgcctggcctcaaacatcacacgtgcaaaatgtgtgctgagaggtttctaaccacaagagtcatgagacccatc

SEQ ID NO: 450277 - DNA, 332 bp, Triticum aestivum
tcttcttcccgaggcaccatgaggtcgtcgtcgatggcgaccgcgatactatccatcgccgccgttgtcctcctcctcgccgtccaggacagccatggcgcgaaactgtgcatggactcgacgttcccgagggcggtcaacggatccctttccttctgcggctacaacggcactgcttgctgcaacacgacggacgacgccgctgtccggaggcagtttgccgcaatgaacatctcaggcacgccgtgcggcgacctcgtcaagtccatcctttgcgcgagatgcaacccgtacgccggcgagctcttcaccgtcgggacaagccctcggac

SEQ ID NO: 450278 - DNA, 290 bp, Triticum aestivum
ggccattgccagagagacccagcaaccgggaaccatgagaggccatagccaagttcttgcaagagaggaaagaaatcgaagaggcagagaaacagagggaggcagagatgggaagaagaagaagcccggctctgccgctgctggtgatcttcggcatcctcgccggcgtcctcgcagctcttcctcccctcgccgaatccaggagcaggcaccaccaccaccaccaccaaggtcacgggcaccactcccgtgtgcaaagcagatggcacggaggagagggagagcagtcg

SEQ ID NO: 450279 - DNA, 85 bp, Triticum aestivum
ttcatatcgtgcggtgcagacgcctgctcctggggggccgccgtcgacgcactctccagagaccgcaggcatgggcgtcttgacc

SEQ ID NO: 450280 - DNA, 246 bp, Triticum aestivum
gctccacgcgtccgcccacgcgtccggcttggtggtctatccactcctgcggctcccgtgccgctgcgccctcgcggcggcgccgcgggccgccgcggcgtcggtggtgtcgctgtgggcctcggcctcggtggcggacggtggggacggggagctgactgcgcgggagaggcgggagaggctgagggaggcgcgggagctgaaggcgcgggactggaaggaggaggtggaggagcggctcatcca

SEQ ID NO: 450281 - DNA, 290 bp, Triticum aestivum
tttttacgctccagcacctctcaacctcaagtgggggccactaccaacaacaccacgagaacacacatgaccttcagcgtctcgccggcgatggagggggggcaagggcacgagtacatgatccgcttcgacagccacttcgacgacccgtcgccgagcaccgccaccgccgagccgtcgccgtttgccggaaggtcgatctcgccggagcaggagcacggcgccatggtcgccgcgctgctgcacgtcatctccgggtacaccacgcctgcaccggacttcttcttccc

SEQ ID NO: 450282 - DNA, 235 bp, Triticum aestivum
tctttcgcgtccgcggacgcgtgggcgaatgcacgtgctgttctatcgcgtcgtacgtcagctgaggaagcttctgtgggccagctttgcgggtgcatacttgcgtatatggactgtgcggcggcggcggcggcgatctaccggctgccggaggagtgcgtggcgcacgcgatcgcgatgactacgccgggggacgcgctcagctcctccgccgtgtccccggcgttccgggccg

SEQ ID NO: 450283 - DNA, 204 bp, Triticum aestivum
tttttcgcgtccgcccacgcgtccgccaagatgcgcataccttgttacttgttgttggctaccaaagtcaacccaaggatgaagcagatcgctgccgatatcgagagggtcctcaagggcatcgtggccaagagagagaatgccatgagagccggcgaggccacgagcgacgaccttctcggtgtgctgctcgagtccaacatg

SEQ ID NO: 450284 - DNA, 353 bp, Triticum aestivum
ttgttttattagttgattggcatatatggatctctccatgtttattagttgatctccaacccctactctgctgtggtgttgtgggagcaagaagagcatgcatgctttctctctacatctagggtccatacggccagattgacgggcctaaactctggcttcactcggatttatgtgaatataagcgtaagaggtctagtggcaatgctacaaaatcattgcaggcgtgagtatccggattgcactactgctggccgtttcttgcgattgcgtacaacaggcttgtgacaaagccaagtcatggcctcattaggccccttttttcagccaaactgaaagcacttcatgttagc

SEQ ID NO: 450285 - DNA, 273 bp, Triticum aestivum
ttcttgtcacgcgtccgcccgcgaccacgcctgcgcgcctccgttccgtgcctgcagtgccgccatccacgacctcggccgccggcgagagccccatgttgttgcctctgcccaagctcgctgcagcctgcagcgcctcctgctgtcgaccgtggacgagctatggcgaggggcgccacactggtgcggtcgccgccgcgagcatgggcacggttaggccgctccaccacggcgcgcgcggggaggggccggcgggcgcagatggcctgagat

SEQ ID NO: 450286 - DNA, 245 bp, Triticum aestivum
ttccttttcctagccctctacctgactactgactagaaataccacacgccccgtccgtcgccacccggcgcgcgcagcagactaccgactaaccaaccattctcaccattaaccaccaattcctcccgtgacagggaggacgccgagaggcagcgaagaaggaaggaaggaggcaaggttgagacaacagccagcaatggagaaggcgctcgacaggcagaggatcctgctgcggcacctggagc

SEQ ID NO: 450287 - DNA, 90 bp, Triticum aestivum
tcctttcgtccgggtatctcttttgaagatatgcctgatgagagctggaagggttggcttttggcgtctctatgtcacctggagaatctg

SEQ ID NO: 450288 - DNA, 307 bp, Triticum aestivum
tccttctccaacccgccgcagtactacccgcagtacgggaactactacccgccgccgccgtcctccgtgcaggtgcccctcccggcgccctacgaccatcaccacaggggcgccgcgccgtcgcccaacgtgccacccacggagttcccgccctccgtccactcgcaccactaccccggctgggccggacggtacccttacgggctccagccgtccatgcccacgccctacgtcgagcaccagaaggccgtgaccatccgcaacgacgtcaacctcaagaaggagacgctccggattgagctcgatg

SEQ ID NO: 450289 - DNA, 186 bp, Triticum aestivum
tgcgccgctttcgccaccgactcatcgagacatcatacatggcggcggtcgcagctcgcgccggtgcagcacgggtcgggttccggcggatgttctccgtctacgccttcgctcccccgcctccccccaccgttcgccccgcggcggagccctgcaacaacctcttcgtctcaggtttgaataagc

SEQ ID NO: 450290 - DNA, 172 bp, Triticum aestivum
actgagcatgtatgagtgcaccctgcacatgagcggatactactagcacatcgcacacactcaccactcatgggacatactactagcagtatgtgctgatgtgcagggtgcatgcatgtatgagtgcacatgcgtgttgtcacacacgaactcaaaaatgtttcagattgtg

SEQ ID NO: 450291 - DNA, 268 bp, Triticum aestivum
tgattggcacctgtccgacgcctgcttcttgggatcagttggccggaagatcagcagctttagttgcctactgattcctcttttgcttgggtgtggaaggatggcagagcactctgagaatgcggcagagaacatgatgagcggcatcatggacgccattgccgacaagctccccaagcaaaagtctgtcaggttcgacgatgagggctccatttccggccaagccaagaagctcttcggcggccacaagtctgttcaccacatcctc

SEQ ID NO: 450292 - DNA, 174 bp, Triticum aestivum
tcttttcgcatgggcggacgcgtgggcggacgcgtggcacaagcacaagagcaaaggcagcagcactgcagcattgcgctagtgtcatagctcgatcggcgcaggctatctagctagtagcgtcgacccccgccctcccggagcgcagcgtctggcagggtgcgcgagatggcg

SEQ ID NO: 450293 - DNA, 297 bp, Triticum aestivum
tctttgtatcccaacccccgagacaactctccggcccgaacacgctcccatctcttttctcgccgccgatccagccggggaaaattactaccccacagtcacgaccgcgcacggcgacggcggccacacagcataccccgccgccacgatgccgtccgcctccagcgccgtgccacccgccgcggcgccgggagacgagtcccaatcccagaaggtcctcctcggcaggtacgagctgggcgggctcctcggccgcggggcgttcgccaaggtgtaccgggccagggacctcctcac

SEQ ID NO: 450294 - DNA, 315 bp, Triticum aestivum
ttgtatcgatctacagcacttttcgcctcatacaattcttttcttcttcgatttttccatcaccagaaacgaatagcagagaatttcctgactacagcacaaagaaacagaaaaatttctgacttttttccccagtggattagctttctccggttgttaattccgagacgagatgccggcgtcggggtgcatcatcggtcctcctcggcccggtcctaccagcagccgccgtcggctcgggagtcgtcggctcggtggagcgtggaggccgcgcggcagccgccgtcgttccggtggcacagggaggtaagcaac

SEQ ID NO: 450295 - DNA, 198 bp, Triticum aestivum
ttgctgcgaaccagcaaaaccaagagagcgaaatcgggtgttgattagacgaccatacctaagccaacgaattggacatcgagaggaggacgtccccaccggaccaagagaggagaacggccatcctcgacgccgccgccgccgccgggaaggagtttgatttgttgaggggagttttggatgggggaccatgtggtg

SEQ ID NO: 450296 - DNA, 226 bp, Triticum aestivum
atagatgatgccttggttcagaattttagaaactgatcatactgttgtttgattttattttacttttcctcttctaaagcgttgatgcatgcaacgttcttccggagctaaagcctagagcttctgctgctgtaagcgacagggtataaattcttatgacaaatgttcaagttgttgaaatgaatccaaagaagccagtctattgttgtatcaacaagtacattgc

SEQ ID NO: 450297 - DNA, 315 bp, Triticum aestivum
tcctatcttccggggaggacaagagcgtccggttggattatataaagttggttttggtgctctcacaattatgtgctgaacagaatttataggtatggcatctggaggatgaattaatcagcccttgcctgttggaagaactaccgaatcaaggtgatcaaatagacgatctgaaaatactgttcgactgtatctgcgaagctctaacagagatccaggagagatattttagactctcttcttggttgacgtttctcaaacacgacatacgggcacctacaatgggagaagacctcgtcgcagaagttgacaaat

SEQ ID NO: 450298 - DNA, 270 bp, Triticum aestivum
tcgcttcgcccgctccggccggccggcgacgtgtgcagcttggtgaaggagaaggaccaggcggtcgtcgacaagtacacgccgcttctgctcgccatgctgccgagggccccgacttcgccgttcgccccgagcggtggcacgaacgaggccaggaactgatgaagcaaccgcagggttttccagtaggatagatggatcgatctctacaagagaaatcgttcagcatacatatgctcactggctgatagtttgttctgctttgcagta

SEQ ID NO: 450299 - DNA, 390 bp, Triticum aestivum
tgtttaccggtgtatgacacggaattcgccggggagaacagcttggaggattccgagaaggaaatcataaccataaacgatcattcatgcgaagccatttctgatgccaagagcagtccggaggtaaccactgacagagaattggttgtttcgtctcatcaagcagttgatgatactgagaggagcccacagccatcagagagggaacttgtcggtacgagtggtcatccacctgagcttgtttctcttgacagagaagaagcagccagtacgaatggtcagtcagacgctgatgacaagagaagcccagagcatccggagcagaaatttgttttggtagaaggtcactcgcatgaacttatatctgatgtttggaaagaaattgctggt

SEQ ID NO: 450300 - DNA, 281 bp, Triticum aestivum
  unsure (1)..(281): unsure at all n locations
ttcttcacgcgtccgaaaattactgcacataatacgtctctttcaatgtatggcttctcttggattgtacttcttgttatggtcctcctgttcaagcttttcaccgcaactccaaggaagtcaactgccttgccgatatttattcggtttctacagggcctccttgcaattggcatcattgcagcaattgcatgccttattggatttacagactttacaattgctgatttatttgcaagtgcactagctntcttagcaactggatggtgtatcttatgtct

SEQ ID NO: 450301 - DNA, 212 bp, Triticum aestivum
ttgttgaccactccaccagaggagcagagcaccggtgctctatttattactgccaggagcccaggagaactgtagtagtggtcaccggcgatatggcggcggcaggcgatgggacgactaggaagacggcgtgcgtcaccggagggagcgggtacatcgcgtcggcgctggtcaagatgctgctggagaagggctacgccgtgaagaccacc

SEQ ID NO: 450302 - DNA, 316 bp, Triticum aestivum
tggacgcgtgggcgcctccacacgagaagagagactcagcagcaacccacgccaagagcaggcagctccgtcctagcaccaaccaatggcgacgtcgcgggcggacgtggagaagggcgggtcgtcgccgaggaaggcgaagcaggagccgggcaaggtgccgtcgccgctgtacccgcagcacgagggggagcgggagtggacgccctggctggtgccctccatcctggtcgccaacatcaccgtcttcaccatcgccatgtactacaacaactgccccgcccacaacgccaagccggggcgcgacggccagtgc

SEQ ID NO: 450303 - DNA, 296 bp, Triticum aestivum
tcttctgcccatcttggaggcatctctcaagtgtggctcagagaagaagaaactccaagcctgcgtggcgacgatgaagctggttcgaccagattagtacagccagcagtgtgcgatgtcaaccaccatgatgaatctgagctcggcgcggttcgttgcgagttgagacgggatctacaaactgaatctgtctccccgttgaagaccctctctgttaaaagactcacggaagaaacaaaatgagagaaatggcggagactgctcttcttcttgtcacaacaaagatcggaatagct

SEQ ID NO: 450304 - DNA, 91 bp, Triticum aestivum
ttggcacgagatttcaccggccgggagcacacggtaagataaggacggtgagcgcaaaggagatcaccgtgactcgacgcaccatgccgtg

SEQ ID NO: 450305 - DNA, 315 bp, Triticum aestivum
gtctcgaccatcaagcttgttatgacgcactttgaatttccgagcaagtcgcagccttttcagattcatcaacacaggttacatcagtagtcaatatggttcggatgcataatagtacgtacttcatttcctttttgttgtgtacggtgacctacaacatggatcatatgtaccggttatctttcaggttcagtttgctgtggcgaattcttcttgaatttgttgcggcaaacttgtggtcatgtatggtttttagttttgtaagcatgcatagtttagaagttagaaagctcgttcatgtattgttctaaactg

SEQ ID NO: 450306 - DNA, 305 bp, Triticum aestivum
ttttatcaccacatgcttggacatccaacggaggctcaagtatacggaggcatagtagatctcctaattacatgactgaagttagaattggtagaatgacttcacctcaaagacaacatcgattcaatgatcgagttatgcgtggtagtccatcaataaattccacttactctcaacatgattcaacatgggttgaaggaaggagctgctcaacactagatatttcttatcacaagaaacggtattctcggaggagcccacctctgagaatcacctcaagaaatgacatgttcgatttaatggat

SEQ ID NO: 450307 - DNA, 175 bp, Triticum aestivum
ttgttggcgtgcgtggtgtttgctggtgttgtgtttggtgcgttgttgaggttacctcgctgagtttgttcaacccgtcgcgggtgcggcgatgagcctttcgctggtcgctgttattttcacaacggcttattccattgcgcgctttcgccgtcaactcattcgcgctcagaag

SEQ ID NO: 450308 - DNA, 231 bp, Triticum aestivum
tgcggggcggtggcgcaccagatccggccgcggcggcgatgatgaagcagctgctgccgcagagccagctgcggcgctcggcggcggcgtcggcggcgcgctcctcggggggcggcgtcggggccgagggcgcgggtgggcccgacggcgtctgcgcgggcgcgggggcgggcgggcggaccgcctcctcctccaccttctggttcctgctccacgcgttctgctgcctca

SEQ ID NO: 450309 - DNA, 290 bp, Triticum aestivum
tttccaaccccagggaatgcactcatgaacttgaggtatagagatgaacgggcagcaccgatcgcaggaaaagaggtcagaacaggtttagaaggacctgggctttcagtttctcaaaagatcttgtactgtattagcactgttggtggccaatacttattgtcccgattgcaatccttttctgctttccgtcgatggggtgattcagaacagagaccactagcacatcgtgcttggggcatggtgcagcacgctgaaggactatacagagctgtttcattctttaacct

SEQ ID NO: 450310 - DNA, 321 bp, Triticum aestivum
tcgtccacgcgtccgcccacgcgtccgcgacatctctctcttcttaacgcccgtccaggtctcgccgccattgcgtcagggactctcggaaccccggttcttggacatcctcgcaggtctggttcgtctgccgggggctcctctcctctcgtggtcgatcctggttgagcgtcattgagttaaagggaacatgtttcggaaaaagcaagcttctcatttcgattcagatgatgctgagcagagacaagcaaagatcaaggaactaaaagctgcacttgggcctttttctgcccgtggaaagaaatattgtgatgaagcatg

SEQ ID NO: 450311 - DNA, 276 bp, Triticum aestivum
ttctcctactctcctctcccatccctcgccccccctcctcgccgcaagctctaatccccccaagattagctccaacgaacacgaattactgtggattagtgcgaggctttggccgcggcaaatctggggcggggcggttggaagagtcgcggccgaattgtttggtcgagcagatgatgacggcgaacgcgaaactccagaagcaggcgctgctgccgccgcgtagcccgttcccgacggcagcgtcgccgtccccgtacgcagaccatggcccga

SEQ ID NO: 450312 - DNA, 195 bp, Triticum aestivum
tttatggccgccctgttctacaagggcttggggctgttgatataattgccaaagaggttcttggttgggttcaattgatgccggtctatgctgctgagcttgtccagaatgttcgcacctttctggaacgttcacatgaaagatgccgggcctcatatatggaggctgcccttgagaaacaaagttatattcttc

SEQ ID NO: 450313 - DNA, 274 bp, Triticum aestivum
gaggccagttgtggcgtgggtggcgtgtgtgcgtcttcctcctcctgatcccctctttctctcaaaccagatgtagctcgaattcatgttcatggagtaaattcgaagactagtcctaacaatctgcctccaaaatccactatatatatgcccccttcgagctaaataacccttcatccaaacaagccaaggcaagctactagccagtacttggagaaaccaacaatggcgccgctcgcagcccggagccggaggccagcctgcctcctagccc

SEQ ID NO: 450314 - DNA, 367 bp, Triticum aestivum
tctctcggcggctgtgccctggtggcgcggtgatggcctcgggcgtcccggtggtgcgtgcacggaggttctggtggctccgcgtcgacgctccggctcgtgcggtcggtggcgtcacgggcatcctgtgtcgctcggctgcggggatggtccgacggcggtggcctctgtgcggcgcgggtggtggtcccaggcggcggtgcttccccgggctcgccccgatctgtctccgcctgggtgtgctgcggcatgcgcagctggttctgggcggttccgtctcagatccgctaggggcgtccctttcctgcacctgctgcagctcggctccccctctcgcttgcgtgtgtacggcgtgggtgccctggag

SEQ ID NO: 450315 - DNA, 351 bp, Triticum aestivum
ctggccgccggccatggaaatggagccgggcggtcctagttcgaagaaagttaagtcagcggccgtcaacagccgccaagaggcacaggcgccgccgacgccggcgtcgccggcaactgaagccccctgtctggaccctgcagagacgccgcccgcagctgatgaagatgatggacgcgtcgaccgcatcagcaacctccccgaccccatcctcggtgagatcgtctccctcctccgcaccaaggacggcgcccgcacccagatcctcgcgtcccggtggcgccacatctggcgcaccgcgcctctcaacctcgactgccgtcgtctccccgacgaggagcacgggctcac

SEQ ID NO: 450316 - DNA, 411 bp, Triticum aestivum
tctctcgcgtccgcacgttccgatttggccaaagagttctcttttgaggaatttataaaggtctgcttaatgcactttttagaatgtttacctgaatcatagaaactttatcaaataatactatatatgcaagtttgttcccgtgatcctgtttattactttgtttcttcagttgtttataatggacaaacactgcagttctccctttttctagtgtgggtactggtgccagcattagaaacatgacagtaccttttttagaaaatagagtttgtagattagaataagcaatgtagtattgatattaattccttgggtagtgggcagtttatgtgataatatagtaactatcgtattactcaccatggctggttacccaaagaacatcttgtggtaggtatgcagcataaa

SEQ ID NO: 450317 - DNA, 319 bp, Triticum aestivum
tcgtacgtatgcaattgacacaaaaagctggcgtgagggatactcgcgaaatctgcctggagcgaccctccaaaatctgtatttacggaagagtatggctgattctcgatgtcaatcctcgacagaacatgggtataaattctgtcaagagtatacattacctaacaaacaaccacaacaacaatacaaactcgaagatccagagtgggtggcagatgatgcccgcctggctagagcacaagatcgtctacgcaattatttgcgttcacagcaacccgaagaatttgatgtctttccggaatctctccgtttggagtta

SEQ ID NO: 450318 - DNA, 283 bp, Triticum aestivum
ttctggtcgctccaagcacgggaggatccatgggcgtggtgcgagccgtgtgatccacaagagtgtgcgtgcacgtaaggatgtgcttcggctgccgtgtccccgccaagctctggtggtgagagttcgaggacaggccgcgcacgtacgtacgtgtgatcagtacattccatactgctgtgccgcccgtgtctagcttcttgccggcggtcgacatgtggggcgacgtggtggcgctcgtccggcagggcctgcggtggcggcggcgcatggggaggaggtc

SEQ ID NO: 450319 - DNA, 250 bp, Triticum aestivum
tctcccctgtgctcgtgccctctcctctcccgccccgagctccactgcctccagcctacgctcgcgctccgtcccttcctcctcgttggtgctcaatcggacgagcgtgagctgcggcaaactgcagcggagggaaacgtggatgaggagatcaagccaagctggtgcacgagctcgcactgccctggcgccgatctcgcgccggtcctacgccctgccaccctctctcgggacgccatggagatcaaca

SEQ ID NO: 450320 - DNA, 294 bp, Triticum aestivum
tttacctagaagtgtcgtttctccttcggccgccgccgcctgttgttccccttccctgttcatcgtccgtctccaactgatccgcccggcgatcgtcagatccatctgagaaaatccgctccagttaaatccaatccagatggagctagctaggatggatccacccggcgtcgagctccccaagagctgcctcctcgctatcaagcctgtggtcgccgattcaaccaacgccaccaccgccacccaccagacggagcacccggatgactctcgcgagatctccattcaggtcag

SEQ ID NO: 450321 - DNA, 273 bp, Triticum aestivum
tctccacgcgtccggtgacagccgccggcgccgatctgaccagcctcgcttcgcctgcctcgtacgcgcgccggggaaagggaaagtgaaaagggaagaggatcaggggaagatgtgctgctgttgcggcggcgacgaccgcgaccacgagcacggctgccgcccgctcgggttcctgctcggcctgcccttcgcgctcctcgccgtcctcgtctccatcgtcggcgccatcatctggatcatcgggctgcccatctcgtgcatctgcccgtg

SEQ ID NO: 450322 - DNA, 329 bp, Triticum aestivum
tagggttctacatggagctggtgagattttataccctataatgaaatgactaaaatgccctcggcgtggcacgagaattacaggcggtggcacgagatcttttacagcgggaggtaactatttattgtagcagtgttaccgggtcgatccaacggccgaggtccttcagtggcctgatctgacggctgaaaacgcatcaaacaagagatccgacggccagaaatcgctgagctatgaggaggcccatgttctaccaacaaacatacccacatacacacacatgaatgattacgtagaaagaaatattccagggaatgtcatgatgcaca

SEQ ID NO: 450323 - DNA, 279 bp, Triticum aestivum
tctttacgcgtccgcagtgatattgttcagatggcaagttatgcgccactctttgtaaacgacaacgatcaaacgtggaatccagatgctatcgtcttcaactcctggcaacaatacggaactcctagttactggatgcagaagtttttccgcgaatctagtggtgccatgattcatccaattacaatcagttccagctactctggttctctagcagcatctgctatcacctggcaggattccgggaacagcttcctgaaagtaaagattgtgaacttc

SEQ ID NO: 450324 - DNA, 362 bp, Triticum aestivum
tctcgcgtccgcctcttcctcctccctctctgttcgcactaaccaatccgagtacaactcgccgtactcgcacgcacacataggcagatccaatccgactgtacaaaagcgccgccgtccgccgctcacgtggaagagggagagggagcagcggagaggagaaggatttccacgattacatgcaacctcctggaatagtctagttcctaaatccttcttccattctggcagatatcaagagatcattcaggtctcgcacctctgagtgggtgtggatttgcaacaattctgcaatcaacttattgctgcctctgggagtaatcccatcatacatctggagattacggcgagcactggaggga

SEQ ID NO: 450325 - DNA, 267 bp, Triticum aestivum
tctcgcatcgctgccatcgcctccgctccggaggtcgctttcacctcatcccgcgcgtcgccgccgagaccctctgcaaccggcgacgcggtgccggccgggcatggccaccccctcccccggttatatcttctcggctgccccgccaccatttttccccttttgatgaagagaaatgccaccctctttttccctgtgctggaaccggcgggggaattgcttcaaccgacgggcggatttgcttcaaccggcaaggatggtggtggg

SEQ ID NO: 450326 - DNA, 215 bp, Triticum aestivum
gatctacacgagacgaacatgtcgtcttaggctcggacgttgttggtcgccggcttggcctgcaagaggatgcccccctgctctgacttgctcacatctcagtgtttcaccaatgaagatgtattttcaaggtgaaggccttgcgttgggactctgtgcctcctaaactaagaacaaatgaacttgcctttaggcttttcgcactgcactatgca

SEQ ID NO: 450327 - DNA, 187 bp, Triticum aestivum
tcgtcgtgcgccgttcgttccgcgagccgagccgagtcgagcgagcgggcgggtggcgggtggtgggttttggcgaccggattgcatgaaaaccagcgccgccgccgccgccgtcgaggagctcgagctgctcgcccggggggccttcgtgggcgccggcatggaccgccacgacctgggcgcgtcc

SEQ ID NO: 450328 - DNA, 411 bp, Triticum aestivum
ttgttttgcgtccgaattcccccaacaacaggggggtttattaacaagaatggccgtaacagcaatccccgcaacaacaattccaccaacaacaattacctgatcaacaattgtcccaacaacaatttccccatcaacaattcccccaacatcaacagtgtccccaacaacaacaattaacgcatcaacaattcccccggccacaacaataccctgaacaacaacaattcccccaacaacaattcccccagcaaccaccacaacaattcccccaacaacaatttccaataccatacccaccccagcaatcacaagaacctttcccataacaacaatatccacaacaacaaccatctgggagcaacgttataagtatcagtggcctatgaaatgaagagatgtaatactaga

SEQ ID NO: 450329 - DNA, 260 bp, Triticum aestivum
tttgaaagaaaagaacatgttgatcttcatatatcatggcaattaaaagcatgcctcatacatcaagaattcaactaccaatactatgcaaacctagactcttgctcaggtttacatttacctcacaactcccaggagaaaatgaaaaaaaaggaacgaaaattaaaactagatcgatcccttttatggcagcgtttcttccatccaaagaaaaaaacttggagaaagaaacataaaataaaatgaaataaaaatgaacc

SEQ ID NO: 450330 - DNA, 112 bp, Triticum aestivum
cgcgtccgcccacgcgtgcgactagttctgtatgcccctgtcgcgtgtgttcgaccagtactgtccttcctcgtgcctccacttctaatgaatatatggcgcctcaactttg

SEQ ID NO: 450331 - DNA, 326 bp, Triticum aestivum
ttctacagctaccaccagtcccggtcacagcaggcggcatggccagcaagtcggcgtccctgctgatcctcgcggcgctggtggccgcggcgtgcctcacggagctgggctcggcggcgcgcggcgtgccggcggagaagcccgcggaggacgatgtgaagcggccggacacgttccaggaggggacggtgctgatcccggggatcgggcggtacgagctgggcacccactacatccccgacatcggcgggctggaccacagcatcccggccgccgccagtggacagttcatccccggcgccgacgacacctgggtgcccaacccc

SEQ ID NO: 450332 - DNA, 381 bp, Triticum aestivum
ttctggctaggcgaagcggttgagtgccgcacccgagatggctaaagtccagtagccgaaagcatcactagcttacgctctgatccccaatcaatccatcgatcaacccatccggccagcgatgaacaatatatagcctcaatctgtatgacatcatatatatgtatcaacgcatacgcaccgcatgcatatataatgcattcacgcgcaatcaagcatactgcatagacattccaccccggcccggcccctctcaggtatgaatgaataatatcagttgtactactacgtttcactcgacccgttccactagacgcacgcgagcttgtatgctcaagtgatgactagtgaatatacacagcttgctattatgtgctttac

SEQ ID NO: 450333 - DNA, 279 bp, Triticum aestivum
ttgtgttctctcgggactcctcaagcgcgcgaagctgttctccaaagccaaatccctacattcgtaggagccctcctacagaaataaaagctttggcgtccctgctagtgttggtctgacatcaagtcctgtcaagttttaatcccactttgtttagcaatggggaatacttttgtgttggccttgtggtgtttagcgatttgaattacctcttgcatgccctgtatattgaactcctctgtggtccatatgtcagccagtgtgaaatgaaacatcatg

SEQ ID NO: 450334 - DNA, 453 bp, Triticum aestivum
ttgcctgttcatggggctcaacaacaacctcggactggtcaacagcgggataccatacaatttcaccggcgagtcatggaataacagcagtgtgcaccagagcggcggcgctggctcggcgcaggtctcgatcgctgccgccgccgcggctcaccactcggcattcccatcgttactctccttggctccaaggtcgcatcagctggtttactactcgtccgaggccgatcagttcccagttgatgacctgggctcccaaagcttatccttgagctcggcgagagctttccatgaccagacaggaagctagctgccacctagctagctagtacaacgctggatcgatcgatatcctgaagaagatggagctgatcgatcggtggtatggattgcaacttttatcctcaaggtaggacttaataatgctctcccaaagcgcaaaatagctagcta

SEQ ID NO: 450335 - DNA, 412 bp, Triticum aestivum
gatcccatcgtggccggcctagcactggcatccctccaccgtcgccctcgcacatcaagccaccgcagatccatccatttgccgccgccctcgcacatggagccgcctccgatccctgcgctacctcgacgggagccatcgatcgtctcactacaacttgaagctgcaacttgggcggtgccatggctccttgtgcagagaaatcaagagggggcgaggtcagggaggagctgcgggaggagtgaaggaaaagaaggcgacggagaaggctctgctcgccggagagctcgatcggcagcgacgaactccgagccgcatgttctggcgacggagggctggaaccggtccatggggagacctgtaggcgcgcggcggcggcggtttgggacggcggagaagctgcaactcggac

SEQ ID NO: 450336 - DNA, 92 bp, Triticum aestivum
ttgtaaacttagaacatatttgcatttgatgcctggtgtgaagcctaatgtggcgtaggtaaccgccgattttcacaaaagaagacttattt

SEQ ID NO: 450337 - DNA, 361 bp, Triticum aestivum
ttatctttgtttctgctccacatgatggcaggggttaatccacatttttagatcttcatttatatagtaaaaatagcatacacttttacaatccatatttcttgccatcatgatgtagatgcaaaattgccatgaactttttctttttcgccattgcataaaaaaaatctttttttaccatggcaatgtttttgcttataaagatgattgcatatttagtagaatgttttcatttttttatctagcacgacaaatttatttttagatcttttcaatttcttttcagagtatggcaaaatatggcctttttattcacaaccaaaagcggcctttcttagtcacagtaggtcttaggaaaact

SEQ ID NO: 450338 - DNA, 420 bp, Triticum aestivum
ttctgggcattaccgccggagcgacgacggaggcggccatggcggagcggggggtggagtcggtcctgttccgggggaagaagctgatgccgcaaaccaacgacaagcggctggaccgcgtggtggagcaactattgttcggtgctgctattttccattcggttgtggggtggttctacttttcaccaatctggccaaggaccaaaagtaggtttgacctcaatttcgatgcaaacatggattgggatgtgatgcatgtacttgcttattaagggatttggatcttgccctcaattagagttcccaatctcaacgaagtggggtttatgaattttattattccttagcttgaatggactgtagcttcgcttaattgactgacagttgtatttgactgcataactggattaattgatttca

SEQ ID NO: 450339 - DNA, 57 bp, Triticum aestivum
ttcttgctcgaggtgctgctagtactttgttatctatctatctatctctattataat

SEQ ID NO: 450340 - DNA, 390 bp, Triticum aestivum
aggttccaggacgggtgggcggacccgacggtcgatcagctgccgccgacccccaccaaggacaagctcatggacaggtactggtcgcacgtcgcgcagtgcaggagctgcagcgccgccctcaaggccatgagggcgctcgaggtggcactgcaggtggcgtccatcgccgtcgtcgggctcctcgcggtggccaaggggacgctgctcacctcggtcgcccagcgggccgtcgtcgtgtccgtcgccgtcctgtgcttcgcggcgtcccgctggctcgccgacttcatccagaagaacttttattttgaggattatgtccatgcttacaagtgacttggcaaatcatccagtagggaaaaatatgtctagagatatagtagaaaatgc

SEQ ID NO: 450341 - DNA, 378 bp, Triticum aestivum
ttgttgcagcaggaattatgttttcatgggcgcagaaatacataactggattgttcataccaggtgatcagatcctgttctggatgctgaacatggtgtcagtaatcgggctctcattgacgttcaagccatttttctctatgccgagtgcgctgaaatgatgagcacacaattatgttcatctagctagttaagtaaagttagggacacaccacagtttgcagccctggataaaaaaaactggtcgtgtgttgtgtcacatatatttttcatattttttttgttgtgtgatcagatgtggcaagtatcttcttttttttgtcaaaactcctacgcacaaggtgctttggtttatgactcgttcctggtaagaagacc

SEQ ID NO: 450342 - DNA, 369 bp, Triticum aestivum
tctctgactccgactcggatggctccgaggcgacgacagcgctcgttcccgcccagcaccctcaccggcaccttcggtcgggccacagcgcgcgcgatatcttttgcgccacacccacacatgctgtgtttaactcgggcggggcgccgaggcggcaggtccgccagttgcgggacggccccgcccacgggatgatgccggccagaagcggttcgaccaagttcaccggggcaaagcagcggtgcaggactgtcgagcgccgggtgggcctgcagaagcgcgacagggcgtggtcgacgagtggtgccgggacatcggcgtcagcaagggcgtcttcaaggtctggatgcacaacaacaagcacaacta

SEQ ID NO: 450343 - DNA, 459 bp, Triticum aestivum
ttctgacggaggagagcaaagctcttcttcccaagtaagtaagatagtgatcagggagggagggagggcatgccatgtgcttggccttccaagttaaaggagctagctctttagaccaggtgggcgagcgggaaggaccggggcgtctcccacgacgcagacgagaccggcggcggcttatggtggcgcggtcgatgaggacctgctggatctcgccggatctggtgggatggcgcgcagatctctctccgatcctttcccagatcttctcctgctacctagggttccccaccgcaggcgcacctcggcagccatcgaggcgaccactgccgcctgcaggcggaacgaggcggaggagaacctcctggtacgacgtgaggaggagacgtacggatgaacttaaagatcaggagagacatactggccgggacaatctttaaaccatgaagctacacaatc

SEQ ID NO: 450344 - DNA, 81 bp, Triticum aestivum
tgtagcatgcaggtgtggcccatcgagggcagtaagaagttcgagaccctgtcctacctgccaccgctcagcacggaggcc

SEQ ID NO: 450345 - DNA, 269 bp, Triticum aestivum
ttaattggcgaagggggatactctggaatttgaaatgttctacagatctctctcaacccagctcaaggacgtagtttggaagtgcggcggcgaggtagaagataacagcaccgtggcatgaagcacaattttccatgtacatagtccctagttcatatgtgggatggatggtgggtgttggctgcggattgggttgtgcagaccgagttctttcgttcgtttgttgatgatgatgacgatgaataggctccgatgaaacagcgggcgca

SEQ ID NO: 450346 - DNA, 240 bp, Triticum aestivum
tggtgatgatgacatgggcttcagtctgttggactaagttgtggggcaccttgtgtctgaagtatctatccttggccaggaaactagagtcaatgatgttttagcctttatttagctgagttgtgaaacactggcaagacaatgttttgatatgtaattcagcccctggttgctggttgatttactggtgaaccatacctttgctatccaattttggtcctttaacaatgcgttgttttg

SEQ ID NO: 450347 - DNA, 67 bp, Triticum aestivum
tcgggaaagggcgggggtcctcactcgatcggatgcttgtgcgggggtcccaatgaagctcgggtgg

SEQ ID NO: 450348 - DNA, 376 bp, Triticum aestivum
ttgctccgcacgcggtcaaccgtgggaacaacacatgcggatccaaatctcccagcctcccacagctccgtcgccgctcgtcccgatcgatcgaccttgcgatcgactccgtttgttgccgcgcgtgcgcgcacagcagcacatccatggccgtcgccgccggaggaggagtggcgctgagtctgcgcggcccgtcgtcggcctcggcgtcgccggcggtggggcggctgcgtagggtgtcgtcctcgccggctgtgaggtgcggggcgacgcgggaaaggtggccggcggcgggggccccgtacggggtgctggaggaggaccactaccggactctgaggctgcagccgggcgcctccaggggcgaggtcaagaa

SEQ ID NO: 450349 - DNA, 414 bp, Triticum aestivum
tggaaaatgtggagatctgtcaatgaactgatgcttgttcggtgggacaaatcaaagtccgctggtgtgtcaaacttgatacttctcaagttcagtgaggcggatgcacatgaatccacgacgcttgatcagataaaagatgaagaacctgaattccatgccatggtttcacgtgtcctgaaacgagccgaaacggagtttgctttatgagctggtcagcaatggtattggatttctacaactgctataccgtcataacccgtgcaacgctcatggaccaggcaggtaggttactgttttgcgtcgtctgattttgtgtactagtgacaaggagcaagtagatgatgcacaatttcctgaagtttgttttggccatagaagtcggacttgctggtactgtttcgatttctctgg

SEQ ID NO: 450350 - DNA, 392 bp, Triticum aestivum
ttcttcttgattattttcatgcatcactcaagggggaaagactggctacctgcaaaaccagcatattaccagtatgtgtgcgcaatgctggcacttaacggcctgtcgctgtttggctgtttccttgttgcatgtggagctggatttggtttatggctgtacaacctcactgctgtctgttaccatgctctttaccttccacttctgtatgtgactttcatggcagacttcttccaggaggaagatatgcttctagagaacgtatactactccgagatgaaagacgccgggttctttgatgctgactgggattaaacctgcctgcagatcccgttccacgctgtatgacttatttgtatgtgaatttgcacggagtagcttcatcctggaga

SEQ ID NO: 450351 - DNA, 445 bp, Triticum aestivum
tcttggtgtccgccccaaaggccccgtcgtggacgtcaaggcgtcctgcgccaagactgatggcccgatcacctgcaactccttcctcgggcccgagccggacagcaagacggcggacgcgcgcgggctggcggagatctccatgagggtcaccgccaagctcggcggcttggtgggggcctacgcgcgccgcgagctggatctggtcaacgacaacccgacgtggcagtgcctggacgagtgcgccgaggacatcgaggacgcgctgtcgcacctggacgacgccctgggcggcgtcaacgacgcccagttcgaccaggtccgccagtacatcgacctctccgagcaggacacctggtcctgcgacgagacctgccgggacacgccgcccagcccggtcaggaccgagctgctccgcaagaacctcgaattcgagaggatgatg

SEQ ID NO: 450352 - DNA, 86 bp, Triticum aestivum
tttttaaaaaaaaaaaaaaaatagaaaaagagggggttatttaaaaaaaacaaagaataaaaaaaaaaaaaaagggggggccgttt

SEQ ID NO: 450353 - DNA, 436 bp, Triticum aestivum
tttcttaaaaaagctgcctttgatggccaccaaggggcctatctgctccacccgcttcagatctccggccagcgccgtttggttcctgccggccgccgtcttcatcctcctcctcctccttctgggccgcccgaccatggacccctacgctcccgccacccctcctggtcccgtgtcttcccggcgcgccgatctgtacggcaggatggcgcgggaccttgacgagcgcggcgcggccttcttgaagggcggcgagacatcgcagtccctcacgctctcggacctcttcgaggtcagggacggcgccgtcgtgcccaggctcaaggccgtcgacccgccggtgcgtgcaaacgtgctctacctggacccggtgttcgccgccgagatagcgaaggctgtgaaggaagtatttcttccttattttgataaagctatt

SEQ ID NO: 450354 - DNA, 339 bp, Triticum aestivum
ctttatttcgccgaccagcgcgtcctcttcctcgggatccctaacacattgaatgtgatctcaaacatccccttcctctttgtcggtctcgctgggctcatcctgtgccactacaaaaactacttcaggctatgctcacagggggagctctggagttggacactcttctatgctggtgtcactgctgtcggtgttggttcatcctactaccatctctacccgaatgatgccaccttagtttgggacagattgcctatgacgattgctttcacgtctatcgtggccattttcatcattgaaagggttgatgatagggcaggaacaaagtcccttgcaccc

SEQ ID NO: 450355 - DNA, 255 bp, Triticum aestivum
gtttggtagagcggagcatagaggatacctcgacggcgccggccatggcatccgcctacgaccgcacggccgacctccgcgcgctggacgccacctgctccggcgtccgcggcctcgtcgcctccggcgtcacgcgcctcccccgcatcttccgcgttccctacggcgtccaccgaccacaaccacctccaccgcacgccccatcccaagaagcgccgtccgtgcccgtgatcgacctcagtggcgccgaccgcg

SEQ ID NO: 450356 - DNA, 133 bp, Triticum aestivum
catgaagtctgctacccaatcccatctactaccccccatctctcttcctgctccgtggtgtacttgtggtctcgaggatgaggagctccatggccctcttggcggcggcgctgctgctgctggtgtcgctggc

SEQ ID NO: 450357 - DNA, 84 bp, Triticum aestivum
tccacgcgtccggttcgccccccctccgatctcaatgctctcccggggtcaaacccagcggacgctgtgagccgcggcggagag

SEQ ID NO: 450358 - DNA, 112 bp, Triticum aestivum
ggaaccaacaaatcctagtccaatctcgactccgatcgactacaggctgggttgattttactgccccaccgccttaagatgcacatcatgatgaagaccctcaccggcaaga

SEQ ID NO: 450359 - DNA, 118 bp, Triticum aestivum
tccacgcgtccgagcaaccgcgtcgacgggctgggactgttcctcctactattacaggaaggccggcgccatcgccgaggacgcccagctcggcgaatcattccgttcatggcttgat

SEQ ID NO: 450360 - DNA, 170 bp, Triticum aestivum
acgatactatggattctccggcggcggcagctagggcggcttttgtggcaaggttcggtctcctacgcatgttctccatcgccgactttgcgacgccgaacgcgcgcatgttctccatctcgggcttcgcgccgccgagcccgtccacgcctcccccgaaggccgacccc

SEQ ID NO: 450361 - DNA, 195 bp, Triticum aestivum
tctcacccctcgcctcctcctctcccgagtccctgcgccgccggctcctccccttctcttacgccttctcctccccattcctctcatctccctgcctgggttacagccgccgccctcgccccaggtgagttgttgctgggggcggggcggggcgggctggtgccctcgagtttgccattaaggaagccgtgggtg

SEQ ID NO: 450362 - DNA, 107 bp, Triticum aestivum
ttctacgcgtccgaaaaaaaatctctcctcgctctcgtccgagtcgcgtgaggagaaaggagggaagccggaaaggggttctcgccgtggcggaaggaggagatggc

SEQ ID NO: 450363 - DNA, 200 bp, Triticum aestivum
ggtccagatacagaaggtttagttcagtggttgtgctggacaggaggggccagggaattgctttaagttgttccaagagatgtgagcctgataaaacaatgacatagcagatttccactgtggtcaccttgcaggaccactctcagtggttggcccttctgttcacttacacaaaaacagaaggcagaagatgatattgg

SEQ ID NO: 450364 - DNA, 84 bp, Triticum aestivum
tcgtagcagaagccactagctcactactagtcgagcaatctgttgtttcagaaagacgctatgaagtacttggggcaggtggtg

SEQ ID NO: 450365 - DNA, 211 bp, Triticum aestivum
cacggttcggccgagagcaagccgcggaccaggcagcagctgccgtagcctctccggtacgtgctgggcgagcaacgcctcgtcttctccttggtcggcatggccctcgccaccctcgtcttcctcctcctctccccctccaccaccaccaccacctcctcaagcagcagcgtggcgcacctggcggcagtggggctggtgtcgcggcagt

SEQ ID NO: 450366 - DNA, 170 bp, Triticum aestivum
tcacgcgtccgcccacgcgtccgcctcctgtccctcttccactccggcggcggcagcagcagcatcagcgcggaagagccaaggagccgaccatggcgacgatcgtcaacaccacggaggaggagccgatgctggcggtggtgcgctccacggcggagctcgcctgggcc

SEQ ID NO: 450367 - DNA, 79 bp, Triticum aestivum
tagacgcgtgggtacctggacagaccgaggcaacgatgagtgcagaagttgaactgatctctacaatgggtgaaaagaa

SEQ ID NO: 450368 - DNA, 110 bp, Triticum aestivum
agcgtcctccacctccgccgactcctccctccaacctttccccaccatggcgtcgccctccgtcttcgccgggatcgcgcagggcccggaggaccccatcctcggggtga

SEQ ID NO: 450369 - DNA, 210 bp, Triticum aestivum
attgctcctcctctgtcctctcctgtgtctttctcgccaaccacagagtggcactgtgattgtaatccagctggaagaccatcctactgtctgcagcattgccatggacgccacaaagacagcagccaaggctgtggcggcaggcaacggcgacgcagacgccgcgccgtcgacccggcggacggcggcgccgaggccagtaccttggcg

SEQ ID NO: 450370 - DNA, 69 bp, Triticum aestivum
ctcacatcattatgctgaaaagtactagttcatgttctccttcgacatagttatgattctaggatttta

SEQ ID NO: 450371 - DNA, 80 bp, Triticum aestivum
tcgtctaactacgccaagcacggtttcggggctacaccgttcaacgcgacgagctttaacgcatacgtgcgggaggggag

SEQ ID NO: 450372 - DNA, 107 bp, Triticum aestivum
cctcgctaccgagcgcgcgcgcgcgcacgcacggacttcgacaatcgtcgtcggcttccgagcgagaccgaccggccaatcttccaagaaaacgccgggggggatga

SEQ ID NO: 450373 - DNA, 116 bp, Triticum aestivum
gcatgcaccctgcaaggcgcagctcggtgccgtgagcggtgaggagaggccggtccgtcgattgatcgattccgtttccatatcgctccccggaccccgagatgggattttgatgc

SEQ ID NO: 450374 - DNA, 143 bp, Triticum aestivum
ttcgatcgatccagcacacgcagcagattaagcagcgacctccttcgaccgaagatgagccaggacaaggccgccggcgacaaggccgcggcggagcccaagaggcagacgccgcggcttaacgagcggatcctctcctccct

SEQ ID NO: 450375 - DNA, 231 bp, Triticum aestivum
cttatactaaaagagtgacactgggcatgttactcaagtaatatgttcgaccatagatgccaagtctcttgagaatgtcaactcagagaactcatttgacagtatcaaaattgatttgggggaccaaaatgtttcaagtagcttggatatcaaaaaaggcaattcctttgcagcaggtcagtcgtgctctgataataatgcaactgaagctttgaaccatcttgcaaatgc

SEQ ID NO: 450376 - DNA, 108 bp, Triticum aestivum
gtttctttctacgtgcaggcgctctcctccctgcagcagcagcaacagcagcagctgcaacagcagagcagcgcgcgcagcggcaccaagccgtccatggggatgggg

SEQ ID NO: 450377 - DNA, 183 bp, Triticum aestivum
ggtcgtgcgagcgagcggaggaggagggttcagagcagcttttttttacctacctttcttgcttggatccagccgttcccgatcgagatctgccccggcgggcgatgagagcatgacccccgcgcaggaccccttctacatcgtcaaggacgagatccaggattccattgacaaaatacaaga

SEQ ID NO: 450378 - DNA, 111 bp, Triticum aestivum
ttgcctacgcgtccggagatatggaaagagccggctcaatcctgtgaagtggaagacaatgcatgaaattgtttgtggacgctcggggaaacctttgcatgagaacaggtg

SEQ ID NO: 450379 - DNA, 219 bp, Triticum aestivum
ttgtacaatggtaaatgtgagtttcgatgttcagattatgcgggctacacttgtcaaaagggttcgacaatactgcccagcctgtcaatgtgtcatgatgtactggttcgggattctgatgggcagcattgtgcaccaagtgaactcagcatactacagcaactcgaagcagtagttcttgtgccaaattacaatagattgatgccaagtgggcggacc

SEQ ID NO: 450380 - DNA, 218 bp, Triticum aestivum
tggctccacagcacctacctaagccctaaacccaacgcgcccaccacctgcctcgtcgccgccgccggcgagatggccggcgcgcgctcgcaggtcaacaagccgcacaagacgcgcttcgcctccaaggcctcccgccactcgcacaagatcgacaaggtcaggagcgggaagccagcgggcagccaccgtgccgtcgtcaagggcgcccgtgcggt

SEQ ID NO: 450381 - DNA, 148 bp, Triticum aestivum
cgtactcgtgggcggacgcgtgggtacacttctgggggatctctggacccgatcaccggggtgaaccagcgctccttcttcatctacatcaacaaccagacggcgcaagagcagatggacgtcatcgcgtggagcggagggatagggg

SEQ ID NO: 450382 - DNA, 377 bp, Triticum aestivum
gtttcttcctcctcctcctcctcatctcgctattgctttccgctcccacaccacgcgcaaacgtccacaaccctttgtatttccacacaacaccctcccctgtacgtgaccaactccgacagcggagacacgaatcgagccgtgtcgacaacaaacaattagcccagaccccgaggacaccagcgcaaaaacaccgcccgccaccggggcggtcaagagaccgccgccgccggccgatcggagcaccattggagccgtgcgcgccccttcgactgcccccgcgcgttcgggcgctgacccgtcgcagcgccgtcgtccgcgctgtcgcgatggagtctgccggctactacaccaactgcaagaagaccgacggaatc

SEQ ID NO: 450383 - DNA, 212 bp, Triticum aestivum
ctctatttaacccgcgatcgagcgaggcaaaacaggtcgactagtgaggcgcccagatccaaaccccccctcccctctctctctccagatctcgcgtcccctgcctctcctcggatctaaccactccatttcctccccactcgccccgccgcgacccggaggaggaggaggaggaggacggccgctcaaaaacaccgtccgccaccggggcg

SEQ ID NO: 450384 - DNA, 119 bp, Triticum aestivum
tcctcgcgtccgagaacagagaagagcaggggccagcgtttaatcagagggtcgatgaatgaaagaagacatggacccggacatgggcgagaacttcgtatactactgggagacgcagt

SEQ ID NO: 450385 - DNA, 141 bp, Triticum aestivum
ttatgaacagtccaggctccagagagcgcccccctgcacagagtgcgagagggagagagggagagagagcggaccagtcgtcgccggcggctagcagcggagcggttatgaaggagagaggcgggtcgagggcggcggtgg

SEQ ID NO: 450386 - DNA, 281 bp, Triticum aestivum
gtgccttcaatgatttaaatataactgcaccgggggggagttctatgtaataatgtgatcatgtagttccccaccacgcagaaagagacatgcatgtacagctgtgtatatgagctgcccacatgatcaaactttgatccatgtcctcacactatagtatagaggatgcactacaattgttcaagcaactctgcacagatgcgaacaacaggtcaaatcagttccctctagataactctctaaccatgaaccatggaatttaatttgctcagagaattgta

SEQ ID NO: 450387 - DNA, 300 bp, Triticum aestivum
tctgtcgggcaccgtctcctgcgggagtgcgggcgggagtactttcacatggacatgttcttctccagggagttcatggagtgcgccaagaggcagtccagcatggcgcagtcggtctcgcgcggcggcggcatggtcgccaacacgtgccgcgcgctcgagggcgagttcgtcgacgccttcgccgagaccctcgccgccgtcggccagaggatcttcgccatcgggccgttgaaccctctgctggagccgggccagatcgacgcgaagcaggggcggcacgagtgcctggactggctc

SEQ ID NO: 450388 - DNA, 175 bp, Triticum aestivum
gttatttagccgcagcgcccgcacgcctcgacccaagggatctttatgggggtttcctactttatggcactgggcatcaagcgcgcgtcgcggtcgcacacctaccaccggcgagggctgtgggccatgaaggccaagcgcggcggaaccttccccaaggccgggaagccagccg

SEQ ID NO: 450389 - DNA, 155 bp, Triticum aestivum
tcgctcatcgcgtccgaggaaagggagccgtggaaagctctccccccctccccaaatttcatcttcgttcttccgctcctctcctcgcctcgcctcgcctcgcccggaccccggccggattctcgtcaaggaggaggaggaggaggagggggagg

SEQ ID NO: 450390 - DNA, 140 bp, Triticum aestivum
atcgcttgtgttctaaaatgtgtcgtcatatgacccagtgtaagagctgcattgagcatgctgattgacatggtaacctgcgtggtttgtgcgtggtgtttgttactggcttttgctaatacaagtgtctattgtgaggt

SEQ ID NO: 450391 - DNA, 163 bp, Triticum aestivum
tcgctgacgcgtgggcggacgcgtgggcgacctgggggagtacttcatgaggtcggacacctagttcactgacaactacaacagctggacgacaccgacgacggagcaggagccggaggaggagcagtactaccgcgaggagtacgtgccttcatacaggccg

SEQ ID NO: 450392 - DNA, 300 bp, Triticum aestivum
tcggtctgtggatgtcaaccggggcattggaatgcttggggcttgttttggcatgtctaacagttcgctacaaacaagggagaagctctatttgatggccgttggacactacagaaatggggattacacaagaagccgagagcttctggaaagatgcttagaggttcaacctgactggaggcaagctcttactatggaaaggctacttgaagagaaaaccaaaagagatggcatgattggcatggtcattgagaccggcgcctgtggacttgtggggcttgttgctggtggaatcatagc

SEQ ID NO: 450393 - DNA, 312 bp, Triticum aestivum
tctttctatgcggcctttgggccataagactggaaagtatgtttttcgctaaaacggtgaccccaggagtaccgaaggaaaagggtggaagctcacggcgcgctaccctgccaggatgccactagatagttcatcatctgatttataactatttctgatcttcattagtgagtatagaggaactggagcacatatcagtttacctgtgtgcccacctcgctgccgcaacctaccgtcccattcggtactatcgtcaagttatgtagtctttatggacatggttaatgatatcttgtcaggaaaaaagattgc

SEQ ID NO: 450394 - DNA, 266 bp, Triticum aestivum
tttatttgtccggcgctcccgtgtgtcggccgctcggggccgctcgctatgctccacccaatcctccgccacctcggcgcttacaccaaaccggtgacggggacgcgtgtctccctccctgtcacacacatccggctgctagaaccttcagcttggccgacctgggcagggtcgagcagagcagagcacagtttacgccggacccggttctcaccagatccgggtgaataaccgctgctctacttggatctgctaggagggggaga

SEQ ID NO: 450395 - DNA, 416 bp, Triticum aestivum
  unsure (1)..(416): unsure at all n locations
tcctacgcgtccgcggacgcgtgggtcgcaggtgggactaagcaggatgccatggatcttcttcaaggacgttacatcacatctgttagtcgagacatggcacctccaacaaaagcaggatttgtagagagctatgcgtccgcccgccttgcttttgcattggtttccggagcttttatgttcatgatgatgtcactgagacatgctcggcatgatgctcgtcatttattgctgtcacttctctgggctggtctttgcatcgggatcacacactttgtgagaagcaatggccgggtattcacgaaccggccccgtgcccacaattcgtcacacccttgatggaaagcaggcggngtgatagattatcattcgttcatcaaacaatggcagtactccacttttttctatgtagagat

SEQ ID NO: 450396 - DNA, 106 bp, Triticum aestivum
ttcgttacgcgtgggcgaggacaagatgaaggagcgggaggctttgagcaaccccatgattttcaagatgtaccagggtgctggtgccgacatggagggcggcatg

SEQ ID NO: 450397 - DNA, 329 bp, Triticum aestivum
cttcttttccgcccgccgtcatccagtccgccatccggatcccccagcatcgcagccgaaatcaaatctgccctccccatcccatctccactccccatcccatctgatctccacccacgatggccaatatccaccacgtcaacaacgttgcacagatgctcggtgtcttagtccagttcgttggagtcgacctcaatgcagcagccggccacaccgtgtttatccacggcgtgaactccatcaacgactgcgctgagatgctgcgccacgctgagtacctcgaagacagaggtgcagtcgactccaacgtagattcactccgtctgctg

SEQ ID NO: 450398 - DNA, 432 bp, Triticum aestivum
ccctgctctctctctctctctctctctgccggtccctctctctctccttttattctgcaaccaatcttgggttgcgccggcgggctccagtacggccgccggggccggggaaagcgaagcagcagctcgccagtgctgcgggaaaggaaacgcgaagacgctgaatataaatctacagaatgatggctcctgagttagataagcaatgctcaaacatccagctgggagaagaactagagatatgtgatatcaagcttgcgctcaaggcattgcgaaagaagatccttagtttggattttcataactccttgcatgttcatgatccacagaactcatttgagtacttagaagtgttatacaaattgcggcagctgtctgagaagttaggtaatttggaccctggtggagaagccaaagagcacaaggaactga

SEQ ID NO: 450399 - DNA, 295 bp, Triticum aestivum
tagaaaataaaaatccccaatccctccgcccacggaccactgctccccgtcctcccctcccagatctgccgggcacggccctcgccggcggcgttgggtccgcgatgcctcggacggcgcagggggcctcgcccctgctccgcgacgacgccggcgccctcctcccctccgccatctgctgctcccaccgcctcaagccctggtcttggcaccccaatatccactcctcctagcgcgccccaaacctgcctgccgtccccttcctcccccctaccttccctcccccttcctccct

SEQ ID NO: 450400 - DNA, 447 bp, Triticum aestivum
gttccttttccttccggcgcctccaaaccctagcccgttgagccagccggaagaagcggcgagacattatgggatgggccgcgcggttcctgactgcggtctcattcctcgccttgggcgtcctcttcgcgccggacgcgctcttcggcggcgcccccggccgcccagccgccggcgtcgcggcggcgaggctggcccatgtactctgcttcgccaccgcatggggggccgcgctctgggtcaccttcatcggcggcatcgtcatgttcaagcatttgccaaggcaccagttcgggagtctgcaggggaagatgttcccagcatacttcatgttgatatcggtgtgttcagctatatcggttgcagcatttgcatacctcaacccatggaagacagcatcaactgttgagcgttaccagcttggtttccttcttgctgccctcggtt

SEQ ID NO: 450401 - DNA, 421 bp, Triticum aestivum
gttgcttgcagccccaccagccatacccaagctcattctttgtaagatgggtcttagcaaagttcctggctttcgatctacataacctgatccgcaagggcaagcaggactcgtgtgctagagcgcacgacggggccaaccacaatgctctcagtgtcgtaaactatggctcgcccctactgcacctcagtgctgctgatactggggatttgcagattggtctgcggaggatggtcaagagtttggacaatcaaagcttctctccgagctcagaagtcttgagttcaagcatggccactgtattccttttgacgccaaatcttgaccggtttactacccataggagacggggttcagacagaccccattgattcattatgtaaagcaacggaccaaacgattcagtgacctgatcaggata

SEQ ID NO: 450402 - DNA, 162 bp, Triticum aestivum
ttttattcctgcccaacctcgagaagatgaagtgggacatggtcaattccttcatctgtttctgatgaaacaacatttctcctctctctagtacgtagcatgcatgctgctgcctatacaaaaccaccgcgtcgacgcatcaatctgtgcatgtacccaaaa

SEQ ID NO: 450403 - DNA, 249 bp, Triticum aestivum
tcgataaccgagagcgcaaccgggacagcggggcaagatctgctgagccactggctacctcacaccggcgaccatggccgaggacctcatgggctgctacacccctcgccgcgccgacgaccagctcgacatccaggaggccgccaccgccggcctacggagcctggagctcctcgtctcctccctctccggcgcggcgccgtccaaggcgccgcagcagcacccgcagcagccgttcggcgagatcgc

SEQ ID NO: 450404 - DNA, 401 bp, Triticum aestivum
ttttgtacgcgtgggcggacgcgtgggcggacgcgtgggttctcccccaattccagatcgagatcccagggcattacaccaccgagctccacggattcccggtgccgcgcccggtgagcgcacgccgttccagatccgccccctgagttgcagggcctgatcgttgggcccttggagaaatcactcgaggttgcgggtctcggatgcggccatgagtttgccggggaagaaggccgcggccggggctgggggaatccggcggtggctctccaccgccgtgctgtcggcgctggcgctggtgctgatcctggtggtgatctcgctgtcggtgggctcgcccttgcccggggcgtcgctccctgaatacccagctgtcagagctagtcacccaaaggggaacg

SEQ ID NO: 450405 - DNA, 396 bp, Triticum aestivum
ttgtgagccctcagacgttggtccgagctctaagggttgttgaaatgcaagagatcatagaccaacaagttgcagaggaagcagctgaggctgagggtgcaggcgccatggcgacaatagcaaaccaacgtagaacgacaaaaaaaggtgcaggggcagcatctaccccaagaaatagcacccaagagaaatcaaagacccagggaaagggctacaaggataaatgctatgagtgcatagggaaggctgttgaggctcgcttcgacaaattgctcactgagcttgttttctcagaagatatgatggaagctctggaggaagctaaggcaattggagaagagcttggcgatatctatgactatgttgcaccatgttttcctcctagatatgaaattt

SEQ ID NO: 450406 - DNA, 400 bp, Triticum aestivum
ttgcacgaaaagcaccgacctttttttcagccgagacacgatgatccaccgccattagcagcggcgggggaagtggcgaccgatcttccgtggccagcgcgcgcgcgctcgctctcgccggatcgggccgggaaaatggcgcgcgcggtctccctgtcggcgctctgtctcctcctcgccgccgccgccgccggagctcgagtggacccgatttattctggcaaactggtgctggactggagcaaggaacccaagtttaaactgcagaatttctccctgaatcgagaggacaatcttcagctcctaagcaggtcacgagatgtcactcgcaggaaattgggggagaggaccggtgtaataaagatggaaacagtacagcaggatgatgaagccctagtta

SEQ ID NO: 450407 - DNA, 350 bp, Triticum aestivum
tttatcaacctgatctgatggaggagaccggggggtgtaacctcggcggatggctgcccccacccaacgggcaggacctcgccgcgcgggccgacgacctgacgctcacgcccaccctcctacgacggtatgtgcggcctcagcccaacacgggcgacctgcgccacgacgcccctgccggcgaagaacaggagcacgtccccatcatcgacctcggccggctgctcggtccgaacggcctcggctgcggacggggcgaggaggccaccaggctgcgctcggcctgcgaggactggggcttcttccagttggtgaaccacgggatacccgaggagaccctgggggagatg

SEQ ID NO: 450408 - DNA, 355 bp, Triticum aestivum
tttgttccacacgagatttctgttctcgttgagctcatcttacgacacctgcgacaccacataaattacatggcccgccagccacacgcataatcctatttcacttgcaaaactttcgagtgcatgttgcaaatcgaatgcggctaccgggggattctctgttgcgccacttgtgaacgtgaggctgatacccggacacgccgtagccgccaaacacgacgggctcaaactcagccgctcacgtccacccgtgcgccgccgaatgccgaacacaaaaccccacccaccccacgcacgcaccgtgccggcgttggcgtcggcatccgcatgaagagctcggcggacaacgtggaca

SEQ ID NO: 450409 - DNA, 370 bp, Triticum aestivum
ttgtctcggcgtgcttcgcggggccgcgcgccggggcggatctggcctcctggcctcttctgctgcgcggaggcgctgggcgctggggcggcggccccagactgcgacagcgtcgtcctcccctcctcctcgcagtggagtcgtggcggcgtgccggttggcggtggatgcgggcttcgtgcccggatccggcggggcgcaggccgtcggcgggatgcggcggcgctggccgtcctgggccccgcgggcggcagggcggacgcgcgtggtggtgggccggtggctcggggcggccgtgggtggatctggagctgcagcttccggcctccctagcttggcggagctgtttggcagagccggccctctggga

SEQ ID NO: 450410 - DNA, 321 bp, Triticum aestivum
ttcaagaaagcaagcaggccgagcccagcgtccgcgggaggcacgcgcgcgcgcgcgcgctcaccaccggcggcggcggcatggacgtggccatggcgctggccacggtcttcttctgcctcctgctgctcgcctcggccgccatctcgctcctcctcctccgcctctgcctcgccgcgctccgccgcgcccccgcgcccgccccctacgccgccgtcgacccggaggccgccgcgcgggcggcgccaccgccagtgccgcagcaggaacccaaggcgccggagccccggcggctggcgtggcgggaggtggaggcgctga

SEQ ID NO: 450411 - DNA, 425 bp, Triticum aestivum
tttgaatatggatttgtttctgccactcgtctgattgattttgattgccggaggacaatgtagccagcatgcttgttttgccgatgcggccaagatgcccctgacaaacatgcagacactcacggcgtattgggaggccgcgcttccaggaattcccattcccccggctatcagtgacctgttagcccaacaaaaagggcagcaaaaaattggaccgaactatgaaatagtcaactcagagggtggtcacggggacaaccatgttcatatcatatcacaggttaaagatgatttaaaagaggcatatgggtctcatggtgaagaaagtagaaagaatgtcatgatggcacttgagccaaaaattggtaaggatctgaagggacaaccattgtcacatgggttacaagctaaaaattatgtagaag

SEQ ID NO: 450412 - DNA, 377 bp, Triticum aestivum
tcttcgactctcccgaaagaaagctcaggcctgggttttttcccacaccacccaccagtctcctcccgcctgaacccccattaactgctcggcaccggagaagagatcccccgtcctctgacgccagcggccatgtccgtcacgcgggttcttgcgctgctggcggcggcggcgctggtggtcgccgcgccggcgcgcgtgggcgcggcgggggcgtgcgcggcggagaggttctccaagaaccgcgtgtacgcggcctgcaccgacctgcccaccctgggcgcgtccgtgcactggacctacgacccggcggcgtcctccctgtccgtggcgttcgttgccgcgccgccctcgtctggcggctgggtcgcctgggg

SEQ ID NO: 450413 - DNA, 427 bp, Triticum aestivum
tctcacgcgtccgccacgcgtccgcggacgcgtgggcggacgcgtgggtcaatttgtaaacttgtttcgatctagcccgtgaagtccacatagctagttttcatgtagcccagaagcgtgctggttcacgttaagtaaagtttttctcctgtgttgtcaagacgtgtggcaggttgtgcggtgacgagtaaaaatatttcattatatgcgaatactatgaagaccagcgcggcctgtgcgacagaaatttccttgttgatgataggcgcttcagcatcaagctggatgagaccatcgaagtggatacagtaagtcacaacgacaaatcttttttcgtaattaagcatgacttatatatgcttcatttgcttcaacttataattttaaattttcactattctactagcgcatcctctgccatgcaaga

SEQ ID NO: 450414 - DNA, 325 bp, Triticum aestivum
attgtccacgcgtccgcccacgcgtccgggccctcggcgtggaggtttctccctcggccgagtcccctcccctccccttcctcgccgatctccgccgccgccgccgccgccgccgaggggaagccatccatggctctccgccgcgccatcgggtccctcgccgtccgctcgcaggcatcatactgcctccgccgcgccgccgcctcgccccccaccctcacgcctcctgcgcccccgcctacgtccttccgccgcccggtcatcgtcccacgccgctccttcgccgccccgccccagcacgtcaagaaggtggccaagcacgacg

SEQ ID NO: 450415 - DNA, 337 bp, Triticum aestivum
ttgtacatctttgatggacttcacatggagagggggggtttggaaccaaaacaactccagcttgctaaccagctgcaagagtcgctagtacataagaggtgcttaattgtcgttgatgatatatgggataaggaaacatggaccttgattgaaaatgtttttgaggatagtgctggaagtaaaatcatcaccacgactcgtaaccgcaaatttgccgaagaatttggtggcatctacgagatgaaaccactatgcacagatgactccagaaagttactccgcaccaaagctaaagttaaaggccatgatactgaatttgatatattgtcagataaaa

SEQ ID NO: 450416 - DNA, 145 bp, Triticum aestivum
gtcgcccacgcgtccgccggcgaaccaagtggctagcaagcaagccacgtcctcctcgaccaagaagctccgtcgtcgtcgctaggaacaatcgatggctgctgcggctgctggtggtggtgctggtggtggtgttgcgggggtg

SEQ ID NO: 450417 - DNA, 354 bp, Triticum aestivum
tgtccacgcgtccgacgcgtccggagagagtagagagcgagggcgagggtagcgcggcaacaacaatacgctaggttgatctggagacctcacgtgtgctcatcctgctgtacgagcagacgatgcgcgcgatccgtgccgggcgactcacacagggcggcagagatgaccaggaagcggcgagttgctcggaagtgaagcgctaaaaggagggctcgaaagcaggggagactcggagacgagcactttgaaacaggtggctcaaagaactgtcgtgggctcgtggcatggttgctgcggatataaggcagcggaaataacccggccgcaggtggtggtgccaggggaggagag

SEQ ID NO: 450418 - DNA, 388 bp, Triticum aestivum
ttgtactactacaacagcaacccttattatgtgccaactgtcccaacacatgatgcaatcactactactgagaccataaaccctgaagtagatttgtgggatgatggctccaactaccatgttatctgtgatcttccagaagttgctaaacataatctacatttacactgcactaaccaaaaattgattatttttgccgaaatcgaatcaaccaatgagtacaatcccatcacaaaccgcattcgcgaaagaagacacaaaagatatcgcagaagagtccgtcttccttcccaagttgacgaaacgaaaattgatgcaaaattggaaggtggggttttgaaggttgttttgccaaaaactaaggaacatcagggtgaaaataaacaaa

SEQ ID NO: 450419 - DNA, 444 bp, Triticum aestivum
tgtggacgcgtgggttcaccaatatgttcccctgctttatttggacatccaaacattctgcaaagtctaatgtaatacagtgcaccatacccaacctccatgccagccttattatttgcatctatgtaatgaataagttgcagtatttatttatctcaagggaaaatggcattgcaaagatttttgctaccttctctcttgatctcagaagtaccatgtagtattgggcagcttcaaagctacaaagttttagtatatttgtgccacagaatatcgaaagccatacagttttggtctgtgtagtctcataaagagatccatttacgtgttcaatgcctaacacattccgtcttgtttgaatgtttgtactattcttataacccaatgaaagttgcatttttcccatcatgtcagctagaagggaaaatttattggtagtttgaa

SEQ ID NO: 450420 - DNA, 216 bp, Triticum aestivum
tatagattctgccctgttaaaaaaaaaaaaaaaaaaatttataaaaaaaaaaaaaaaaaaaaaaaaaaaaaaaaaaaaaaaaaaaaaaaaaaaaaaaaaaaaaaaaaaaataaaccggggggccgcccttttggaggcccctttttttcccccccctgcctgcatcttatttttttttttttggggcccccttaatttaatttgctggccgttttt

SEQ ID NO: 450421 - DNA, 304 bp, Triticum aestivum
ttcccacgcgtccgatctcttgcatctgtcacactgcacaaaagcaaaaccactcttcaagagtagctaaaaggacaaatcggcaagaggttgtgtgagatttggtgcaaatcgcaagatggttaagcaaaagattgtcctcaagttagctctggacgacgagaggaagaggaggaaggccttcaaggccgccgttggcatgtcgggcgtgacatccgcaacgatggagggggacaagatcatcatcgtcggggacggcgtcgacccgatcacgctgaccacgatgctccggcgcagcctgggc

SEQ ID NO: 450422 - DNA, 383 bp, Triticum aestivum
ttgttgaaaccagaataggtaccaacattgagaatactgatgtcccttcagtttcgcagcctgatatactgatgcaaggtgctctagatgtgtctggtcttcagtataacccgccatcagtttcggatcatgtgtatccgaacacaacacagccaagtataatggagagccaacaaggaaacgctcaagcacaacatctttcccatttttcaagcttgctggcacagcaagctaacactctgcaaagcaacttcttggggtcaaatcttacccagcaccgggattttgacttttcaccatttttatcagcacagtcagctatgaaatataacccagctgtgccaactaccagttacccaatctccatgcaggagaatttaaac

SEQ ID NO: 450423 - DNA, 357 bp, Triticum aestivum
tttttacagcccgggtggttgactacccactgagcagagcatctttcggggcgcgatccaggaagccaggaacggcaaagcaggcggcgcggcggcggctccatcgtgacgacaagaaatggccaccgccctccgccctccccggctcccagttccagagcaagcctcttcacttcatcgcctaccaaagtacagagttgccgtcactgggcgtaggagcttcgccgccagggccggctcgtatccaggcaacgtgggcgtcccgaagcaatggtacaacctcatcgccgacctgccggtgaagccgccgccgatgctgcacccggggacgcaccagccgctgaaccccagcgacct

SEQ ID NO: 450424 - DNA, 335 bp, Triticum aestivum
actgtccacgcgtccggctgcgactcccgctcgccgccgtcggccaccggcgacgagcctccgtctccgcctcctctcgcctagcatcctctcccaaaccccaagctaggagccctccgccgctctcccctcccaaacccctcctcgcacccgcccagatccaagcgcccatcttcccctacgccgccgccgccgccgccgccgggccgaccaagagggggagcgatggctccctattaatctccatttccccttcctccatcccctccgccgctctcccctcccaaacccctcctcgcacccgcccagatccaagctcccatcttcccctacgc

SEQ ID NO: 450425 - DNA, 363 bp, Triticum aestivum
ttgttaccggtgcggcgagccgcgtggccgggggctctgaggccactttcgccaaagccggtatcgccgccgatacggccaattatgtggtggaacgtgttggcagcttcacgctgtacaacccgaagtcgacgcgtcgttggggcggcggttccaccaatctgtgcggcggatcgcgcgcgattcagtccaaagcgccgagcggtttgggtttctaccgcgaagtcgacttcaccgctccggccggttacgtcgagttccgcggctaagcgttgcgctgaacagtgctcaacaactgccgcagccgaaggcaaatcccagagcgccaacggccaaaccgccggcgcagtaaacagcggcgaa

SEQ ID NO: 450426 - DNA, 328 bp, Triticum aestivum
ttgttacgcggccgcgcaacgcatgcatgcatgcggggatctatcatgcttacgacgacaaacggacgggctttacgttttcttgttcccactttttggtttgttccaaccaaccaggctatgttcaagctcttttagcgacaggtttggagtttgcttcgggttaattagatcatggaaaccttggttgttgaccttctagctatgtacgtgtctcgatcgatctgggggtagtagctagctagcttgttgcgcaagaactgatacatgcatgcatgcacagatgggcatgagtttgctggcatgatggctggcaagctatatggtg

SEQ ID NO: 450427 - DNA, 387 bp, Triticum aestivum
tgtaagaattagatgaaacaagcactttggttaaagacaaagaatctgaagctgctgtacttcatgacaacgtcggatccttggaggatgaggtgaccaggctcaaggaagaaattgacgtgacaagtgaacgtcttgatgctgcagagaaagatgcagccgacctaattgcagagatcgaagagctaaggttgaagctacaggcagtagaagatgagaaagcagaggcgctgaacaatgaccagcttgcaagttcagaaatcgcggccctgactgaacaaaagaacgagctagccaaggagctagaagctagcaaagatgaagttgagaaggttaagaaggcaatggagggtctggcctctgccttgcacgagatgtcagctgaat

SEQ ID NO: 450428 - DNA, 361 bp, Triticum aestivum
tcgggaaccttctgctcgccatggtcggcgaggtcggggagctgtcggagctgttcatgtggaaaggcgaggtgcagaagggcttgcctggctgggaggagagggagaaggagcacctcggcgaggagctctccgacgtgctgctctacctgatccgtctctccgacatgtgcggcgtcgacctcggtgacgcggccctgaagaagatcgtgaagaacgccgtcaagtacccggcgccgtcaaagagcgcctgatgagcgaacgcctaatatgatctgcggagggattgtctacttttttgcagtttgagaacgtgaagttccggcaaacttgtggtcggttgggtcaagttaaattgtga

SEQ ID NO: 450429 - DNA, 55 bp, Triticum aestivum
tggtctcttgtcgttgagggcgaggaaggcgaggagacggactacgcgctggaga

SEQ ID NO: 450430 - DNA, 424 bp, Triticum aestivum
ttgcaagcgagagagaggaaggaagaaaaaaaatggcatcgtcggcccgcgccgccgcctccgccgcgagatcggctctccgccgggcgcccctcgccgcctcctcgtcctcttcagctgccgggatcctccacaggtcggcggcggcgggcctggagacgcggatgcccctgcacagcgcggcgtcggcggcgcgcctcggatcctgcatcacccgagatggcgacaatgctttctcatggaactccaggcgcatgttcagttcaaatgagaaacatctgcctgcaatatctgacccgaaaattgagactgcatttaaggatttgatggctgctagctggaacgagcttccaggttctcttgtggaggaagcaaagaaagcagtatctatggctactgatgataaggctggtcaagaagcttt

SEQ ID NO: 450431 - DNA, 387 bp, Triticum aestivum
taaagtgaagaactggaaaatgtctgcatacaagaaatttgaggagctggagaactcagggggtcttatccctgattatttcctgagtaacggccaccttgtcccagcagcgcctcccaacaatggtgccagtacttccaaaaatcaaactactgcagaatttggtgagcaacaaccatttctgcaggagagtggattcccactggcacagatctttgcaaaaaatgttgctgctccttcgaatcaagaaggaccaccatttacacagtgcagttacgaacaggttgcacatcaagaactatatcagcaggatccttctatactgtgtaatggaattcctccctatttgacccatggaaacatcaatggtcaggggatcattctcag

SEQ ID NO: 450432 - DNA, 311 bp, Triticum aestivum
aatccgccccaaatcggcgaccgcacgggcggtggcggcggcggagatgggctgatggattactccgagttcccctttggcttcggggccactggtttcgggttctctcagcccgatcgtcgcccttccggatgtccaatctgaagggggtaccacatgaagttctgcaagtgggaaattaccatagaactgtccgtcacgaccataacaagatagttgaggttccccaggaagttggtaccattgagaatctgcagccgctgcggcgccgtgtcctcccccgcggccacaccaggtctaatattggatac

SEQ ID NO: 450433 - DNA, 468 bp, Triticum aestivum
tttaaattggcatctgagaaacgtaatattgagaaagaaattgatcatctggagccaggaaaggaggagttggaaagccgtcttgctaaaaacgaacgggaagtaagaaagcgggagaaaaaaataaatgagatagtcgacaggatctacaaggattttagcatgtcagttggtgtgaagaacattcgtgaatatgaagaaaagcaactgaaagatgctcaagcactgcaggagaggaagctaagtctgagcaatcaattatcgaaactgaaataccagctggaatatgaacaaaagagagatatgcatgctccgattgcaaagttaaacaacacacatgagaccctagagaaggagctgaagggcttgcaggagagagaaactcgtgctaaggctgatgctgaacatatttcaaatcagatggaagagctgaaggctgaggctgaagactggaagttgaagtcagat

SEQ ID NO: 450434 - DNA, 444 bp, Triticum aestivum
tcttatgtttgcaaggaggctttggagaggggatttgttgtctctagtctaaatagatctggaaagccatcgacaagtgaatcttgggctgacaaagttatatggaaccaaggcaatcttcttgaacctgcttcactggaggatagtatggatggtgtctctgctgttgtatcctgtgttggaggctttgggtcaaattctcaaatgttcaaactgaatgggactgcaaacatcaatgccatcagggttgcagctgagaaaggcataaaaagatttgtgtatgtgtcagctgcagactttggtttagtgaattacttattgcaaggttattatgagggcaagagagctgctgaagctgaactgctgtcgaagtttacctatggaggaagtgatactgcggcctggttttattcatggaactcgtcgagtgggtagcgtgaacat

SEQ ID NO: 450435 - DNA, 432 bp, Triticum aestivum
tttttagcaatccgccccaaatcggcgaccgcacgcacgccgtcgcggccatggcgaccgccaccgcttcctccccgtccccctttggcttcggggccactggtttcgggttctctcagcccgcggccacctcgtccgcctctcccctcttcggcgcacccgccacctccgccgcagcaaccacgcctagcatattcggggccgccacgaccacgcccagccccttcggcgcaccggccacctcgtctgcggccaccaccccgagcctcttcggcgccgtctcctcccccgcggccacaccaggtctcttcggtgcgaccaccgccgccgccagcacccccagtattttcggcgcttcttccgctgcgtccactccaggtcttttctctggcgccgccacgggcttcggcttcggctcatcggcatcaggct

SEQ ID NO: 450436 - DNA, 394 bp, Triticum aestivum
ttggacgcgtgggcgccgccgccgcgctcgtgcgcctccctccccgccccacgacgagctccctgccacagcaaggttttggccgcgccggagcctcgctgctggccgtgcgtgcggccaaggactcggacgggttcagacgtctggtctctgagaagcccgagtggccggcgccggcgccggcgaagcgggaggggctggatggtttcggccgggaggcgagcaacggggaggaagacgggctggtgcagggcgagctggctccgtggagcgttctcagccagctcggcgtcgagttggattctgacagttcatatactgctctagtctatgggtcctccgccattgttgctatttggatatcatcgataggtggtttctgcacttgaatcag

SEQ ID NO: 450437 - DNA, 411 bp, Triticum aestivum
tttcagccccccgcccccctcctcccccacccacagcgcgcacgcggcgcagccgagagagcacgcgaggaggagagcaacccggccgctcggagctcccagcgctcacccggtaccgtcgggcggcagtggcctggcctggctctggcgcgtgcgcgtcctgtgcgtccgggagctgtggcggcgccgtctcggctgaatgcgatggacagctcgtagcggctgcttcagtcatgcactttctggcggtctaatctttccgaggaggcaatatcgtatgccttactacctggcattggctggcttagatgtcgtttcgtagcatagctcgtgatgttagggatggttttcggtagcttgtcgagacggagctttgatgtgacaatcgcaagcctttatggtcttactggg

SEQ ID NO: 450438 - DNA, 459 bp, Triticum aestivum
tttccgaatccccgcgccatctccgtaaccctctgctcgccctcctcttcctcgcagcagcagcagcgtcggcagcccagatcgccatggcggccgagccggagcagcaggcggccgtgcacatcgtgtacgtcgaccgccccgaggacgccgaccccgaggagttccacatccgcaccctcgcccccgtcctcggcaggtaactgtgccgtggaatcggaccggatccgcagccgtttggctcgggtttgcgccgccctgcctgtgggatctaggcctttgggggtccgatttagcttggccttgtcgttttggggttgattcgttctcttgagactttttccggccgtgtgtcaatttgctgatctggggggaattttggcagcgaggagaaggccaggggcgccgtcctttaccactacaagcacgccgccagcggattctccgcaaagctcacca

SEQ ID NO: 450439 - DNA, 261 bp, Triticum aestivum
ggcgcctctccttccgtctccctccgatccccgcaagattcttggagcaaccccctcttgcttctcgctctcgtggcggcggcgcttctttacctcgccgccttcgccgccgccgccgccagcgcgcacgccggattcttcggccgccccgtcaagctcctcgcctcgctcctctccgttcccgcgtccgttctccgcctcctcctcacagccctcccggcctcccctcttctgcttatccccctgctcccactgcccgct

SEQ ID NO: 450440 - DNA, 221 bp, Triticum aestivum
ttgacgcgtgggctgagcccgagtcatggacctctctcgccgctgacggcgacgacgacgatgaagaggagctggcccctatgacaccgcctgctgccaaggcctcggccccggccgctgctctgccggacgtggtggtgaaggcgagcaagggatggcaggaggtgttgccccggcgtggtccgcgtcgcccgacgtcgctagcccctgcaatggctccc

SEQ ID NO: 450441 - DNA, 219 bp, Triticum aestivum
tttcagaacttgtgcttatccgtctctgtactgcacgtctgtttgtggggtcctcctggcaaacatgtcgagcgcttcgggacgggcggtttgacgagcaatgagatcgagcgctggtggggaggtatctcacggtaatggtgggcgtggcggagcggcgctggatttcgatggcatggagttcctactagagccagttgaccggttcccactcaggga

SEQ ID NO: 450442 - DNA, 258 bp, Triticum aestivum
ttttccacgcgtccgcccacgcgtccggagtttgacttggtccaagattgatgccaaattgcaagctggaacatctgattcagctaaaacagcacaaggctctccatgtgctggccattctttggtatcatgcgggaacaaaatcttctttgttgctgggcatacaaaagaaccatctgacagcattacagtgaaggaatttggaccacatacttgtacctggtcgattgtgaagacttaccgaaaaccaccggtttc

SEQ ID NO: 450443 - DNA, 71 bp, Triticum aestivum
cccttgagggtatcaagcatttctatgtcaatgtggagaaggaagagtggaagctcgacacactgggtgac

SEQ ID NO: 450444 - DNA, 358 bp, Triticum aestivum
  unsure (1)..(358): unsure at all n locations
ttgaaaccgcgccaggacctccgccgatcaaggagaatcaagaagccggcgtacagaccgatccatcgatcgacccttgcctgagccggcagcagcagccatgaacaacctgttctcgagttcgtggaagcgcgcgggcgcggggggcgacggcggggacctggagtcgggcggcggcggcggggtggagatgactggcgccgccgggcgccgcggcgggggcgagcctggaccgcttcttcgaggacgtggagtcgatcaaggacgacctgcgggagctggagcggatccagcgctccctccacgacggcaacgagtcgggcaagtcgctccacgacgcctncgccgtgcgcgcgct

SEQ ID NO: 450445 - DNA, 407 bp, Triticum aestivum
tctagactatttactatcactgttgtttggtatttgaacatgtcttttcgagggggagatgggaacagatagactcagtgaaagttggctgcacgtaaactattgtgatcaagttggaaaaaaatgtttcccctcttaactgctcctgttggagactggggtcagtagtcactgaaatttgcacacgcatggaggaatgaatgatgattctcaagtaacgaagttgtagccttcacgacaagataaatggatgattttgcagctcaagtgttgctacatgttacagataactatggcattccattttaatgaatctgcatattgctgttgagcaccggaagcgagggagggcatggctgcctggaggttgtcccaaggcgagggcagggcagagacatgcaacaatg

SEQ ID NO: 450446 - DNA, 291 bp, Triticum aestivum
tgggacaggttgggacagttcgaagggagttattgtcatggacaatgagtggtggaagaaggcgagaaaggacattcctggatgtggcaagtttagaaaaaagcctcttcaaaatctggagcatctttccaaaatggttggtgatattttgaatgatgaacaagatcattggaatcccatgagtgacaaccccatcatacccccaagtcaagagaattttgttgatgttgataatgttgttggagttggagagaaagaaggttcatgacatccctgatgatattggtaatg

SEQ ID NO: 450447 - DNA, 279 bp, Triticum aestivum
tcacgcgtccgcccacgcgtccgcccacgcgtccgtgaatcgggagcctaaatcatcggccgcgatttgagactctttttctcgagggaagaatcagaaagggacaagtctgagatgaatcataccttttgtttctatttgaagccacttgcttcctggcagtgttataagaagagtggcatggggtttccccacttattatttcccttctagcttcaatctgtagtacgctgtttctgaatgtacgaaaacaggccaattttttgcattcgatcttct

SEQ ID NO: 450448 - DNA, 451 bp, Triticum aestivum
gtagaagtcaagtgatgagagcagcaaggagattgtctcaagtcagccagagggaagcagtcccccggagccagagaaagcttctgacagcaatagtgacggaagctcatctccgggcaagaaaacaagtggaagcaaactttcagcctcagcacctccattcaaacctggatcgctcttatcggtgtcccatccttacagcacagtggcaatatatgatgctagcgttgtgcttcagccaatcccaagtcaagcaatggagattctccctcatgctgtcgatacttagagtacctccgtggtcctcggtccaccttgtactatcgtactggacattctttccaaaggaaacagggttatacacagagccagagcactattctgaggggcagcacctcccctccaaccatgaacccccatgctgctgagtttgtgcctggaaaaactgtgc

SEQ ID NO: 450449 - DNA, 264 bp, Triticum aestivum
tggtcgagaagcagaaggcccaggcggcgcaacaagatcagactcagcctcaaacaagctcttcttcttcttccttcatgatgagggatgctccccctgccgcagctaccagcattcatccagcggcggcgaggcgagagggcaggggatgcgggcagagcagacgcaggccccaccccggacggggcttccactgtggatggggagccacatcaacggctgaagggcttccagcccatataagcgtactattcagtagagagt

SEQ ID NO: 450450 - DNA, 464 bp, Triticum aestivum
ttaccaaggagaagccccggcagcagccgatcgtgatggaggccgtccggatcctcaagcgcggcgaggagcccccggctccctcccccgcccctgcgcctgtccaggcacgggcgcaagccccgccggccgacaggcgggtgcggtctccctcccctgcctcaccgcccgtcgtcaaggcccggccccaagccccgcctgcggacaggcgcgtgcggtctcctcccccagccacagcacccatcccggcccgggcgcaagccccgccggccgacaagagggtgctccggaccaccagccggatcggcccgcagcaacccgccgtcgtgccaaccaagaagatggtgccgctcgccgtcgcagccagctacgccggcccggcgttctcggccgcggccccggagccgagctctctccccctccctgggttcttcttccgccgcgccgaggaagaggccacccgc

SEQ ID NO: 450451 - DNA, 312 bp, Triticum aestivum
tctgcagcaggtggccatggccgactcccccgagttagctcgtgctcgggacgtcctgagcgtgcgcgccgacgagcacgcgcgggtggacgcgctctcctccgccgcatccgcatccgcatccctatcatcggccactactcatctgtcgccgagcttcttcgagggattcgcgctgcgcgggatccgcgtgctccgcctccatccggggttcatccactgctcctacaccgtccccccgagcctcaccgactccaccaccggctgcctcgccgccggtgcccgttgtcgccctggtcgacgagatcggct

SEQ ID NO: 450452 - DNA, 376 bp, Triticum aestivum
  unsure (1)..(376): unsure at all n locations
tttggatcccggcgctgccccgccccgcccccacctcctctctcgctcccggcgccccgctgcttccacgcgccaccgccggccccctgcttccacgcgccgccggcggccccgctgcttctagccgccactgtcgggagccaccatagcgccaccaatcgccacgaccagtcgtccctaccgccgccttggcgacctacccccaccccccgcagggggccatcgcttcgtgtcaccgcatccggtggccacagcgtgccgtccaactcggcagtccaactgcttgctccacggntcggtcgctcaagtagctgcgtgcaggcaaacatctccacgggcgacaagttcttctttcacaacttgttgctgctgctgc

SEQ ID NO: 450453 - DNA, 149 bp, Triticum aestivum
ttttgggccgtgcgatcacttacgacatgggctgaaggaggacctacgccgcgcttgtctactactcattctacaacgccacggagttcgcgaagactgcgtctgctaattaggtctagggcgaggatgctagatggaactgcaaactt

SEQ ID NO: 450454 - DNA, 134 bp, Triticum aestivum
tgataaaaaaaaaaaaaaaaaaaaaaaaaaaaaaaaaaaaaaaaaaaaaaaaaaaaaaaaaaaaaaaaaaaaaaaaaaaaaaaaaaaaaaaaaaaaaaaaaaaaaaaaaaaaaaaggggcggcccttttagagg

SEQ ID NO: 450455 - DNA, 337 bp, Triticum aestivum
tgtcaaatccgaacctcctccagagtccaaaccccaacctaggaaatggaggcgctcgtggtgcggaagcttggcgatcccacgctgccgcccggcggcgaggactcgccgtttgcggcggtctccggtgaccggccgattccggaactctcctccccgacctccgtgcgggtgcgcgtggcggcaaccagcctcaatttcgcgacgttcctgcaagtgcagggcaagtaccaggagcgccccccgctgccctacgtcccggggtccgactacgccgggcgtcgtcgacgccgtcggctccggcgtgcgcagattccgccccggcgaccgcgtctgc

SEQ ID NO: 450456 - DNA, 212 bp, Triticum aestivum
tcgcacccagctctgccccgccccagcgcgtcgccacccggcgccgccccaaacctcacccaggcgggaagggagcggcacatcgagccgcatctccccccaaaccgcgcccgcgacgagaggagctcctgcatcccgccggtgccgcctcaccctcccccggtcgccgccctccggtgccgcgccaaggaaaggtttattacctgcaggaa

SEQ ID NO: 450457 - DNA, 303 bp, Triticum aestivum
tgatcggcggctatacaccgtgaactgcgccactagactaggaagaaaatggggtggaagggcgtcctggggttcgactacggcgtcgtgcaggcaccgctcggccccgacatctccggcccggagctcgccgccgccgtcgccaacgctggcgccataggcctcctccgccttcctgactggccggcgccggaccacgtgagggaggttgatacagaggaccaggagcctgaccgagaagccgttcggggcggccattgtgctggccttcccgcacgaggagaatctgagagtcgtgctgga

SEQ ID NO: 450458 - DNA, 223 bp, Triticum aestivum
cgatgagacacagctggacatcctgataggcgtgctgtcggtcaccacctccgtgtcaatatgccacgtggatgacctctgtcgcgcccaggtgttcgtagccgagaatgagtcctcgacgggcaggtacatctgtgaagccacgacaccaccctcgtgcagcttgcctctctcctggccgaaaagtacccacaataccaatgtgaaacttgaacgctttgct

SEQ ID NO: 450459 - DNA, 210 bp, Triticum aestivum
tgtacgcgtccgagctcgcgctgcgccgccaaagctttgaagtcgctactagggtttatcgcctccactcatcaagcgcctagctagggttttgcttggtccagtcgggagagggaggcgagatgctgcgtcggaacacgcggcttcgtcgggagtacctctaccggaagagcctcgaggggaaggagcgtcagcactacgagaagaagc

SEQ ID NO: 450460 - DNA, 366 bp, Triticum aestivum
tgtctccctgctgctcctctctccagttcgtcttcctccttcggatcgagaccttggagcctgctccatggatctgttcatggagccgaatggcgactcggaacagaggattagccatgggcagacgggggatactggtgctgcgcggcctatagagtcccaggcttctattagcgtcgccgagggtgacattcgccgtgtcggagacctctgtagcggcggcggaaatgcgtgatttgttggcgaggacccgctctgcaagtgtgttcggaggctacgagcggatggacacacatagtaagggatcaggaaagcccctccggagcgcgagttcaaccataaccggaaaagtgcgcttgaactatc

SEQ ID NO: 450461 - DNA, 295 bp, Triticum aestivum
tgtctagctgtgatggagactatgtaacctcagtgactaaaatgtgcgcgggggttctaaataccattcaaaaactcatttctgaagttgacgagggatatatcttagatgatagatgtgtacgtgctgctcccaaacctgtgaaggatgatgcttcaagaagtaggtttctatcagaagaacagattcagccaaccgaatcatctgctgatcccactatcaattgtttctcatatcggtactacctatctaacatttgggcgaattacaacaggactagagatgctcttaagat

SEQ ID NO: 450462 - DNA, 153 bp, Triticum aestivum
catctcctcttccacaaccggccaccgtcccgatctgaaggtctccgaccagatcagcctcctccccaccacggcgtgcggcgaggagtccccggatcgctcgccgtcacccagtgcggtgcagatctgggagtccgccctcaccaagcattc

SEQ ID NO: 450463 - DNA, 273 bp, Triticum aestivum
  unsure (1)..(273): unsure at all n locations
tgngcagcattgggtgagagacaaggagaagccaatcaggaagtgcgccggccggcctcacgccatggcttgtcacgtgaaggccattgtgtttggcgccgccgtcctggcagcatttgttctcgcgactgagggccgcgctgctcggaaggacctggggctgggcctcgacctcggcggcggcggcggcctcggggtcggcacgggcggcggtctgggagtcggcaccggtggtggcgtgggcatcggctaggaatcggtgtcggcattggc

SEQ ID NO: 450464 - DNA, 358 bp, Triticum aestivum
tcgtgcgagacttttctttccatccgcaggagatcccgacgagaaggcgaaggcgaagccggcggcgcaaccgaagcccctcatggcccgctcgtcctcgcagtcccagtcctccgtcggcggtgccggcgccgccggatcccgcccggccaccgccgggccccgcggcacgcccgccgccacggctggcatgcgccgccgacccggccgcacctcctcctccgcgtccggtggcggaggcttctccggcggcggagggaacaacatgctgcgcttctacaccgacgaggccccggggctgcgcctctccccgaccatggtgctcgtcatgtctgtctgcttcatcggcttcgtcacc

SEQ ID NO: 450465 - DNA, 170 bp, Triticum aestivum
cgcacgcacgcacgcacacagccgccaccaccccccaccggcccacctcgcgcccgctttgccctgctctgcgcgcacgcgcactagcccatcgctcctcacagccgcgcctactgccgtgctgaccatgaaccgcccgacgccggcgcaccacaggggcatgccgccgc

SEQ ID NO: 450466 - DNA, 263 bp, Triticum aestivum
ttttggccgctacccacaggccatcggaagcttggtggctgtgttcctgtcatccttcgccacaatgtgcatcttcaccagtggcacgctctacgccattggcggcgtctgcatcaagccggtcctggtgctcgcgctgtggatcctctacttcctgttcccgctcatctcgctgccgctgctccacccgatccagatcatcatccgcgccgacgccgtccgcatgcagctgctggggttcatcatcgccctcttcgtctccg

SEQ ID NO: 450467 - DNA, 351 bp, Triticum aestivum
tgcggacgcgtgggtcggaacgtggcctctgggcaggtgttgttcacgtcggaccagacactgatggacgagacgccgacgaccggcaacaagacagcggtcatggtagccgacaacgccgccaatcctatcacgtggatggtcaagttcgcggtggccatggtgaagatgggaggcatccaggtgctcaccgggaccgaccccggcgaagtaaggaaggtctgcttcgccaccaacaacgcgagctagaatccgtggagctgcatgtacgatgactaaacaaaagtgcacctgggcagctagagccggtgctcttagttggtttaatcctttttgttttggtttcattct

SEQ ID NO: 450468 - DNA, 420 bp, Triticum aestivum
tgctgcaaatgatgtgatatacttggttgtttcaacatgagtacggctcagtaggaaggtcaaccgtggggaggcgcaacatagcgcggcctcagccaattaggtgtcctatctctttgcccattgcttctatggaactcttttgtttggcttatgaaggcacattcatcctgcaagtacaatcatgattaagagttagaatgcccctgcacatccgtttactttcttacattgattggtggttcttatgccttgtataatacgccttctcacataatagtttggtaaagaaagaatgaactcactcctgaattttgcactaattatatacttatttcactattaataatttgtatttgctatatcttttctcatgagttcgtcaagtacctttctaaacatgcttagatgcttttttgt

SEQ ID NO: 450469 - DNA, 339 bp, Triticum aestivum
tccacgcgtccgggttgattggcagcggcggtggctgaaggtgaggcgctgctggagacagctgctgctacactggaggatgcgatgggtcggtgagggaggtaggttgaggacccatgatgccgacgccggcagccagtggaacactggtcagtggacgggtctcgtaagccgccatccttgttgacatatcatggagttgttcctggagggttgcaagttgctcttgatgcagcgcccatattttggtgtcaggaagcgtgaactgatactcggtggtaggttcggcaccagacatggaatctgataccaaattggaacaacccctgggtctgatgg

SEQ ID NO: 450470 - DNA, 245 bp, Triticum aestivum
ttctgacttcaagactggcgacgccaccgtcgaatacgacgtctacgtcatgcactagcctgaaaatgctttgagggcttactttcggctatgctttgagatttgagcgttttctttgtcctacatatcggtgcatttacttgggttaattgtgcaagttgcaagaataagtggccctatgtgaaatagtatactctttttattagtggaacttgtttaacgcagaaaaaaaaaaaaaaaaaata

SEQ ID NO: 450471 - DNA, 423 bp, Triticum aestivum
tgctccacgcgtccgcccacgcgtccgcggacgcgtgggacccggacatgggcgagaacttcgcatactactgggagacgcagcgctacctcgagtcagaggagctcgttgacagcatcttcgtcggggcgaccgaagacgccatctcgtactacgactccagctcgccggacggttcccactcgtcctcgacgccgatgggggcggccatgccaggggcggggatggggatgggcggcactggggcgaacaagaacatactgatggaacgcgaccgccgccgcaagctcaatgagaagctctatacgctccggagcgtcgtgcccaacatcaccaagatggacaaggccttcgatcatcaaggacgcgatcgagtacatccagcagctgcaggcagaggagcggcagatggaggcggaggtg

SEQ ID NO: 450472 - DNA, 115 bp, Triticum aestivum
attcagaaagaacaacagaaggataagaaggaaaatgcagtgcaagttaaggagccagaagcgcaacccaaaagtcagggaggcgcggcacaaagctcacaaagcaagaaaggcg

SEQ ID NO: 450473 - DNA, 353 bp, Triticum aestivum
tgtcacacgaggcttgagagagagagagagagagagagagagagattaccatgtgaacaggcccttctttcccctgcttcgggccaagcttaccgcgacgacgatggcgaggctgctgcttctcgggttctccctgctgctgctcacggggctcaggcccggccgcgctttcctcgtcgcggaccctcagcccgacgtctcagacgacgtgccggcgctgctcgccttcaagaaggccatctacgacgacccactcgcgaggctgtcggactggaactccagcgacccggatccctgcctgtggttcggcgtcacctgctcggatttcgacgcccgcgtggtgactctggact

SEQ ID NO: 450474 - DNA, 386 bp, Triticum aestivum
tctcccacgcgtccgcccacgcgtccgcgagaagaagcgagatccagatcgagctgagctgagctgcccgggccgccggagctgagctgagctgctctgaccgccggaggcgaagaagaagaagaagaagagcaagaagatgaagcggaagacgcggaacaagatcgtggtgacggtgctgctgctgggggcggcggcggtgctgatcggcggcacgctggcgctgatcctgacggcgggcacctggaaggtgaagctcaaggagtcgcaggagaaggtgtgcaacaaggggtggggagtgctccggcaccaagtactgctgcaaccagaccatcaccgacttcttaaggtgtaccagttcgagaacctcttcgccaagcgcaact

SEQ ID NO: 450475 - DNA, 384 bp, Triticum aestivum
tcttccacgcgtccgcccacgcgtccgtgtgatctgacaatggagttcaagaaaccaaaaagtaaatgcaatgctgctgcagctgcaaggaaccgtcatctttgtgagaaccttgcggacagttgctttcctattaatcaagggcattctgccagccgacttcatgaatttttcttgcgccaattctgtgatgctcatacttgcaatgggggctccaaacctttccccaaaggtggcaggaaacaaacaaacagattctacctggctctctgcatcttgacaatgctgcttttgcctgtgttctatctcatagtatttttacaccagagggaaatgaagaagggagatcaagttttcaaacgaatcggaaaacccgtgcacaag

SEQ ID NO: 450476 - DNA, 157 bp, Triticum aestivum
ggcggggccgagctgccctacaacaccaccgaggacgccggcaacgccacctctttctccggctacccgcagacggacctcctcacgccgattgccaccgccggcgacatcacgcagatccaggcctcggtcggattggtcggcacgctcttcgccg

SEQ ID NO: 450477 - DNA, 140 bp, Triticum aestivum
tggacgcgtgggtttggttcgggcttcgggggaaaggtaaggccggggcggggaggaaggcccacaagccaatttgggattctttttcttcccttcaggcccgggattccggcccttggcggctggccgaacgggctggt

SEQ ID NO: 450478 - DNA, 364 bp, Triticum aestivum
gccgcctgctccggggctcccaccgcggacaccattgcagacaccagctgcgcggccgaggcgattgtttgcacgacgtccatggcttcgcctcagggcaccaacacaactcctgatagagtcgaatcaccacaccgacgaagccttttcttgcaagaattcaagaatcagttccctgctgtcgcaattccacaaacaaatggcatgcatgctcccggtcgcaggtacgggtagcaaaatccccctttctatcaacctgggtatcagacctaccgatcatccgcttcaacccagaaatcatccgtccaaagccaaaccccaatcgtcagtccgaatttccaaaaccgcagcacgaatcgtgaca

SEQ ID NO: 450479 - DNA, 68 bp, Triticum aestivum
cttgcaccaagagcttatttgttttgagcttccatcattgcattcatctttcttggatttgctccatg

SEQ ID NO: 450480 - DNA, 200 bp, Triticum aestivum
tgcatacatcgactttgagaagctggaagatgccatttttgcccatagagccttgaatggggcagatttagggggcaaggaattgtgtgttgatttccagaggtccagaggcagagcggaacggttggaagcaggcaacttcaacagtagaggatcattgccacccggtgaaatgggagttggacatgcaaagggtttct

SEQ ID NO: 450481 - DNA, 159 bp, Triticum aestivum
ttttatgaaggagcaggagatgtaaaggcaattgtaaattttgctctgtcgcaggtcaaaggtcttctcagagataggttggatggtaagacatcaggaggttcaagtggcaaaacctctggtggctcaagggagaaaaaaactgaaccaaatgaatca

SEQ ID NO: 450482 - DNA, 244 bp, Triticum aestivum
gggcgctcctccccgcctccggcagcggcggcgccggcggcggggagcgcttgagcatcgacgacgcgctggcgctgcacgcgggggagttcgggcggtggcagctgtggcacttcctgctggtgacggcggcgtggacgctggaggcgatgcacaccatggtgatgatcttcgccgaccgcgagccggccatgtggtgccccgcgggggaccgggcggtgccgcgaccgctgcgccggcgccg

SEQ ID NO: 450483 - DNA, 167 bp, Triticum aestivum
tcaacgtttcttaagagagctgcagttcgattcaggccacaattggtcaagactgtcactgccaactatagtaccaggaaacctctgctgtggcgcctattcaccttcaaaccttatcctgaatctaactggagatcttttaaggtgcgttgggatgagccgtcaac

SEQ ID NO: 450484 - DNA, 336 bp, Triticum aestivum
acgcgtgcggtggctctgaatccacttaactattgactgagaccacgatggaaaccagagagatagttacatctgaaaccacgcagtgtgttgcatcagacgaggtccagagcaccatcttggcatccgatgctgttggtactttggatgacaaggtagatagtgacggtgaagacatcatcgatcatcacgtggatgaggacaggatcaccgaagtggagctgtggcaacaacttgaaaacgagctgtaccggaaaagggaaggggagaacaacatattggaagagatgactgaaagtaacatctgcgaggaagttggcggcagagctcaagatg

SEQ ID NO: 450485 - DNA, 305 bp, Triticum aestivum
  unsure (1)..(305): unsure at all n locations
tccacgtgtccggctcccctacccacacccagacacaacaccacattggcgccgccacccaacgccccatctcccttggaggctcggaccttgccgccgngcccccccccccccccctacccaccccttgagcgaggaggaggtcggtaggcatccccagatctgttaagggattcgaactggagctctcgatcgctcacgcgccgggcacaacctccgtctgctcttattgctcgccggcgacgcgagcatggagcttcctccgtgctcgcttgggctcgggacaccgctgctagtcaagacac

SEQ ID NO: 450486 - DNA, 305 bp, Triticum aestivum
tttgattctttgccagtctgccttgaagccaagccagtagaacgttctgcaggtgatatgattggactgggtggttccttttcaacaaaagaaaccgagattagatgtacaaaaggaacagaaactctttggtcagatcgcatctccggaaaagttactgtcttggctggtaatgcaaacttctgggcagttggctgtgaagatggctgcctgcaggtttacacaaaatgtgggatgcgagcaatgccagcgatgatgatgggctcctcggctgtttttatagattgtgatgactgctggaaatt

SEQ ID NO: 450487 - DNA, 340 bp, Triticum aestivum
ttcaccttatctcctacaccattgaccagacggcggggctcacctgcccccccttggccttccacatcgtcctgctggcttccccggttcttcctcgtttttgatctcagtcactcatgtcttttgaagtcagcgagggatccccttatttgctctcgcgctacttctggttcatatatcgcataaaattccgggacttcacttgatacaagtggatcatctggagttttgtgcgaatacttcctatcatgtgaatcagcggtagttggcttaattggcaagactcaaacttctctcatctgagttcagaaacatttgttgcttgagtctttggtgtact

SEQ ID NO: 450488 - DNA, 330 bp, Triticum aestivum
ttgcaaggaaaaggagcgcggcttcatcgtcaagaaggaggaggcggcgaacgggacaccgacgtccggcaatggccgccggggccgcaagtacaggtacgaggaggacgacctggacgcggagaccgccaggagcagcaagctgatgatgccggacagcgaggagaccggcgcgcgcgagatgttcgacgaaataatgctggaggggtacgagacgtgcatgcgagggatagaggagctgcgcctcgccatggacagcgaggccaagaagaagaacgggaaggcggcgcgcgcgaagaaaagcgaggttgtcgacctgcgcaccatgct

SEQ ID NO: 450489 - DNA, 380 bp, Triticum aestivum
tccacgcgtccgcccacgcgtccgcccacgcgtccgcccacgcgtccgctccagcacacaagcaccccagctgagctcgaagagcaatggcggaagcaggggaatggctgccgtgcgtctccacgctggcgtcctgcctcctcggcttcgcgctctacttctacgcgccctactggggagtccgcggcgtgccgggccctccggcgctgccggtcgtcggccacctgccgctgctcgccctccacggccccgacgtcttcggcgccctcgccaggaaatacggccccgtcttcaggttccatctggggaggcagactctgggtgatcgtggccgacccggaactgtgcaggaggtcggggtccggcagttcaagagcatc

SEQ ID NO: 450490 - DNA, 172 bp, Triticum aestivum
cccacgtttccgcgaattctgtacattaggttgtcctttttcatttgttacaagcagctatatgtcatgttagattcgtttgagtgagtaatggaacttttaggtctacttggcatgccactgcaacttactgttaactcttactgcagttatatttcatgttagattggac

SEQ ID NO: 450491 - DNA, 340 bp, Triticum aestivum
tcgaccttcgagccccccttctccacctcgtcactgtggtcacctagcttgagctcgagcgaaggagcgactcggcaggacgccggggggcaggggcagcagccagccgcgcctggccccgtgctctgcaggcgcccatcggcctcgacccggccgacggcaggaggagctcgagccgaagccgaggagcggggccttgatccggacttgactgcctactggagcagctggagagaagtggtggatccgacggggctggaatccctcatcaccgggcgtggaggatgtatgactcgcgaaggaggtagcagattgagcaaaatggagtggcctttcccat

SEQ ID NO: 450492 - DNA, 311 bp, Triticum aestivum
ttcgtcgccgcccatcgcgcacagaaaccacgctccaagacaccaaaacccaccgatcccccatggagaacggcgacgaaaccctcgtctcccccgccgccgccgcctccgtggaggtcgagaaggctgcgcccaacggagacgtcgcgggcgaggaggtcaccctcgccgacgccgtccaccccgccaagtcctacgccgccgtcgccgccaacgccgagatcgaggacctccgcgccaccaagctcgacctcgaggagcagctcgccaacgccagccaggagaacaagaccctcgccgcggaggcccac

SEQ ID NO: 450493 - DNA, 431 bp, Triticum aestivum
gtgcaaggtggtgatggcaatggagagcgatggcgagcgagcgagcgagcaatcaggcaaagcaaccttggcgacggctccatttggatatttggatgggtcgagccgtcgacaacggaagataagctcggagcaactgggtgctgcaatttggcctggaatgatagttcctcctctctccactgctcggtgcaactcgcccaagtggatcaaagcgaaactgtgccagtatcggatcgtcgtggttccttctgagtcgtagggttatattttgtcactgtcagagtgcgtgtggtaaaaattacaaactcgtgaatcgtgatcgagcataatggaacttgtgaaactttacaagcatctgtggagagaattccgggagtgaattgttaccccatttgttctttgatcaatgaatgtttcccattggcgtc

SEQ ID NO: 450494 - DNA, 398 bp, Triticum aestivum
ttcccacgcgtccgctcctgcagtggatcaggtcattgaccaccgcccgatgcggcgtcggactagcggatccacgctgctcctccacctcccgaccaatgcccccggcccgtcctgctgctcacctcctcctcacatatgcatcaacaaaacatggcagccgctgcagtccacatcgttcaacagtagcaggtcaactcctccaaggtcacacaagctcgccgccaaaagcccacggtctattgagccagagatggcactggacgctgccgtggccggtcatctggatcggagccaccaacccacgtccgatagaggggggctggtagcagccccgttgaggggattgggcactatctgcagctacaagtggcatcgacctgcagctgcgggagcgt

SEQ ID NO: 450495 - DNA, 325 bp, Triticum aestivum
gccagtttcacaaagattctgctcatcatgcacctcattgctttcatcgccctcacaatctttcttggagtccaggcttcttcccacccgaatcctacctacaagcccttcgcccacttcattccgctcgcctcttctgtgatattatctattatcgctgcctgcttttggactatccttgctgtcactaatcctgcaaaagccatcaaaacatctctctggacagctcctgtttccgcacttggctgcgatgtagtcatactccttgtcggtgacggcgaagcccttggcatcggagtgctcatagtgtgatcgccattgcagc

SEQ ID NO: 450496 - DNA, 318 bp, Triticum aestivum
tggccgccgccgccacctccacccgctcctcacctaccccggcggcgaccccccagggacaccccgaatggcgacggcggtcacggcgtccgtgacggcggcgacccgcttcacgcgcctggcgggcgtcgccctccggcgcagcagctgccgcccccacaccgccgtgcgcttccagcgcccggggctcaccaccaccgcgctcctcaggcccaccgagctcaagcccaaggaccagggccagcccgagacgctcgactaccgcgtcttcctcgtcgacggcgccgaccgcaaggtgtccccgtggcacgacgtgcc

SEQ ID NO: 450497 - DNA, 359 bp, Triticum aestivum
accaccgtcattactactagaggaagcttcaactgttgtgctcttgctctctagctagtagtggttgctatcggtgctactaccgccgccgtccaaaccctagccctgatgccgcagcaggaggtgcccgaccagatcgccgcagggtggctcgcggtggaggcgccggagcgaacggggagcctccagaggagcggctccaacagccgcctcaacgcgcaggcgccggaattcgtgccgcgggtcgcggctggtggttccaccgccacagccaccgccggcagtgattcgtgtgtttgcggtgccctcgcctccacctcgcgcggctttctttgcggctcccccgcctcccccgtcgt

SEQ ID NO: 450498 - DNA, 53 bp, Triticum aestivum
tgttatcattcccattctgataggactgctaacaatccatatgaacaaaagag

SEQ ID NO: 450499 - DNA, 289 bp, Triticum aestivum
tggaaccatgggtggaagcggctcacatgaggaggggcaacagctcaacatggcttgggtggcaattctgtgtcgctagtgtggcggggttgtcggctcggtcgacgcgtcccagaggaggcggtctgactttacgtcagggcagcggccccggaggagttggtggcggcggtcgtggtctgcggggggttgccctgttcagcttgggttgtgggtgactaagtcgtgcggcattgcagcttgagggagagcggtggtatgtcgggacggcggtcccggaaggtggtat

SEQ ID NO: 450500 - DNA, 389 bp, Triticum aestivum
gagatccccatccggcgcccgtcccagcagcggagggggcgcagcagcagacgacgacttcgccttctactactctttcttccaggacgccgccgccgcgtcgccgctcccgctcgcgctcgacggagccgccatgcctaacaaccgccggaggaagcgcggagtggacgacgactccgccgcggcgcccatcaaggacggtagcaacaacggaaggaagcgctccatcgccaccataataacttcgctcgccgcgctcgaggccgagggccacgccgacagcgcgggggccgccgacgcctcccgccgcgagctcgcgctcttcgagtccaacgccgataacaagtcgcaggccatgatggactacttcgccaagatggagggcagct

SEQ ID NO: 450501 - DNA, 343 bp, Triticum aestivum
ggaaccctcaattgccgccgccggccgaccctcgtccctcccatccccctcgccgccgccgagggccgctcccgggcaaagcccgggcagggccggcggcggcggggcctctccaccgcgcgactccccaccccatggccatggcgcatgtctctgtctccagcggcgcttggtggcgtggtgctgcgattcgcggcggcggcggcctggcgcggtggctgcgggggtggtttgagccccgtacggtggtgctgcctgtggcagcgatggctgctggtttcgagtccgccccgatcctcttctttggatctggatctggccggcccgtactcggtcgtggctg

SEQ ID NO: 450502 - DNA, 395 bp, Triticum aestivum
tcacgcgtccgcggacgcgtggggtggtaatacaaagcgcgcagatgatgagtacagtgaattgggtagtctttctcccgaggtgtctgctatatatcttgcaatgcagcactctaagctggagtgtattgatgaacaaagtcaagattctatctcaacagatggcgggtgtgctgatcctgatgagactgaggagcttgatgagtttgacccttataccttcataaaggatttgcctgagttatctatggttgtacccaagtttcgacccgttcttcttccaaagcaaactcggagctgccctcgaaccacccttgtccttgatctggatgagacactggtgcattctactcttgagccgtgtgaagattctgatttcactttcccagttcatt

SEQ ID NO: 450503 - DNA, 481 bp, Triticum aestivum
  unsure (1)..(481): unsure at all n locations
agctgaggctatcttttcagctgcatttagtgaacctgagaatggcctgtcaacagcccttaagttatcggctgaaggtaatggccaattggatgctattagtggaaatccacctgcgacagataattgtcagacaaatcaccatagctctgaatgggttgagctatttgttagagagatgatgagtgcctctgacataaatgatgcacgggctcgtgcatcaagagctttggaggttattgagaagtccatcatggagcggacaggagccgaggcagtgcaaaacttgcacaaggaaaataagatgctaaaggagcaattagcaatagctcttcgagagaatgctgttctgaagcgnggggttgcaatccaacacgagcgccaaaagagtttgatgataagacaangaggttcacaacctaagcaattgattttgcagtatcaggaacaactaaagactctcgagatcaataattatgca

SEQ ID NO: 450504 - DNA, 321 bp, Triticum aestivum
ttggacgcgtgggccgccgccggcgctttcccatccccatccccaactagtgagcgtgaacccgatgtgaggcgcgcgaaatccctccgccatggagcatagtgacggcgagaccgccgctaagcgagccaagctctcctccagcggcagcgaggacctcctcagcgcgctatccgacgacgttctcattcacatccttctcaggctccgcaacaccgccgtcgccgctcggaccagcgtcctctccagccgctggcgccgcctctgggcccttctcccgggcctggactttctccccgacaccaacccatacagcatacc

SEQ ID NO: 450505 - DNA, 195 bp, Triticum aestivum
ttttcggtggcttgcaatcgagtagctgatcctgccatacataacctattgttaacggagaagccgatgtcaattgccgcggctgtcaccggaaccgccaccgcggcggtgcatgcgcccgtgcaccacgcgccggaccacgcctatacgcagcgcacggcgccgcggcgcgagcagtcgccgatcaacccgagc

SEQ ID NO: 450506 - DNA, 131 bp, Triticum aestivum
ctaccgccgcctcgctgcgctccaatccgtgccgccgccgcgtttcttggtccggcggctggttggcggggacggggggaggcgggggatgaaggggctgggcggcgggccgaaggtgctgctggtgcact

SEQ ID NO: 450507 - DNA, 71 bp, Triticum aestivum
ctgctgcggctagcggggcgacggttgcagtggagagcgtggtggtggtgcacaacgtggccaaacggcac

SEQ ID NO: 450508 - DNA, 353 bp, Triticum aestivum
gaatcacaaggggagtcttgtccaccaagaaaacatggaattatacagaaagattaacctaattcgacaagaaaatgctgagttacaaaaaaagctctctgagacggtggcagcgactgaagttaaccgagattcaagaactacatacaattttgcagttgttgaagatgccaatgtttctgttgatcttgaactcaattcaccgcagcaacaaaatgatgttgagcatactgcgccccctaaactaggattgcaactacatccatgacgatcgtggggtatgggattactcttgttgttattattctcaagggatacaattcagagcagccagaatactcttggttgtaaag

SEQ ID NO: 450509 - DNA, 288 bp, Triticum aestivum
tgccacttagctatatatctacacgtgcacatatatacctacgcacggttccatttcggttgatgagctgagagcctgagactcgaccgaatctaggcgcctagatcgaagtgatcgagcatcacttgggcgcgcgctcgcaatggacagcagcagctggatccatggatactacggccccagcagcggcgccggcggcggtaacagcggcttcatgtgcggttacgccgacagctgcgtcgttctcgaagagctgcacaacaggaaggaggaagaggagcgcacgca

SEQ ID NO: 450510 - DNA, 286 bp, Triticum aestivum
tcttctttctctctctctctcgccacagtccccgccagatttgttgcctcgcctcgcctcgcctcgcctccacctgtatgccgtcaacgcccccatggcgtcaaccgcaccacggccgccccgccgagccgcgaccttgacactcctcctgcccttcctcctcctttcctcctccccgtccctctccttcgccgcttcgccgccgccgtcgagccccgtcccgttccacgcgccgccgcggtgggtcgcgtgcgactccgacagcgcccccccgtcgtcgcaccac

SEQ ID NO: 450511 - DNA, 423 bp, Triticum aestivum
tacgaaccaaccggcgcgaccgaatcaaaccgcgcaaccgtgcgcgcgactcctcgtgggggccgggcgggcgcgatgcccctggacggcggcggcggcggggcggcggtcatgttcctggcgtacgcggccctggccgtggcggcgctgcgggccgtgctgtcctacaagtcggtggcgcacgcggtccgccggctgtggcggtgggcggacgagtgggcgcaggcctaccagtactacgaggtgccgcgcttcgtcgctggcggcaacgacggggccgagaacccgctcttccgcaaggcggcggcctacgtggcgtcgctgccgtcgctcgaggacgcggacgccgcctgcgtgctctcctccgccagcaagagcaacgacttctcgctgcagctcggcccgggccacaccgcgcacgac

SEQ ID NO: 450512 - DNA, 196 bp, Triticum aestivum
ttcgtctttggacgcgtgggttgtttttttttttttttttttttttttttttttttttttttttttttttttttttttttttttcaggaaaaactccaagggttttcatatgcatttatggggaactaaatcactcaaccgaaaaattttcatgaccgaaaaacaaaggaggcagtggtatatttgctccctggat

SEQ ID NO: 450513 - DNA, 243 bp, Triticum aestivum
ttgacttgccttcgccgtcaccttcctccgcacgcgtttccaatccaagctagctagccaccgccgaggcgacccgcggtagctatataaagccgcggcgtcgccggcaagccgcaaacccaaaccaaccaccgcaaacatccatcgcgttcccggccacttctacaacctgctttgcttccgcggcgcgatcttgttttagctcggcctccatccccgcttggctccttgcgcaacagcttc

SEQ ID NO: 450514 - DNA, 437 bp, Triticum aestivum
ttccacgcgttcgggtcgctcgcccaagcgcaactcaatcacccgcttctcttcccccaaattctcaaatcgcgagctcggaacacttgcaccctactcggataggatcggcgattcgcccccctagttcctcgtcgggaacttcagagagcttcagtacaagatgcaaaggggaaggggcgggagaggtggtctctttggttttggggacccttttcctgcttttggcggctttgtaccacctgggaaccttatgtccagtttctttcgggggtcaagtccctttgatgatcccttcttcaccaatccttctggttctttgattggacctagcctatttgagcaaagcatttttggttcaagcatgttcgggccacacacagctctaaatggaggaggcttccagcagcaaggtcctgaaccaagcaggccaaaag

SEQ ID NO: 450515 - DNA, 111 bp, Triticum aestivum
atttacgtcctcagatctcgctctcgcctgcttgcgcagccgacggcgacagcagcatgtaaatggcggcgagcaacctcgagggtgtgctcctggggatgggcaaccccc

SEQ ID NO: 450516 - DNA, 474 bp, Triticum aestivum
cggacgcgtggcggacgcgtgggcgcgacgtcgcgtccctgctctctccaccccgtcagcgatctcgggcgttggttttcgaggtattgtggagagctcttcaatttcatccggctctgttcttctgagcaaagggtgagaagaatctttcgccggattgtccccaaagatgccaggaatcatagtggatggagttgtcacagaggagattcagcatgaggtgggttcctctcaaaacaaggagaatttgacggccccaaccatggcgccaagcatgcagagtgaggcacttgagatgcacgttgagaattctggtgccggggagccctcgattgagcagctctacaacaacgtgtgtgagatggagagctcaagtgagggcggcggatccccatcacgcgagagcttcgggtcggatggggaggaatcaaggattgactctgagcttcgccaccttgttgctggggagatgga

SEQ ID NO: 450517 - DNA, 249 bp, Triticum aestivum
tttactcgtccgggcgaatcttcttggcgatggctggtaagcagggccgcaagaaggcgaggagcccccccggatgccctcagctgcgtccgatcggcagcaccgtctccggatcgaagaagcctgcggcggcgacggttccttcgtgcaagtaccacctgtcggaggcgtctgtccaggcggtcctaaaccacaagagggtgcctttcgtcattggggactacttcgacgacctgacccccgaggagc

SEQ ID NO: 450518 - DNA, 205 bp, Triticum aestivum
ttcggactcgtgggcggacgcgtgggtcggttgccgtcaccaagttccttgacgatttggccaagattgatttccccggtgccaagctggtgagcgacgcggtggccaagtccggcaccacgcccctctccccggccatcgtcttcatcttggacaaggttgcgcctttcgtccccgcgcccaaggaggagcccaaggccgagcc

SEQ ID NO: 450519 - DNA, 263 bp, Triticum aestivum
ttccactcgtccgaattgtgcaacgaaagagcacttgttctgccgtggctgcatcgaaacctggctgaaacaaggacatcaccagtgccccttggatcgaaaagaactcaaagttgacgatttggtgctgaacgaattcgttcggcattccatctttgcgcaacgcaccacatgcacacacgttccgctctgcgactgggttggtgtcattggaagactggatgaacacctcggctccacatgtcccctgcagaaaattgtct

SEQ ID NO: 450520 - DNA, 413 bp, Triticum aestivum
gcaacccgctcccgcgtcggcgccgccgcctccgcagcgccttccccggcagaagccccagcgccccaccctccatggcgaagaagaggaagcgcagctccgatgctcccgcgcccgcctccgtagagaagcccgacgactctgcgccggagcggccggagcgcaccctcttgggcttcaaggaccagccggactccgccgccgagcctgcttacaaggacgcggggccctacttccggaacagggaaaaggtgctcattacgtgctcccgccgcatcatctacagggtaccggcacctgatgcagaacgtggtgtcgctgctgccgcacgccaagaaggacagcaaggccgagtccaagcagagcatgtgcagcgcgctcacgagctggtcgagctcaggagctgctccagc

SEQ ID NO: 450521 - DNA, 204 bp, Triticum aestivum
actcttgtttataagtaagcttgtccgttgtgcggagaggggaggcggataggtacatacacatggaagggttgcagagatcgtcctccactttcagaaggtccggctcgtcgggcctggtgtgggacgagcggttcctgaccgagggcgccgaggcgaaggccgtcggctagggcggcacggatgaagcccagccggagatgc

SEQ ID NO: 450522 - DNA, 377 bp, Triticum aestivum
tccacgcgtccgaagataagctatatacagagtggagaggtcacacaccagagctagatacagagaagcaacaccatgcgcgctccggcgagcctcctgcaccgcgtcgctctcgccaagactggtccgggcgagccatcgtcgtcgccgatgagtatgaaggctcctgagaaccagcagacggctcctgtgatggcagtgaactcagacatggtgctcatcctagcgtcgttgctatgtgcgctcgtctgcgtccttggcctcgccctagtctcccggtgcacaggccgacgccgccgctcgccctcattcttcgaccacgctcctccagccccaaagggcctcaagaagaaggccatacacgcgctccaaccgtc

SEQ ID NO: 450523 - DNA, 359 bp, Triticum aestivum
gacggaggctcgcaaggctgaaactgcagtctcggcaaggccgcctctctgtagctagcgtagcagacttctgttcagactgttcttgcgtgcagtgcacttcttggctagctagctactcggccatggcggatcaccagaggcagaggatccacccggtggacctggaggcgggccagccgaggccgtcggcgccgctggtgccgccgggcagctcgttccggtccgacaagggcgacccggccgctgccccgacaggaggccgccacaccaccagccgctgccgccgccgccgcgccgcgtggccgcacctgtgccgctgccgccaccgaagcggcgcaggggctgctgctgccgct

SEQ ID NO: 450524 - DNA, 200 bp, Triticum aestivum
ttgcctagctagtgccaaccaagctacgcagctcaagctcgacccgatcgatggccgggaggaagcaggcgacgatggcgagcgcggcggccgtggcgctgctgctggccatggcggccgtgtcgggcgccggcgcggcgcccggcccgctgatgatgtgcaatgtggacgtgtaccgcatgatcggcgcgtgcaggtcg

SEQ ID NO: 450525 - DNA, 95 bp, Triticum aestivum
gtaagttaataagagaacctacaggattgtatgctgtatgcactattgttctgtgtccacgtgtactgttttattcatggacggtcggttgatcc

SEQ ID NO: 450526 - DNA, 261 bp, Triticum aestivum
ttgtacgtggacgaggcgctcctcgccgccgccgcctacatgcagatccccacgggcttgccgaggctgcaagtggggcccgagggcaataaacaaattgttcgttcgggttcaagcagacgggttggattaatcagaccaaattcacccaagtccccttttgctagtgcaagtactttagagagtgtagaggggtctgatgaggatgccgcgatgaaagtcaacggcaaactagataatggccatgcgagcacaaacaga

SEQ ID NO: 450527 - DNA, 192 bp, Triticum aestivum
tccacgcgtccgggccacccgccagcggtcggctagggattggtcggctccttcctcctccgctcagattcatccacttctgcctcagctgcggctgtccgctacaacatcaggctccgtcgacgccgcgcagtgcctcggtgagccgtgtgagcagactgccccctctgtatctctcccaatctctcccct

SEQ ID NO: 450528 - DNA, 409 bp, Triticum aestivum
tgggctgcccgtgctgcggggagctcggatgatcgcgcgctgctgagcgtggcgtccctgttccccggcccggcttgccccgcgacagcagagcacggacccagcgctgcggcgtcagcgaggatgaggatcgtccaccagcacggcccatgctctcctctggccgatgcgcacggcaagcggccggcccacgacgagatcctcgccgccgaccagaaccgcgtcgtcgtcggggacggggtacctggacttcggcccggggtcggcgggcaacaacgcgaggctgacgccgatgctggccgacaaggggccgacgttctactacgtgggcatgaccggcatccgcgtgggcgggcagcaggtgcccatcgcggagtcggtgttctccacggacgggacgctggtggac

SEQ ID NO: 450529 - DNA, 431 bp, Triticum aestivum
ccaagaaagtaaattgcataatccacttaggtccatcttctgtgacaaatactgttgattatcagaactggatgaaatcttttggcaccacacagcatatcatggcagggcatgaaaataaaaacatggaagttcctatcctgaaaggtagtgcaaggatatcttcacgtcttaattttgtatgccctcagctcttcccatcctctgggttttggcctgtggaacctgcaaatggtattgatttggagaagaataagagtacttcattccaagcctgtgaaagtgtgacagcagcaaacttgctgaagtttcgtctgcgtccatatgctcaactggggttggatagagcttctattccaagcttgtttagttatgaagaaattgtagatgaacttatttctgagattcctgagattaaagaagttcctgag

SEQ ID NO: 450530 - DNA, 393 bp, Triticum aestivum
tcttaaagttgcacattgcaaactgcagatctcttacatctgttggacaaggacaaccaccaattagggcattcaaatcccttacattcctaatcattgacaattgtgagaacctggcaacccttgatggtcttctaacagaactatgtttgcctgccattcgaaagattgatgttaggaattgtggcaagttacagttcctttttggtgaaaggcctgggagttttccttcccttgaagatctgttgcttcatgattgccctagcctcaaatggccaagggaattagtgttaccatcatccctaaaaaagctccacttagttcgatgtggggatatttcctcctggttttcaagctgtctacagaacctcaaatctttggctgaactggctt

SEQ ID NO: 450531 - DNA, 379 bp, Triticum aestivum
ttggtcgcgtgggtgatgccctgagtaaggggaaatcacatgcccaaagtatggggaaatctgtcgtgtcttcttcggtgccacctgttccttcatttgctcctggtggatctactcttggttctccgaacggttatacgccctttgggaatatcaaaaagatcaatggtgattcaagctcagccttccctgcccccagaggccctccacccagttcaatgccgaccttcgaaactattccgagacttcccccttactgttcacttccaacccatggtttgcagaaggcattccctcctccacctgcctatgactacaatcagtttagcttcagtaggccttccgcagttaatccatatggaatttatcaagatcccta

SEQ ID NO: 450532 - DNA, 337 bp, Triticum aestivum
ttctctttgctcacttgacaaggattcatgaaacgacgtcaggtttaggtcaggttgagaaaggagcacggcagcaacatgtaaaagcctttcgaagttgtgaatgagagaagagcaagcacctatgtcggcgaggagatcctcgtcgcggccgtggcagggcgtctgtgcagctgcacctgtcttgggaacagcacgtcgtcgtggccgtcgtcgagtgactcggcgacctcgtcgtcgcggccgtagtcggatgcctcggcggctgcgcagggcggcgacgtcgcggccgtcgtcggtgcggccgtcgtcagatgcctcggcggctgcgcatggc

SEQ ID NO: 450533 - DNA, 406 bp, Triticum aestivum
tcggcagcccagcagcgcacaaccagcatgaacgccggcggccggcgcgacatacggccaaggcgcagccgacacgcccctttcctgacccctatcccgcctagcccgtgttcctctccgtgcccggctgcacccctatgttcttccgcgatcgaggcccgtaggcacccctctgtccgccgcatctcaggcgacgtcagcgacgaccaaggacagcaggagcgccacaagaacacttcatcagcaatacattgatcagtagttcctgaggtgcaccatggaaattatcatcctcatctcacttgttgtgcttcttgtactgggagcactctttgctatcccggatccaaaacaaaggtgaaggaaaggatgcacgtgcagcctgaaatggaacgacatctacgag

SEQ ID NO: 450534 - DNA, 376 bp, Triticum aestivum
tttggacgcgtgggttgcgaaattcacctggaattatgcggatacgccaaagaagtgaaactacaaaagattgtggagacggtgaaacaagcatgccatgctatgtgctcgtgtgatgaatggtgccccctgtatcttcatcttgtgaattgtcccgtgaataagaacatgtgcactgtctccacctgccgtgtaaatttatgtgtgcctgtataacagaagactgagactgtgctagctatgtttgtggctctctagtcttaccggctttccgtgacagcaattacactgttggaaaatgtatctgctcaaagagatattcagaagcatatcaagacgtttgaaaaaaaaaacccacgcgtccagggacgcgtgg

SEQ ID NO: 450535 - DNA, 107 bp, Triticum aestivum
ttttgttaaatcaaaccgaacccggcctcactagctgtcactagccccccccgcccgcctgggccctccttaaaaattcggaggagctcgccgaccggcggatcggc

SEQ ID NO: 450536 - DNA, 404 bp, Triticum aestivum
tctttcgttctctcggtctcgcgaatgagaggcggcggcggcaagatccaagagcgacgctccgccctcctccgtccaaggctccgcccggcaaccggaggcgacgcaccaccgcctacacctccacgaactgctcctccggcgggggcaacggcaaccggggtcatcatcctccctctccccggatctcgtctctgcccagagatcgaaggaccttctctgttgtctgaaatttgtacccaagtgagcagctgtactgaagaacatcgaacgttttgcagtgcatctaactaacctgacctcacaagtgctgatttgtaggtctgctctgaaattagaagttggctttatctgaagaccttgtgtaaaattgcttggtgcctttcgaaagatttcactcagag

SEQ ID NO: 450537 - DNA, 393 bp, Triticum aestivum
ttcttcttgttatgctccccccggtcaacgcctttgcctgctgagcctgggaatgattgatccgctcatgatctacaagacgagaagcaagcccagttttgctcctagctagctgctttctcctcctcctccaatctccagcaacgaatgaaggagaagctggcaaccatattcatatccataatccatatctatatgcgagctattgcttgctagaaagcttcttgctcgcatactcggaaatgggcggatacgagttccagagggcggagctagatgcactggaagggcgtcgtacgcgatccaactgcggagccaatgagtctgacgttgccgcttctcaggcacataacaaatgatttctcccctgaatttgaaattagtaaagatgat

SEQ ID NO: 450538 - DNA, 346 bp, Triticum aestivum
ttgttaacgcgcgtgagctcacactcaccgaacacacaaatggggcgcgccaccacctgcctggccaccttgttgctcgccgtcacctttctgtttgcctccgccgccacgaagtcgcttacggccatgcagacggaccaggcggggactaagagcgggtccaccctgccggcgcactgctgcaaacaggaggagaaagcggtggccaagcctcagcttgttgttggcgatctagtggacttggcatcagcggaggagcaaggccagaagcctagccctcaccggagtaacaaaaagaagatccaccaccaccaccatgacgacgacgacgacgatgatgatggtg

SEQ ID NO: 450539 - DNA, 407 bp, Triticum aestivum
tcgtcgagagccagcgagcgagggatcgagcgatggcggcggcggcgctgcgggggatcggcgcgaagctgtcggcgaacccggagaaggtgacgagcgcgctgctgctgggctcgttcgtggcgctggcgttccggtcgtcggagcagcagggcgagatcgacgagctggaggcccgcaagtcctccctccgcgccgccaactccgccatgtcctccaccatgtgggcctggagggaggagctcgtcaagctcgccgccatgccctccccgcccatcaccgccgcccgcctccgccacatctacggcgaggaggacctcgccgtcccggcgcccaagccgtcaggcccggatgccgaggaggaacatgttcccctaaaaatatcatgaactcttccccgatgcttg

SEQ ID NO: 450540 - DNA, 102 bp, Triticum aestivum
gcccctctcctccgcctccggcatcgccagccccctgtaggtgcgtttccattcccaagaacctgagctcccccgtgctcgtcagcgcaaggtgggtggagc

SEQ ID NO: 450541 - DNA, 337 bp, Triticum aestivum
agataatccccataccatagccaaaccattccccgtacactagccacgcactatccatacaatagtcttcgagctttcagcagcagcaacggccgagcgcctgcgcccgcggccccgtggctgctcgtcgtgactcccacccgcggcgccggagccgctgcgccccggccatgtcacggctgcttgctccgcccccagcgcgggtggactgctgcgcccatgtgcagaggccggctgttccgcgcctgtgtcccgcgcgtcgggcctaatcccacgccgtctccgctcccggccggttccacgcctcccaggcgctggctgccggctccacgcacca

SEQ ID NO: 450542 - DNA, 451 bp, Triticum aestivum
ttctccccctgcccgtcctcgacctcgccgccggccagcgatggagcggcgatccaccacccgcttctcgccatccgagattgcgaggatggagaagttggtttcatcagacagaaaagagcaagtcttggttgatagtttctgccagaagcttgtagaagaatttaatcgttctccagctcgagtcggaagcagagctctacaggctacacaggttcgaggatggttccttgataagctccctgcatcaactcctaaacctgcttccttgcctactacttctgaagaaaagcctttagcctcagaaccagatgcgttagtttctgagataaagacttcagcttctgaagaaaaagctttagctcttgatacaagtatttcaaacaatgaggatgcactttctccagatttacccaaagagactacagataaggttcctgaatttgaagac

SEQ ID NO: 450543 - DNA, 431 bp, Triticum aestivum
cccacgcgtccgcccacgcgtccgcccacgcgtccgcccacgcgtccgctccctccctccctccaataattctcttctctcctctccgcctccgcaccaccatcggagaaaagccagcgggaaggggggaaatcaatccccatgcccccacccctcgccggaccagatccccggcgggccggcgcggagccttaggcggggatgggcggggaggccccggagccgcggcggctgagccgcgcgctcagcctggacggcggcggcgtcccggaggaggcgctgcacctggtgctcggctacgtggacgacccgcgcgaccgcgaggcggcctcgctggcgtgccgccgctggcaccacatcgacgcgctcacgcggaagcacgtcaccgtgcccttctgtacgccgtgtccccggcgcgcctgctcgcgcgc

SEQ ID NO: 450544 - DNA, 441 bp, Triticum aestivum
tctttcttctctgttgccccttccgatcctctccgtccctccctccctccccaagaaggaaggccggcggcgccatggcctagacggcgtgggagctcgccgaactattcgtcctccgccccatcctcgtcgtcttcttcgccctctcattcatcctcctgagtacgtacgacgaccgcctccttttttttctttctttcgtctggctggtttccagattgagatccctcgggttggtatgtggcatggaggacggtgctggtgcacgtcccgctcgtgcaggaggtcgccggcctgcgcccgaagaagaagcccgccaagcccaagccccccaaccgcggtcgcatcggcaggttctatcagtcgcaagcacaagcacagaggtgaacgaagcctcttctcatttggaaattggcttgatgccaacaattggcaacatca

SEQ ID NO: 450545 - DNA, 331 bp, Triticum aestivum
ttttacgcgtccgcccacgcgtacgtccacgcgtgcgcccacgcgtgcgaattctttaggcttgcacacctccaaaatctgatgctggggacatggagtcaggtgcgggaaaatctggctcgatgttgcaatcgaagactgatgataccacaggtcacttggcaactaatgtatcctctttcaaggttcagcctgatatatgtggaaaaagtcctgatggtagtcgaaaaggtcaggatatgccactggtgacctattcagaatgggagagtggcgcgccatatctggattttgtgaggaggcaatacaaagtatcacaggcagtgaatgg

SEQ ID NO: 450546 - DNA, 443 bp, Triticum aestivum
  unsure (1)..(443): unsure at all n locations
ttgtatcccctcctcacttcgcccctccccctctcctatttcttctctccgggccccgggccaaaattccatcctaagttccatcgaagagggcggcaaggggcgatccggatagcgcaagagcgaccatggcctacgtcgagagaggtgttgtgaaaggcaaacggacaatctggagactaagcataatccccgacttctttaaggctattgtgaacttcatcagaatgttcttcctcacaatgttttctatcgagaaaacagacagctataagaaaggatatggtagtggtaagaaggcgattggtggacctggggngggaggtcctggtgggggtccaatggtgctggggccgcgtggncaaggtggccctcgcggtcctcgcacactatctgacctccgatcaaacgatcagagttccctccctgcttgtggatcctgc

SEQ ID NO: 450547 - DNA, 66 bp, Triticum aestivum
tcgtggacgcgtgggcgccattggtgtgaactacggcatgatcgccaacaacctgccgacgccggc

SEQ ID NO: 450548 - DNA, 237 bp, Triticum aestivum
cggcgtcatcctcagcacccgaatcccgcaaccaaatttcgaactcgccaccggccgaaaaaggattccacgggatcgaaagcaacagcctcgatccatacatccagcttttctgaaagcacaagggggttaaaaccctagctggattgggcggcggggcccttccgccatttgcccgctgctagagtagttgcgtgctccagagacttccagttcgtgttcgtggggcggcggcgg

SEQ ID NO: 450549 - DNA, 290 bp, Triticum aestivum
tttgtcgcgtgggccaaatttggataatcgtgctagtgctctcctgcaaaaggaatatgccaatctgagtggaaagagctcaaaagccaaaggaggtgctagccaaaaagtcaataatgaaaatggtggtgctcgatcgtttaaaggccggcaaaaagatgcaaaaccacaagaggatattaagtcaaacaaagatgacattaagaaacgcaaggtagtggaagaagctgaagcaagagaagagggtgaaatttcagagtctgaagaacagattaaatatcgtttggaaa

SEQ ID NO: 450550 - DNA, 195 bp, Triticum aestivum
ttctttcgtccggttcaacaagatcatcaagcgcggggcgcgcaagggcgcgcgcggccacgacgcggcggcggccgagcccagaggcgcggccccgtcctcctcctccggcggggcggcgcccgtcaccgtcaaccacgcctcccgcgcctccgcctcgcccgtgccgccctcgcccacctcgccgcacgccgc

SEQ ID NO: 450551 - DNA, 268 bp, Triticum aestivum
atgcatactgcaaagcccttctgcaacttgattttatcaagtggaatagtaaccctgaagaagttctaaaacggatcaatgagtcaactagatggtctgatgagctgcatgattatgagctacaacgcggtttatagtttgataaggtagctctggaggaagacatcaactatggtatgagttcagaattagagaagcatctacaattccctgaccagttgctcatgcgagaatatttcaatagtgtgaaaataaggaaccttgccag

SEQ ID NO: 450552 - DNA, 271 bp, Triticum aestivum
ctcacgcgtccgcccaagcaagcaagctagtgggtagcccagccccagcagagcgatcgtgatcgtgatcgatggagcccagccgccaccgtgtgccggcggcggcggcgctgctcgtgctcgtggcggtggctgccgtcgctgggcgctgtggcgcgcagctgccgatcccggtgaggacggacgggttcctgtacggcgggaagtcggccgcgccggcgtggggcgacccggtggtcgtcgaggccttcttcgaccccgtctgccccga

SEQ ID NO: 450553 - DNA, 471 bp, Triticum aestivum
actccacttcttgagaaggaacatcgcgctgcatcgaggaagttgcgcaaagtcacacaagaaatcagtgatttggacgaagcaaaactaaaggagaaagctcgcctgttccatgattcatttttgacaaagttatctttgctactgaaaggcatggtggtggcacctcctgataagtttggagaaactttaattaatgagaggatcaatggaggaacatttactggaagcgagaatttccagctcccaaacaagatgatggctaatgctggaatgcgtctttacggtggtgcacaataccatcgggcaatggctgaatttcgtctggttgttggaagtattcaagtgccccccgattactagggaggaaatagtcaacgcctgtggtgttgaagatattcatgatgggacgaattactccaggactgcttgtgtaattgctgtggcaaaagcatgcgacacatttgagcc

SEQ ID NO: 450554 - DNA, 129 bp, Triticum aestivum
tcgtaacttgttggagcactcctgcagtagagttttgatgtttatttttttcacccatgttttgaattgtggccaggacgacatgtgatggatgcttagataaccaagctgaagaattgtccgttaaaa

SEQ ID NO: 450555 - DNA, 403 bp, Triticum aestivum
tttttgaccaagataattgctgggcctaacggccagacaatatacgctgaaattccgtacaaacagtttcttgatcaagtacaaggaaattggagaaaaaggttgcaaacaccatggagttctcccgagtcactagaggcactgtgccagcaagtgaaaagatgcactgagattgcactgacctgcatggagatcgacagacacaaaaggcctagcatagtggatatcatacacgaccttgaccagaccgaaaaaaatattgaaaatattaattcttatgaacaagatccatcaccgccacttgattcctcttaaatgttgttgaacctgtagcatcagctccacctacaactccatctccaccacctttcctaacccaatcttatattggatcttcaacacc

SEQ ID NO: 450556 - DNA, 198 bp, Triticum aestivum
gataaggacagcactgccaacctatcgctgtgttgttgggaaccccgagggagcgcggctcccaccgactgagcgtctcgcccaccagatcaggaggagctgagggatcccaaccaaggaggagcgcgcggttgggcgcctaatttgagctgattggccggtctgtgcttattgttccagcgcgcgtgctgatccatg

SEQ ID NO: 450557 - DNA, 402 bp, Triticum aestivum
tgcacgccagtcgcccttcttccgtgccctcgcctcccccgtcccgtcccaccgcggcggcccccacttcgcctctcccccaccccgcctggccgcacccacctcccggcgaaaaccgcccccgccctcgcccccgcttgggtaagaaacgagagggaggagggtcccgacgaaacccgcccccgcccttgcccgggttcagctcccatggcggctcggcccccaccgcctactccgcctctcccgtcgcctccacgcctccgccggccccggctccggcgccggcgaaggcaaattgcttctacccggcgtctccagatcgatactaagcatggacaagtctgcctgatcccaatcaaaatagtgtgtctgtcaccaagtggacgagaaggagatgcatat

SEQ ID NO: 450558 - DNA, 377 bp, Triticum aestivum
tctttccaaggcccagcccacagatatatacgctttcggaaagtgggggttggtttcgctttgagctttttatccggggcagccaggcagccaggcagccgccgggccgggacttccgctctgttacgcgtccagaggctagatagctccgtccgtccgtgtccgattccgccggggccgggcgtggatacctaggctaggcgaggcgaggcgccgccgatgtcggactgcagcaccggcacggactcgccgcgggccgactccgtcgacgagcagccgcccgccgacgccgagtcgcccggcgttggccagagcaagcgcgaccacccctcgccgtcgtccccgctgccgccgcccaagcgcagcggagatccgtg

SEQ ID NO: 450559 - DNA, 450 bp, Triticum aestivum
ttttacgcgtccgctccgtctcgtcctccgccccgccgcctctacgtcatctctccgctcgtctcctcgcctacgacgcagatcccctactcgattgcctccgcccgagcagccgtgcccgagagcccgcccaccgccccacgccctgacgccgctccggttcgccgccgaccgcagcagccgagcgagcgagcgagaggcaagatgcctaagcggacgacccacacgtactcgagcgaggacgcgctgccggagggccccgagtccgacctcttcgtctactactgcaagcactgcgcctcccacgtcctcatcactgataccctattgcagaaaatgccaaagaggaagaccgaccgagcacatgttctagataaggcaaagcatcttgcgagggtaaatgtgaaagatgcaggaaaactcttgtgaaacgtggagaaggaaagctcg

SEQ ID NO: 450560 - DNA, 385 bp, Triticum aestivum
  unsure (1)..(385): unsure at all n locations
tttctttgctctgctgccgtgccaacaagggtaaaaggtaggcgccgcgccacgccatgggcgcccctcgcgcctgaccatgcactccaggctgctcaagaggctcgccaagaggatcatgtgagccgccgcgcgcccgtggaaatgtgggagatggacgcgctgctctactgcgcggtcgtcgcgctggcgcttcactgcgtcggctgtggctgctcggcgatcaaccttgaaggctcagcgctgctcaagttccagtccagggtggaggnaggatccgcatggcgccatggcaggctggagcgcgcgggacgccgaccttgcggttggaacggcatccgctgcgccgatgacagggttgtgatgctgaaccaaaagatctctc

SEQ ID NO: 450561 - DNA, 367 bp, Triticum aestivum
tcttcccgtaggtgattgcacgggtcgttgatgtggtcgcggtggtggttggcgtgcatcggtggggtgcgggtggtggtggctcctcccttctcctgggctcgggtcggcggcgcgagttgttcgcgtggcagagatggccacgacatggggctcgtgctcgggcggactagattgaggcccgagagttggagctttcgctctgggtaggcgatggtgggcttggtgcgggtggtgcccacgggcgatgaggtccctctccttgcgggtgcagtgttcgatggtggtggttgggactccgctgttctatcgggcagatctgtgtcgatggccacggacatggcattgtgagcgtgcttggcagcgg

SEQ ID NO: 450562 - DNA, 355 bp, Triticum aestivum
tttgctgccgttgtcgacgcgaagccgcaagccgtggagaacaaatgggtgtcgcccaagagcacgctggacgcggcattctgggagtcggagtctgacaccgacgaggcggacgacgagccgtctcacggcgcggccgagaggaggatcagcgcattggcctgccctgcgtcggcgctccccgactgggactccgacgagggatggatcgacgtgctctccgggccaacggaagcagttgccgttcccgccaaggtgacgtgtggcatcatcgtggacgacgcgatcaccagtgaagaggagtcaatcgacccagagtccggtgctctcgacattaccgtggacgtggagtaca

SEQ ID NO: 450563 - DNA, 478 bp, Triticum aestivum
ttttcgcgcgcgccctcgatcggatcggaacccgtcgaggaaccgcgagggagctcgatccgatcgcgggagcgccgcgcccaccagatcaggaggagctgagggatcccagccaaggaggagcgcgcggttgggcgcctaatttgtgctgattggccgatctctgcttcttgttccagcgcgcgtgcggatccatggaatcagcatcggagaggactggcgctatggattcaccggagccaagaatcgaggatgagaaaactgttaaacccaccatttcacttgattcaagtgttatcaatctaccaagtgaaggacaagtccaggcggtcacatccaacataggtggggaacatagtgctgcatatccacaacacatttattcatcgcaagcagaaccattctattaccaaggtacaggatatgagaaccttccaaatgaatgcgatgtatatcctcccatacgagtgttgatgga

SEQ ID NO: 450564 - DNA, 369 bp, Triticum aestivum
tcttgaaaatccaaggctccggggggcggcggcgcccgatccacacacggcacatctcgggccgcgcggcgcacatccacccccctccactctccacgagtctgctcccccaccgctaataatagccgctgctaccaggcgggcggggcggacaccctctgccgccgccatgggagcgctcgaggaggcgcacctcgccgccgtcgccgcctgcgggtgcgacgaggaggaggatggaagatctcctggtggaggtcggcggcggggaggcgccgggggacgccatggagccggcggtgcgcgcgctgctggcggggctcggcgaggacgaccgccgggaggggctgcgccggacgcccatgcgcgtcg

SEQ ID NO: 450565 - DNA, 373 bp, Triticum aestivum
tttcgaccatgtgaaaacggcaatcaacaatactaagctcacctggctggcgtgtttgttttggttatatcatgcagaactaccactgtcactgggctatgtcccattgctcagggttctgagactttcaaatgctgctcatagtttccacaaaaacgtcaagttgagtacgtttctccatgagacctctgttcgagacctgacgttggggtttaaatgcgaaaaggtttgggttcaaccagagtgtttgaccagaaggcaggcatatgcgttccagcaactaaggattctcaatctagttaaaattcctgaagggtatgatctcacctggacaatgttcttcttggaagcggcgccgtccctggaggagctc

SEQ ID NO: 450566 - DNA, 476 bp, Triticum aestivum
tttttcgcgtccgcccacgcgtccgcccacgcgtccgcccacgcgtccgcaaattttaaaaagtttaaagagagatcattgagagcatagagctttatttaataaatttgcagatcgaataagtaaagagaaaaaaagaaatccaaaaaatgtaaatttattttttaaacgtatttgaaaatttgaaaaaatatacctaaaacaaagaaaaaatcctaatatattaaataaattacaaaaatataatcgacatttaaaaaaatttcaaaaattctcaaaaaaaaaaccatatattttattggtaaattgcgctaaatcatatacagataaagaaagtttaatggaacttttaaaagcttcagcaggactaaatccaaaagcaatagcagcatcataaaaaatatggattaaattgccggttcaatatattgaatttttttagtcaaaaggaatgaaaaatagaaattttagaacaa

SEQ ID NO: 450567 - DNA, 363 bp, Triticum aestivum
tttttcacgcgtccgtcctgaataaatttctcgaaattcccaatattagagcaagatttatgagtgacaagttactgtccgaggtgcttgaggccttcttggttattcgtgggctagttgtgcagaagacgaagttaatcaatgactgcaatcggcttttgaaagaccttcttgatagtttacttatagagagtactgcaaacaaacgccaatttattcgtgcttgcatctctggattgcagaagcatgtgaaggagaaaaagagacggacatctctgtttattttggagcaactctgtgatttgatttgcccagtgaaaccagagcctgtttaccttttgattttaaacaagtcacatactc

SEQ ID NO: 450568 - DNA, 465 bp, Triticum aestivum
tctcggacgcgtgggtccacttgctgctgccgcctccatccttctaccgacggcaccggcagcgccccactccggctcgtccccggccccggccctggaagagccccactccgactcgtcgcctgcagcgacccggcctttgtcctgggcctccctcgccgacgaggacaacgaggatgacgaagaagagttggctccgctgacgccgccggcttccaaaagcccggtctctgctgctgacccgactattccatgcgttgggcacgaggaggagacgagtggtggatggcatgaggtactgcctcggcgcggtcggcgctgctaggcgtcaccaacaccggcatttgctcctcgtcccatctctgtctggctccacggtcgatgttgtcgatgcctcgcccctggacatcgtgcggcagtttgcggagatcccttatgatgctcccgttgcttggagaacggaca

SEQ ID NO: 450569 - DNA, 319 bp, Triticum aestivum
gtctgttgaaattaaaaggggaaaaataaacccgaaccactcgccgaacaccaacccccaccccccacccttaacccccgccgtccctgaccggcgccatggccgccgtcggagagcggcgcctgctcgtggtcctgctcctgctggccctgatggtctgggcgcactgcctggacggcggcgcgggccaccacggcccgcgcgtgaagcggcgccgcatgaagcgcgagatccactcccccgtcaagacggtggtggtggtggtcatggagaaccgcagcttcgaccacgtcctcggctggctccgcgccggccgccc

SEQ ID NO: 450570 - DNA, 296 bp, Triticum aestivum
tttcgcgtccgcccacgcgtccgaccaaaccgaaagcaaagaaaccccgtagtagaatcttacgagccaagcaagcgaccgagctaatggccatggcaccgtcagcatccgccgtctccttctccccccgcccatctacgggaacgactttcgggccccgcgccgcttccgcctctagctccgtgggcgccgggcgggtccgcgcggcgggagcccccgagggaggcaagtggttgggcgccgctgctcggctggtccgggcgggcggactacatcgaggccgcggcaccggcgcc

SEQ ID NO: 450571 - DNA, 411 bp, Triticum aestivum
  unsure (1)..(411): unsure at all n locations
ttatgactcacagttctataggaatgatactcaagagtactcagctgatggtgatccattacctggtattgagggatttcaaattgtcggcgatcctaggccaggatctactttaagagcatgtggtttccctacaaatggtactacactttgtaatttccagtgggttcgctgtcatgaagatggcaccaggtattctattgaaggtgctacgatgtatgactatgtggttactgcagatgatgttggcactcttcttgctgtagactgcactcctatggatgatagtggccgccagggtgatttgtgagnggagtttgctaacaatgagaacaagataacttgtgatcaagaaatgcagaatgacatcaatatatgcatttaagggggagagccgctttgatgtttatg

SEQ ID NO: 450572 - DNA, 368 bp, Triticum aestivum
tttatgcgtccgggcttccagaaatccagatccaaatagcgacgacctccggctccgatcttgagagaggaggcagctggacaccctcaacacagaggaggtgatccagcttgtcgacggaattggcgtcggcgacgctaaccagtactgccggtgatgtcgttgacgcccattgatacagcccatgtcgatgccgatcacgagggtgggcgagtatgacgatgaagacaggaagcttaagcgcggtgctcggcccccaggatgccgatgtcatcctagtggccagggtgggcaactgcccgctccggccctcctcgtcctggtgccatggcaacgacgggagaggaggcctgctctgctccgtgtgc

SEQ ID NO: 450573 - DNA, 371 bp, Triticum aestivum
ttttctcctcctccttcctcgcgcgcgctcctctgctctgttctcctctccttgtgcgctagtgttcaccaagatcaggcaaacggccacgcgcgagctcgccatggagcgtaccggcggcaagggcgacgacgactcgcggctgatgcgcgacctctgcacgctgctcgtcaccatcatcgcccccgtcgcggcggcgtcctcgacgaactcgccccggaggcccgtggcgcggcgcccgcggggcggcatgtcgccggcgggcgcggcgtcgatgcttctgggcgcgtcgatggcgctgatgctgtgcgggtccgtgacgttcgccatcggcttcctcctcatgccgtgggtcgccggcgtcgcgctgc

SEQ ID NO: 450574 - DNA, 484 bp, Triticum aestivum
tgtcgccgccgcagccgtgattcgaaaaaagcagcttattatggggaggaaaggctaagcgagctgccaagtgatgttgtggtcaaagtccttgagacggtgaaaacacggttgaagaaagcagctggtaatggggaggacaggctaagcgagttgcccaatgacgtgctgctcaacatcctcgagagggtgggtacgcttgatgccgtaaaaacctgcatcctgtcaaagcaaatgcagaagctgcccgctatgctctcacagatcgtaattgatctcagctctcaagatttgattcaaatggatggtgttgtggctgatgtgacgaacaagatccttagtatgaggtctccagagatcaccattcgcaagctgaagctcaaatttttcttggttccctctcgctgtctttccatcggcaaatctgttggcctcgccatggtgacccagaaattggatgcagctgagtttgagatcatgacac

SEQ ID NO: 450575 - DNA, 422 bp, Triticum aestivum
tcttcacgcgtccgtccacgcgtccgtaccccttctagcttcttcaggtgctgttcccctccagagaaagaagaaagtatccttccaagccaccacttgctttgattcttggggagcatccattccatagcatcctcatagccgcctgcaagcagatctgagcagctataataactccctgatcggatccgctctcgttccttgcgctgatttgcgatgaccggaggggattccatggatgcaatcagcctgtatgactgggagctcctgcctgacctcgggagctccttcttcctggaggagtgctctgctggtggtggtggtaaggatcaggatcagctcttgtttgggtccggtttggtcgtgatcgacatgggtcacttcaccctccaccctgcatctcacccctctacctatgattg

SEQ ID NO: 450576 - DNA, 452 bp, Triticum aestivum
tttgtcagaagcatagagggcggagctacccatacctgactaatattagatcatggggaacatacaccaggccggcgtcaagaaagatgaccatggcggcggtgacaaccagcagctacaggtggtctccgttctcgagctccaggccggcgttgtggaagaccagctgcagcctctcggcggatggcatgccgtcgaggcaacctccatgttggaaaattgcaagacaaacagtactgctacagatggaggcaccagcagcaggatagatatccccggtcctgcaaccgaacagaacatccctaaacccagtaatcctcttcatccatgcccgccgccacagtcgctgccggagggtgtgcagtccgtgctcaacacgtcacgggttaaccgaaagtgcattggagatggtgatggcttcactgcttatgaggagaggattggaggtgata

SEQ ID NO: 450577 - DNA, 403 bp, Triticum aestivum
ttttgtccggaccaacccaatcccaatccaacatcgcgagtcggggtctctgtccctcaccgtcgccgccgcggcttccccccgctgacctccgccggagttcgccggactcgtagggtttcttcagtcgtcctcttccctgctggagatccgtaccctaggtaagcctcggtttcgtcgacttcaccttcacctaatttgcgccgtgttagcagaaatcggcccgtcttccccgagatttcgtgcctttagctgtacgcgtatgttgcccgagtagatgcgaacccgcttgctgttgcccgatgtggtcgccgcccctagggtttctttcattgaagcttgggctttgtccgataggacttaggagcatggcccggtggaactgttgaggcgctcatatgtt

SEQ ID NO: 450578 - DNA, 453 bp, Triticum aestivum
ttctaccccgccgcctcccgattcttctcctgggccgcatcccacgacgccgccgtcctcaactccaagtgcttcaactccatgctccagctcgcagccgccaacagcgacgccgcccatttctggtcactcgtctcctcgatgcgttccaagggctacggcatctcgaagaccaccctccaggccgccacggagagcttccggtccaatggcatgtccaaggacgccgacatgatccagaaagccttctccgcgcacgccaggaacgcagcggtggcggaggcgtgcaagattctccgctcagatgcggatgagatatctaagctggacaagttgaatgagttgggcgttgaggtgaccgatgagatggtggcactggttgtggagaaggtcggacagtttccgcgacaggcaatggtgttcttttattgggtggagcagtcagctggggca

SEQ ID NO: 450579 - DNA, 346 bp, Triticum aestivum
tttttgagaatcgcgcccgcccgcctagggtttccgcctgccgccgccggagaggaggggaggggaggggaggggaggatcagaaccagggcgagatggccggtcggctcctcggccaactcctcgtcatgggcggcgccgtcgtcggcagggccgtggtccaggcctaccgtcaggccatcgtcaatgcacaaagaaccggagctgctcaggaagctgtgaatggtattcgaagggctagcaaggtcatgacggagcaagaagcccggcaaatattaggaatcggtgaaaagacgagctgggaagagatcgtgcagaaatatgataccatgtttgagaagaatgc

SEQ ID NO: 450580 - DNA, 102 bp, Triticum aestivum
ttcttcacgcgtccggcctgtgctcgtatgctagattaaaagatgcatccacgcgtgtgcacctatgaaccatgtggaactgcgaaagggtgaatggctcat

SEQ ID NO: 450581 - DNA, 395 bp, Triticum aestivum
tttttgacgcgtgggttttttttttttttttttgtaaacaaatgcaggctaccaaacaaagtctcaattcagaatgtctcagcgcatacatcggtgccgaacaacagcaaatgcatggactaagcatatgtctgcactcagcatgtatgagaggagaacaactgggcggccaggtccatacatgctaccaaagtaccaaacacacccaaaatatctgctgtgcctacacccttattttatgatttattttctaaaagttctaatcgataattgagatgcatatgtcccgatgcatgagatattttgtgatcacttctaagttctaacgttgtcatgcctctaggatgggcgggtcggcgaagggcccgtagagccatcccttggcgatgtggccg

SEQ ID NO: 450582 - DNA, 477 bp, Triticum aestivum
ttcttaatttctcttgcttgagctgcgagctgccggagccatgtcgtcctcctccttctccaaggccagattcgagggtaaaggagtaggaggcggcggagccgggagatccatatcgctggccgcctccagggccaagctcgccgcggccaccgccagcgccaagaaagcagctgctactacagctagcgggcggggcaagggcaagggcaaggccgtcaagaaggtcttctccctcaccggccagaagttcgatatcccagaggagagggagccccttcggatcttctacgaatcgctctccaagcagatcccatccagcgacatggccgaattctggttaatggagcatgggctgttatctccggagagagccaagaaagcctatgacagaaagctcaaacggcagcagcagatcaaatcagggaccccgatcaagtcgtcaaattccaacactgtcagcaaacacaacaacaa

SEQ ID NO: 450583 - DNA, 180 bp, Triticum aestivum
tcttgacaagggaaggaggaggccggcgaggaaggcatgctacagcggggaaggagaaggtgagcgatcctagcatggggaaggggcagggtgaggcctcgcgcacctgccggcggtcggcaggtcgacttgttgcgccaccgcgtcgtcatctcctctgcaccatgagaggcgccacct

SEQ ID NO: 450584 - DNA, 505 bp, Triticum aestivum
gtaaaataccgcgcaacatttgtttgttacaaaggtggcattgctaggattaagcctgggcttaaagctcgaagaagacttgttgcgaagactggctgcaaagctatgatggtggtgaagtataacgcaagtgagaatcattgggaagtagtgtttgttgagctggagcataaccacccatgtaatcctgaaatggtcagattcatgatgtgttttaaggatctccctgactggcagagggagcaccgaccattcaatgcgaaaactagattgaacccaaagattcattctggtagaggcaggccacccaaccaaaacaaagatttcatggtgaggtccttcgctcagtctaattattcaattgaagcagctgccaagtgtgggaagctgagatttgcagagggtgacgttgaggcattattagtctttttcgataagatgcaagctcaaaattccaacttcttctacaactgggacatggatgatgaaggccggcttaaaaatg

SEQ ID NO: 450585 - DNA, 385 bp, Triticum aestivum
ttttcacgcgtccgcccacgcgtccgcccaattttctcatccgcgagaggacgagcggaggctggacggtggcgcgggggtctgcaatccccggggtcggtcagcagccgacacgacaccagatcgagcgccaggcagggtcgggcgccgctcctccaggcggcacggtcgcggcagaccttcagttggatctgcacctcgtacagcttgcccgccagcctcctcttccactccttccccttcgacggcgacccctcaggttctccgacgagatccgcgtgtgcactcgccgcgtgatggagacatcaacatcaggggtctctccctcccgtccgcgtcaaggccggaggggactgccagcggtggactgcaagcgagcgagcgt

SEQ ID NO: 450586 - DNA, 479 bp, Triticum aestivum
tccacgcgtccggtggcaccggcccttccgcaatggcctccttcctcgccgcccgccgcctcctctccaccgccgccgcccggcgcctcctcccatgcacttccccgccgcctcctgccaccgctgctctctgctggctgtccactgacgcctcgcccccaccgcctcttcccgccccccctctggagcccgcggtcgaccctcccaagaaggatggagcctccttctccgccggttccggcgctggaggggcctaccggactggaaagggagctgcatcggggggtcgccgatctggtggcgcggggtacgaggaggagcagcagaaggtcctccgcgcgtcgcttctccacgtgccgaggatgggatggagcgagtcggccatgatcgcgggtgcgagggacgtgtccgtgtcgccggccatcgtcggtgccttcccaaggaaggaggctgcgctagttgagtttttcatggatgac

SEQ ID NO: 450587 - DNA, 397 bp, Triticum aestivum
tttgctcgcgagagccgccggacccggagacgccttctcctccctctctgctttgggattcaactcccaccaccaccacctctaaactcaaccggattgcagcttctcatcccatctcgtatatatacgcgccctcccaatctctttctccgagcgcgaaatctgacagagcagtgtcagaccgttgttgagcaggaagcggaaggacagttcaatccgcaatggaatccctagccgccgccacgttctcgccctcgcgcctcgctgcccaccccgccccgcccgcggctgcggcagcgggcagatcgagggcggtggcggcactagggaggaggaggagcagcagcggcctgaggtgctcgtcggcgagcgcgaccccggtgatcaatgggagcgc

SEQ ID NO: 450588 - DNA, 394 bp, Triticum aestivum
ctcagcggcaccagcgatggcagagttatcgtggctcacggcgctagggttcgtcttcctgaccttcaactccggcatggccgtgtaccgctccaacggcgacgccgggtccgtcatcttcgtcgccgtctcctacctcgacctcgtggccctcttcgcctgcctgcgcctctacgagcgcctcgaccgccactccccccgccgggagcggatcaaggccgccgtctgggcgctcaccacgctgctcaccgtcatgttcacctacaaggtcgccgaggtcatgccgctcgccgtcaagctcctggtctgggcgatggccgccgccaccacctgcggcggcttctacgtctttttcgtccacgacgacaagccgtaccagcagctgcaggacgcg

SEQ ID NO: 450589 - DNA, 374 bp, Triticum aestivum
ttttgcaaatcgaagccatgcaccaaatttttcagcactgctggttgtccctttggttcaagttgccattttctccataacttccctggaggtcaccaggctgtttcaaagatgaccaacttgggtggtccagctgtttcagctcctcaaggaagaatgcccatgggacctggtgttcctgatgggccacctacacccagcttgaagactcgcttgtgtaacaagttcaacacagcagaaggctgtaaatgggggaacaagtgtcattttgctcatggagagagggagctcggaaagcccatgctgttgaacaactcgatggcacctccaatgggaccaagacccaacggtcactttcagccctcaccgatgcc

SEQ ID NO: 450590 - DNA, 383 bp, Triticum aestivum
ttcttcgattcttctcagaaccttcctgcaagactttgtttcatggcttttctaccggcgcggttctaatctcctctgcgtctatagaattccagtctggatcaatattaggctttcagtgcgaaggaaaatatctccttcacaggaatgccggaagatgtgcatgcgtgctagagggctaccttggttgggaactggcagtctagcttttgaagatactgaaatacaacagttgctccatgggcatacgcaggatgatccatggaccacctaccatcttggtgaagatggttgaaacgaattgatcatctgcaggtcttgtccacatcattgagtgcccctgatcagttctgatcacctcaagttacaacatcactgccttt

SEQ ID NO: 450591 - DNA, 420 bp, Triticum aestivum
tcggcaagctcctaagttgcaccataggttgtcatcaagcgggcgcgcgcctagctagctaacaaggtggcagcatcaagaagagcatcctcgatgcgtgtaagagctgccatgaagatggcatacctcctggccttcgccgtggtcttgctctcggcgtgcagcctcgcctcctcgaggtcgctgccctcggtcaccacccatggagccgacgcacagctggaaggtggccgagccgcgcgcgccaagctcgaccctccaaccgcgaatgccgataaaccgccggagctcggcatccgcgacgacggtgccattcagactgagaagaaaaagcgccatgccgaggcgccgcccaagcaccacgggcctggcaaacacgctcccccggccgacccttcgccgccggcgcctgatccggac

SEQ ID NO: 450592 - DNA, 410 bp, Triticum aestivum
ttcttccactccaaactggacatgcccagccgctcacaaacagcggcgtcagagaacgcaaccactgtaccatgcggcggcggggaccaaggaaggacggcctaggaggtttataccatcaaaccacaggattgggaaaattgtgcctttgttcacagagttgaaagatgatgcactggatagcttcagggaaacatttgcaggcagtcagaccgaaagaaacgcaagggctaattaaagaagccaatgaagttgttgcctaactggaagctgcaaaacatttcttgcaaagttgatcacaatacttaatcaaatgacattgagatccagaaatgtgagttcgaaggatgaatcacaatgtatatgttactgattattagtgatgatgcattcagaaaatgtacataaac

SEQ ID NO: 450593 - DNA, 437 bp, Triticum aestivum
tcttcgcgaaggcgcggcggcaaccccatctacgcaggccgtccgccgcactccgatttcaagcaggaatcacggaccaacccgatcctcccgcccatagatactctccctccacgcatcgcctcatctgaccacctcgctgcaaaccaagatccgcatctgccgattagggtttactacgattggtatttggtgagcagcttctaaaggggatgggtacggtcggcgcttggaggcgagcacaggatggttccgtcactaccggtgaagccgtcgaggacctggatcgatctcccatcgccgccgccggcggcggcggcggccagcacgaggctccgaacaccgtgggcacacgggccgcgcccattgacgtcgaagcgctaggcgacgagaggaggtcgagagctaagataaagcgccgtgtggttgttgtggat

SEQ ID NO: 450594 - DNA, 268 bp, Triticum aestivum
tccacgcgtccgcgagtacaacctgatgaggcgagctcgcctcgggctgccgccgacctcgccgccgccgccgctacagcaccaatagatagatttatactataaaataatgctagaatcagggctggctaatacaccacgtgcaaatagcctgtaccaataactgagcatgtatgcttacactgtgtatgtatttctaccttctgtgaattttttgtgaataccgtttgcccctaaaaaaaaaagaaaataaaaaaaaaaaagatat

SEQ ID NO: 450595 - DNA, 393 bp, Triticum aestivum
ttctaccactccaaactggacatgcccagccgctgacaaacagcggcgtcagagaacgcaaccactgtaccatgcggcggcggagaccaaagaaggacagaagaagaggtctcacgcctgggagcgtgtacaggttcgaccctcattcaggctaatgttcctcctctcttttgcttcagctggttccgtttcgaatcaaaaggcctgcagggtgaccccgatcgccggacgtccacgagggatcgccggagttcgtggggctacgttttcatcctcgtgaacaactgcctccagtacagcgcttactacggcgtgtcgacgaacctggtgaacttcctcaaggtccagctgcactccggcagtaaggccgcggcgaacagcgtcaccaactgg

SEQ ID NO: 450596 - DNA, 398 bp, Triticum aestivum
tttcaaagccaaagtttatctacttatcttgtggtagtatttcagttctttaatttccagtaaattgtcttgttatcatactacaattcatcctggtcgtctcctctatcctcgtcaagatcagatttttgtccatctctcctcgtcagatccatcgggatcctgacagtcgtgtgtacaggtgccccgccatgaagtgcccttccgattcctcggctggtcgtgatccctgggctcctcctcccgcttctggcggtggcggctccagcgagccagccaagaagcggcagcggacctcgagctcgagccaggctgaggcatcctcctcgtcctcacagcctccgccgcagcagccgggggacgcgagagaggtgccggatctgggggaggacgtgatg

SEQ ID NO: 450597 - DNA, 256 bp, Triticum aestivum
ttgtcgcgtggcggacgcgtgggcggacgcgtgggaaaatttattttcaacaatcaaacaaatcaaattaaacaaacaaatcaaacaaatcaaattaaacaaatcaaattacttttaatatactaatatccttattaatcaattaattctttaatctttaattctcttttctcaaaaaataaataaataaataaaaatgtctcttacaccacctacttcttttgagaccttacctccacctcctctttctagtagt

SEQ ID NO: 450598 - DNA, 256 bp, Triticum aestivum
tctaaagcaaggtaatgaagttactttgcttttacgaaaacgggccaaaagtacataaacattccaacgggaaattgaggacactagtaaccagttttgacaagagcaacatctcagaacatgaaataactcagctaagaggctactagcaaaatcttaagagtacagagacttgttgcacgagtgagtcactgtaccaccatgtgtcataacttggaagtgctcaacgatgttggccaaattctcatagaaagct

SEQ ID NO: 450599 - DNA, 353 bp, Triticum aestivum
tttttctcttctctctgtcacacacccaaacccaacccaacccaaagtaacagtagcccgcggcggcctgcgcgatgcccgccgcggcattcgcctccgcgctcgcgtctcctcctccgccgtgggccccacgactgcctcctcggcacgctagcctgcgcctgctcccgccaaggagcagcagcaacaacagcggcggcggcggaggggacaagcccaccacctcgtgggtcagccccgactggctcacgtcgctgtcccgctcggtgctcggccgggggaacgacgactcggggatccccgtcgcctccgccaagctcgacgacgtgcagggacctctcgggggcgcgctc

SEQ ID NO: 450600 - DNA, 314 bp, Triticum aestivum
tctgacccgaccgcctccacgcatcatcgacggtgaagcccgttgcgttgcgtggtagcgaccgtctccacagatcgggatcaggcggcgatggacttctccggcgatgtcaagcaggcgatcccgcggcccgccgtcgctttcggcggcgtcgggagcgctgggccgtcgccgctgctcaggggctggcgggagttcaggcggagcggcgcgccggtcaggttcctctgcttcgagggcggcgcgtgggctgatgtcgagggcgaggcggctgtgcctctgcgccgggcgttcctggacgggagggtggtcgc

SEQ ID NO: 450601 - DNA, 174 bp, Triticum aestivum
tctcacgcgtccgccacgcgtccggtaacgtcacttgttacacttccagtcatcatctttgagccgatgtcaatgcttcagaaaatggcagagttgatggaatattgtgacctgttagacaaagcagatgaatgtgaggatccacacatgcggatggtatatgcttctacatgg

SEQ ID NO: 450602 - DNA, 195 bp, Triticum aestivum
attcgccgcctcggcagtcacgctttgacgcatgacagctaaaacaatgaaaattcgcagggcacgcaccaaaaaaaaaaaaaaaaaaaaaaaaaaaaaaaaaaaaaaaaaaaaaaaaaaaaaaaaaaaaaaaaaaaaaaaaaaaaaaaaaaaaaaaaaaaaaaaaaaaaaaaaaaaaaaaaaaaaaaggggggc

SEQ ID NO: 450603 - DNA, 401 bp, Triticum aestivum
ttcacgtcgtgagcaggtgttgtattagtcgtgcaggatctctagaaggaacaaaagagagttcacgtgctacaagagtttatccagctatataactgaactgcagacaacgggattaatgacgactaatacaacacctgctcacgtcgtgactacatcttactgctcgatagtagcacacttggacagaagctgtgatggcttaacatgatacaatcgttgtttattttttgggcaactatacatcgttgttgagctgaaatatagatggctgtgctttgccaaatgaactttatcccatatagcaaagccatccatttttacatgcacttggattcttgtaaccagtaaacttgatcttggatcctgtgatgcagtgtactggtctactacttaaaact

SEQ ID NO: 450604 - DNA, 393 bp, Triticum aestivum
tcttgccgctcgaccgccgcctagcaccgaaacagcgctggcttcggacgcgagcctttcccctcttccttcttctggcgattagggttgtccccagcgccgccggccagctgctggcaccggcgcggtacctcgttcctgccggcgcaccgccggccgcttccacccccccatacacctccgtcgccagagcctgcccgctcccccgccacccctcatcctgaggacttcctgctagcccccgccggcaagaaagcccgaggaccaccagcttttcacgaggaggccactgtctccgcatcttccactgtttcgctactgctaccgcctgtctgtcatctgcgtcagcggctgcagatccgccccggcatcatgtcttcagaggagctcaca

SEQ ID NO: 450605 - DNA, 298 bp, Triticum aestivum
tgcccacgcgtccgccccaccccaccccacccccacccagcggtgccgccgccgcacaaagtccaaccctagatccagcgcccgatccgcggccatggcgacgcgccgggccctctcctcgctcctccggtcggcctcccgcgcgcgcgcggcctccccgtcgccgctcccccgcgcggccccgctccaccgcccgtccccggccggctacctcttcaaccgcgccgccaactacgcctccgccgccgccgccgccgaggcccccgccgagaagctgccccccacctccgacaagtac

SEQ ID NO: 450606 - DNA, 263 bp, Triticum aestivum
atcaccactctgaacggcgcgcgcacactggaatccacgggcgaaaccagcagagtggagaaggttcttccattccatggcttccacggccctcgcgagcgtgtgccccatcgcgtccctctccgggcgctcgtcgccggcgagctaccgggccgtgaggtgctggggcgcgaggagggggaggcggcggaggtcggcggggctgagggcgaggtgcgcgggcggccagccctccgccgtgaagcccggcccggagagccccg

SEQ ID NO: 450607 - DNA, 298 bp, Triticum aestivum
ttttcggctatgagcacgggtacggcggcggacatgcgcagcacggccatggccacgagcacgggtacggcggacacgtgcagcagcacggatacggcggtggccacgcgcagctcgggtaccctcctgccgccggtgcctaccctccgcacggcggttaccaggcgcacggctacgcgccggcggcctacccctctcacggggcgcaccacggtcacatgggatcgtaccacaccgggcatggcggcgggcaccaccacggcggcaagcacggaggcaagtaccatggcggcaagca

SEQ ID NO: 450608 - DNA, 235 bp, Triticum aestivum
tttttgcctggggagcttcaagaacctggagcgcctcgacctcggccacaactgcctcgtcacgctcgagggtttgtccgcgtgcaccaatctcaagtggctctcggttatagaaaacaagcttgtgagcctgaaaggtgccgaagtcctctcgaagctacaggtactgaatgctggcaaaaataaattgacaagaatcgatgaggtcaaatctatgacaagcctgggagccttg

SEQ ID NO: 450609 - DNA, 306 bp, Triticum aestivum
tctcggacgcgtgggcggacgcgtgggcggacgcgtgggcggacgcgtggggcgcggacggcccgaattacgcggggccccggcggccgccgttccggttggcccgggtggcggtgaacggcggctggccggaacgcttcttcttaacggtttccttcttttcggctttctttttcttttggttggggttggcaaggttcttcttttacggcggcggcggggccttgggcggccgccgcggggttgcaacggccaagttgcttaaaagcagggggtccggcaacggcgggaacaagaaggaaggcg

SEQ ID NO: 450610 - DNA, 274 bp, Triticum aestivum
tcttgagtttgtatactcgataaattaagcgggcgcggtgtgcgcgctcgcggcggtgtgggcggatgtgacgttccgcctcgggcgcgaggcgtacggcggtcaccgcagcccgccggggctgacgggctacggcgtgtgcacgtgcgtgctgcacgcgctcatgcgctttgtgccgcctctgcgcacgtccgcggtgctgaaccgcgcgttcatcgccgacccgcactgtgcggtgaccgtcacagcccccggctgcacccccggtgtggac

SEQ ID NO: 450611 - DNA, 295 bp, Triticum aestivum
ttcatggtaaggattggcacaagcgatcaggatctggagtccttgatcgctgccagccccgttctgcagtcccttaggctcatcgtcaatagccccaagcacgtccggctccgcagcaaaagcctcatgtgcgcgctcgttgggctatccacggtggaggagttgaccgtggtggacacgccgctcctggcgcggttttgttggtccgggcctggtaagggggggaggatcaggatcgtttgtgctcccaacctgcgggcgctcggttacctggacacaagagttctcaagctgc

SEQ ID NO: 450612 - DNA, 507 bp, Triticum aestivum
tgttgactgccccaaactgattcaagttcctgcatttccgccatccgtctctgagcttacagtggagcgtacattattgatatctaatatgaagcttgctccttattcttcatcacgatcagagatactcaccctggacatttctacgaccagtgtactttccaggggactgttccatcaaagccatctagcatctatcatagttttaaacataaacgctggctgcaagcatcttgttgccgcagagggactccacacctttacttctctccaaaagcttcagctgtgccactctgacatatcagatcagaatttggaaagtcttcttcaggtgctgccctctttgtactcgtttgagatgatagatctgcccaacatgacatctctggtgccagcaaataatagtttgtgtacaacagtcacagagttgcaaatatccaactgtccactgctctcttctgtagtctccttgagtacttttgtttcactgaaacgtttggtgattga

SEQ ID NO: 450613 - DNA, 302 bp, Triticum aestivum
  unsure (1)..(302): unsure at all n locations
tttcaagtttcttttgtgtctagttaattgatcttgtgttgggacgaaaggaagggaataagtggactgtgctctagggatctgatattgtaggctaattagtacggtcattgaaacaataatcaggaggcaattccaattatttaatgaggtccaagattgtgatatggggtgaaggtaccactaacagttgccaagattaatctcgtgtataggagcttaggatcttcaatggtctcaacttcgacgattttataggtgcctgttactggcttgcagatnggcgtgccacgtatattaca

SEQ ID NO: 450614 - DNA, 261 bp, Triticum aestivum
ttatgaggaccccagacccgagccctagacagccaacccaaaccttcccgaaatcccaatccagaccatcagcttcccccaaattccccacgccgcgccgagccgccgatcgaaccgcagaatctcgagcgccgcccgcgatgccgaagaagatgggcgtcaactccaaggcggaggcctgccgcgagcgccgctccgccgaggagtcggaccgtcgccagcgcgccgagcgcgccaaggagggaggagtactggcgcgag

SEQ ID NO: 450615 - DNA, 431 bp, Triticum aestivum
tgctgctcctgccaaggcggcccgtgctaaccccgcccgtgtctggtgtgtcaaccacggagaacgcagccatgcgccggggatgcccggctccttcgttgcctctgatattgcctccgccacgcgccctgggcctgccaccaccttgccggctgctgctggtgctgatcccgtggatgtccggtgcgcgatccgtgcccatggacgcgagatggctgaagacgaggagtccgcttgccaccaccgcaagcgcccggcttccaaggctccaatctgcctgcccgccactgctgctgcgcctgtgaagaaggtctctcgtcaggtcgcttcaaggcttgctctttcgtcggctctacaccactgcctgccactgctgctgcgcccagtgtgcaaccgaagccgcagatcagcatgcgcgaactgatcgagaa

SEQ ID NO: 450616 - DNA, 299 bp, Triticum aestivum
tctcggacgcgtgggcggacgcgtgggcgagggcgcgcaaggcgcggcgcgggcgcgttcggtcttcggcggcgtagatcggacgctggatcgggaatcgcattggcggcgcccgatccagatctgaaggcttccgtctacttcaaccagggctgcctccgatggtcctgctttcggcggcctttgtcgtcggagttgtaccggtttggcggctggaggtgggaaggtggctccggagaaatccgaggccagcagtgctggtcacgacggcggcgacgcccgagggcgccgtacccttc

SEQ ID NO: 450617 - DNA, 447 bp, Triticum aestivum
tgtcaaacttctgggctgttatggaggatcctacaggtggacggctgggcgacgtgctgattctcggtggaagggagcgaggaggcagagagttcgatcagagaaagcaattgtgcaatctctttcttcaggtaagtgataccctgacaacagtttgatactattgttgtatttgattcctttcgcttcagttacaggctataactatcctgcaagatggtgggacgaatcagaagtccaccaaccgcttgcacgtgtcatgcgtgtttgtcggaacagatctgcagctacccctatcctctccatatcagagaaagatggatcggtcgtatgtacaccaagctggatcaacagagcttactacgttgcattaaccaatacctttgtggtcgtcaactgaaatggattatttttttcaagtattatttcatggattactgtttgcta

SEQ ID NO: 450618 - DNA, 306 bp, Triticum aestivum
cccacgcgtccggtggtggtgcgagactccggtccagagcgggggcggccggccggcagaccgccaagaaaccagaccacctcccgtctccgtcctcggccaccaccaccgccacctgcccgcgcctcccctccaccgctcctcctacaagaacccccctcgcctgcctgcgctgcagcctacgccggcgagtcaacctctctctcatcttcgggtcgggggatctcgcgcgctcctcccggaatcaggcgccggcggtcggagggacaaagacacggacatggagggcggtcgcggcggccggtg

SEQ ID NO: 450619 - DNA, 304 bp, Triticum aestivum
gttcgcgcacacacgcacacgcacaaagcagccgtctcctcctacgccaactaatttaaccagcttaggtttatcatcttttgtttgccgatcgatcgccgttgatctaccacgatcgttgaaatggggtctgtgccggaggagtcggttgcggcggcgccggaggtggtgttccggtcgaggctgccggacatcgagatccccaacgagcagacgctgcagagctactgcttcgccaagatgtccgaaggtggggtcccgcccctgcatcatcgacggccagacgggcgcctcctacacctac

SEQ ID NO: 450620 - DNA, 414 bp, Triticum aestivum
ttctcaagaagagatctggagaagggagaagcggaaggccattgctagctagctccccgccgtctcctccctcctcgcttggtgtcgccatggccaccatcctggagaacatccagaaggcgcggttcctgccgacgaggccgctgcgggacgacctgcccaccttccagggcggcgggggcggcaagggggaggagagccacctcatgggcctgcggaagcgcctctccagcttctccggcaagatccagcccatctcctccgcgtccgccgagtgggcgttccggcgcacccggtcggcgcgttcgctggccgccgagttcgccggcggcccgctcaagcgctggtgggactggggcctcggctggctgctctccaagaagctcggcttcgccggcgacctggagatgaacg

SEQ ID NO: 450621 - DNA, 451 bp, Triticum aestivum
  unsure (1)..(451): unsure at all n locations
tctctaatctggtgtacatttccaaccttgccatgacagagttcatatccctctcgctgtccctttgactgactggaattattgatacgcgtagaaatctctctcagccttcaattttctttctttgtttattggacggtttcttggtagttggcgagcagtgctccagctccatccaggggccacgaacgtgggtctggaggagatctgagcctcctccgtgaggaaggaaatttgctaagtccacctaagatttcatcgacgatcacttcgacacatgagatgaaggcaagaagcagcttctacgctcagtgacagctcggtccttccatcccattcccaggtgaagatcaatggctactactagtagtacggctggnggatctcacggcagttctcggccctgctatcctcggcggtctggaatgggtgctgatcctgctgatgctgc

SEQ ID NO: 450622 - DNA, 106 bp, Triticum aestivum
ttttgatttgattcaagaagtaccagaagaagatcggcatataaatctccaactggagatttatatgccgatcttcttctggtacttcttgattcaaatccagcgt

SEQ ID NO: 450623 - DNA, 329 bp, Triticum aestivum
tcttaagcaagcagcgctcaccaccacccacccagcaggtcatgcggcgctcggtagccatgaactgcggaagcggtcccgctccggcgacgatggtgcgctgcaggcagtgcagcgccagcgtcgccgcgccgcccggtgcccgtgccgtccagtgcgcgcagtgctgctgcgtgacccgcgtcggcggggctggccgacagctcagtgtgatgcgccccatcccgaacttcggcggtggccgcggcaagaagcgcgccgtgctggtggggatcaagtacaccaacactcgcgcctgcgagctgaggggccccataacgacgtcaagt

SEQ ID NO: 450624 - DNA, 338 bp, Triticum aestivum
  unsure (1)..(338): unsure at all n locations
tcgtaaaggtatactaccgaaggacaagacaacggtgctgaccaaggcggcggggtacctaaagacgttggaggcgcaggtctctgagctggaggagaagaacaataagctggagaagcacatcccgacctacgactgcgaggaggacgtgccgcaccagcagaggcggcagagggccaaggtccagatcaccaaggcggcgtcggacgaggtggtgaacctgacggtgatggtgatggtgggagtgtgacgttggtgnnagctgtgtgctccgcatcctggagtgcctccggtggatggagcaggtcagcgtcatgtccgtcgacgccgacacctac

SEQ ID NO: 450625 - DNA, 224 bp, Triticum aestivum
ttaattcccaatttttcgtggcctccccgtcgctccgatcctcgccggccggccggcagcccagccccagatccgaacccccgcggcgccccgccattgtcgccgtccccgacctttccccggcagggaatggtgcactgtgggcggcggtaggcagacacgagcacgaccgcgggggcaagaagcggcggcggcgagatggccggcgcggagagggagaggag

SEQ ID NO: 450626 - DNA, 372 bp, Triticum aestivum
gttgcaactcgtcgacgcagagcggaggagcgaaggaggccggccggcgagatcgacgcaaatgcagatggactcctactacttccacgacgacgcccacttcttcgccggctgcggcgtccccggctcgccggacctgcccttcgccgacctcattgcgtcgctgtcggagccgctgcctgaggtggcgagccagagcgcgttccgggagtaccgcggcgtcgggctggagcttccggggacggcgcggggagggacggggaacgggatcaacatccaccggaggatgatgggcgtgctgggaggaatggtgccggtcaccgaggaggaagagagaccgcagcaacagcaccagcagcagcagcagcaggc

SEQ ID NO: 450627 - DNA, 312 bp, Triticum aestivum
ttttctacggacgaaatacgttgaaatgagggcggtgcaaaaaaggaaaatatgtggtttttcaacacatgatactattcatcccaaaagtccatgactttgtccttttgcacagatcgcatctcaagattagaaggaaatcccctatgttcaaaagtcaatgatacatactgttcaaataagaaaaagaacaccacatctactgtgctcatcgccgtgatagttcctgtggtactgatatccctcctagtagttatgtgcataatctggaagttatgctggaaaggagagccaagagtccatgaagattat

SEQ ID NO: 450628 - DNA, 334 bp, Triticum aestivum
tctacgcgtccgctcgagggagcgaggctgcgaggggcgacggccgtttctccagagaggaagagctcgagctcgagctcgacctcctgtcccttccggcagtagggggaaagcagaaaatggacgcggcaggtacctccaagagaggtcgtcgtcctcctaccaagccacagaagctcaagttcaagccgaaagtgccgtcgcgcaagccaaagaaaccacctgcacaaaagccacaactggaagagacataaccaattgatgaagagttaatgaagacactgaggacgggacgaggagatgcaaaaactttgcgagttataaaagatgagca

SEQ ID NO: 450629 - DNA, 333 bp, Triticum aestivum
ttctccgcttccccccctaaacccccgccgccgaccatggcgtcctcctccgctaaaccctactgctgctcctccctaaaccccgccccttccaacgccatcgccaggcgcgctgccctctccgccctccccgccgccaagccccgccgcttctcccatggcctcgccgccgtcgccgcgaaccctagggcctcccgctccgccgtcctccgccccgtccgcgcgtgcctggcggcgccgcggcggcccggagtacgtcccggaccgaatcgacgaccccaactacgttcgcatcttcgacaccacgctccgcgacggggagcagtccccggg

SEQ ID NO: 450630 - DNA, 321 bp, Triticum aestivum
tttacgcgtccggtcatcctcatctactgggccatcttccagccgcaccacatccgcgcgacggtcagctccgccacgctcaccaacctcaccgtggcccccgacaacgccaccgtctcctaccgcctcaccgtcgggctcgagctctacaaccccagcctccgcgtccccatctactacgacgccctcgacgccgagctccgcgccagcggcggggccttcctcggcggccccgctgcccgcgtcgcctcgtcgccggcggagttcctgcagcgcaagaagagcgccgacacggtcaggctgggagttcgacgggagcag

SEQ ID NO: 450631 - DNA, 194 bp, Triticum aestivum
tttcgcgtccggctccgcccggccgcccgactttgaccgcctcctcgtctccgctcccacgcccgcgggagagaggcgaccggcggcggcgcgcgaggaggggcctacccacccatcccaccaccccgccggcgaagatgttcggccgcgcccccaagaagagcgacaacaccaagtactacgaggtgctcggg

SEQ ID NO: 450632 - DNA, 115 bp, Triticum aestivum
tttttggtggcgtgtttacctggggaagacctggaaaaggcttgcattcacgcctaaatcccctcgtaaatgaatttgaccaaatcaaatcgatctccgctttcaaaaatgttca

SEQ ID NO: 450633 - DNA, 205 bp, Triticum aestivum
gtttccctcctgcacctggcctggagctcgccccgtttctcctccccacaccacactagcctctccccggtttttccccaaatccgacggactcgaggccaagcggaggcggagatggcgctgcggtgggcgctgctcagatcggcggagatctctcccggtcgcaaggctgcacttgagtacttgcattctctatcaaaggcac

SEQ ID NO: 450634 - DNA, 347 bp, Triticum aestivum
tctttggccgtcggtgaccgtggcgacaccggggtcgcgccggcgccggcgtcgccgaggatcggctgcatggggcaggtcaagggcacacagagatgctcgagggcacgctgcccggcctcctcgaggggaccggcggcgtcgggcctcccgtgcggcagcctggcggggctgctgatggggctattcggctggcggtcgacggggaaggaagacgcgcgcatactccaaggtccgggacgtggcgagtgacacgtcgtcttcagggagcgcaaggggtagcccgtgcgccgagcccgcttgagctcgacccaccgctggccggtgccggcgccgggtggtgagac

SEQ ID NO: 450635 - DNA, 290 bp, Triticum aestivum
tttgttcgcgtccgtgcgtgtccatggacgaggaggagcccgtcgacgcggacgggcaccggcggtgggtggtgtacagcggcagcctcgacgggtcggtgaaggtgtggcgcgtgtccgacgcgccgggcgcgatgacgacgcggacgccggcccacgtgtggaagggcacgccgtcgccgctgggcgcgtggacgccgtaccgggcgccggagcggcgctgaagcgcccgtctgcgcgtgcaatgtagagcacgcacgtgtaaaccgtgtggctgtgcgagagcctac

SEQ ID NO: 450636 - DNA, 310 bp, Triticum aestivum
tttttcagtcatcctcaatggcacggattcgcattctatctttgatagctaagctctttggtgcatcaagttgtactgctactgcaattcgtgactcaaaccttctcagcttatttgaggacgagataaaagatagaaaagatatgcttaaaaccctgagtgcactagaggtcctctatgagcttgcggagcaccctcacagcaatatgttcttgttaaagaccagtttgcttcaacacataactgatgtgatcaacgatccctcagctgattctattgtacggtcaagggcatcattgatcagtgggag

SEQ ID NO: 450637 - DNA, 248 bp, Triticum aestivum
ttcttcccatggcggccaactcctcctccccgtcggccggcggcgacgcgccggccccggcgctgccgccggtgcgcctcgcggcgggccaggcggccacgatccagccctcctccccgcgctacttcttctcctcgctcgccggcaaggacgcctcctcccatcgccgcatcgccatcgccgtcgacctctccgacgagtccgccttcccccgggcccgagggccgtgcagaactacctgcgccccg

SEQ ID NO: 450638 - DNA, 285 bp, Triticum aestivum
ttatctattacgctcctccttctcggccccgagcgcttcaccatctgcgagatgcggatcccggggcttctcgcggcggcggggccgctgctggtgctgcttctcgccgtcgccggtgcggctgcgcaggaggcggcggcagcgggggacgtgcggccggaggagatcgcggcgaacgcgagggcccaggaggaggcggtgctcgcggccgagctggggcagctcagggcgaaggtcgccgcgctagagtcgagcattgcagcacagacactggagctgaatagc

SEQ ID NO: 450639 - DNA, 293 bp, Triticum aestivum
tcttcccacgacgatgatgcaccgtgctacgatcgtcggcgtcgtcgcgcttatcggcgtccttctcgtcggcggcggggttcgagcgcagccgccgcagcggtttgactacccggcggcgagggcgcccacgacctgggccaacacggacgccggcctgccgaccacgtggtctacaccgacggctccgtggcgcgcgtggccctgctgcggcttaacccgggccggctacggcccctcctacgccttcggcttcttctgcaccggccacggcgcggccccgtgcgccgact

SEQ ID NO: 450640 - DNA, 335 bp, Triticum aestivum
tgtataaggtaaaccgccgctaaaccctagccgccggcgagatcggccgacgcacccagtccagcctcctcttcctcaaccacctcagacatagcattaagacggtatggcttcaccgtttggggccgcctcctcgtgtggcctcaaggctgccgctccttccggattcgcgaccaggaagcagctctccctcgtttcgcccccgttggtctcgctgccccagagggccaggccagggagaaagtgcagtttccgagtgaacgctgcaaaggagctgtatttcaacaaggatgggtcggctatcaagaagctgcaaactggagtcaataagcttg

SEQ ID NO: 450641 - DNA, 243 bp, Triticum aestivum
tttacgcgtccgggcggccccttcaggtccgagcccaactcgccgccggccgccgcggcggcccggccgcgcctctccttcgaccgctccccgagatccgccgacgccaagcccgtcgccgagcgccgggtgcccaagatcggcacgcctcctcccgaccagaagcagctgcggagggagatcgagctgcagtcgcggctcgagtccgcgcacgaggacctcaagaaggccaaggaccagctc

SEQ ID NO: 450642 - DNA, 205 bp, Triticum aestivum
tttattgaatatctcagttgctttccatggcgcgacgcctccactctgctataatcgccaccttcgttctgcttgcggttggacagtgtagcaatgcagtcccgacggaggctgaagtgtactggcgcaccgtcctgcccgattctccgctcccggaccccatcctcaagctcctccatcctgagaccagctctgtgaagaaacc

SEQ ID NO: 450643 - DNA, 262 bp, Triticum aestivum
tgttctcgtggatcggtctctttgtcggcggcatcgtggtcggcctgatcgccatgtcgctgtatacgacgagcatctttgttgctggcgcggctggcggtgtgctgctggcgttcacgatgcacacgacagtggcctacaagatcaaccagagcgacccgaacgtcgtgctcgtgatcctcgcaattgtgctcggcctgctgtgcggcgtgctcgcactgaagctcgagaagcccgtgctggtcatcgccacgagcttggt

SEQ ID NO: 450644 - DNA, 172 bp, Triticum aestivum
tttaaaaaaagaccaatacatttatcacaaatattatcatacatagtacccttctataacttacatcatagaagttgtacaagttatgcagttgcaatttttggcaacaacatggcagctctgaaagaattttccatcccacaaaacatcgattcttaagaaaatacaattg

SEQ ID NO: 450645 - DNA, 201 bp, Triticum aestivum
tgtctacgcgtccggcgtcctagatggtttgttattgtaaaggaagcagcagcaattccttgttccatgctgtgcctcatcatggcttctttcttctttagcatcgctgcatcatttgggccactaaagcccttcttgcccttgtgattgtgagcaagttcttgatgcttcccagatcccaaatggccatacaactcacac

SEQ ID NO: 450646 - DNA, 206 bp, Triticum aestivum
tgtatacgcgtgggcggacgcgtgggggagtagtgaagatggcagcgacgggagaggggatggcgatcgacaatcaccatgcgataccgaggacagagtatagcagctggagcagtcctggaaacatgcccggaagtggccatgacattgctagcgaagaagccaagccataagcagcctgatatatgcatgcctttgtacgtaga

SEQ ID NO: 450647 - DNA, 260 bp, Triticum aestivum
tttttgacgcgtgggcgagaagctgcggatctcgatcactggagctggtgggttcatagcctcccacattgcaaagcgcctcaagggcgaggggcactacatcatcgcctctgactggaagaagaacgaacacatggaagaggatatgttctgccatgagtttcaccttgctgatctgagggtcatggacaactgcctcaaggtaaccactggggttgaccatgttttcaatctcgcagctgatatgggaggggatgggc

SEQ ID NO: 450648 - DNA, 181 bp, Triticum aestivum
tctttggagtggatgacaaggtgttctccaggttctgcatcatctccatattctgcatcattagtgagcaacttacctagggaggaggtagatactgacagagtgtatgagcagtgaataaaatagaggagtggcctgttcaccggagcaagcgaggaagatagctcagcccgaccaccaa

SEQ ID NO: 450649 - DNA, 175 bp, Triticum aestivum
ttctcacgcgtccgcggtcatagacatagagtgatacaaggtttttgttttctttgtacgtaaccttgcacttatcgccatgaagatcaccatgctctcgtccaggcccgtcaagcccgattacggcgcttgcggtgcacctccgggcagcacggacgacgtcgtcccgctcacc

SEQ ID NO: 450650 - DNA, 198 bp, Triticum aestivum
tttttgacgcgtgggcttcttcttcgttctcttcagatccccggaagcgccagacccggagcaactgagcagcaagttctcgggcatggacgacgacggcgactggatcgcggcgaggtacctcctctcctccatcctcggccggaacccgctcgtggtcgaccacgtcgacgaggagtccttcccggtcgaccacgc

SEQ ID NO: 450651 - DNA, 258 bp, Triticum aestivum
tgttgtagagtgcctctggctctgaagactcagcttcacgttcggctttgtgcaactgggcaacatcgatcgtcaactgccacaaccacatcccaagcagcaaggtgatagtctcgttcctcaactcgcgcaaatctcctcacctggtgacgagcatccaccaagtcggcaggctcttcagcacattttatattgatcatggcggttagatatattgatattttattccctcccttcaatgtaccatagctaacctgt

SEQ ID NO: 450652 - DNA, 287 bp, Triticum aestivum
tttttgaggagcacggaggagctatgtatatattaagtctaagttgagtcttgcccctgtggcgtctggcgctatgccgaggtggagcgtaccgccgccgcgttcgagcagcggccggtggttagcggtggctgcagtcctggctgcgctggtgtgccagttgcttgtgaggagtgggttgccggcgactccacgaataaagctcgtttggtccgttgatctggaggaggtccttattttcctctgcttccaaggttaccatggtggtgaaggaggaagagaggaaa

SEQ ID NO: 450653 - DNA, 218 bp, Triticum aestivum
ttcttccaccatggcccgcctcgccaccctcgccatgctcctcctgtccctcctgtccgtcgcaagctgccgcgaccttgaggccatctccgacgaccagggcccacccgtccccgtcctcctcactcgagctgatcaagcggatgctgctgctgaggcgacgacccttccgagcttcccggccccggtcgtcgcatgggacgaggacgagctcccat

SEQ ID NO: 450654 - DNA, 287 bp, Triticum aestivum
tttttgccatagccagagagacccagcaaccggagcaagctccacaccggtcaagttcttgcaagagaggaaaaagaaatcgaagaggcagagatgggaagaaggagaagcccggctctgccgctgctgctgatctttggcgtcctcgccgtcgtcctcgcggctcttcctcccctcgccgaatccagcagcagccaccaccaccaccacggccatggccaccactcccgcgtccaaagcagagggcacggaggagagggagagcagtcgtcctcggctgcggcggc

SEQ ID NO: 450655 - DNA, 318 bp, Triticum aestivum
tttttatcgtcaaggaagaaacggaaggcatcaaacaaatttgaggatgacacagttaaaggattccggcgtatgagagaccttattggatcaaacaggacgcccagactgcagttaggtgctggatcttattaacatgggtatcatgatttacctgatcttgaaagtgggccaagctttggctatgagttgcctagcacaaatggaataaacaaaaataagcagtctcattcgttgacaaaaaggaaacgctccaatattggtcaagcttatgaaaattcaagaaagaaagataagcgactttctttgtcaaagtta

SEQ ID NO: 450656 - DNA, 228 bp, Triticum aestivum
tttttgcgtccgcccacgcgtccggttcagaaatacatgtgccgccgatttgccatgcccatgcaaatggtacacactcaggcagcccatgatgcatttttccagtctgatagagagccaagttgtagctgttggtcacctttcatgatatggttgtctgagttaagcatttgcaatattgccaactagtaggattgctctttgagaagaccttgcgttgctattctc

SEQ ID NO: 450657 - DNA, 232 bp, Triticum aestivum
tattcacagggggaaagcagctgcaccgtaccgacgtaagtgcgacgatggacgcgccggcccccgacagcatcgccgctgaggagggcgggcagcagcaacagatgcaccaggacgagaaggagcacaggccgatgttcaggagagtcaaggacaggatgaggaagatgaagaacaccatcgccggccacggccacgatcacgatcacgatcacgagcaggacaccggtgg

SEQ ID NO: 450658 - DNA, 362 bp, Triticum aestivum
  unsure (1)..(362): unsure at all n locations
tttttctaacgaggtacactagtgatcaactaattaagctgtcctttgcgtagctggctagctagtgagttagtgaggatcaatggcatcccagctggagtcactcatgaagcgactgtggagctatcttcccccttctcttagcagttccaggagcgaccctccacaaccgattcctgatcccaccggtgatcctccagccgctcaagccggggacactcccgccggtcaggagctttcacccgctcttcaaggtgtaaactcaggactcagctacttatctactctcagcacacacgcatacgttacacacctntttttgctaatgatatcccccgaacgctgtgataataatctatggc

SEQ ID NO: 450659 - DNA, 219 bp, Triticum aestivum
tttttcacgcgtccggtctctccctgcatctgtgtatacagctgaaaaatgaaggggaaaacaaactgcaggcccctgcttgctagctagtgatttcccttcccttgtagcttccctcccgtgttcagaaatgggtcaagaacaaaagcaaaaaaaaaaagatcatgtgtaatctatgatgagatggtaatcaggtccaacgctagaccttttctcaaa

SEQ ID NO: 450660 - DNA, 251 bp, Triticum aestivum
gatcaaacaccgacatacacgccgaactggattctctccagcctgaaaatctcacaaggttttacaattctccttggaactaatttggtagctgtgtttcaaagtgacgaactaagtttggtgtatacgccgcagcgatcgagacctaagctgtaatgagttacccagaacagggtctatgagtaaattttccatatgcccagcccataccctactctgatcagcaggagctcaaacaccatgtgcaggat

SEQ ID NO: 450661 - DNA, 345 bp, Triticum aestivum
tgtcatcgcgtccggccgacgtgtaccgagccgcgccgggccggaagcaaatacggagcatccccggggacttcaccggaaaagtggacagcagcactccgcggagcgccgggcgagatggggttcatcggcgaccaggtggagtcgatccgctcgatgcaggtccgccaggtgctcgcgcagatcatcagcctcggtatgattgttacgtcggcattgatcatatggaaggggttgattggttgcgactgggagttgagtccccggtggtccgtggttctttctggtagcatggagcctggattaaaaggggtgatatcctgtttttgcgcatgagcaaagaac

SEQ ID NO: 450662 - DNA, 265 bp, Triticum aestivum
ttatgcgcccggatctcagcagcgagaacgagcagctcaggaaggacaaccacgcgctggcagcggagctggccctggcgcggcggcactgcgaggagctcctgggcttcctctcccgcttcctggacgtccgccagcttgacctgcgtctgctgatggacgaagacatgcaaggcgctgccggcggcgcacgctcggcggaccaagagcactgccgtagcagcacccgcagcagccgttcgcggagatcgccgaccaggccgtc

SEQ ID NO: 450663 - DNA, 348 bp, Triticum aestivum
tcttggacgcgtgggcggacgcgtgggtccaaagtgtgtatgaagcaactccgggagctggtcttcgagatcgaagactggatcgatcaaaggccggagaccaacattctgttggacacagaagaaatcaaatacttcatgtctgagatcaagggagcgcgtgagcgcttcaaatggtaccgaagtcttctcaagatagagtccagtgagaccgatcttgctgttgttgcacccagcaaaatcaccattgaccctcgtctgcttagcgaggagaaatattgtcatggtattcttgatggtccaagggatgagcttgtcaagcatctgacagatcagacggaggagatg

SEQ ID NO: 450664 - DNA, 164 bp, Triticum aestivum
tcgatcaatcagagaaaatcatccctccatatctgtccagctcttgttcctgctcctcctcctcgtcagctcccgagttcttcctgagcgaagcaagccaaggcaagctaggtagcagatccaagaaggagaagcgatgtcggacgtgacggcggtgatggatc

SEQ ID NO: 450665 - DNA, 320 bp, Triticum aestivum
tgattgaaaacactcgacgatctggctctgtctcaggtatatgctccctcgcccgcaagatccgctctctcccatctacgcatcgcaacagcacttcagctcctcttgtggattctcaccagatcaggccacctcactcaccttcagtctgtcgtgatggacaaagttaagatcccaacaaaaagtgcttcttgatgctatgatgcagcaacttaaccttccaaattacagtttactaaacagacctggccggcagatccctcagctatcagggaaggcagacatcagcggagattgagggcgcctctccggcgagagtg

SEQ ID NO: 450666 - DNA, 471 bp, Triticum aestivum
tcccacgcgtccggcgccagttccttcaccacgaggtcctttatcgaaacaattgtctttcaacaattcgaagagcgaaccaaaggtcaagcagttagcagaaggtgtggcaagcaagctgaagcctgtaaaacattccccaatagatgttagagaaaaggggccaatgagaaagcttatgaagtcagagtcattcaagcgcgagggttcagttagtaaagactccagttcattaaaacagaataaatcatctctcttgtctcgagatgaaaaaccaagaatgttgaagctgatgagtgataagagttttttagaaagaaggccttcttttattcttcagaaaccacctttatcaccaaggcctgatagttctgtcaagtcgggagatagaaaagtcgaccaagataatccaaggcctggaccaagcatactaaatactagcaaaaagccaggtaacatcgaaaagaagca

SEQ ID NO: 450667 - DNA, 424 bp, Triticum aestivum
atcggattgaattagtggtgcagatgataaaggagatgagagctaatcgctttgagtctgatctggcaacaagcaccatgctgatacatttgctttgtcgaagccatcggtttgaggaagcatgtgctgagtttgaggacatgttccgtagaggccacgtgccccagtatatcacttacaggatgcttatgaaagagctcaagcggctgggtttggttcaactggaagagaagttgaccgacctaatgcgctcagtaccacattctacaaagttgcctggcagctacagagaaaaggaaggcgacaatgctaaagaaaagagaaagttaatattggagaaagctcaggctgtttccaatgttctgaaggagtgtaaagatccgaaggagttgcacaagctgaaagatgatgaagaaactgatgt

SEQ ID NO: 450668 - DNA, 260 bp, Triticum aestivum
tttcctcccctgtttgtttcttgaacccaaacccagcttgtgccccggtcaaaatcggactttgggatcgccatgggcggggattcgaggttctcccactgacgcggctggtccggtcggtcagcgacagcgcacgccatggccgaggaccatggatcgtcgcggcacatgtcgtccatgtccatgtcgcacaaggagctgggcgacgacgacgcgcgggtggtgcatgtgggcgacgcggagcgcaccaacgagcgcct

SEQ ID NO: 450669 - DNA, 323 bp, Triticum aestivum
atcagttgatccgtccagcaccagcaagcaaccgggttcaggttcaagtttgatcctctagctttttcggttgcgtccgtcgattcgtctgccatggagggaggaggcgttccttccgcccaggacgtgtgggactgggaggtgctgcctgacgagcacaggagcttctacgccgagaccagggccgcatcccgtgcccacgacggcggcgaggttcttgccgatcacgaaaccgaggaaccgatcctgcctcccccgtcacaagtcgacgctgataatgttgacgagtgcaaggacatcggcgtcgacgtcgacgtcgtgcc

SEQ ID NO: 450670 - DNA, 247 bp, Triticum aestivum
cccacgcgtccgcggacgcgtgggcctagatctgaacccgtcaggcggcgacccttcctcctccttgccgccctcgccctggtccactccggcggccccttcgccctctttaaaccccagcacctcaatcacgtcttcactccaccgcccgcgaaatccaggccctagcgcgacttcgccatggccgcagcactcctcctcctggtgccgcccgtcggcctcctcgccgagctcgccttcctgaccc

SEQ ID NO: 450671 - DNA, 245 bp, Triticum aestivum
gcgggtgaacctgctgataccggaggtgaacgccggcggcgtgaacgagatcatcggcgtgatgggcgcgcaggcggacgtggaggtcgtgttcgaggtcccgcccctggagcacgccgacgtcctggagcccaactggctgctggacccgcagagcctgtgcggcgagaagggcgcgtccgtgccgggcagcgtcggcccgttcgggctgctcgtcatggcctccggcgacatgcaggagcaca

SEQ ID NO: 450672 - DNA, 337 bp, Triticum aestivum
ttctttccgttcttgcacattgaggagattactttcctcaagcgtgcttgggtttggagcccacatgtacagtcacgtgttgcaaggctggaacacgattcgattgagaaaggtcttttgtaccatattccatcgaaggtggtgtgtgcagagcagcaggctgtggacgtgatgggcaatgcccttcgagagtatttcttctatggaaaaaagaaatatgatgagcgaaaggcggcctttgaacgtgtgattgcacgcaaaggtctgggtgactatttcccaggcttcgtctccttcgagacatgtgtagagacttacaagcaaggaagcgagcaca

SEQ ID NO: 450673 - DNA, 248 bp, Triticum aestivum
ttgtcgcggcacccttcacctcaaaagaaaaaagaaaaaaaagtgctcaccgatgcggctcgtgtccacctgctccgtctagtcgcgacacccgcacagctctggttcgcagtcgcagcgatggcgcccaaccaccgcccccgcgacctgctccttctcgccgcggcgctcctgctctccgcctcctgcgccgccgccgccgacttcgagtactgcaaaaaggggcgccactatccggtgaaggtgag

SEQ ID NO: 450674 - DNA, 252 bp, Triticum aestivum
tcttcctggccatgataccgcgagccgccgcgcccggcgggggcgggtgcaaggtcgcgtacgtctgcaggcagcccaaggacatggtggtctcgcggtggcacttccaccggcggctgcatcccgagctggcgttcgccgacgtcttcggggccgtgtgcagcggcttggtggcgtacggaccagcgaaaacatgttttagagtctatgcatccgggtacttcttattcaaccactcattcctgcatcacg

SEQ ID NO: 450675 - DNA, 270 bp, Triticum aestivum
cttccctccctcctcgatctctctccctcggccgccacgaaccctagctccctttcctacgatcccgtggtcgctgccgctgctccatccgacctccctcatcagccgccgccgacactacggctcctccatccaccgactctgtctgtgcaagcgaccagtttccttccgccccgaccttctccactgtctcccagttcatcatccgtcccttgctgctcgaggtgctcatctgcccatgccgcgaggaagcaacgtgaggagggagag

SEQ ID NO: 450676 - DNA, 223 bp, Triticum aestivum
gcaagcatatagtatatatatatatatatagacaagtaatgccacttcttccgctccagacagatacggatcagatcatgtcgagcattccctgatggaaggcggcgacacggtcgggcgtcacgcactgggtgatgagccgtgcccctggcttgtgcgcccacggcttcaccaggatgcacgtcgcgatgtagtccaggttcgtcaggggcacgacgtgtgc

SEQ ID NO: 450677 - DNA, 233 bp, Triticum aestivum
tacctgctccccctcccacctcctgccgccccaggccccggcggcccctccgccggcgcggcccgacatggcccctccgcccccgcgccccatcatggcccctccgcctccgcctccgctgtcggccatcccgtcccggctccaccgcatccggccgccgccgctggccccgccccgcccggcgaccatcctgccgtcgccggcccagccgactctctcccctctcccggcgc

SEQ ID NO: 450678 - DNA, 382 bp, Triticum aestivum
ttgctgaggcaatagcggagggtatcaaatcaaatagtactttgatatcattatccttggcaaaaaatccgattagagacgaaggagtacactctttatgcaaggccttttcaaatttcccaattatcggtgatgaattaactgcacaaaggaaaaagaacatcgccgaacttgaaaaacaaaggaaagaattattagcaaataataatgcaaatccttttcaggcagatgaaccatttcaaataaaaagggagcaaaaccctccaaaaatgcactgcgaagatccaccatcatggattcacgaacaagtgaagttgatgtaaaaagaaaattagggggaccatcagccatgttgaacatgcccgtaagaagttaggaggcg

SEQ ID NO: 450679 - DNA, 399 bp, Triticum aestivum
tcttctttgcatctttttggttcaggaatgaagaaaaagaaaaaaacccaaagaagtttccttttgcctatgtcccaaagggaaattaaatagaaattcaacatctagtactccatttgacttttaaagcgtaacaacatttgagtcatacttttggttgtgattcttgttgcttcgattcgatttgacttttttttgaagtgtaacaacatttgagtcatacttttggttgtgattcttgttgctttgattcgatttgacttttttttgaagtgtaacaacatttgagtcatacttttggttgtgattctttttttctttgatttgattcgactttttttagcttatgaacattcaagtaagattgtgtttctttgatttgacttttttgttattaat

SEQ ID NO: 450680 - DNA, 268 bp, Triticum aestivum
tgccactcgtccgcccacgcgtccggtccgccgtcgcatcgccagccaaaccctcgtcgtcgtatccgatcccgccgtcgcagtcatgccgttcaccctggtaccctgctccggcaagagcaccctcgccctcgtggccagggtctccgccgtcggcgtggggctcgtctacggctccgtgaagctcggcatgctgaagatgaccaagcccaaggaggaagcagctgatgctcatgactgaggacaagtagctccagcgagttgacgc

SEQ ID NO: 450681 - DNA, 217 bp, Triticum aestivum
tgggtgttgttggtcaaacaaataattttccatgtttggacactcagttttctgcactttagtcatttgtatggtttgtgttcatgaataatcagtggctggcatcattttatatttgcaccgtttgagtgctgattacagtaggtctacattttttagtcaaagtgtttttatgttactttgttctttcagttttctgtcagtagtttgttcaact

SEQ ID NO: 450682 - DNA, 235 bp, Triticum aestivum
cgactccgggccggagcacgcgttctacgcccctctccctctccctctctctcacgggaggcgagtgcgagggcggaggcgaggcgaggcgcggggggtcggatttggggaggctgatcgagcaggggatccgccgcccctccatcccctccaggtttcgtgtcaggcgcgggggctccgggccgattggtctttgatcccgggcccccgaatcagctcggatcgcgcgcggatc

SEQ ID NO: 450683 - DNA, 238 bp, Triticum aestivum
ttcttcccacgcgtccgctcctctttttctcattcaaatcagtcatgcattcaaaatccgctttccttctgatcgtggtggcagttagcaccacggccatggtgcacggccaccctgccgctagcactccggcggcacggttctgggagcaggccctctccggcacgcctatgccggaggtgctagctgattttgttcagaaaggaatcgatctgtcaccgcttgtggagcactactc

SEQ ID NO: 450684 - DNA, 240 bp, Triticum aestivum
tcactcgtccgctgttgagggacacagctccagatagtgagtttgagatttcagatccaacaaataacgttctatttggggtgaacattgatggtcaactgggcttaccacttaatgcagatgccttgattgccaatagcattgaaaatgataaattcatggatgagatggctggaaatggcatttctaactacatttcatctaaggattctcaacaagagttatcatcttcaatgattt

SEQ ID NO: 450685 - DNA, 242 bp, Triticum aestivum
ttccactcgtccggagacccggcccgcctccgcgtccacggagtccagccgcctcacggcggggtgcacgcgaagccggctccacgcagcgtcctcctttcgccaccaccacgtccccgtcctccctcccccacccaaaacccgcctcatccccgtgtcaaaacctccgagctcgccacagcgatcgccagctcgcctcgcccacgcccacgcccgcgaccgcggagctgacccatggagga

SEQ ID NO: 450686 - DNA, 112 bp, Triticum aestivum
ttactgcgagaggagtggccgggaggaagaggggaggagtgagccggacggacgcacgcggaggcgacgcgagcagcagcggtcacctcgcgcacgcattcggccgtacacc

SEQ ID NO: 450687 - DNA, 263 bp, Triticum aestivum
tctcctctcgtccgcggacgcgtgggcgacgggaagcagcagcagccatggcgacgcaggccgccttcgcagtgagattcccgcagctggcgcggccgggcaggggccatggtcagggacagccggcgcgggtgggggtcgcggtgaggggcggcagggcggcggcgcgcggggtgcggtgccgggccggcggcctgatcgagccggacgggggcaggctggtggagctggtggcccccgaggagggcggccggcgggcggcg

SEQ ID NO: 450688 - DNA, 381 bp, Triticum aestivum
tcacaccacacctctcaggaactcctcctgctggttcctgctcaatcccccaatccgtcggccgagcaatttccccatgctccaggcctcccggatgacccccgccccgacccgtcgctccctctgctgctgcttcgcctgctcgctcaatccccccggagccgtcgtcgcccgctagtcctcgccgggggagcagaagatccggtcttggaccccgcctgcgtcgccgacgtcgtcgtcgtcttcgtcccgcgtggggctgatcgttctgtggagctcgaggtgcagtgcttttgaccgagaatttgagcccaacggatgaacatgtgcgagaaagatcaaaatttccactgggcctacgaccttttccatgaccccttt

SEQ ID NO: 450689 - DNA, 275 bp, Triticum aestivum
tcgcttcgcctccaccacatcccgccgcgggtcgggctaatccgctacgactgccgggcccgcctccgcccggcgccccgtccaccatccaccatgcatggagatctccctggacgcgctgccgcccgtgcggtcggggccggggctgagggcgcggatgggtcggatgaagaggaagacgggttcgagttcgagattgggaccctggggaaatttatgaagcctcaggggactgtaaatgtctcggctacgtacaatacatggcaccacactgt

SEQ ID NO: 450690 - DNA, 227 bp, Triticum aestivum
ttcctttgccctttcccctcgcacatgtcacaagaaaccatggaaggggaagtagctgttgctgtaatggaagaaaatcaaatggcggacctggtttggccatacttgaggttggtttatcagccgcccgaggaatctgcgcggcgtcgtcgccgcgaacagtactcgatattcaccatcatggaggctctgaggcaaatgattcttgaaccaatcgtttacgacac

SEQ ID NO: 450691 - DNA, 269 bp, Triticum aestivum
ttcttttcagaaaggatgagatcgcggaatggcaggtcaggccggaagggttcgtccaccacacagctgtcaggccagtcaaccttggcgcacagcttgtacctaccccatgtgtcgtggcgcacctgggtcccaccgcatccacgcttggcggtgccgcgtccccgtccgagctcgtcgccgccctgtccctgcccgcctccaagctgccgttcctcgcccgcctgctccgccagctcgccacggcggggcgtcttcacctccaccga

SEQ ID NO: 450692 - DNA, 216 bp, Triticum aestivum
ttcactcttccgcggacgcgtgggctcttcctctctccgttctttagtggcgtcagccatcgccgccgggaaacggggatcactttgttggtgggacttgagacgggcagaatgtcttcatcgcctccggcttcgacggtggcggacgcggcggcggtgggtcatccgtcgcagctggccatcagcaacggggtgctgctggcggcggtgatcttc

SEQ ID NO: 450693 - DNA, 408 bp, Triticum aestivum
  unsure (1)..(408): unsure at all n locations
ttccatgcgtccgcccacgcgtccgcccacgcgtgcgctcctctcctcgacctcccgatctctcccagaccacccacctcccggccgccgccgaggacgcccggacctcccggccggcagcaaaccaaccagccacctcgtgcgtgtttgaaaaatcatggcgcagcgggatcacaagcaggaggagcccacggagctgcgggcgccggagatcacgctctgcgccaacagctgcggcttcccgggcaacccggccacgcagaacctctgccagaactgcttcttggccggcccggcgtccacgtcgccgtcttcctcctcctcctcctcctcttctctgcngggcgtgtccgcgccgacccccgtcatcgacaggccgaggccggcgccgttggaggcggagctggc

SEQ ID NO: 450694 - DNA, 182 bp, Triticum aestivum
ccgaccccgggaggcacgctcccgctctcctccatcgacaagaccgccgccgtccgcgtcatggttgacttcatccaggtcttccaatccccctcctccgactcctactacgtcgacgaacaggtgtccgccatgcgccagggcttcgccagggcgctcgtcccctactacccggtggccgg

SEQ ID NO: 450695 - DNA, 354 bp, Triticum aestivum
ttccatgcgtccgctgacggctcagaggacaacggctgctcggagcggagccttcaacggccgcagcgcccttcttgctgcgggaactggggccagggagctgagccttagggtttccctctcgcccaactcccacccccaccgcgtcggcgcttcatgcccgtggccagtgcgttgctccccctgtccttctcctgatttggaggtgccgcgcgtcagtaagaagaataccaggaacgaggaatgggaggcgttgaagacgggagttcggacgcatgttccggccgcagcttcgcaatctaggggaactcttttcgtccgccgtgtctacgacattgaggattatcagctggg

SEQ ID NO: 450696 - DNA, 226 bp, Triticum aestivum
  unsure (1)..(226): unsure at all n locations
tccactcgtccgccctcgcgcgctcctccccacccccagagccccgtcgcctagctagggtttttgactccccgccgacaccgccgcgcgcgcgcgagagagagaccacagcgaccaacccagccatgtcggtgcgtccgagcgagcgggccgacgcgcggcggaaccgatacaaggtgaccggtggacgccgatgagngggcggcggcggcgcgaggacaacatg

SEQ ID NO: 450697 - DNA, 222 bp, Triticum aestivum
tcccacgcgtccggtcgaaagcactagtagtagtatcatctatctatggtgtggtgtgatgaagaactcctctctccttctccggggagctccgttcttgtagcatgtaaatagtttcagcgatcgatgatgatcgacgagatgagcaagtatgatctggtagcagtatgagtttctcccctttgtgaagacaataagagggagctagcgtctggtcctggt

SEQ ID NO: 450698 - DNA, 189 bp, Triticum aestivum
aacccgactcgatcctctgcagggaggccaagaaaatcaaggtcgagccgagcgagcgatctcgagccctgcctcgaccgatgcatccgctcgtgggggcgctgctggtgagtgccggggagcggtggtggtggccgtgctggggcccggcggcgcgccacgccggggggtgggccggcacgctggcgc

SEQ ID NO: 450699 - DNA, 268 bp, Triticum aestivum
  unsure (1)..(268): unsure at all n locations
tccacgcgtccgaggagatccagcggaagctggcggtgctggcctacccgcgcgccagcgcgcctgcgcagtccctcctcttcgccggcgtcgagcgctaccgcctcctcgagtggctcttcttccggctgctgggcgacagatcgccattcacgcagcagaactggcagggggacagcctcgaccgcgacgaggagaacagncaggatccaacacttgcgggagatcgcggaatttccttgggtatcacgcctttcagtcgacactg

SEQ ID NO: 450700 - DNA, 309 bp, Triticum aestivum
ttacgttcattgctcacaagactggtgcagacgcacggctccacgaatccacggaccaaggtgtggaggcaggctgcagtgccgcagtaggcggaagcaacatacatcatttatgtccatcaagtcccgagagaactactaatagctagctggaaagatgttttagagaatttgtttggaggccgacagcgggctcgagtctatctctgtctcacgaacagggtggacaggttcacgactcgactgattgactgaatcggagcaaacaattcagcaaacaccttatgggcagagcttggactggcagca

SEQ ID NO: 450701 - DNA, 234 bp, Triticum aestivum
tttgtgcagcaacccctaacagacccacggaatcggcccatagccatcttggctaccgggaggaagagtaatcccctagagccctgaggcactggctggcgctaagtatttacactgtgcgtaaccatgtacttcacgcgaaggagatacctcattagaggtgaatagtgcctaaataagactgactggtacactttatggagctacatagactacaaagacgatgcgaataat

SEQ ID NO: 450702 - DNA, 377 bp, Triticum aestivum
tcttcctgcgacctgagccgagagagggaaggaaacaccaggaacctcctcctccctcctctcctctcccctctccccctcctcctcccccgcgcatcctcgagcgagcccctccggccggcgacgcgggacgcggcatggccaccggcggcgacaacgggtgcggcggcgggggggcggcggcgcccggcggcggcgacctgtacgccgtgctggggctcagcaaggagtgctccgacgccgacctcaagctcgcctaccggaagctcgccatgagatggcatccggacagatgctcgtcctccagcgggaccaagcgcttggaggaggccaaggaagaagttcagggagatccagggcgcctatttccgtcctct

SEQ ID NO: 450703 - DNA, 219 bp, Triticum aestivum
tgtggtagccacctcctcgccgtctcctccgccgccgtcggctgcctctaggcctcaggccgcctcccagacgcggccaatggaggcgccgacgggcctgcacaggctgcggggcccgtcgcccatcgtgtgggccatgcgcacccgcgtcgccccgccgccgcggctcgcgggcccaatcccccgccccgtctaccctgcccatcccccgccgcgggc

SEQ ID NO: 450704 - DNA, 225 bp, Triticum aestivum
  unsure (1)..(225): unsure at all n locations
tcccatgcgtccgcttttttttacctcggagccacacagactctcaccacatcccaggaaccagagcagcaagccttgtggagctcggctcgagcatggacaccaagcatgcggattcgttcgacgagcgcgacgtcgtcgtcgacgccggctgcgtccgcgccgtgctcggggagctggtcctcaccttcctcttcgtcttacncggagtcgccgccgccatgg

SEQ ID NO: 450705 - DNA, 329 bp, Triticum aestivum
tcctcgcgtccgacggatacgggttcgtgccgcgtccgtacggcgacgtccaagatggttccgggaagaccctcgccatcatcatcggcatcgtggcggcggcggccatcatcatcatcttcctctccttcgtccgaagagcccgcgccgccaatggcaaaagctaagctaagggttgcagcagggatggtcgccactcgccactattagctcagatttggatcggtcggtggcttttggcttcggcgttgctttagtatctctccttttatcttttatggtctcttttgccgtgccagaaaaacaaagggaggccatgccgccactgt

SEQ ID NO: 450706 - DNA, 317 bp, Triticum aestivum
tcctttcacgcgtccgcggacgcgtgggcagctctgttccatccagtcacgaagcagaggagagagctgtactcctacgtctgtaggctcatagctggggagatggtgctcaacggcgccctgttcttgctcgtctgcgcggctgctcgagctgctgcgtcgggcggagacggcccgctgctgaacgggaacttcgagcacgcgccgaacaggtcgcagatgaacggctcgagggtgacggggaagtacgcgatcccgcactggaaggccaccgggttcgtggggtacttcgagtgcggcgcgaagcaggaccacat

SEQ ID NO: 450707 - DNA, 248 bp, Triticum aestivum
tgtgtcctcccgattgttcgtgccacacccccgtccgtcgtgagtcaagcagggagccaatcctctggttgaatttgaacatagcatcagcatcggccgttcaactgcgggcggtggtagtggttgctgcctttcggcgctggtgctatggatagattcaaccgaatggttgtgacatacccgattgaaagaagaagctttgctcccgcgcacatccaggccggtgggattagagtgccctggtggcg

SEQ ID NO: 450708 - DNA, 254 bp, Triticum aestivum
ttgttctgaggtcagaggcgccgttgacgccgacaaggcagccggtctgtgttccggcgccgagctcgaatcggcggagccgggtgtttcggatgcgagatcagaagctccggcggcgcgaatccacgaacagaagctgggttgcgggagtacgggttccgatgaagctgccgcaatcagccatatcccctcaccggttgagccgtcgccgtcagacgccagttcgaattcagacaccaacaccaccactgggg

SEQ ID NO: 450709 - DNA, 109 bp, Triticum aestivum
ccgcttgtcggtgtgaaacatggtcagtcatatgttgttgtatattggatattttgccattttgttggagattatcaaccaatcaataaaagttgcagggttttgtttg

SEQ ID NO: 450710 - DNA, 355 bp, Triticum aestivum
tttccttccacgcgtccgtccacctccgccgcgataagccctagcccctccacctccttctccatggcgaccaccaccacccttttccatccgctctccgtgcccatcgccgggggacgcgtccggcgctgccccctcaccctgctcgccccggcccgcacggccccccggcggccgacgcccctcctcgtcgcccgcgccaagcgcaccaataactccaccgctgccccgaagcgagaggcggacgaggaggtcgaggtcgaggaggagctgccgtggatccaggacaaggcgctggacctcgttcgagttcaccggcaccgtcacgcaggccatccctggcccccgcgtcggc

SEQ ID NO: 450711 - DNA, 302 bp, Triticum aestivum
tttcctgagagaggtagagagagagagagagagagagggagaggggggaggggagaccctgaccaatgccaagaacaagaagagatcagtgaaaatccccaccgggcgagaggagacaagctccggcccccgtcctccaagaacaagaacaagagcaagaaggaatccgggagcacgagggaataaagcggccggaggagaccggaaaggccgaggagaaaaaagctccggcgacgatggagaagggattggatccggcgctgctggacaacatcatcgccaggctgctggaggtgaagagc

SEQ ID NO: 450712 - DNA, 238 bp, Triticum aestivum
taaatttcccaatctcctcccgcactcaacccaatccccacctacccgcaccccatggcgccgaaggcggagaagaagccggcggcgaagaagcccgtggaggaggagcccgcggcggagaaggccgagaaggcgcccgccgggaagaagcccaaggccgagaagcgtcttcccgcggcgggcaagacctccgccaaggacggcgacaagaaggccaagaagaagagcaagaagagcg

SEQ ID NO: 450713 - DNA, 299 bp, Triticum aestivum
  unsure (1)..(299): unsure at all n locations
cgttttcaaaccaccccgcgccgcggtccacacgccacgcgctacctcagctcagctcagctcctccctatctatacgcccacgagcagtatataagcagcctcgccttctaatcctcgaggccacacccgacccgagagcaagaaacaagcaacgaagtttctgtttcgagcaaggagtggtagagatttcaaacgagaggttgntcagttaacccgagggttgaggagctgaaagaaatggcgacgaccaagctgtccccgctctcgcctgtgcggccggacgacaagcggcgcgcg

SEQ ID NO: 450714 - DNA, 402 bp, Triticum aestivum
  unsure (1)..(402): unsure at all n locations
ttctagtccaagaagaagctcccgctagctttgcaagagtcactgaccgccgcctttgctcagatcccagtcgcgtcgtttcctgatgttcctagtggccgggtgactgaaattcctggagaaacttctgtgcttgatgctgttagaattttatctgagcacaacataagggcggcgccagtgcttaaccctgaacctggggttccggccgattggcagggaggtatcttggcatcatcgagtactcagccatcatcctttgggtactagataatgnctgatctcgcggccgtagctctgtcagctggatcggcaactgccgcangagttggaatgggcgctgttggtgcatggggcgtggcagcattaggtgcaaccggccccgcagctgtcgtggattga

SEQ ID NO: 450715 - DNA, 193 bp, Triticum aestivum
acgcgtccgagcaacggcgccaccaagggagcagttagttggctggacgatccgactggctactggctactggtagcagcagctgatcctgatcgagagcgatggggtgggcgatcgcgctgcacggcagcgccggggacatcccgcgcacgctgccgccggagcgccgggagccccgtctcgccacgctccg

SEQ ID NO: 450716 - DNA, 376 bp, Triticum aestivum
  unsure (1)..(376): unsure at all n locations
tttcctctgaggcagcaggcaagccaaggaaggagcgaggaagctagctccggtggagaggcgacttgtttgttgtgcatggaaggggcggggagcggcgggaagatgggaggaggagaggggatggccggccgtgccggtgccggtgctgcgtgggcggccaaggagaagaccggcttcgccgccacctgcagcctcctgagccgctacatgaaggagaagaagggcggcgcactgcagggcctcgtcggcctcgacatgtcgccgccggctgccgtcgtcgatgaaggaggagctttccagccgcccaccaccatgaacctgctttcggggctagaggagccaaacgccgcncacgtggagctccccctcgaga

SEQ ID NO: 450717 - DNA, 330 bp, Triticum aestivum
tttctttaagcaacacacgaaattaagcaagcgcacacacacgccagcatggctgccaccatgaagctgacaatcaccttcctcctcctcgtctccgggctggtggtgttcggcgacgccaagaaggcgccgtgcgccgtggtgtgcgtccagggagggcacatcacctgcgacaactaccccgggcagaagctcgacgggtgcgactgccagtgcgcgcccaaggacggcaagggcctgcgtgctccacctcaacagcggctccaccaaccagtgcaccaccacgccggagtactggagatgaatacatgcggttcgtcattgctggct

SEQ ID NO: 450718 - DNA, 206 bp, Triticum aestivum
tctcattcgtccggaggagagagacccagcgcagaaaagggacgccgcaaaagggcccccggggacagcgagaggtgtaggcagcagcagcagccagcggggaggctggttgtggttggtcgtcgcgggcgggatggagagcgagatgtcggacgcgcagcccccggcggctgcggcgcccgtcgccgagccgctcgccgccgtgg

SEQ ID NO: 450719 - DNA, 234 bp, Triticum aestivum
ttccattcgtccgcttttctctctcctccctccccctcacacgctttgcctttgcccacgaaaaggacaaccaacccggagcgacgcagccaggcaggggtgaagagaagagaagagaggagaaggagaaaaaaaaaggcataggcatcattccagcatcgggttctacggaggaggtgccggtttggacatctgatccatttggaggggtattgaccgcttcagagccagagc

SEQ ID NO: 450720 - DNA, 248 bp, Triticum aestivum
agctcaagcggactctctccatcgcacaacttgctctctcttggcccatgcatctagatccatccatggcggcgataggcggccacccttactcgccaagtgacctggagctccccggtttcgtgccgcagcagctttcacccatcgaactcgtggtgcccctcataggcacttctctcttggtcatcacgggtgatctggcttgtctccggccatgtcctcaatagtggaagacccagcagactatc

SEQ ID NO: 450721 - DNA, 90 bp, Triticum aestivum
tcccacgcgtccgcccacgcgtccgcccacgcgtccgaaaaaaaaaaaaaaaaaaaaaaaaaaaaaaaaaaaaaaaaaaaaggggcggcc

SEQ ID NO: 450722 - DNA, 72 bp, Triticum aestivum
tatctttgcagctgctaggatgaggttggcagccactgagaaagcggaagcggagaagatactccagatcaa

SEQ ID NO: 450723 - DNA, 191 bp, Triticum aestivum
ctatgggcaactgcaagagtgtcatgctcgtgcactcctaggaaagggccaggttgttccggatccagaatggaggattcgggacttcggaaagacccatgttccagatttcgaatggaggattgatgacttctcatcactgcttaagactggagctaagagagcaacatctggcccttttcactgctctg

SEQ ID NO: 450724 - DNA, 370 bp, Triticum aestivum
ttcctttcgtccgggtcattcttccaaactcttaggcagggccctcgcacacactgtatcatgcatgacctgatccatgatcttgcagtgtcagtttcaaccaatgattgctttcaaattgagcctggcatgacccgttctatcccctcaacggtgcgccatatctcggtcactacagatggcgtacaagacatcaatgctgccatcaacatgctaccgaaaaagctgcgcaccttgttagttctgagaactcgttctttctcctcatattgccttcaaggagacttcttagcgaagctcaagacttggcgggtgcttgatattagccactctgattacactgaattgccaatgtccatttcctgcttaa

SEQ ID NO: 450725 - DNA, 437 bp, Triticum aestivum
tttccttggacgcgtgggcggacgcgtgggagcagtccttcattattttctttaaaaacgcggaagcccggtgactggagtaggcgaagcagggagcaatgtcgccaccgacgaagaaagagagggcggcagaggccagggcgagctcgtcaaaaccgatcgtctcggcggctccccaggttcagcggcggagggtgggtggtaggcgggtggacgagctgccggatatccttctacgcctcccgcgtctacttcctgctcatcatcctccagatcccgctcttcagggtcccttgtagagcaggcacatgcactacacctattcaaattacatcttcacagttggtctcaaatgagatattcccaccatctgttgtgaaggccatgctctaccctggagttatagtgcgcaacctcactcaagaatgagcatgaca

SEQ ID NO: 450726 - DNA, 279 bp, Triticum aestivum
aatcggagctgcggaagcgcgaaggggacgcaagggagcgaggcgctgcgcggcagcgggcaaaccctaggcgtacggcgggcgccacaacccccggcggagggcaggctccgcacggctcggctcgattctgccggctctgaccccgccaagcggccatgtcgaacaggtccatttgcaagttctttgtgaatggtgcttgctttaaaggagactactgccaattctcccatgactggaatgatcaaccaaatgatgtgtgcacattataccagaacg

SEQ ID NO: 450727 - DNA, 108 bp, Triticum aestivum
tacatgctgggcaactaccctaccgcttggtgctgaccgtccgtcggaacctgcaacagtgggaactctcgccgggagccctacaccgcggctcataacatgctgctg

SEQ ID NO: 450728 - DNA, 396 bp, Triticum aestivum
tcgtaggaagcagcggagaccacacgaatccccccaccaccctcgcgcccccctcccagcgcggcgccaccaacctcgcctctcccggcgcgccgagcggagccgagcgccgccggagccggcggcgggtctgcgtcaggtccggcctcgtccgtcccgcggaggcggcggcagcgcagcgcgcgctcgcggttggagcttaatcttggttcctgaagctgtagtagggctctgttatggcggggtctgtcgcctcggggttcttccccacgccggggtcttccccggctgcatccgccagaggctccaagaacatgtctggtgaattacctgagtctttgagtgtccgtgggatggttgcaaagccgaacacgcctcccgcgtccatgcaagtca

SEQ ID NO: 450729 - DNA, 300 bp, Triticum aestivum
gggcgcagtcgcaccatccaccccaaccttcagtgcaggtctgctcatgtctcctcctcgaatccacccctccggaatcactccagtagccgcagccgcagacgattcataggtttctttttcagtactttctttaccaagcaaacccaattcgccgacaccacttaggattcagattagaggcggggaaaagcggaaaaagcagatggagaagacgacagggatggcaggctcccagcccaccgacaccgagtcgttcgagtacatgctgctggagaaggaccccgaccactaccggac

SEQ ID NO: 450730 - DNA, 262 bp, Triticum aestivum
tcccccgccgcgggctagacgcagaccaacccgggaagcgaggcgggtcgccgccgccctagggtttccgatggagcccgcggccccctccgcgtactcggtctcgccggccgcgtcgccggcggggaggcggaggacggcgccggaggccgcggagctgagggtgcggcggcggacgctcgagaccgtgctcgagcagtgccagcgcgcgctcgagctcatgcgcgacgccgagggggaggacggggatccggaggaggag

SEQ ID NO: 450731 - DNA, 180 bp, Triticum aestivum
gggcaacaacaaagagcgcgggagaaataagcggagcacgccaagcagagagagagagagaaggcggcggcggcgacggcgacgactacagcggcggcgacggcggcggcggaggggccgggggaggtgaaccacgcccacagcctggagcagtggaccaagcagaccgaggaggccaac

SEQ ID NO: 450732 - DNA, 305 bp, Triticum aestivum
ttcatgcgtccgctcgccggcatttcctcccacttgcggctgttgcggcggcggcggccaccgtccaccgggtgtggaggcgagatgtcgtacatgcgaggcgatctgctgacgaagacgcggaaactggtgaaggggctggccaagcccgcccctgcctggctcaaggccatggagcaggcacctccagtcacattccctagaactgatggtaaaatcgagaagatagaactgccagaggatgtctatgtcaagaggttcttcagaaggcatcctgattcactctaccatgatgcaataaagat

SEQ ID NO: 450733 - DNA, 389 bp, Triticum aestivum
tcttctacgcgtccgccacgagcaacacgcagccacatccacatcccattccactccacggtgaggttgagcgatccgactagcccttcagcagcaacgacggcaggtttgttctctgaacttctctggtctttttagcggcagccagcaggaacacacaagaaattcaggtcccgttcaaggggtccttcttctgggattattagatcggaagaagcgccctcctcttgctcgggattctcctgatttcttgctaacctcactactctcctaggaggaacagagagatccagagaaccttttttctctcctggattcttgccttttttcagccttgttttgctccggtacggcgagaaagggttcttttgcaatacccttctagttcg

SEQ ID NO: 450734 - DNA, 249 bp, Triticum aestivum
gggtcggcaacaaatacactatagtggcttgttttgacagcgtttgggcgctctcaatggcgagccgtttgggagtcgtgctggctttagcggctgtcgtccttcttgccgcagcgggggccgtcgtcgggcaatccacgccacggccacccaacgcccagggcccgaagccgtagccgaagccgatgaaggtcaagtgcactgagaaccgcaaggagaacccctactgtttcaaccggaacatggact

SEQ ID NO: 450735 - DNA, 405 bp, Triticum aestivum
ccagcctgcttgcacacgccaccggcgtcgtttcagcccctccatggccgccccggcgccggaggagtgcctcgacgtgctcaccgccgccggcgacaagacgggcgtctccaagcccaggtcggaggtgcaccgggacggggactaccaccgcgcggtgcacgtgtggatctactgcgagagcaccggggagctgctgctgcagcgccgcgccgactgcaaggactcgtggcccggccagtgggacatctccagcgccggccacatctgcgccggggactcctccctctccttcgcgcggagggagctccaagaagaactaggcatcaagcttccagtcgatgcttttgagctcatcttcgtttttcttcaggaatgcgtcatcaacattgggacttacaccaa

SEQ ID NO: 450736 - DNA, 339 bp, Triticum aestivum
tcgtcttcctcggttcctccaacgaacacaacacccgattaactagcactagcagaggcttatcccagtagccgacagggggtttgagagcgtacagcggggtcaatcgatcgagcgccaagaatggcggcgtcagggagcgctcagagccgactgttcgccgcagcgtgcggcgttctcagccgctgcatcaaggcggcggacgcgcggccggcggccacggtggtcctccccctcatgcccggagcggaagtgcccgcgcaagacgagcacacggtgggttctgcgccggggcacgcgcagatgaccatcttctacggcgggcaggtgctggtgctg

SEQ ID NO: 450737 - DNA, 302 bp, Triticum aestivum
tccacctgcacctgcaagcgctggttaccttcttcctcccccggcactcgacctctccgctcgctgccttccaagagtgccgctaccgttggcgaccagaccagcagaggaacgccgctggcagaggatgaggagtccttccttctccaccatgaagcacgcctgcttccactcctcgccgccgaagtcggatgcgtgcgcagatgcagttgaaggaaaggggcgggcctcaaggccggacctcaaggagatgcagcaccggaacatcatcaggctgcaggacgtggtgcataacgagaaga

SEQ ID NO: 450738 - DNA, 259 bp, Triticum aestivum
ttacttgcctatattgacgtagacgcagcaggagcagcagcagcttaactctgtcagttctctagcatctccggtgaagcaagcaagcagagagatggcgtcccctcgtcgcatggccgccgcgcccgccgtcctcctcctcgtcctgctcctactcgtcgccacggagatggggacgatgaagactgcggaggcccggacgtgcctgtcgcagagccacaagatcaagggcacctgcctcagcaacagcaactgcgcc

SEQ ID NO: 450739 - DNA, 141 bp, Triticum aestivum
ttcatgcgtccgcggacgcgtgggtacaaactaagcagatgcacagctgagctgccggatcaccggcgcaacgtacacgcctacatcatgtatatacagaattacagtatattgttcagaaaaaaatcaacaaattgttaa

SEQ ID NO: 450740 - DNA, 358 bp, Triticum aestivum
cccgaatcaagctgccatcagaccatatgtttcaaattgcacggtgtgagcattgaatatcccgaacacgtctgcagaccggcgtaggcccgctgatgccggggaagaagttggcgcatcatcagcgctgcatgatcaatcgttgcaggtgggaactgtcttcaaggcgcgcagatctcgaaataggttctcatccccctctatagataaagcagcggtcaacacgcacagatggttgaacaacgctgagatcatggtcatggaagagaacatggaagactcgggcggtattagacactctcatacagattaatattgaccacctgcttaattagttaatacattgtaacaccccctc

SEQ ID NO: 450741 - DNA, 333 bp, Triticum aestivum
tgcagttgagtttggatctctacatcatcttaagttattgtagtcgcatgttcacgaaggaaacaaggcttaaggaagttaattctgttgggatgaaagattgggctaatattcagactgatattgttggtctaattataaagaagcttggcattcctgactacatcagattccgtgctgtatgcacgtcatggaaccatatctgcaaggaagtatccaaccatccaagggtggacccatggctgatgctccccacaaagccgcttgatggtgctaagttttttagcttacctgaaaaaaagactcaaaccatgcatatcccgagtgttgcca

SEQ ID NO: 450742 - DNA, 459 bp, Triticum aestivum
ttgtttacgcgtccggaagaggggagggggggactagccggctagcgtgtggacgggtgcggctctcggctcgccacgcggagacggcacgagccccgatgccgtcgccccgccgcgccggcgcgggcgacacgagcgccttcttcgcggcgacgctggtgctgtgggccgtgtcggtggggttcgagatcggcgcccggggacgccgcgagctggccgccgtggccgccggcttcgccttcttccaggccgccaacacggccgtccgcgccgcggtctcccgcgacccgctcttcgtcaacaccgccgtctcgctgctccactcctccctcacctgcgcctcagttatctttgttctattgtgccaatggcgtaccaaaggccttgagaacatgtttcagcatgaagaattagttggtagcagttggattggagcatattctgctctgtgcttttcat

SEQ ID NO: 450743 - DNA, 212 bp, Triticum aestivum
gggccatctccgagctggcgcgcggagccgacgcgccctcggtgccaccggtgtgggggagggagatgctcatggcgcggcagcccccgcagacgtgcacctacccggacctggagtaccgagagcccgcgggcgggctggagccggacccgatgctcacgacgcccccaggcgacaaggggtgcgtccccttcttctttggggcacgggag

SEQ ID NO: 450744 - DNA, 426 bp, Triticum aestivum
tcgtttcacgcgtccggagaatcgccacatcgctcgctccctccttcctctcctctccctcccgatctggaagaatcgaagagacatgagaatcgacgcatcgcctcatgcgcatccgcccctcccgatccttttcggtccacgatcgctagcagagggatcccctcgagagaggaggacgagcgatcggtcttgctgatccgtcggtgcgaaagggaagatgagggcatctggtcgccgcgactttgaggaccagggatcggtcagcttctcggctccggcaagccgatgctctgcaggaaacacaaaggtccgtcccgcccgccattgcggaccaggcctcgggcaccgaccctcgatctcttcttcctcgtcattccgggactcgcaattcactgacgtcgaccttactggccacctggcaca

SEQ ID NO: 450745 - DNA, 411 bp, Triticum aestivum
atcgttcatttatggatatctcggaggtttccttcttgaattcggacgtgggttttctcgcctgaggcgggatcccatattgcgaaattggagcacgattcgattgagaaaggtctcctgtatcacatcccctccaaggtggtgtgtccggagcagcagagtgtcgatgtgatgatgaacgcactgcgcgaatatttcttctatggtcgtgaggtcttcgaagagcgtcgcgagaaattcctggcagtgattgtgaactgcggcttggtgccgtacctcacggaagtgccagcgtacgatacacttgttgaacaatatttggcatccagtgccaagtatgctccgggtggtcggtgcgaacaatgcagtgcttaggcgctgcgcgtggggcctaccttataaggtcccttc

SEQ ID NO: 450746 - DNA, 105 bp, Triticum aestivum
tcctttcgtgcggctagctcttgccccgcggcgcccgatcgagcctgggaggagactcgaaccctaatcttccgcctcgatctgtcccgccgcaggagagatccc

SEQ ID NO: 450747 - DNA, 363 bp, Triticum aestivum
tgcgtcatccgcagcagagaactccagggaattgaagctgggatcggaaaaaggtcggtcttttgccattttggccgggagcagaggagggaggagatggccaagggggagagggaggggcgcctccccctcttgctgctgctgctgcttgtcttgtgcctcttggcccagtccaggatcgccgtcgtcgccacccacccacaggatgcggctgctctcaaatccttgatgaggaaatggtcaaatgtgcctgctagctggaggaagaaatcgaatgatccttgcggcgacaaatgggatggaattgaatgcaatggtgccaactcaagggttacatcactaaatctttttggcatgaacatg

SEQ ID NO: 450748 - DNA, 423 bp, Triticum aestivum
ttcttgcgtccgcggacgcgtgggcggcggcggcgccgatagctgacaacatggacgaggacgacgaggacgaggacgactacgaggacgaggacgaggaggacgacctcgacggcaacaaaacgcagtacaagatccagttccaggggcagcaacaacatcagaatcagcatcaacagcaccaccacaacgttgtcaggccgaacgccacctcgtgcggcggcggcaacccgcctggcgctgccgctcccagcgcgccggcggcggcaacgacgacagccggatctttcctgggcatggtccagtagatccatccatcaccccggtgactagctctctctctccccataccccaatcaattccatcggtggctttctaccttctctttctctctttcttggaccatttgtatctacctacct

SEQ ID NO: 450749 - DNA, 315 bp, Triticum aestivum
tgggtgcagatgaagtggcggcaaaatgcatgatcatgatgtgcttttgaccctgtagttatacagatgtagaaccggctgttgagagggtgctgtgctgagttattatttgtttggaggggacgttgcatacagcggatgtattgtagcttgtcgaaaggaaagtaacacttggtttgttgtacagggatttatagaacttttttgcttagatcaatttcactttgtaagctgtatattttgcagcgaatttctgcatctcggttgattctgtggtcgttgccttagctataaaatattctgtgcgactcgttc

SEQ ID NO: 450750 - DNA, 199 bp, Triticum aestivum
tgccggcaccaccccttttcttgcggagcagcgtgagggtttcggaaagctaagccatggcggagcagccgcacgccgaggacgcgggccacaagccggagaccctgatggagaagatcgccgacaagctccacgtcggcggcggcgaccactcctgctcgtcctccgactccgacaaggaggagcagccgtgcccctc

SEQ ID NO: 450751 - DNA, 147 bp, Triticum aestivum
aaaagaaacctcagagccttatggttcatacggccatgaaaatcgtaaggaaatatcggcaacatatggatcaaaggaccaaggaattcgcaaggaagcatcaggatcctacgggctaaaaggtgaaagggatttaaaagaaatctc

SEQ ID NO: 450752 - DNA, 308 bp, Triticum aestivum
tctcctagctcattcttcaaagttcaaacacatattttctgtctctactctccttcctcattgcccataagctcctgcgtctgtgttcgtcctcttgcgacgctaatggcgtgcctgtcctcctcgccgtccggccggcgcctgtcggagctgctggaggagaggcaggagcccttcttccttgacctccacctcctggagaagggctgctcgggctggctcctcgatggctatgacaccgccctgtgctggccagccgcagccgccggcaacgacgcggcgtccgtgctcaagcgactcaccagcaa

SEQ ID NO: 450753 - DNA, 393 bp, Triticum aestivum
gtttttcaaagaattcattgaattgaggcgccaagctctggacctattcatcaacagactagcttcacaccctgaacttaagcaaagcgaagatttgaggacatttttgcaggcagatgaagagaaaatggatagagcaaggtcttttgagactggtatatttaagaagccgggagatttcatacagatgtttaaggatgtacagtcaaaagtcagcgatgttgttttgggaaaagaaaagccagtggaagagtctactcctgaatatgagaagcttaaacattacatatttgagctagaaaatcatctagcagaggcccagaaacaagcatttcgccttgtaaaaaggcacagagaacttgggcaatctttggcggactttgggaaagcgat

SEQ ID NO: 450754 - DNA, 65 bp, Triticum aestivum
tcggtttcctccaccgaccaccatgccgacggacggaagcgtcaaggatattcacctccgcctcc

SEQ ID NO: 450755 - DNA, 133 bp, Triticum aestivum
tcaggttaactaggagggaagaggagaggtgaggagggagtgtggtgatgatgatgatgaggtctctagagccggcggccgaccacaaggcctcgtcatccttcggcaaccttctctccatctttctccgggt

SEQ ID NO: 450756 - DNA, 150 bp, Triticum aestivum
gatgaagcagagcggcatggagagcagcctggcggcgcgacaggcgccgggcagctacggcctgccgttcgtctcggccatccgcgaccggctcgacttctactacttccagggccaggacaagtactttgagtcccgcgtccacaagta

SEQ ID NO: 450757 - DNA, 150 bp, Triticum aestivum
cccagatccactttccctcctttcgctcgtacgctccttctcctccagcgcggcccgaccgctgctatggtcgccggtgtgcaccaccgcggtgagctcctcccccactccccttcgacgtgcccacgacccgcgccatcgtcgtccacg

SEQ ID NO: 450758 - DNA, 234 bp, Triticum aestivum
tgtaccacccgagcacgcacgcacgcacgcacgcatcactctcctctcaggagcaacggcggccgtgcctgccacgcgcgcgcgagcatacacatgggagaggtcgcctccaccgcagcggcggcgtcgctctcgtcgtcgtcctcgctgctgatggctgcgacggccgtcaagggggacgaggagcggtacgtcatggtggcgtcgaggttcttccgggtgaagccgggcgct

SEQ ID NO: 450759 - DNA, 249 bp, Triticum aestivum
gtgattcgaaagccctggaacatgtggtgcttggttcttgcagcattcttgcatcacagactgttttgagacacttgacaactgattctgcttccctctcttcattaatcatgggaattttgggaagctctcatcatgaatcgataaagtgtcagaaagctattactgagctctttgtgaaatacaacatacgtttctctggaatatcaaggtcttttttcaagaattctcaaagtctggctgacaggc

SEQ ID NO: 450760 - DNA, 209 bp, Triticum aestivum
ttttaaagttccaaaccaaaccaacgaatccttccttctgctacctgcctacgtgatcagcagtcaacaatcgacccagcttccagcgctcgatcgatcagcagccatggttgccaccgccatgcaggccctcttcgaccagcccgagctctccctctccctctccctggtccccgccgtcgcgccggcgctcaacaaggacgactacc

SEQ ID NO: 450761 - DNA, 293 bp, Triticum aestivum
gccagagctccgcggacaagagagtgaccactcccgcgcgaacacgtaggctgagcgggacaagatgccaatggagaggtcggtgtcgctggctgagaggagaaccgccgccgtcgcgccggccaacgacctccggtgccacagcgcctcctacgccgtctcctacgcgcccaccaaggtgcagcgcgacaggagcaccacctccctgtcccgccccgtggcggcgaccgccgtgcagcggagcggcagcacgaggaccgtctccggcgccggcgccggccccaccccggggc

SEQ ID NO: 450762 - DNA, 251 bp, Triticum aestivum
gtccgattgaccacccagagtcggcaaccttcagcggatgtggcatttagtgtcctcattaaacttgttattgacatgtatatgatggactctgaggctgctgctcctctgacactttatatgcttgagggcatgttaagctctcagaaatcacctgccagaacaaaggctttcgatctgattctgaaccttgggattcatgcacacctgctggagcctatgatagttgaagatgcaccacttattgaaaa

SEQ ID NO: 450763 - DNA, 240 bp, Triticum aestivum
ccaagaaaccggcgttcagatcgatcgatcggcccttgcctgagccggcagcagtagacatgaacaacctcttctccagctcgtggaagcgcgcgggcgcggggggcgacggcggggacctggagtcgggcggcgtggagatgacggcgccgccgggcgccgcggcgggggcgagcctggaccgcttcttcgaggacgtggagtccatcaaggacgacctgcgggagctggagcggatcc

SEQ ID NO: 450764 - DNA, 204 bp, Triticum aestivum
gggcaagggcaagccgcgggaccgcctggacgccggcaggccctgcccgctcgaccacacctggaagtcctacgacctctacatcgccggggacgggggcagcgccgcctcgccggcctccgggccggcattttccgcctggtagagggagcgcccgcagctgcactgactagacacagtgattccctcgccggctgggcggcc

SEQ ID NO: 450765 - DNA, 269 bp, Triticum aestivum
cctacatatctactatatacacagagaactgggtaaattcacctggacacgaggaagataactcgcggcaggctttcgtgagcgtgcctcatggcagctggcgaatcctgaagatccctctcgatagctacttacctacatggaaaggaaacgtgatcgaagcgaacatggaaatgaatccttctcgcgtcgtgggaatgtctctctcgctaaatgcagaaggcggcgttcctggcgctaagactgggccaggcgattctagattagac

SEQ ID NO: 450766 - DNA, 288 bp, Triticum aestivum
gtccgtgtgcttcttcttccttgtgtctcctactgtcttcttgattgcgcaacaacaatattcacggaggaatcggagtggccgcccttggcctacccaatacaagtcttctcttcaaggacatggagatgggaggagaggtcgctggcccggagaggagaggctgcagggaccatcgctgacatggatccatatagggattatgaacaccgttatgccgtctactggaaaggagcgatctatgtgcattgtcaaaatgactccattttacgcataaccttaacggat

SEQ ID NO: 450767 - DNA, 292 bp, Triticum aestivum
aaagcctcctagatataagcagccggagtacctaataagcagactctatcaggcttctgtgctgaatggtgatactgctcaagcaaatgggcagatctgctttactagaaatacttcatcacttgtaaagcctcctaaatataagcagtctgaggatttaaaaagcagacacagtctaacaccgcagctgccaatcaattgccctgcggcttcgaagcctcttgtgcatcctataaccaatgagaacactctcaacactttggtctcttcattacctgttctagagcatgct

SEQ ID NO: 450768 - DNA, 187 bp, Triticum aestivum
gcgcaccgtccacgtccatggcgtgcacgccctctttcgccgtccaccgcgccgtgtggaccttgtccccctccgcgccgcgccgagggccggcgaaatctgccgcctttgtcagcgttccggggggacggccccgggggcggcggccggtgctggcggcggcgctgggcgacatggacatgcgccc

SEQ ID NO: 450769 - DNA, 198 bp, Triticum aestivum
gtccaccgcgcctcgaggaccttgtccccctccgcgccgtgccgcgggccggcgaaatctgccgcctttgtcagcgttccggggggacggccccgggggcggcggccggtgctggcggcggcgctgggcgacatggacatgcgccccgccattgacgagaaccccgagggcgtgctctccggcgagtggcccggcaac

SEQ ID NO: 450770 - DNA, 109 bp, Triticum aestivum
tgaaaggccataagcctagctctcaccggagtaacatattgaagatccaccaccaccaccacgatgacgacgatgatgacgatgatgatgatggtggtggtggtggtgg

SEQ ID NO: 450771 - DNA, 204 bp, Triticum aestivum
tggctagacaacacgaagagatgcatccagttaaggtgaaggtgaaggacggctcgagcgcgctgagggccaagctggcggagaaggtggaggcggcgacgtcgaggtcgcacgacgagcggaagctggcgcacgagcgcggcagggccaaggtcgccgcggccgaggcgcagctgcacagggagaaggtcgcgcaccgggagg

SEQ ID NO: 450772 - DNA, 165 bp, Triticum aestivum
gactgaaaggtggattggtcatatcattcatgaacatggcatcactggtaaacttggatttatcacacaacaatttgacaggagctattccagactaccaaataaagtcactcaaagttctcgatttgtcatataaccagcttgatgggccaatcccggattcta

SEQ ID NO: 450773 - DNA, 180 bp, Triticum aestivum
aggacaacaatgtgcactgcctcgtcttctgcttcgtcaactggtctttcgtgtgatcatccatcacccttgcctgtcccatgcagctccatttttgctctctctgtaggggagaaccgccgccactggaaagtagttttacgttatctttaactagtttgtttctagatttgaagagcc

SEQ ID NO: 450774 - DNA, 192 bp, Triticum aestivum
ctatatatcaaacacccagataaagagtgtcaccagatcaaatgcaaagtaaagagtgacaaatagtcaatgtaccaagtaaggggtggcaaataatcaaattcccctcaataaacctacatctatggccaccttcacccgatcaccgctcccgccggccgaccccgagaaggagaagccgctcgcccgctc

SEQ ID NO: 450775 - DNA, 211 bp, Triticum aestivum
tgctcccgcgaggcgaccggggggcaaccctaaatcccgccggtctccgccccctgtcccctccccctccctcgccgccgcccgtgggcgcggctgggcaaagcccagccgtcgccggcggcggcggggcctcatcgtcctcctgctcgggcggtgctggcgcgggccggcgcctcgggtcggagcgtggagctgtgccgggcgacacggc

SEQ ID NO: 450776 - DNA, 228 bp, Triticum aestivum
cgtcgcctctccctctcccacacgaaaccagctatcccccgaatccgtgagatccgaggagggtcgcctcgcctcggcactagcatccgcggcgtcgaagatgggatcggaggcggacatgaccgggcccctcctcgccggcggcagcggcgtcgcgccggcggcggaagcggaggtggtgccgccgtggcgggagcagctcacggtgcggggcatagtggtcagcgc

SEQ ID NO: 450777 - DNA, 296 bp, Triticum aestivum
tcttctcttcacaacaagaagcggacgctagctagagcctatgagcagaggaggcggaggacgaggaagaagaagcttcacacacagcgcgggcgccatgagggggaggaggagggggagcagcggcacggccaccgacttcctcgtctgcttcccgccgcgggcgcacctggcgctgatgccgcccaagacggtctgcagcccgtcgaggccgtccgcgagctccgagcgccggcacagcaccagcggcgcccggccgtcgtcgtcgtcgtccagggcggccaccaacaggaacc

SEQ ID NO: 450778 - DNA, 307 bp, Triticum aestivum
cttagactgaactggacggggtctgcttgatattgctcccctgtccccactccctgcctgcaaactagccgacgatggaacttcacatgaagcttctgctggcctccctcagctgtgtacttctaatacaaggagcattctgtgataacactgcaggggggactggagccacaagccggacatgtgtgtgcgctgatcatccgcttggtgaatctaactccaatagcaatctgccatgcacctgcaactgctcgtgccattggctaccagatgaaaacggcggcacacggtcatggaactgctcgtg

SEQ ID NO: 450779 - DNA, 65 bp, Triticum aestivum
gtctcgcaccaggctctgcaaggacgagggcggatgcccgcgccgcatctgcttcttcgcgcacg

SEQ ID NO: 450780 - DNA, 96 bp, Triticum aestivum
cttacgcgtcggcgagcttcgttcccttcccattaagcctgcccgttacctccgccccaatctgagatggaccgcctgtcactggcaatctaccaa

SEQ ID NO: 450781 - DNA, 432 bp, Triticum aestivum
ctttcgcgtccgcccacgcgtccgcccgcgcccttaccgacacaaacctgcggcgaggtccctgctcgcgcttcctcttacacggggggcccctacacttctccggccacgccaccggagatggcgtccgagctcacgtaccgcggcggggccgcgtccccgtccgcgggcgccgccggcgccgccggcgagtactcctccccgaagcccgccagctccaagccgctcgcgtggctgccccgcgccgcccgctacgccgcggccgagcaccgcccgctcttcgccctcgtcggcatgctcgtcgccgccgccatcttctgcctcgccgccccctccggctccggctccggcaccgccgccccctactcctcctccggacgcgtctccggcgcgctcacccgcttctccgtcgaccccgccgcgcacaaccct

SEQ ID NO: 450782 - DNA, 487 bp, Triticum aestivum
atttcgtgaaagttctgattctgactctgaggaggaggataccactgctaaaccagttcaatcttccaaggctggtaagaagggcaaagaatctagtgatagctcagattctgactcagattcagattctgaagaagataccaccgctaaaacagtctctgtaaagaaagaagaatctagcggcagctcagatagcgactcggattcagattctgatgaaccagcaaaatctactattcctgcgaagaggcctctgacaacagagaaaaagagtgaacattccaaggatgattctgatgatagttctgatgagagtgatgaggaagagcctccacaaaagaagcctaaggattcatcttctggtgctgccaagccagtctctaaggctgccaagaaagaaagcagtgatgatgatgacagttctgaagagagctctgacagtgatgaggaaaagagtaaatcggtgtcagtggcaaaacccaagcag

SEQ ID NO: 450783 - DNA, 498 bp, Triticum aestivum
ctgccccctttcgctgatcgctggggcctcacaatcaatcggctactcccctctcctctcgcgcgtggcgaattcccctctccctctctcacgctgcagcgaccccggaggcgacgtcggcggccacagcttgccgaaatggcatcatcttcggacccatggatgaaagagtacactgaagcatctaagcttgttgatgatataagctccatgattgccgatagaagttctcttccacaatcaggccccgaaattatgcgccacacatcagccatccggagaaaaataaccattcttgggactagactggatagctcggtgacattgttgtccaggattcctccaaagtcactcactgacaaggagatgcataagcgccaagatgcactttccaatttgaaatctaaagcaaaacagatggggacaagtttcaacgtgtcaaactttgccaacagggaggatttgcttggtcagagtaagacagcagctgatgatatg

SEQ ID NO: 450784 - DNA, 461 bp, Triticum aestivum
ctttccccctcgcttgccagaagaagcccgagagacccccgaagagagccctccagatgcagccggccgccgccgagatgcagccgcccgtcggctcccccaccgccgctccccaatccgaggtccagcacccgctgtctacccctgatccttcctctccccccgctcccgcaccggcgccggacccggccgatccgccctcgtccgcgcccgccctggcgccggtgcagctgcagccgcagcagcatcccaagaccgtcacgtggagcgagaagctcacgtccgagtcgcccacctacgtgccggccgccgccgccgcggagtccagccagtacgtctcccgcgggcccgccgtctcctcctacaagggcgcggtggaggcgatgaaggacacgctgtcgaggtgggggaagtccatggcggagaccaccagcatggtcgagagcctcagccgcgacacg

SEQ ID NO: 450785 - DNA, 451 bp, Triticum aestivum
ttgcctttcaggttcacgcgccgcccggcagaaagaaaggagaaaggaagaggaacaaaggcggggagggtgccccggccccggcacagctgctggattcggggcggcgggcggcggtccacggaatccggccggattgcgcgtgaattcagagcagtcgaggcatgccataagaagagcagggggagcaaatgtggcgtctcttcaacgagctgtgggacgttctaggatccgggtttttctcgtccaggttcctataagcctaacaagtcagcgactcgcctctcccgtcgcatcaaatcaagtccatccatccattgcatcggtccatctggtcggtcggcatggacgaggaggattactcgtgggtgcggcggacgaggttctcccactccgtcgtccgctccaactccggcagggagcagttcggcgccttcgtcgagcagttcaa

SEQ ID NO: 450786 - DNA, 452 bp, Triticum aestivum
tccgcgtgggggagaaggaaacccatcttcgcgagatcccgtcgggcgccgacggggccggcgcggcgatggtgcggccggcgggcctcctcgacccggcgacgaggcggcgcccgttcctcgaccagcgccgcccgtccttccggcgccgctggcagcagcgcccgctctgggcccgcctcctgctctcgctcctcctcgccctcgcctgcgccctcctcctcctcggcctcgccggctcccccgacccctcctccccgccctccaccgacgcctcctcctccggatccgccgacgccgacgccgatgccgtctcctcccctctcctccgccagagatcttacctcgaggttatcacggacacgcagaacatgacggacgaaatgatgagcgctcactcgctttcccgccagctcatggaccagatttctctcgcaaagacctacatcacg

SEQ ID NO: 450787 - DNA, 248 bp, Triticum aestivum
cttatgcgtccgctctcgaccaccccgccccagtaatattcttgttgctcggccttcactagccgcccaaccactccgaccaaggcgcaccgtaccatcacacgctcgacgggttccgacgtctagcgacgatcctctgctggtgctggtgctgcagggggctccgccccgcggctgaggggcacgaccagcatcaagaggggggcgacaacgcggcgggagctgcgacacatgcctctgcgggggac

SEQ ID NO: 450788 - DNA, 411 bp, Triticum aestivum
tttttatatgtaaggtggatagtttgaggttttgtttatcatgaaaaacaagggattagcaagtttgagctcggtggtagaattgctcaatgagatcgtgaataggagcatgattcaaccaattgacatcaatgttgataaaggcatggaaaaatcttatcgtatacatgatatggtgattgatttcatatgctgaagaaaaacacttctgtggcatggagtgaaagcggtctatccaaaggcaagatgtgaagattatccatctgaaagagcatgacaggtagcagcgatgtgacaatgaggtctcttgcaattgttgattcagtgtagcttatgttgaattttccaagttctacatgcgctggattagaatattgtgctgcatgtctctattctttgcaatcacaatga

SEQ ID NO: 450789 - DNA, 241 bp, Triticum aestivum
ttcttctccgactacttcgagttcagcttcccccctggcgtcattgtgcagccgtacgtcgagagggtggtgctcgtgtaccacaacctgggcgagctctcggagaagtactacccgctccccggctacacctacctctcgcccattctcgggctgctggtctacgacgctgccaacttgtcagcggtggggttgtctgagctgagcatcgtcgcgtcagggagcccgatttctgtgagtt

SEQ ID NO: 450790 - DNA, 384 bp, Triticum aestivum
tccacgcgtccgggcggattacagagaagcttgagttcaggaagtacgatcctcgtgtaaacaagcatgttctatttacggaagccaagatgaagtgagacagtgcagcctttttttattcttgacataagacctctactgttcattttcgttgaagacaatgctacctttattagcctgttccagatttgagagtttcatgtgggcaccaaatcagcatggatcttgctctgcctgcctgtttatttgtattgtaagtttgtaactgaaatgagctgcaagcctgcaaaagtactgcccatctagtgttgtgatgattatcatgtggatgcttggttctgaaacttaaagcagccacagatcaagggtagagggtctgaacca

SEQ ID NO: 450791 - DNA, 415 bp, Triticum aestivum
ttccagtccaatccaccctgttcacgtccctgatggtgaggtggatgattctcctcgtaacggatccagccgagggcttgttcttaatccgctgcccatgaggatcacagggggttgaaaatccacgccaaactgaacaaggtgaggatgtcaacatcttcgaaagtggatcagaggagattagagagcatcgaggggattttgagttgcggcggacttgatccccttcggtcctctttaatccacacgaaacagaaggcctagaggatatccacgtctctgaatcagcatatgcaaattcaaccgcccaagaattaccagggcaccaagtacgtccgagctggttgttccacgttttatccggagtttccagatgactggtataacatcgaggacccttccatgcccaaggaca

SEQ ID NO: 450792 - DNA, 173 bp, Triticum aestivum
ttttctgtggctcaaataattcaagcagcaaaagtgttaatagagctagcaaacatgctgccctcagttttgttaaacgcacgatggcacgttgccaaatctacgaagaggcaggaacaagctggtttgatgaagcccctttcaaggatttgtttattttagcaacttcacac

SEQ ID NO: 450793 - DNA, 146 bp, Triticum aestivum
gtccctgcgtcgggtgcacacttctctgccaccccgatttttccctccctcccctgttcctcgccttatctgcatagccgactgctgcttcagcttgggcttagctagccagggaacgaggaggagcgggttgttgtcatggcggg

SEQ ID NO: 450794 - DNA, 437 bp, Triticum aestivum
tttggcaatgaaggtaacaggccaatgcctccacaaacgagaggagaccatcatgcttggcgtactgctgttggtactcatggtgctagaccacattctagtgttgaaggccgtggccattttaatcacacttggcaaaatcatcagacgtttggtacgagagaaaacacaagtatgccacacggcgttgggcccagaacttttgtcagaccaatggcacatctgccccctactcttgggtacctcaatggaccatcataccctgggcctatgcctaccatgtattattacatgcctgctccacccatggaggcaatgagaggtccacctcgttttgtccaaaaccaaccagccccccaacctgttttatcgcctgaagcgactgagctaagagctaatatattagctcaagtggagtactatcttagtgatactaa

SEQ ID NO: 450795 - DNA, 89 bp, Triticum aestivum
tctctcggccgctgaggtttccgccgcgatctcgtctcgctacgcactctctatctgagatctggaatcgggcgaggcctgcagctcct

SEQ ID NO: 450796 - DNA, 239 bp, Triticum aestivum
tttctaaggactgactgccagcgcctgtccgtgatccaaatcctcccgggaaagttcttggttgatctcttcctcctcgaccgcctcccagggtatgctcccctgctctgattcttggttgatctctatggtctgttgctgatctgcagttaagttatgtattagggcccccttctagggagaggatctgtatgattatggatcgatcctgttcgtcttccgtggttctttcttaagcc

SEQ ID NO: 450797 - DNA, 303 bp, Triticum aestivum
tctccacgcgtccgcccacgcgtccgcggacgcgtggcgctggttcaaagaagctgcccaagggccaaggacgagccgcattgtagactgcctggactcactcatgaagccagcgtttggacagattagatgttgcgtaaacagtttagtttcggatatccggatcggtatcgcggcatggccgctcttttctaccttctcttagatcacattgtatcactcaccatgtcctgtcaacatgacccaccgttcttgtacaagtttgtgggtgtgggtagagctgtagacagtttggcacaacct

SEQ ID NO: 450798 - DNA, 359 bp, Triticum aestivum
tttccacgcgtccgctgcctgaaatccgcgccgctccctccagcccaccaccgcgctctaggtcgtcgcggctccaatggtgaccaggtggagccagaagagccccggcctcaagatcctgtggatctggacactgggcaccgccgcgatcatgatcacgaacgtcgtccggacgcgcgtcaacgatatgcagatgatcctccgggaggaagacgaagccgtcggctctggcggcggcggcacgggcggcgggccctccggcgagcgcgtcatgagggacgacgagttgaattgagcagcaagtgaagaagagttcgcttgagcttgagcgactctacatagcaaaattcgcggaagcc

SEQ ID NO: 450799 - DNA, 380 bp, Triticum aestivum
tctccagccaccactttcaagctcacaatcaagtcgatcacgacccacaggtcaagcaagcttcgttgctagcttgcttgtccggcgatttctgcttcatctagctaccaacgtgcggagatgccgaggtcgtccaagaagaagcagcggtcggcgtggggctcgctcctgggcagctgcctgggcgggggcggctggaagacggggaagcaggtccggcccggccccggcccgaggaagcgcgagtcgtcgtcggcggcggtgggggccggagtcgggcagcggctgtcgttcacggacgtgatgagcatgagcgcggcgtcggagcaggagctgtccgtgtcgctggttggctccaacctgcacgtgttcacggtcgc

SEQ ID NO: 450800 - DNA, 379 bp, Triticum aestivum
tgtgatacatcctttctctgtctacttcctagtacctggagactactcgctgcaatcttcttctgttataattgacgctacggatgttcttcgtgctcgggcaaaggcagagtccccggatgaacctattctatgccgcggatccccattccatatccatgtagttggtacagagtagcaaacactgtttggtgtagtttagaggcagcgatttcaccatgacatgtgcagctgtgaagatcatgtacaagagcattattcccatgtacacttgtgatttatttgagccacttggaggcttcctttgtaatacacttgtgtttgtgtacagtgtaaaagcatccgccaaggttaatatggtgcactggtgcacttaacc

SEQ ID NO: 450801 - DNA, 219 bp, Triticum aestivum
tccgactccatggacgctcctgacgtgttgcagtccgactctgaagagccttctgaagaggagcctgcctcctcctcctgatagttcagagagaaaatgcctctgtgtatttattccctgatgaatgtgctccagattcagaaatagcattagcaggcaaacaattgttcagatgagacatttgagatgatctgcaggttgcgggtgacacatcactga

SEQ ID NO: 450802 - DNA, 392 bp, Triticum aestivum
  unsure (1)..(392): unsure at all n locations
ctgtcggcgcgtcccgacgaggcagccctgtccgccgtccccctcatccgccgggccatcgccgcagagaccgcggtcgccgtggtcagcaccgacggccacctcgtcggcgagatctccaccgcgcacctcgctgcctgcgacgagacggcagccgcggccatcgccacgctctcggcggccgacctcatggcatacatcgactacttcggctcgccgccagagcacatcctgcgcgccatcaagaccgggctcaaggccaagggccttgacgccatgcttgagctgatggaggacgagacngatgacgtcgttctccctctcttcctcgtcgtcagatgacgacaccggccggccgcacctgaggcgcccgtcgtcggggagctttgggc

SEQ ID NO: 450803 - DNA, 490 bp, Triticum aestivum
tatcgtgttccagccaggagctatgcccaaggctgaacatgttgatgtcactgcacattgggcggttgtaaaagaggaagcatccggcaacaacggtgctgattggtttgacccaggcataggcatggggaacctgccgtcccttcggaaggttaaagtcagagtcgactctcataaaatgacggtcggggaggccaagcaagccaaggcagcgctggagaacgcactccgtgcccatcctaaccgtcccctgttttgcgtcgagttcaggtggtccataaaagaaggcgctcatgatgacgacctctgctagtgtggtcgcagcgaagaacgttcgtgcaggccgtcaatgtttactggagacgcgcttttgcaaactatatgcgtagcgcatgctgcaatattgatcaacgctcgttactcactgagcttatttcttggcttcacaaaaaaaatggaaaaattgtatgaaaaaaaaacaaacaaaata

SEQ ID NO: 450804 - DNA, 212 bp, Triticum aestivum
ttgattctgtggtgctctagcatagttgcgtggcagaactgagagtagaatgtcactgagtgtgtatggtgtgttatagttggtgaataaaggagcgaacagaagtgaatgtgtgatgtgttaccctgatctgtaatagtatgatgtttcattgttacgtgtgctctcgtggttcaagtagcaggaccggctatgttatgagtttttgacaa

SEQ ID NO: 450805 - DNA, 284 bp, Triticum aestivum
tacaaggaccccaacttcaataagattgagagtatgattgcaagggaagcactcattcaatgtgctgaggttctcgatatgtaatctaatggacatacagggccaaatgagtcacatttggcataatgctgagcccatcaacagatagccatgcctgtctcagcctcagtgctgctagattatgacataaaccggagatgacggggagcgcctccgacttccaccaaagcaactgtggccataagtcggcgatgtccacctcccggaggacgaggccagcggca

SEQ ID NO: 450806 - DNA, 373 bp, Triticum aestivum
tcggacgcgtgggggccatagccagagagacccagcaaccggagcaagctccacaccggtcaagttcttgcaagagaggaaaaagaaatcgaagaggcagagatgggaagaaggagaagcccggctctgccgctgctgctgatctttggcgtcctcgccgtcgtcctcgcggctcttccctcctccacgcccgcccagcaccaccagcagcagcaccaccagcagcagcagctggatcgcgagcagtaccaccacccgccgtcgcaggagcagcagcagccgccgcatcagcagcacctgcaaatccaggtgcatcagcagcaggaggatgggggcggcggcgggggaaagggagcagcagcagcagcagcag

SEQ ID NO: 450807 - DNA, 372 bp, Triticum aestivum
cttggtacttctgctctcactaactgaatacttctccccttcctacctttcgcccccgcgtcgccccgcaggggcggctcgggcggaaccctaaacgccgccaccgccgccccctctccctcaccccctctcgccgccgtcggcgctcgtcggtgggcaaagcccgttggcggccgacgacggcgggatctggcgctcgcgctggtcgggcacgcccctcgcagtggtgggtgttgtggagtttttggctgcgagatctggagctcgagtgacggcgcacggcagagcttcgcagtggggtggaggtgtgcggctggggctcgcaagaggagttggtcgcggcgcggtggtccctcctggagccaacgacac

SEQ ID NO: 450808 - DNA, 378 bp, Triticum aestivum
tggtagatctgattcgatcgcgtccgacacggaatccgggtcagacagagggagcagcagatcgaaaaaaaccaggatgtctaagcggctccagggagaggagatacaggcaaactgcgcccgcaaaaggtcacgaccttctgatcagaagcacctctatctggtgctggatgactggaaagatgggttcagcattcacaagattgacgccgacgacgatgacgcggaccttggccagccaccggtcctccggttggtgttgccggcgcctggctttccaatgcgctttgcggtcgtgggcagcaacatcgtcatcgtcaccaacccacgctgtggtcaggctcccacacttttctatgatacgaaaagaacaggact

SEQ ID NO: 450809 - DNA, 328 bp, Triticum aestivum
tcccgctcgccgcacctaccctaccgcgagcgtcagagccgcacgagcgccgcggccaaagagagcttgcttgcttggcccgctccgatggcccgcgacggcgcgtcggcggagcggcgccgggtggcgctgcgggtcctgctcgcgcgcggcgagggctcctcgtcgtcctccccgccgccgcgggggcccgaggaggaggcgcggcggggcaagcagcagtggctcgcgctccgcctgcgcgacctcggctgcgcgtccgccgccgcctcccgggcccacgcgcccgtcgccgcctcggcctccgtgcgcccggccccggacgcgt

SEQ ID NO: 450810 - DNA, 382 bp, Triticum aestivum
ttaggggaaaagccgaagttgggggtacaagatgattgaggtctatgtactttgaaagaacggaaacatatcggaataatggaaatggtgaacttctgtacataaataacttgatttttctttgtattactgtcggcgagagctgtcagttttgctccatattcatgtggcaatgtgatttatttttctgggtttgaagcacttctgcagttatgcttctgtaggagttcagcgttgtaatagttcggagtatgtttagatctgtaatagaataacaagaccaaacttcagtaagatagaatggtaatgaactgctagttttgggggctgttggctcaaccgtggtacttattaaaccagggttgatgtataggaacagtat

SEQ ID NO: 450811 - DNA, 326 bp, Triticum aestivum
ttcgaacaaacctccataccaaaagcaaaagagcggagcagctacacagcccccccgatccttttgtaaacacaatggcggcgccggcgatgtttcctaaggcgacgaggaaagcctccgtgggcggccgggcgtggcggctgctgcggctggccgtgctctgggcgcggaaggggagcgcggcgcagagcctccgcctgctcaagacgctgcggcacagccgcgtcggcggcctcggcctcggcggccggcgcaacgaccggctgcactacggcgagcgggagttctccatcgacgagacgccggcgttccggttccgcaccccc

SEQ ID NO: 450812 - DNA, 340 bp, Triticum aestivum
tcgctctattaccagcttcggttccacgcgcgcccccggcgctgcgccagcgcccctcctcgccggtgccgcccccggtgaccgctggcccgggccggcagacgccgccttcgacacgtctacccctgccgccgcctggtcctccgcctgccggggcggtccgcctcggcgtctcgtggagccagatcgtccgtgcggaatcggcgggcagcgttcaaggccctggcttttcggtcccttttgagccggtggtgtcgtcggtgctctcgcgcacgctggtggatgatccagtggactgcgtcttcctggagtcaggtctggacttgtgggccctggagga

SEQ ID NO: 450813 - DNA, 399 bp, Triticum aestivum
tttctcgtgctcccggaggccggagcacgcaggagatcgaattcgccgcgccggctcgtcggagacgacagacccccacagagtggtggtgcgtataatgaacaaaggcagcatccacaaaaaggagacgcacggaacaagcgacgacataagcgagaacacgcctgtggagaaggtcaggggccccaatctgtttgaacggaccaaggaagagatcgaggctcttgtggcggctgttcacgataagatggagcaccattccagtccccgcgggaaggagggtgaattgcacaaggattccaaggaacacagcaaggcagacatgcataagaagacccacgagaacgaaactcatggtacaagcaatgatataagtgaggacacgccggtcagcaaagt

SEQ ID NO: 450814 - DNA, 294 bp, Triticum aestivum
ttgttgcgccagagcgagagagctttttcctgaccgtgacatgacaccgcatctgcccgtgtcgccccaccccgcccaccacctgctcgacgcgctgcccccgtagacgcaccaccgccgccttcgcaggcgccggcgattttgcccgccgcgccctagggccttctccttcccctgctccctccgctgccgcgccgccgccgacgccgcgccgcagccggcggctgctgcagcgaggaccagggtgttcgacgtgtcggacctgcacaccgactacccggagaacatggagtg

SEQ ID NO: 450815 - DNA, 235 bp, Triticum aestivum
cttcctttggtggttgaatcctatggatggatggatccctgccgtccgtgcgtgtgtgcgcgtgctcgctctttgtttccatatatatggtatcgtcctagcctgtgtaactataagatgaataaaagtctcagaaactaagtactccctccataaagaaatataagagtagtgatctagacgctcttatatttcttcgcggagggaggtattttcctgagaatttatacttctt

SEQ ID NO: 450816 - DNA, 361 bp, Triticum aestivum
ttttatcggcaacaacctgaccaacaccggactggccgcgatcctcgaccactgcccccgcctcgagtccctcgacgtgcgccgctgctgcaacctccagatggatgatgccttgagatccaagtgcgccaggatcgggaacctcaggcttccccgggaccccatcaacgacttcaagtaccgggcttacctcgctatcagtgatgactaccccggcggttccgacatcgaggtcgacatgtacgatgatctgctggacgtggtcaccgacgaggaggatgccgagttcgatgacatggctgattatatcgaccgtgtgggctcggacgctgacatgtatgatgacgtgttcgacgatgtc

SEQ ID NO: 450817 - DNA, 427 bp, Triticum aestivum
ttccacgcgtccggaagtagtactaaaattgatacgaggaaaatagcatcaaaatgcatatacgaatgcataatatcacgtgccttttattgagttaatttacaacattgcacatgttttctgtgtggtgttaactttatagttctgtaatacactagacttgctctggctaagtttctccgaatatatatggtagaatagcctactaatttttttaggtttagcacataaattaaagcacagttactgggtttgtagaattgtaggcctggttaattgtgtggtgcaccactgcaacccaagtgttccctgttcttgttagccattgaacaaacgcatggttcgctgctcagtgtcagggccctgctgaggttaatgtggtgaaagatgtgtaaagctcactagcgggcttgaaccagcttaaacg

SEQ ID NO: 450818 - DNA, 303 bp, Triticum aestivum
tttgttggattctgggattcattggggagcagcacctgtagtgaagggcatacgggatgcaactcttgatttactgcacatccttgtagctgtacatgccgaggtatactcgggtgctaggcctttgttggagaaaacgatgaaaattttggtcgagggtttggtcgacatctttgttagtcttttttatgagaacaaggccaaagatctcagaatgttggatgcaaatggtttttgtcagctcatgctagagctcgagtattttgaaaccgtgttaaacacatacttctctactgaggcaca

SEQ ID NO: 450819 - DNA, 404 bp, Triticum aestivum
tcttggacgcgtggcggacgcgtggcggacgcgtgggctttcaggaagagttccagccagcctgggaggaagacctctacacagagttagattcaactttacggacaatgctgggctgcgtggaattcctggtttacatgagtgtggccctcatttatcagtcgctgcaaagatcggcatggctttcggggtacttgtagcttttctgtttctagttgtatttgctgcatgctggtggaaaaggaggcaaaacgttatccgtggtcagaaattagctgcagcaagggaagctccgtatgctaaatcaaggacccagtttacacgggatgtgcagatgggcaagcaccaccgcccgcatgagacgagcccacggggtggcaacaatgaaagctcgccacatttgc

SEQ ID NO: 450820 - DNA, 220 bp, Triticum aestivum
ttgtaccccgggccgccggcgaccgccgcgagagcgagaccctagccaaggtctccctatcgtcggtctcggccgccgcggcggaggtctcaaccttccccctcgacgccctcaagacgcgcctccagctccgccgcagcaccggtggtggtggtggtagcggcggtggcgtcttacgcgtcgcgggcgagctcgtccgcgacggggggttctaccgggg

SEQ ID NO: 450821 - DNA, 313 bp, Triticum aestivum
ttcttatggaccagattgcagtagttggtcaaaattggcctgatcaagccgaacaaaatccgatcttttatgaaattatgtggtggcagagcaggcaggcaggggtggtacctccaaggagaggatatacaggtacacctgagtcattatacaattttggaagaaacaacagagttcatgcacctggaaaaaaaggggccaaggggagctctgctaggggagattcagcaagtgccaccccatggtgcagggcgttggcgatggatgatcattactcctgagggggaatggggctgggcgtggcagcctgctc

SEQ ID NO: 450822 - DNA, 175 bp, Triticum aestivum
ttcacgcgtccgccacgcgtccggaatgaatgcttgtaatattagcaatatcatattttgggctcctataacattgcacgttgctttgaaaatgcatcagaactgggctaggcccaagatagcttgcggtgtgatgtgttgtaatgtcaatggtataataatttttttggattgg

SEQ ID NO: 450823 - DNA, 276 bp, Triticum aestivum
acgcgtccgggcgggtgctgaattgaggttgcgctgaatctggacctgcacgacaacaggcagaagcagaaggcgctcaaggtcgtgttcactctccacggaaagaatgccctgcttgtccttcttctccaggtccgtcctagtcatggacggaggggattgccaggatcttcatcatgtttcagtttgacatttccgatgacaacaactgccgcttgcctcaggcatcgaccacatcgccgtggacatgaaggaccagaagatgacggtggtggg

SEQ ID NO: 450824 - DNA, 372 bp, Triticum aestivum
ttgttgtcggatccttcatctaattacatttatgacctggctgctattttgattcataagggtagtgctgctaatagtggtcactatgtggcacatataaaggatgaaagcaatggtcactggtgggagtttgatgatgagtgtgtatccagccttggttttcacccttttggtgaaaaaccaggcaagtcatctgataaagcggatcagaaatctgaaggtacttctaccgaaggctctgtggcaaatggtaataacagtagccatcatgatgctgcaccgacttctaatatgggagaagatgttctcttccactgatgcttacatgctaatgtacaaacgttcgagcaaggatgaaaatggtattaaaag

SEQ ID NO: 450825 - DNA, 349 bp, Triticum aestivum
tcttgaagccacggccccttcagctgtgtctgccaacaatgtgaagaaggctgaacctacggttccttcagctaggcctgccaacaatgtgaagaaggctgaagctacaggtccatcacctgtgcctgtcaacaatgcgaagaaggctgaagctacattttcttcaccagggcctgtcaacaatgtgaagaaggctgaagctacagctccttcacccaggcctgtcaacaatgtgaagaaggctgaagctacagttccttcacctgggcctgtcaacaatgtgaagaaggctgaagctacagttgcttaacccggccctgctaacactgtaaagaagactgaatctgtg

SEQ ID NO: 450826 - DNA, 73 bp, Triticum aestivum
tgctgtggccggcaagacggcctacgagaagaagagcgtttagggcattgacaaggaaaaggtagccgccgcc

SEQ ID NO: 450827 - DNA, 73 bp, Triticum aestivum
agaggacgggtgcccgaaaccctggcccgatcccgtagaacccctagacgcggaggccctgacgcgggggagt

SEQ ID NO: 450828 - DNA, 213 bp, Triticum aestivum
tggtttcgctatgtggcggtgtgaccgtgctcgtcacgggccacctcacagggaaggacgacgtctgccgcgagttcgcgcagtccttcttcctcgcgccgcaggagaagggttacttcgtgctcaacgacatactacgttatgtcgggcagggtgaggccgacccgacattgccgccacctcagcagcagcagtcggcaccggagttggatg

SEQ ID NO: 450829 - DNA, 336 bp, Triticum aestivum
ttccacgcgtccgcccacgcgtccgcccacgcgtccgcccacgcgtccgccagtttccaaggacacgccgttgacaatttgccaccagtacgagctgagacaaacatgctaaaccttgccttgggattttcagcatgcatctttctttggtgtgtcggcgtcacctagcaccaatgtgtttagaactactcctactggacatcattgtcgaaccaatgttttaaaactactgggcaacattgtcaaggttggaattttcggacaaagtgcgctctggtgatgaaacctagcttgttcatcattaataaagtataataaagtagaggctgcgatctc

SEQ ID NO: 450830 - DNA, 334 bp, Triticum aestivum
ttccacgcgtccggcactcctccgccagctgatcaacgagtcgtggatctgggcatgctcggagctgaaaatcctcttggttgtggcaggcttgtcgctggaaatccaaaagcttgagcatgatgtgttaccccagctcatggttcaggaggccaagctggaagagggcgccctggaagccctcctactcatgaagaactcagcaattacgctcttagatctgaggaagtgctttcagttatccttgggcgtattgcttgccgaggaggatctggtcttagcccgagtcaaagagctgagcataatgctaaaggatactgctgatgatgtactc

SEQ ID NO: 450831 - DNA, 86 bp, Triticum aestivum
tttgttgtcgctatgtggcggtgtgaccgtgctcgtcacgggccacctcacagggaaggacgacgtctgccgcgagttcgcgcagt

SEQ ID NO: 450832 - DNA, 393 bp, Triticum aestivum
tcttccacgcgtccgttccttaaatctgaatatttggggctccttaaatctgaatatttagggatgccggctctcatggaacatttctgtgaatcttgttagtgataacatgatctcctaggagcacattgtgatctgcacttgctcttgcaaaatagtttctatcaaataatctgctcagttgtttctaacttttagttgtatggaatttctgtgtgcctgaacatcattcttgaaagtaacaggggaacttactttcttctggtattctattgttccatcctgcttatgtatcttctactcgtgtcaacaggcaagatttccgacgccgtagaagtggctgggaaggatgtgctatcaacatcgtcgacggtgacgaccggtcttgtatct

SEQ ID NO: 450833 - DNA, 347 bp, Triticum aestivum
ttttggatcgatcgagtcggcgagagcgatggcggcgctccggcacgcggcgaggcgtgcgctccagcagggaggagcgcaggtgaggccttcggtcgtggcggagggacctcggcggctcttgctaaacggcgcttcccctgcccgccggcccatgtccacctcctccatcagtcgcaagccgacatctagtgccaagcctcacggcgagctggaattgctggaaatgcgattcaagaagacgaaggaagagttgtttgatttgctcgtagcagtgagaagggcagaactttacccacagttgttctgggaagacatccaaactcatcggctcatcactcaccttg

SEQ ID NO: 450834 - DNA, 401 bp, Triticum aestivum
ttgatttgctaattccgtatgtgttggttcctatttttgcaggtcaacgacagtacctatcgcgcgatgggtttgggactgagattgccgttcttcctactcctcttgctgctggtcagcctgggagccgcacaaggccggagcacaggtatatctcacacaacagccctttccaatcccatgatgctagttatgttgtttattcatctctaaatcgacatcagtggctcccacatgtaaatcgggaagcacccttaagaacatgtaaatcgggaagcacccttaagattttttctgcgcacagctgatggagggtggtgagctatttaggttggtgttggaattagaactggaattaaggatacccttgttgtgaaatcatcttatgcgagttcccagta

SEQ ID NO: 450835 - DNA, 411 bp, Triticum aestivum
tctcacgcgtccgagcacgagcgccacatgctttaagctaaccccgtgctgtattatcggtagatgagatggaccgcttccagatgaaggagacggtggaggctgctctctcgcagcttgattccatggggagcccgccgcttagttcgatgagctattagggatcactgctacggtcactagtggctggtcgcctattttcacctcacctagtttctcttttgcaaggccaatattatatactccctccattcagatttactcgtcgtggttttagtttaaatttgaactaaaaccacgacgagtaaatcggaacggagggagtatatcttatgtaatgtatgccagaattttgcaccttttttttgcaacacccatttatatgtgtggatcgaggtgactgcttttttt

SEQ ID NO: 450836 - DNA, 446 bp, Triticum aestivum
tctgttggacttccacgtgattggccataagtgcagccattgcaactcatacaacactcgatcgacgtcgcggcctgcagatttatcaggaagcagttctccgttgacaacagactcatcttaagacaacctcctgtagagaatacatcatactggtgtatcacctggtctgtgcagccaatgccagaaccatacacatagaagaagaagcattgtttcgcggcattgcccgtgtagtgtcagccccatccctgggccttcgccgctttaccattctgccaagattcaattcatctcttgaattgtcagctattagtgtattgctgcgaaaagcgttgcttacctgtaagtctgtcttaaatctgtaatacagcaccattactctgtatcaccatggatgaagcccagcatatgctatattccccaggagttgaattctgagctac

SEQ ID NO: 450837 - DNA, 338 bp, Triticum aestivum
tgtgttagtgaagcagctgcggaagtttctcacggcgacaagcacctgtgtgcgtgcgtgcgtgcgtgatggctggggaggaagccaagaaggcggcgccggctgctgcggcgccggaggcagtcgcggagaaggatgtgccggtggtcatcccgcctcctccgggggtcaagccaccggccgacgacgccaaggccctcgtcgtcgtcgacagcactgccgagaaacctcaccctgagaagaacatccacaggggctcacatgaaagagacgtcgctcttgcaaaggtggagacggagaagatgagctctttgatcaaagcatgggtagagaacgag

SEQ ID NO: 450838 - DNA, 343 bp, Triticum aestivum
ttctcatcgccatggccgccgccgccgccgccgccgcgaggtcgcgcgccgccaccgccgccgcgtgggctcgcctgctctcccaccgccgcgtcgccgccgcagccgcgtccggatcgctgccccacctggcaggcccgcggatcgcgccccagcgccgccacttcgccttctcctccgcctcccccggcgccggcggcggggcgagggacagtgagccgctgttcaccgagcagaccgtctacgacctgctggcccagctggagcgggagcggcagaaggaacgcgaggatcggcgcaaggccggggccggcggcggcggcgaggggaagggggacgagga

SEQ ID NO: 450839 - DNA, 336 bp, Triticum aestivum
ttgtgaagagacagaaaagaagaacagaaaaaacagtgggaaaaagaggctgggctcctcgaatctctcaccatctatctcccgtggcttccttgtctgcctgcccacgacttgcctacgccttgccttcggggttggtgagcgagcgagctcgggatcagttggcgactacacacccagaggttgttgtccgagaattatttaggcccgcccccttcttccttccacgccgcctcgcctcccttctctgctccgtctcctcggatctccgcctcaaatttgcctccccaatccccagttccaggttcttggaggaggggggaagccatgggcagc

SEQ ID NO: 450840 - DNA, 407 bp, Triticum aestivum
ttgttacctttctatacaaactcatggccagagtgcttttgccaggagaaccctaggaatcatgcagacaaatgcccaccagacaatatatacgaggttctggagaatcaatttcggagtgaagagaatgaagaaagtatagaagtgaaagccactagtcagactgtttcaatcagccaaaccgaagagactgtgatttaactgaggaaccaaactgttattgtcttaagaggacgagactggatcatttatgcccgtagcagattattgctttttcgaatggattgactatagagggtacggtcgggcctaataaactgggatggaggtagtatttcatcacaaaaaaatcacaaaaaattacacatgtagtgtacatccatatgtgcatttagtttttttggaac

SEQ ID NO: 450841 - DNA, 410 bp, Triticum aestivum
  unsure (1)..(410): unsure at all n locations
tttgcaccatcccgactttaaccttctagtcgccgctccgccatcgccatgtcgtcctcctccgtcgccgtcgccgcgccggtggagcacatggtgctcatcaagctccgcccggaggccgtcacctcgggggccgccgccgcgatggtctccgcgctgcaggccctgcccacgctcgtcccgggggtgtcctacctccacgcgggccccgtgctccgcctccgctcgccggccgccgacgcgctgggccccacccacctcctccactcccgctacgccaccaaggccgacctcgccgcctacgccgcccacccggctcacgtggccgccgtgcaggcgcacatcgtccccaacgcgctcgacaccaccgncgtcgactgggtcaacgccgccgagtccccgtcacccgt

SEQ ID NO: 450842 - DNA, 179 bp, Triticum aestivum
gtcgcccacgcgtccggccaccgcggcccaggccccggcggccaccccgctgcccgcgcccgtggccccggtgtccccgcctccgatgatgccgccgccgaccccggcgccggtgtcccccccgccggccgtggcccctgccacccctaccccggtgccggcgcccggcgcacccgttc

SEQ ID NO: 450843 - DNA, 335 bp, Triticum aestivum
ttcttgtcttacgctgctccattccatcatctcccccttgtattctccagagttgtgttcagtcagcacaagtcttgttcattcgttatcagcaactttgctccgtgtaagggtttatatctcgtgtgttttcttcgcaaaaaagtgctggtaactcttcctcttttaacattccccaagttgccaaatctagagctcaatatatagttgcaaatctcaacttgttagagaacaacaacgatcctaggttagtttgcaacgcttatcatttcgcaaggcacggttaactagaatactcgatcggctgcactaatttcccacgagcagattctcac

SEQ ID NO: 450844 - DNA, 113 bp, Triticum aestivum
tcgctcacgcgtccgtccacgcgtacgcacggagctggagctctgcgtcgggctgcggtacgactggggcaagtactacgcattcaagtccttctacgaccccgtgaagaagc

SEQ ID NO: 450845 - DNA, 387 bp, Triticum aestivum
tccgccgcactatttccagtaaacaacaatacccactccccacccgtgtacgtaccattcgcccgtccccccaagaactcgtgctccctccctccccaatccccatcctccctccacttgccgcacacacgggggtggtctattgtccgtcgagactctctgtttgggttccaagaagtgtgcgcgggggagacgccggagatgggttcctgcgcgtcggtccacaaggaggacgtcgagctgcccaagaagcagcagctgctcgccccctcgccgccgtccaaggacggcacccccgtcggcgacgtcctcgtcgacctcaagcgcaagatcgaggggttcggccctggcggcaggacccctgactccggtagcaaggatgagatg

SEQ ID NO: 450846 - DNA, 357 bp, Triticum aestivum
tctcggacgcgtgggcggacgcgtgggtccggcttggcttcttccacccgtacccgtagattgatttccatccgggtcccttccgttccacggcaagtatccgtcgcacgattcaggcccacccctcgacgtcgtccatggcgctgcagtacgtggaggcgcagcggcaggcgcggccggacctcgccgactggtacgccgacctcgccgacctctaccagcgcaagctctggcaccagctcaccctcaagctcgaccaattcctccagatcccggccgcacagactggcgacacgctcatacagctctacaacaatttcatctccgatttcgaaacaaaaatcaatttgctcaaac

SEQ ID NO: 450847 - DNA, 199 bp, Triticum aestivum
ttcgtttccggccgctcaggcggatccaggtggagggggagctcgctgccccgccccctgccccgccggcggaggaaatcggcgaagcggctgcggtgcccgcggccgggatgctcatgggtgccaaggtgcggcgccgcgcggccgtctaccgcgactgcatgggcgactacatcggcgtgcacaacgacccgtgcct

SEQ ID NO: 450848 - DNA, 116 bp, Triticum aestivum
ttcgtacgcgtgggctgttcgctgtatcgcgagtgtaatttcattagaaagaaagcgaggtctcctgatgattctgtaacagttttatccgtaggtcttgaggaattttttgggtc

SEQ ID NO: 450849 - DNA, 365 bp, Triticum aestivum
tcgtgcccatcgttgcgcctcagtcgccacaaggacatctggtggaggggatccggtgcgaacgacgcacatctcggccccgtagcaggagcgggaggtgtcggcggcggagatggtcgatgtggagcctctttttcccgcgatctggtcctccccattcatggccattggcaggagggtcccctcggatttattccatcctcggaggtggcaaccgccctaggaggggcggtgcacgggcacggctatcttggtggtcgtgatgttgttccgcaactggttcgccttcgggtcggcgccacagatgaggcctgctgttgcgaccttgccctcgttcccgcggcgacggactaccccccaagatg

SEQ ID NO: 450850 - DNA, 364 bp, Triticum aestivum
ttcttacatggcagttatggaatcagccaagctgaatgctgcagagaagaaggtcacaactgttggaaatgacggcctctcccttatggcacagcagcacactacacaaacacaggctgtgagaaagaaagtaggcggaggatgggatcccacgtatacaaagagaagctttttcccatattggagatcagtgttacaagctggggttcctttgaaggtgtatccagcccatgcaagctcagatcctaggtctcgtgttaaccatggacaactccatgtctctctgagtaactcaatagccaatggatctacaacaactccaaatcataaacttggtcgaacctcgccacttacaagcaataat

SEQ ID NO: 450851 - DNA, 161 bp, Triticum aestivum
tttttaattgttgcaattttgcgtgaacatgggtactttatcattgtaagttttgttactggagtagctttcttgggtttgtacctgatgcagtttaccatgaacatgatgggtactctattgtcatgagtttgccagagttgtatgttagtttctactca

SEQ ID NO: 450852 - DNA, 376 bp, Triticum aestivum
tcgcacatcccgtggaggacaggagagaggcggcccgccgccggcggaatcaaacgcggcggcgctccctctacgcccccctgaggcccaccgacctccgccaccccgcgcagcgaggccgaccactgaatcactgatgacctgatcagagcaggttaggaggggaaagataaaattataggggcctctcgatactcctgcctgcaagtaggtgctcagccttgatggcgatgcccggatcctgcccgtcaacaacggcggctccatctgccggccaccctcccatctgccttgccgacgcttcagctgggggagctggatcccaagacatgctacgaccacgcctggtgctcttcggcgactccatcactgagca

SEQ ID NO: 450853 - DNA, 240 bp, Triticum aestivum
tttttgcaaatcccaatttttcgtggcctgcgggtcgctccgatcctcggcggccggccggcagcccagtcccagatccgaatcccgagacgcgtctagccattgccgccgtccccgaccttctccccggcagggaatggtgcactgcgggcggcggtaggcagacacgagcagagaccgtgtggcaagaagcggcggctgcgagatggccggcgcggagagggagaggagaaagatgcc

SEQ ID NO: 450854 - DNA, 85 bp, Triticum aestivum
aaaccaacaacaacttgcatgtgactgacttgaggtaactatgccaaaggacaggagctcccgttcagtctcgcatgagggctgc

SEQ ID NO: 450855 - DNA, 351 bp, Triticum aestivum
ggaagggatagttccatcagtacatgcttgaggaacactatgtttgacaaccaagataggttacttcggtagaacgtcagaaaaattatagctggggttaggatacctctcgagaagcagtatatgcctcgctagcacacaagaacagtcaggaccatgtacgaatcggacgaacagttggggctatgtcacaccaccaatcgaacagttccgcgccgggacctgtgtctcgctcgcagccgcgccggcacccgtggatcgctggaagcctcgccggcacccgtgtctcactggcagccgcgccggcaccgggggcaaagtttgaagaaacaggcctcacacacctgatcc

SEQ ID NO: 450856 - DNA, 385 bp, Triticum aestivum
tcttccttccctcctctcttccccgctcccctcccgcggcgccctcgtcttcaagaagccgtctgcttcgtcgctcgcagtctcaacggcgaagcgtggagtccgggtggtcgcagaggccgcggcggtatcgtcccccgcatcgtcggtgtcggcacagcggacccagccgtcggcagccgaggtggcgcggacggtggttgagctcgcgccttccgggacgctgtccgtcgtgggcgccgacagttgggcgctcggtgtcggcgctcgttttgtcgccgacgccgctggcgcgcccgcgctctgcctagccacagcgggagtgaccgtgcctgatgcgcgggcaagttttcacgttgagtttcggcaaagtggagccaggaca

SEQ ID NO: 450857 - DNA, 166 bp, Triticum aestivum
tttttgtttcaagaatgcaaaatgctttggttatgatatttctgctcaacagatgcctccaaactatttattctgggccaatgtgtaggatgcttgtaggcgatgtctatgcagaatatcaccgattgggcatgccaccaagcaccggtgctccatgagcaaaagc

SEQ ID NO: 450858 - DNA, 325 bp, Triticum aestivum
tctgctgtacatctctctctcttatctctcccagaaattcctccttcgtcccgcccctcttttttttttcccttatctctctctgagaaaattagtttctacccgggcctgggccgccggagcgagcttctggccgctccccaccgcctgtggtctcccggcgccggctggatctgaggagctgcggtgtttgcttgcttcttccttcaaggtttcttgcaaatttgggtgaccttgaaagcttgtgaagaaggggttgttggccaagtaaaagatcctggagctggcttagagtgttgtccataaaaaaaaatcatgggtgctc

SEQ ID NO: 450859 - DNA, 380 bp, Triticum aestivum
ttctttaaatggtgtttgtgtatcatttaggtcttcttggaagtgtagcgccatgtgttctgtatggtagccatagtataggaatcttaaaactactgttggctggctcacacatgacatttttaatttttagtagacatgcctttgataagatgcattgttcagttctaattaagtaattatggaccttttgaattacgggccaagccccgtggtgtgctaaatgttgttatctacctaagcacctggacttttgtatgcagagggttatcagctattaaacagcatatgacaatcctgttctggccatctgatgtttgtatgtttgagttgttcgtgttcgttgtagtgcatgaggcgggatttattgtgatggctct

SEQ ID NO: 450860 - DNA, 51 bp, Triticum aestivum
gaacagtcagcaggacccgcgagcgaccgaatcccgatcaatcgcggcgcg

SEQ ID NO: 450861 - DNA, 265 bp, Triticum aestivum
tgaaccttgataagactcgacaatataatatcattcacatgattaacgttagacaaatacatacaacctatgagtacaacggatgcctaatacccagtatccaccatgctaccacgagattagcagcaagaacaacatgtttattttgtatacgacacaataaatagaaggaaataaaatatattgttcacattgatatgtaacactaactttacacctgaacgccttcgttccgactttacaagactacaacaggagctatggc

SEQ ID NO: 450862 - DNA, 99 bp, Triticum aestivum
tgtgaacggaacggttatgtacccccaaacttgctccaattttggtccttgtggatatgtacctgattcggccctgaacctttttggatgtgtaatact

SEQ ID NO: 450863 - DNA, 218 bp, Triticum aestivum
ttatcaatgtcttgcactaagctcatatcgcttaccctggttgtcctgtttagcattggattagccagcgctggtagggtatctagatactctagttcccagggaacaggcactggaggtggagagggtggaggagcggtgaacggcggcggcggaggaagtgggaatggccagggcactgctcatagtggaggtggaggaacccatgcaagtgctgg

SEQ ID NO: 450864 - DNA, 205 bp, Triticum aestivum
tctttcagtaaccctgttgatctgaaaccctatctgagctaagaccacagtagcttttatggtaacaccatttcttacaaacgccatagaagcttctatagtgacataaattttacagacgcctaagacacattcacgtgctgttagttctgagttggtcatttggacgatatctcgattctggacttggcctaccttgtttttt

SEQ ID NO: 450865 - DNA, 406 bp, Triticum aestivum
tcgttaccctagctctagctagagcagcagcgtctcccccgccgccgccgtcctcgcctccgggcgctgaggatccactgcagacgaagatggcgctagcgatctcgatggaagccatagatgcgcgcgcgcgggagctggggatcgacctcgactccgtcgacgtcgactccatcaccctcccgcccggcgaggacttcgacatcctcagtgatgatgaggatttacttcagaatgaagacattccagagctggagatgggcttttcaaacattattgtggtggacaatctgcccgttgttcccccagaaaagtatgagaagctggagaacgtcgtacgcaagatatacagtcaaattggtgtcatcaaagaaggtgggctttggatgcctacacacccagagac

SEQ ID NO: 450866 - DNA, 349 bp, Triticum aestivum
ctccaagtctgggatagctcaagcgacggcgacatatccagtgggattcatttcatctcttctgcaatattggaggcatcagcacgcagaagccaaaggccccaagctggaggacttcctgagcgtcggctacggcaacgacaggagcagcggcagcgtctacgacgccagccacgccgaccagctcaagtaccaccaccaccaggacgtccatcacgcctatccaggctcgccctacttccagggcaatggctggcggtggcgccgtcatcgggctggacatcaacaacgcgccgtcgtcgtcacactgcaccggccttccggaccaccactacatgccggcgcacca

SEQ ID NO: 450867 - DNA, 244 bp, Triticum aestivum
tcgcccacgcgtccgcccacgcgtccgcccacgcgtccggtgccgatgaagacgacaggagggggcagcggacaaccagccatgtccggacttgtgttcttcctcttcctcttttccctcttcactgccgctgcctcgacgaccaagcaaagccaggtctatatagtgtatctgggcgagcacgccggagccaagtcgaagggaaccatccttgatgatcaccatgccctcctctccgtcaagg

SEQ ID NO: 450868 - DNA, 344 bp, Triticum aestivum
atcgtctcgcgtccgcggacgcgtgggcccaaaacgcacaagccttccttcccttccttccttccttcgccgaaatcctactcgagacccaacccctccccccatccgccgtctccccaccctccccgctcgttccccttgcttctccgggagggaaggaacccgcgaggccggcctcccaccctccgcaaaagccacgcgccaccaacccaacccctccgtcccgccccgccccgcgcgtcgctttcgcctttctccgcgcaaccgaaagagaccgaccgcgaggcccataaagagggaggcgccgaggccggcggctatgggcggcggcagcagatcgcgcg

SEQ ID NO: 450869 - DNA, 389 bp, Triticum aestivum
tcgttgaagccgccgccggcgtcgccgtcctcgtcgagatcgtcgtcgactttctcgtcctcctcgtcgtctatggcgtctgggcaccaagaggatcgcagcagcgtggcatgcttgcccctgctccgcatgctcgaggaggggaagggggctggtggtgaccatgatcaccctgcacctccagtcaaggaagagatcatgggcagcggcgcggccgaggtgctggggcctggcgtggatctgaatatcggcttgccggttggtggatcttgcgatgatgacatcatggaggaggagagccaggaggaagatgatgaccacgactgtgacgaagaggaggaggaagagatggatgagttggaacctaaccatggcggttgcaaggtgga

SEQ ID NO: 450870 - DNA, 322 bp, Triticum aestivum
atcgtccacgcgtccgcacatccgtcgccttctcgagcagatcaccagttcagttcaggacgcgcagatggcctcctacgagaagcagcagccgccgccgcagccgccggcgaacgcggcgccctactacgcgtacccggccccgcagcagccgtactacgcgcccccgcctccccctccgcccgccccgcgccggagcggccccggctgcctcctctgcttcgtcttcaaggtcatcgccctagtcatcatcgcgctgggcgccgccaccctcgtgctctggctcatcctgcgcccgggcgccgtcagggccaccgtcgtc

SEQ ID NO: 450871 - DNA, 336 bp, Triticum aestivum
cgctatctccccaccgcttcccggccacctcagacaccgagccgcccctccccccttacccccaccccatatggcgctgccttcccgccccgtagccgtcctcgcatggggttcgggggaagacgggcagctgggcatgggccggtgcgacgagaaggactgggcccgctgcatcggcgctctggatgcgtacgctcgcttcgtcgacgtagccggcagccgcaactccctcgccatatgcgacgacggcagcctcttcacttgggggtggaatcagcggggaacgctcgggcacccgccggagaccaagacagagagctccccggcgcatgtcga

SEQ ID NO: 450872 - DNA, 292 bp, Triticum aestivum
atcggtgccactggacacttgactcgacggtcattgtccccgaaccttgatccacgtccgcccttctttctgggagggagggaggctgtcagccggccggccatggacactgcggaggcggcgtggggggtggcgagcctgcggctaggctctcgccggctaggctctcgctcctcgtaccgggagcgcggggccgacgtcttctcccgggcgttctccgcggccggggcgggctccgaggacgatgaggaggcgctcatgtgggcggcgctcgagaggctgccaacgcaca

SEQ ID NO: 450873 - DNA, 134 bp, Triticum aestivum
acctaaagggctcgggaggaaactaagatctcaagtgtggtgacttttttttctgtgtgtggaaacttgagagagttgcaaggagggacaaccagggaggaggtagtcttggaggttgatttggggggaatttg

SEQ ID NO: 450874 - DNA, 180 bp, Triticum aestivum
cgatgacctcggcggtggcggcggcagagggagttggctaggatggccgctggggcgaggaggcggagccgatgaccccggcggtggtggcggccgaggggtcccaggggcgtcgttcagaggaagagcaccctgcgccagttcagcggtcgtggtgttacggaggaggcggagagaaag

SEQ ID NO: 450875 - DNA, 119 bp, Triticum aestivum
cgctccgtgaagtggatgccgggcgggcagaagaggggcgggagcagggactgggaggaagaggggcggggctggagacggggaggaagaggggcggcgagggtggaggcggaggagga

SEQ ID NO: 450876 - DNA, 347 bp, Triticum aestivum
tcgttcgtccaattgaaaatttcttttctttttgctctccttgatcgattgactgcctcacggacggtgcccatggccatggcatcgccgtcgtggtcatcttgctgcgcctccacctccacccgtcctctgcctagcccccccgcgagcagcaagagcaggaacccatggcgggcaagcagcggcaggaggagcgccagcggagggaagagacggcagcagctgtccatccgcgcggtggccgcaccgtcgtcggcggtggactactcggacaccgccgccggcgccggcgacgtcccctcgctgaaaatcaagctgctgagcgcggtcgccgggctgaaccgggg

SEQ ID NO: 450877 - DNA, 296 bp, Triticum aestivum
atcgttgacgcgtgggcgccgcgatcgacgcgctgagcagcgccgcgagggaggagatgctcgatttggtggccgcctccacgcgattggcgcggcgggtgtgcggggtttacggcgcctggatgggccccgaggcggcaacgctgtggctggtctctgaacggcacacgccgggagtcccccccttgttgaatgagaggagcgacgaactggaaactgtggctcggattggagctgttggaatggaggtgtgtgaagcgctcatgggattgcacggcgaggggatggtgctgggt

SEQ ID NO: 450878 - DNA, 384 bp, Triticum aestivum
ttcttcacgcgtccgcccacgcgtccggtcgcctcgggctcctcttcgccttcctcacccatgccagccgcaggtcctggcgcgagcaactctcccccggcgccaccctcctccgccgctacctccgtcggtgccacagcaggatttggcctcgtcgccctactggcggctggtctcatggcttgaacgcatatattgatcagctgccacgcgcacatatgagcttatatattgttaactactgctgtagtcattatcacgggtgaatacatgtattcttttttagagtgagaatgtgatagttacttgtatctatcacgtctatatgtaatctgcagaccttcatgtcttttatataatcattctagagcattattttatact

SEQ ID NO: 450879 - DNA, 355 bp, Triticum aestivum
acctcaccaccgtcgtctcctctgctaagcattcggtcgtcaccgcccaccgtctcctctccgaatcttctgcggcaagtctttcaccgtcgacaacaaccagatggctcgcttcgccgtggtcgccgccctcctcgccctcctcgccgtcgccgccgccgcgcagggccccatgctggcgcccaggacggcccctcttccagcgccaccggcgaggtccccagccatcgcccctgcgccggtcgccaccccgcccaccgccgtgtcgtcgtccccgatggcatctacccctgccccgaccaccgacgctccctccgcgatgacgccgtccgcggtctctgccacacccgctgga

SEQ ID NO: 450880 - DNA, 183 bp, Triticum aestivum
cggacgcgtgggcggacgcgtggggcccagtttgttcaagctgcacagcataaaccccagcatcaaaaggctgcagaagctaaatctgtggctggggattcatcttcaatgccaagtgctggagataatgagagaaagaaatctgcatctgccaagtacccgagtgattcacagcagcattct

SEQ ID NO: 450881 - DNA, 318 bp, Triticum aestivum
tgtcgtgattttctattgattgaagaggtagcaagtatggcttagaggcgaaattaggggagaggcgcctacggcggcggagatggctcccggcggcggagatggcctcggcggagcttgacgccgggagtgccttggagagggggagccgctgcccagagggagagcgcgttgttgaggggaggaattcggggaaccacatctcactactggatgtggacgacctcaaacgaagatggcttgccattacagagaaagctgggaagggagcaagtggtgcttcggcgaccgcaaaaagctgtagttggtaagatggat

SEQ ID NO: 450882 - DNA, 358 bp, Triticum aestivum
tgttcgctccgatccaccaccaacacggctcgagctcttggcggaggaggaggtgtcggcagcttcgtcgtcgcggtcgccaggcagacgcaggcgcgggaagagaggcggagatgagacggccgctcggcgcatgcggcagcagatccagcccggccgctgctttcctcctggccgtcgccgcgatctgcgcccagttcgccacaggactagctgatgatgcatctaaagatgagtcaaaaggtcacactggccaaacagttttgtttgtcctgctaggaattggtgcagccggtctgttgtcattcttccttttcaagtattggcagaagaagaaaagagaggagcaacatgcacg

SEQ ID NO: 450883 - DNA, 224 bp, Triticum aestivum
atcgtccagcgagcgacgccaacgagagagagagaggagacagagctcaagcagcggagctacctacccaccccctcgaggccggagcggaggagatggagtcgccggagccggtgagcccgtcgtcgtcgtcgtcgtcgtcgggggaccgggagcagcagcagcgccacggggcggcggagcggccgtcggagacggcggcgctgcgggcgctggtggagcgg

SEQ ID NO: 450884 - DNA, 280 bp, Triticum aestivum
taccggtttcttcctcgagtcaagtggctcttgattgatcccaccaccagccgcaccaccaacgtcttctgtccgtagctccttggtgcctagctgctgtgttcacatcacatctccatcgatgaagacgaagcaggcttccaaggccaaggcggcgccgtcgccggggaaggaggaggaagcagttgcaccgggtggtttccgcatggggccatggacggcgcaggaggacatgaagctggcgtggttcgtgcggctcttcggcgagcgccgctgggat

SEQ ID NO: 450885 - DNA, 290 bp, Triticum aestivum
acgcccacgcgtccggcttcttccaccttgccgctctctgctccacttcatctgctgcgccccgcccatccatccttgaaacatcaagttgaccctctggctgggccacagcggttgcagagacaacaagtctcctccacaaaaggggtgagatgtcctcgctgaggccgctcaacacggaaccaagttttctccactccccgaagctgcagagcccgagggatgcctgcgccgcgccgctgaggtcgccgtcgccgagggtcgtcgtcggcccgccaaagaagaggatg

SEQ ID NO: 450886 - DNA, 328 bp, Triticum aestivum
tcgtttaatgtattgaatcttgcttttgacataaaacacaagtactgattttgagccccttctccaccacaggcaaagagaagacgaggccgaaccccaacaccaggaaggtatctgggcaccaaatcatcgcgtggaaggaggtattcccgaagcaggtcacctgttaggagagaccgttacagctcacgctactcgcctgagcgagaacgctcttattctccttatcgcagaggacgatcatactctcgtcgtgacaggcgtagatcatactcccctgatgaaaggaggcgatactactctccctatggcagaaggagatcatact

SEQ ID NO: 450887 - DNA, 360 bp, Triticum aestivum
tcgttcgtcctcctcctcccccgacgccgacgccgacgccagtcagccgccgatccggcgcgaaatcgagaggcagagccgccggagatccacgggggccgtggagggagccgaaccccgacgtccggcgccatgaacgcgaggggctaccgaagcaccagaactgctctctttgatggcattgaagaaggtggaatccgagcatcagcttattcttcacatgagatagatgaacatgagaatgagcgagctatggatggattgcaagatcgagtcagcattctcaagaggatatcaggtgatataaatgaagaggtggaggctcataaccggatgctggacagaatgggtaatgacatg

SEQ ID NO: 450888 - DNA, 241 bp, Triticum aestivum
tggtactcgtcgcgcgctgtgtgcaaatcaccgccatctaccagatgtttgattgtctttgattgcctctctagacatgctgtgatggcatacagacactctctcaattgatcattctcccctcggaggatgtcaaattctttgtgtgtgtttcggagtgctggggaaggggcagaggctggggcaggggagacacgttctttctcaatgccttgatgcatgagggtggtgtacatggtca

SEQ ID NO: 450889 - DNA, 120 bp, Triticum aestivum
tgtgttcgccaacccgtccggggcccctggggcggattttggggggaccagggccaccaattttgggggtccttggttccagggaaaccaggttctggagggtaataaaatccatggggg

SEQ ID NO: 450890 - DNA, 346 bp, Triticum aestivum
gcgtccgaaaatgcaacatgacttgttgtttgatgttacaaccttacaggggcatcgactcaaatttgcaacgacgaattttataccatgcttgtgtagctcagtctgtggcgggcgaggcgtgggaggtgacgatgacgaatgatatggtggtcagcagataaaagaagccgttcatctccattgcccagttggggcctcttaggggactaatctagcattgggggttacaggaggagagacgctctcatggattaggatgttgcacatcattgacgggtcattccatggattaggatgttgcacatcatcgacgggtcattccatggattaggatgttgcacat

SEQ ID NO: 450891 - DNA, 271 bp, Triticum aestivum
aatgccacgcgtccgccgcattcacatccacatccaaggatcaaacgcccgatcgaaaagcttctctccagcaagcagaggcaatcaggaagcctgcggcgatggcggtggggttccgtcgggcgctggacgcgctcacgtcgcccaagtcggccctgctggagtgcgcgcggcccaagaagctgtcctcctacgcgcgcgtccgctccatcagcctccccgtccgcctccacccgctggtggccgcgctgcacgactcggcgcgcgcgct

SEQ ID NO: 450892 - DNA, 369 bp, Triticum aestivum
tcgtctcgagcgccgagtacgccaggctcctggaggagatacgtcaggaggccagggagctcgtcctcatcgccgtcgccctcacggtcgtcaccctgccgctcgtcttcgccaagcagatcctcgccttctccgcggcctccacgacgtactccggcgaccgctactccctcgcggagctcctccgcagggtgaccaagtgggccaacctgaggggccctctcgtcaccgtgggctgtggtcaccgcgctccagctcacgttcatggcgctcctgggcgtctacctctccgccgtcatgcgccacgcgggggtgctctccgtgcaaggcgcggtcttcgtcctcgcctttctcgccttcatgtacttc

SEQ ID NO: 450893 - DNA, 209 bp, Triticum aestivum
tcggcggcggacggagcaaagcagagcgactcatcgagcgcagccgccatggaccgtgtgcagttcgtgctcctgggcctgcccatactcctattctgctccgacgtagtcacgctcttcgcgccgtatccgtcggcgggccccaagtcccaccggcacccccagccggtctgcggcgccttccagcctggcgactcctaccgctacgc

SEQ ID NO: 450894 - DNA, 122 bp, Triticum aestivum
tcggtgcctacctgatactgggaagaaagaaatttggtcacagacctgcaggtcaggtctttgcaacacacagttatgctgtccactgctggatcgaacttgactagcttattgctttaaaa

SEQ ID NO: 450895 - DNA, 337 bp, Triticum aestivum
ttcgtctgacaggccacctcaaccccgcttggcgatccgaacccaccgactcctcgtggccgacgacgccaccatggcggcgctcctagcccggcaggcagccctggccctccgcgctaggcagacggcgcgtctcggcccgtccgcgacggcgatgcagggccacctccggacctacatggacgcgggggcgcccaagaggttcaaagaggacgaggagaaagaacagcttgcgaaagagctcgccaaagactggagtgctgtgtttgaaaggagtatcaatacattgcttttgactgaaatggtccgtggtttgatgctgacgctcaagtacttc

SEQ ID NO: 450896 - DNA, 86 bp, Triticum aestivum
actcacggggaaaggggaaggggaagcagtgtgtgtcggtgtcggcgagcaatggcggacaagccgagccgggcgctggtgctcta

SEQ ID NO: 450897 - DNA, 118 bp, Triticum aestivum
ccatcgctgtccgggtgtctgtcttgtgccttctacatactgtcctaatgtaagcttcggtgaaacctggatgttatgagacttggttgtgtcttttaatactagtttgttgaatttt

SEQ ID NO: 450898 - DNA, 135 bp, Triticum aestivum
ctttatttctgacatatacattactgggtgaagatgcgcccttggctgaggcttcttctgcaaaggggctgaaatttgtaactgttttgatcagcattggagctgtcgctggtcttactacaacacttcttgttg

SEQ ID NO: 450899 - DNA, 319 bp, Triticum aestivum
tcgcctacgcgtccgcccacgcgttcggtcagtggatggctactatggcaactgcgtgtacccggtggggatcacccggagcagcaagaccatccgggaggcggcgctgcccgaagtggtcggcgtgatgcgagaggccaaggaggcgcttaaggtgaggttcacggactggatgcacggtggcgccaaggacgaccactacaatgtgccgctggattacggcaccgtgacggtgtcggactggagccgcgtcggcttcaacgaggtggactatggcttcggtgagcccggatacgtgttcacgctcaacgacgacgtt

SEQ ID NO: 450900 - DNA, 334 bp, Triticum aestivum
tcgcttctcctctcccccagaaacgcccccgccgccgactcaatccgccctgctccgcccgcgactcagcccgccctgctatgcccgcgtctccagtctactttgcccgtggcgacctcgtgccgatctggccgccccgcggtcgggcacgatctggaggaccaacaggcggtggtgcacggtctgggcggcggcgacctgcgcggcccaggtgctgcaccgatgcctccttcctccgtcgcccaggtccaaggcggctctcttctagccaaccaccagccatgcgtcgccccctcctccttggccgactctctcctcctctagagaagtagca

SEQ ID NO: 450901 - DNA, 332 bp, Triticum aestivum
tcgattccaaggtgacgctcccgaccgtctgcaattacaccattcatgacgccgaggacgccgaggacgccaagcaacaaggctcgagcttgagcaacgtcgtccaggaacagcaggagcagcagcagcaggggagcaggccgctgtgcgacttctccaactttcgggcgaacgtgtgcgagatgcgcggcgacgtgagggtgcacccgaaggccacctcggtgctcttcatggagcccgaggggtcgcagcgggacgaggtgtggaagatcaagccctacccgcggaagggcgacgagttctgcctcagccacatcacggagctgacggtc

SEQ ID NO: 450902 - DNA, 165 bp, Triticum aestivum
cctcgcgttcgccacgcgtccgcggacgcgtgggtttcggtttcccccattccccttcgcacccccgcggcggcggagccttcccgggcgctcaccggacacgcgcaaaaacactatgaggaggtacagcccttcacaccgtagtcccccgaggaggggatatgg

SEQ ID NO: 450903 - DNA, 302 bp, Triticum aestivum
cctatcgtgtccgcccacgcgtccggcagagccaccaaaggcagcgcagcgctagcgtcttggccgggtccatttcttcgacagaccaaccaaacgctctcgcaggacacgcacggccgcaccgcatgtcgtggtctgacacggacgcggcgctcttcgcggccgtcctgggccacgacgccgcgcgccacctggccaccacgccgccgcacctcgacggcccggcctcgtcgtcgcccgagctgcaggcgcgcctgtacgacctcgtcgagcggggaggagcctggacctacggtatctac

SEQ ID NO: 450904 - DNA, 365 bp, Triticum aestivum
aagccacggcgccgcaccgacagctcggaggagagcgttgggggcggcggcggcggcggcggcgatggggctgctgtcgaaccgggtggagcggtcggaggtcaggcccggcgaccacatctacacctggagggccgtctacgcctactcccaccacggtatttatgttggaggaagcaaagtggtccattttacacgaaagaaggaagttgaatcttcggattcatccaactccatctctggcctgatctcacgggcttcatcagagtgcccaacattcccagactgtggttttcagctggccgatagtggcgtcgtactcacctgcttggattgctttcttgcgaatggctccctctactgct

SEQ ID NO: 450905 - DNA, 153 bp, Triticum aestivum
ccctcgctgccgctcctacccaagctgtaaagcaccaccgtggtacacctacgcggtgtgtgcgtgtgtgtcgtctctgttcggtcgctccggcgagatgaagctcccgctgtcggcggggtcgcccgacgcggcgccggagatggccaagcc

SEQ ID NO: 450906 - DNA, 86 bp, Triticum aestivum
catcactagcggtccatcgccgactacttccctccccaccttctcaagaaggtggtgtcggaggtggtgaccacgttcctgctggt

SEQ ID NO: 450907 - DNA, 385 bp, Triticum aestivum
cttttgattaatctattgatctgtctatggacaggcaggcatctatttggtttgacgctggtgttcaaccgttagttactactgtaccagcaaggccgcaaatataattttatgcattctaaaaatatatcatctagttcgagagctaggataaaatataccaacactgtagtttgttggttctttttgtgtgtggatcatctatgttgtgcgtttgcattttgagcttgatgcagtctatgttacagtcctgcaaattgaagcatacaaactactccctccgcttttgtttactccattattagttttgaccctagtccaactttataaagattgaccaagtttatagaaaatgatattaaatttcacaataactaatatatat

SEQ ID NO: 450908 - DNA, 111 bp, Triticum aestivum
cttttctttcggttcgggttctggttcggttcgggtccgagagtagctagcctagtctagggtttccgtagttcggagaggagagaaagggagagatccatggcggagacg

SEQ ID NO: 450909 - DNA, 127 bp, Triticum aestivum
actatgcttcgcgcagggatggctcgccaaggtatggtcacggcgctgttgctggtggtcctcgccgccggctgctgcgcgtcggcgggcgccgtggcgtacctctccaagctgccggtgaccctcg

SEQ ID NO: 450910 - DNA, 216 bp, Triticum aestivum
tctggatgatccttgccggataaaatgtaaagagtcccagcctttttgttatttgcttgcaggaagtgctgtttgttaaatttgaaaacgtgtgcgaatagtagctactagggaatctagaccagatggtattctggcatcacttgtgccttgcatttttatgcaatacttagccataaataaatggacgccacttcatattccttgaaccatttc

SEQ ID NO: 450911 - DNA, 234 bp, Triticum aestivum
ttgtttattcgaactgacgggccgaccagccagccaccccactgcactagctttcctaggagctagtagtcccatggccatggccagatgcctcttgctgctagccatcgtgtcccttgccgccgcggaaggcggcggaaacaactccaccgactctgccgggcaggtccgcctgagctgcggcgcgtccgccccggccaccgactccgacggccgtgcgtgggaaggtgactc

SEQ ID NO: 450912 - DNA, 157 bp, Triticum aestivum
gcccacgcgtccgccacgcgtgcgcacaaacccattcaattcagttcctctctcacaatgaatttcgtacagatatacacccacattagagttagactcttcgggcttagttcgattgattttactgacatggcttcctcgcgtgccattatgatgc

SEQ ID NO: 450913 - DNA, 386 bp, Triticum aestivum
tattgattaaaattgacctattgctagaggaaggcaggaatagagaggagcagcttcaagaggaggagatgaagattatcaaagctcagacagagatctttatcttaaaagagagtttgcgcgacatgtctgaagcgaattcggactactcggcaaaactgcagaagaaggaagaagcatgcaaggttcatgaggagaaattgggctgcttgtcacaggataatcagaagctaactgaagggatcggttcattacggaaagtattgcacttggatgagaagtacgagtccctggaccaaatgaagcttgacatcattttgcagctcatgttgcatgaggtcaactgcttaaggagtacaatatctgatgcccaggatgcgagacag

SEQ ID NO: 450914 - DNA, 247 bp, Triticum aestivum
ctttcattcaatcgagccaaccaagccacgccgctcaatcccgcaggagcccgaggcctccacgctggagccacgagcgccaccgccaccatttggagcgccgccgttgccggagatgagtgccccgctgccccatgcttcttctccctctcctctcattcgtttctcttggctctctagctctctgcctctcaagtctccctattatctccccgtgtaggagccgtggaagccatggactgaattc

SEQ ID NO: 450915 - DNA, 371 bp, Triticum aestivum
tcgtcttctagctaacatacaggcaggccatcaggaggagccacgaggaagaaacaaccagcgcatatatccccctcgccccctccctcccgccggcagagctgagctgagctgagccaccgttcgaccaactcgcctctagaacacagagccccccgccgcccggatcccttcttcatccccctctccgctctttgtatcgctcaccaccgccatggctaagcagcagaagaacgcgcacgtcccgaagttcggcaactgggacaacgacggcaacgtcccctacacgctctacttcgacaacgcgcgcaagggcaagggcggcaagcccatcaaccccaacgaccccgtcgagaaccccgaggccttct

SEQ ID NO: 450916 - DNA, 137 bp, Triticum aestivum
tcgcccacgcgtccgttttccccttctttctccctccggtccggtggatctccagccacccaggcccgagccatgggcggagacggcgacttcaacgccgcaggcggcggaaggggggttgcgggtcggaggcgtgg

SEQ ID NO: 450917 - DNA, 126 bp, Triticum aestivum
cggtcgctcggggtcgaaatagccggtgatgcgtgtttacatgggtgatactttctgccatgtaaattgaaatatgtctcatgatgtttctttattagttgctgcatagttatactgaattgcatt

SEQ ID NO: 450918 - DNA, 144 bp, Triticum aestivum
cttatcgcttgggcggacgcgtggggcatcatcctctgtaatgagtaaacagagcacttctgttttgagcaatatggggctctcagaggtttcttctgctttaacatgatttggcgacctcgacgatgggtagcttttcctata

SEQ ID NO: 450919 - DNA, 192 bp, Triticum aestivum
cctacgtgtccgtcgaaaaggagttaaatgatctgtattaccagctttgtcatgaaaggaatgaacggctacttgcccaaaataacccaggaggcttgccatctgcgtcctcagatgaccgctcgctgtcaacttgcatgtgtacatgggaagaacacatatcatcattgagggatttgaagtttggaggat

SEQ ID NO: 450920 - DNA, 174 bp, Triticum aestivum
aaatcctaggacccgatggcctagccaccattcccacacacagcccgcccgccggcgccggcatgccgccgttccggcgctgggcggatctgccggcggacctcctctgccggatcggcgacagactggacctcaagtgctacgccagcgcgcggggcgcctgcacggtctggc

SEQ ID NO: 450921 - DNA, 163 bp, Triticum aestivum
tcgggtggaggacgtgcggctgggcgcgaaccgctactcggagcaccagcccatcggcacggcggcgcagggcggcggcgcggacgagaaggactacaaggagccgcccccggcccccttcttcgaggccggggagctcacctcctggtccttctaccgggcg

SEQ ID NO: 450922 - DNA, 101 bp, Triticum aestivum
tgcatctcctccccttccggttcgggttctggttcggttctggtccgagagtagctagcctagtctagggtttccgtagagaggaagggagagggagatcc

SEQ ID NO: 450923 - DNA, 87 bp, Triticum aestivum
aagaaacaagcaacgaagtttctgtttcgagcaaggagtggtagagatttcaaaccagaggttgctagttaacccgagagttgagga

SEQ ID NO: 450924 - DNA, 106 bp, Triticum aestivum
gcagcaccacccccacgtcacggcctcacgccacggagaacacaacgtcgatccggagagcggagcacgcaatggagcctgtggccgtcgtggcggtgccgttccc

SEQ ID NO: 450925 - DNA, 77 bp, Triticum aestivum
cattcaatcatatctcttgggagagacaacactgtcttgggagaatagcagcgctcaaattgtggatttggtttcaa

SEQ ID NO: 450926 - DNA, 341 bp, Triticum aestivum
tcgtgttgcccttcatacgaagctgatcggccacctctcaacaacaaagatgaagatagggaaggctcctgagctcctgaagaaggccgtagcgatgtgcaagagcaagaccaccaggctcctcatcctcgcctcgctccagcgccgcaggatgtccatgggcgttgtggtctctcgcaagatcggcgcgctcattgtggccgactgggagagagcggaccgccacaaggctctcgcgctacaaacggtggagaagagaccggtaatcatccaggagagtgacttggaggccaatttctctcgtcacttggcgatgttcggtcaagagaatggtcatggtg

SEQ ID NO: 450927 - DNA, 57 bp, Triticum aestivum
tcctcctcggtcctcgcccccatccaaatcccccgccgcccccctcgcggaggagga

SEQ ID NO: 450928 - DNA, 258 bp, Triticum aestivum
ggaccacttctctgtttttcacgttgcattgaagcgtaccaaattccatcgcttacaggtggtgtatacgcattgatcacatatctgtatataatgaaactatttatgtctagctactaaccatttggcggacgcagcttacttattcataatcatcaggagcctgtcatcagcaggatccgggggcgaagccgacggtcttcttgccaaggtcgtagagcacgcccgaggtcttctgctgcgtgttcccgatgatgg

SEQ ID NO: 450929 - DNA, 344 bp, Triticum aestivum
ccatcgcgtccgcagaggggggcagccaagatccaaatcttctgtagcgacttgatccgatctccagccgacgccggcgaccatggctcgccgtcaccacctcctcctcctcctccctctcctcgcgctcgccttctccttcgtcgccgccgcccctgagggacagggagatgccgccgccttcatcgacggcgcgtcgcaccgctacctgcgggatcagcagggcgaccaggccacgtcgatgtcacttgatgaagtttccgcagctgtttctgtcttgcttgggtttgcaccacctgccatgcttcccgcgccttcttctgcaaagttaaacgagctgctac

SEQ ID NO: 450930 - DNA, 378 bp, Triticum aestivum
ctttgcgtcagcatcagagcaaagaaaggatgcctccccctgccttggatttgatagccgctagctgattaagcttattacgctctgtcctaccagcagctagcacataaaaatatctccaagaaagagcggaaatcgcagcagcagcagcagcagcaccatcgtgctcagcttagtagcagtagcactgctatctctttcaggctttcagctaagcgggagagctcgctcgctagctgagggagtgccgcgcgccattaatggcggaggcggaagggcagctcgcggcctgctgggggaagcaggacgacgagtggaggaaaggcccgtggacaacccaggaggacaagctgctcctcgaccatgtcgcccagcacg

SEQ ID NO: 450931 - DNA, 88 bp, Triticum aestivum
cccacgctcccgaaacagatctgctctctccctctctttctctctcgtccgcggcgatacgatccgagatggccatgagggcgtggag

SEQ ID NO: 450932 - DNA, 201 bp, Triticum aestivum
gtaaagggtccacgcgcgcaaggtcatcgtgtcgggggacgacgccgcgaggggcctggtccagctcgtcgacgaccatggcgttgccgagctcgtcatgggcgccaccgctgaccgcggatacaccaggaagttgcggacgccgaagtctaagaaggcggtgacggcgcatcggaaggccaacccctgctgcaggatctg

SEQ ID NO: 450933 - DNA, 202 bp, Triticum aestivum
tcgcattcatcactccatccgacgtacgtagatttcggcccgtctgaaacactcgctcaaccaatccgtccaaccgtacgtactcggagactcggaagatttgcatggcgtcgtcggcgacgatggcgaggacggtggtggtggccttgctgctgacgcaattctgcgacgtggttctggcggtgaggctgctggagggggg

SEQ ID NO: 450934 - DNA, 179 bp, Triticum aestivum
tgtctcggctgcaccacatggcggagttcaaggaggaggcccagctctgggtcgccgccaacgtggcgccgttcctcccggcgaccatgatcacgcacgtcctggcgggagacgacgtcctgtcaagctctcccggggccgcctactcgctggtccccgccatgctgaaccttcacgcc

SEQ ID NO: 450935 - DNA, 328 bp, Triticum aestivum
tctctaggtcgccggtcatccacaacaaggacgatgtcgccggacgtcatctccatggccttcgtgcccatcacctccctgctcaccggcgtccccggccgcggcttcctcaaccacgccgtcaatctctacctcagatacaagccgcccatagaggagctggagcagttcctggagttccaggtgccgcggcagtgggcgccggagttcggcgagctgccgctggctctcggcccgcagaggaagaagaagaaggacagcctgccgtcgctccagttcacgctcatggggcccaagctccgggtcaacacggccaaggtggactccg

SEQ ID NO: 450936 - DNA, 354 bp, Triticum aestivum
tgggttatatcaggcaaagacctctgaagagcgaggaatgttagaaaccccaattcgtgctcggcaaatagtgcctcgtgttcgcggcctttatgggatggacatttataagaataaggtcttagaattcttacaaagtgaacgatctgatgagtctatatttggattatggggcacgtcgggtgttggcaagacacggcttctttcactcatcgctgatagctttgccgattcatttcatcacgtcatatttcttgatggtggtagtagcgtcagagttatgcaaaatcatttcgcatactttttgaaattggattgggagacaatctcattgttggaggagcattaccgagc

SEQ ID NO: 450937 - DNA, 248 bp, Triticum aestivum
tttccttgcgtccggtataatattcacgtgaactgttcaagccttgcagatcctcccactgattactaccttgtctctgaatctacacaactgggcataatcatgcctgcttgtcactcggtaaacggccctctcgaggactacatctcccacattgtcgagtggctgtctcgaccacatgtgctggccataataatagcatgggctgtgacctttaccgctgattgctctttgatcctttgcttggg

SEQ ID NO: 450938 - DNA, 179 bp, Triticum aestivum
ttgcacgcgtccggacgtggtggagttcaggcgggtcgtggaggaggagaaggcgtgccttgatgccgcggggtcgtggtatgggccctcggcggccggccttggccggctggccgcggagagccggacgccggccatggtcgccgcgctatacgggagcacggccgtgctggcgcacg

SEQ ID NO: 450939 - DNA, 219 bp, Triticum aestivum
tttcccacgcgtccgtgcagcctcatgcctatgtggaaacggcagctggtaggaagccgcttgttggcgtccatggcgccctaggacataaggtgctcaggtggttcatggacgaccataaatgcgacactgttaaaatcatctccatggttggacccgttggggtggggaagacagctattgccatggaggtctaccgcagactccaaagtagaggag

SEQ ID NO: 450940 - DNA, 194 bp, Triticum aestivum
tgtggagcaggagcaagaagaacctgggcagcaggagcaggaccgagatgaacggcatgtacccttctcagcgtttcagcaacgtgatagtcggctacctcaacctggtcacgctactggcctccatcccgggcatcggggcggggactttgctggccaagggcttcacgacgacatgctgctccatgctgcag

SEQ ID NO: 450941 - DNA, 144 bp, Triticum aestivum
tgccctcgcgtccgcccacgcgtccgcccacgcgtccgtccttctggcccacacgcacgaaccaaccggcgcgaccgaatcaaaccgcgcaaccgtgcgcgcgactcctcgtgggggccgggcgggcgcgatgcccctggacgg

SEQ ID NO: 450942 - DNA, 290 bp, Triticum aestivum
ttcccacgcgtccggagaaggtctggagagagaggatttcattgcaaaacaaaaagatggcagcaattgaagacgactcgtgcaggagggcgggctcgataccgttcaagtgggaggtctgtcctgggacgccgaagcacacgaggagcgcgagcgccgcggcggcggtggcggcatcgcctgccaaggtggcgcccaagctgacgctgacgccgcctccctccatggcgtcctcgccatcgccgtattaccaccactcggcgggcttcgtcgcctcgtgtcacctccgc

SEQ ID NO: 450943 - DNA, 394 bp, Triticum aestivum
ttcgttcggctcaccactcatcaggttgctgccgcaagtatgtcaaacttgaggtgtgttactctgtttagaacagatgacaatctgatccggtcctctttcaagcctccaactgctgcgtgcgttggactctatcaggttgtgatcttcggaaaagtagctaccaaatctgatcttaggtgtatggagaaattattacacctgaggtacctagggctactagatacacgggttgatgctctccccattgaaataggaaaacttcaatctttgcaaacattggacttcaggacaagtaaatctttggaggcaccatcaagtgttgttcggctaggaaagctgatgtgcctatatgttaatgagaacatgaggttaccggttgtgatagacaact

SEQ ID NO: 450944 - DNA, 84 bp, Triticum aestivum
tgcccacgcgtccgataaagataaaaaaaagaaaaaataaaacaaaagaaaaaaaaaaagaaaaaagaaaaaaaaaggggcgcc

SEQ ID NO: 450945 - DNA, 372 bp, Triticum aestivum
tgtctgcaccagttgctctggagcatcactcaaagggcatgcctataagaccaggtgaagttgattgctcattttatattaagacgggcagctgcatgtatggtagaacatgtcggttcaaccatcctggacgacatattcaagcatctgttgtccctggcgagatgctaaatccagctgcgaaattcctgccgagttttgattttcgcgtgacacatgtgccgattgaacctgagccaatcacctaccctcagaggcctggagaaactgtttgtgatttgatcgctctgcacctgattccattgcaaagtgggagccgtctcagcaacctgtgacgcttactgttgctggctttccaaggagagaggatgc

SEQ ID NO: 450946 - DNA, 89 bp, Triticum aestivum
tcgaatgggctctcgacttgctcccagagccggagccgacccgagccgagacctgcctctcctgctgcccgaacacccatggggtcggg

SEQ ID NO: 450947 - DNA, 52 bp, Triticum aestivum
ttcccacgcgtccgggggatttgaggtttcaagggaattggatggaagaggg

SEQ ID NO: 450948 - DNA, 162 bp, Triticum aestivum
tttcccacgcgtccgatatactagcattgattgccgagaagatcttgcccatcgccatttgccactaataccatcgctccatcgccaactccgctagcctgctaaggagactcaatgccgtccctggcgaaagctgcggcgtccatggatcacgcggtggag

SEQ ID NO: 450949 - DNA, 317 bp, Triticum aestivum
cggacgcgtgggttccgatacgcctctccagggcgcgattttttccgtcccctctggcgcacccatggcttctccgtatctccttcaccgtctcaccgccgacgagatcttccaaactctagaggcttcctcctccacgtcctcctcatgctacgatgccttcgtgccggtgttccgcccagatccctcggcctcctccctatccgtgtcggcggccgaccgcgtccggagccagttcctctccgtggagcgcgacctcttccacgacgcactcgtcgcgcccaggaatgacgacctcggcttccccgaggagaacg

SEQ ID NO: 450950 - DNA, 158 bp, Triticum aestivum
tgcggacgcgtgggagagtacgtatgtagactgtttaatcatttttaatgttctttttattgttaatctctttctttctttcttggcgagttctttcatggcttatggcttgtattcgttttgtacgatctgcatgatgaataaagtttttccttact

SEQ ID NO: 450951 - DNA, 162 bp, Triticum aestivum
tgctaggtcgaagacaagatagtctccgtgctcatccatcatcttccatggcgccgctgcacttcctggtcgtcgcgttcccgggccagggccacatcaacccggcgcgcgctctggctgagcgcctcgcgcgggccacgccgggcgcgcgggtcacgctct

SEQ ID NO: 450952 - DNA, 338 bp, Triticum aestivum
tttaagtgatatgaggtactcagacctgaagaagatcgaccgctgtgacaggaggcactttcatgacgatattactgttgtagtactattcatggaccctgcgcttatcagcaggaggctctacggtgggccgttgctttcgctaaggggcggtggtggtacctcgacgtttgcacagaaatgctgatcatccatgacagatgctttctggaaatatcctcctatatatcgttcatatcttggcctggtgctctccacacgacatgcagacactgcgtatagcggtgcgtggaggagccgtattgttttgacttctaatatgcacagatagagagaga

SEQ ID NO: 450953 - DNA, 63 bp, Triticum aestivum
tctcttgtgctttgggcgattccatccgaggcgagaagaggagaggagagcacatgaggaggc

SEQ ID NO: 450954 - DNA, 216 bp, Triticum aestivum
tgaatcgatccttgcttcttcctcctgtctgctcacctgcaacctatcaaccgccctcccctgcgctgcggctaccctccaagcaagctgcccatggcgaccaaaaccctagccctacgatgtccggctcaggcgggccctcaggccgcggctcagcaggcggcactcggagcttcgacttcggcaccgacgacgtgctctgttcctacgacgact

SEQ ID NO: 450955 - DNA, 136 bp, Triticum aestivum
tgctcttcgcacgcagctcgctcgaccagaacacctcggagcagcagcagcggcggccggcggagaccgtgtcatggcgatggagggctacgaccgcgagttctggcagttcggcgaccagctgcgcctccagacg

SEQ ID NO: 450956 - DNA, 164 bp, Triticum aestivum
  unsure (1)..(164): unsure at all n locations
ttttnctgcttcccctcccctcgggcagcccagtcgtcgtcgcgaccgaggaccagacaccagacgcgggcggggagctcgaggcggcctgcgggacagcagcatcggcggcggcgagtcggggcagggccagcagcgatggggttcgtctccttcgtcgggag

SEQ ID NO: 450957 - DNA, 351 bp, Triticum aestivum
gcttgcggtgcccttgtgagccacactagatgcctgttgtagtagacctcatctcaggactgctgcgagatctccatacacatgagccaggctagccatactccggaccccacaatggctacggtcccgatcggatcaagcatcctaaggactcccaagagtaatccaggcaagacattcacaagtagaaacaggcttgaaactccaaaaacatcttataacagaacaaaccgcgctgagccgccctcagtgacacctgtgaacaagagtgctcgactggctcgaagagtatccctcccgctgtcgacatacgaaacgcccatcaagcgcagcatcagcattcttgaccag

SEQ ID NO: 450958 - DNA, 52 bp, Triticum aestivum
tgggccgccgaggctcctggcggggttgatgccggtgccggtgatggggatg

SEQ ID NO: 450959 - DNA, 261 bp, Triticum aestivum
ttcggacgcgtgggttatcattcctgcaaccaacaccggatcaactagcagaggcactgcgagctcgccaggcttccagagcgtacagggtggccgatcgatcgatccaccggcaagcaatggcggcgacagggagcgctaagggcctccggttcgctgcagcgtgcggcgtcctcagccgctgcatcaaggcggcggacgcgcggccggcgcccacggtcgttctccccctcatgcccggagcggaagtgcccgcgcaag

SEQ ID NO: 450960 - DNA, 189 bp, Triticum aestivum
ggagcctgacacgagggccctcaactaattgcgagtggattgatggctcacgggtgaactctgaagtggagcctaaactgaggagtctcctactcgagatgggaagcgacaaaattttgggactacaagtatgtgcatacaaagacggaaaggtcataatagacaccgctgctggtacattagggaaat

SEQ ID NO: 450961 - DNA, 314 bp, Triticum aestivum
ccttcaactcccctccccaccttctccctccgcctcgccttctctcgacggtcgacgctatagcttttcccaaagtgcacgcgccatggcgagatcacgagacaccaggctcaggctcaggctcacgctcctcctcgtcacccttcttctgctagtagacatggcaagcgtcagccatggccgacggacaccggacgtggatgccatggccctcgtcggtggcggtccaccaccggcgaaggcctactcctccgagcagtcgtcttcgtcgacttcaagggagcatacggctcgtgtttatcggcgcatgcaca

SEQ ID NO: 450962 - DNA, 240 bp, Triticum aestivum
tgcacaacgagccacacaaaacaaacacacacgagcattagttagcttgggtgctccagcaatggcagtgacggtggagatcacgcagagaacggtgctcgagccctcacgggactcggcccgcggcggcggcaagaaggtccctctcaccgtcttcgaccgcgcctccacggacggctacatcccggccgtcttcgcgtggaacgcaccggcgccgaccaacgacgcgctcaaggccgg

SEQ ID NO: 450963 - DNA, 147 bp, Triticum aestivum
ttgttttatgggggtccctcaccgttgaccgttcccttcaactaaaatagttccacatgtgtactgtttttagataacatggaaaataacattttatgtaccaagcaatattgctttgctgtcacaaattaaagatcatttcacgtt

SEQ ID NO: 450964 - DNA, 75 bp, Triticum aestivum
ttcccacgcgtccgcggacgcgtgggggccggcccagctaaactccccacctgacaatgtcttccgaccggatcg

SEQ ID NO: 450965 - DNA, 380 bp, Triticum aestivum
ggatcaggctatgcgtgaggcacttggcttagctcccaagcgtagcagtcgaccaaaaggcaatcgtttagataagcatgaatatgctgagctaataaagaggggatctaccgcagaggatttgggagccggccatgctgaagcagcacaagtgcaaggattaggtttatacaaggctcctcacaacgaggaagaaccaagctctcttagtcctgaccctcctggaacggagcctgagcagattgactttgcacctgcaacgaagcaggaagattctgaagatgatggaaggggaaaaggcggcgcgaagacaggagaggggacagagaaaaagagcggaggcgtgataagcactatgagggaaaagagaggaagcgaga

SEQ ID NO: 450966 - DNA, 75 bp, Triticum aestivum
gctctctcatgtctatacggctatcttgaagccggataacgaggtcagaattctggtcgacggggaggagaagag

SEQ ID NO: 450967 - DNA, 352 bp, Triticum aestivum
ttataatgtatatcaaaggttatgggtgaaagaggctgcaacgtgtcaccgcagcagtgcgaggataagttcaatgacctcaacaagagatacaaaaggcttacggatatccttggtcgtggtactgcttgcaatgttgtggataatccagcactccttgattgcatgaataatctgtctgataagatgaaagaagatgcaaggaagatattgaactctaagcatttattctatgagatgatgtgttcctatcataacaacaaccgtgtgaatttacccgaagatcctgcacttcagcactcactacaggttgctcttagatgtaaagaggagcatgatccgaggagggatg

SEQ ID NO: 450968 - DNA, 408 bp, Triticum aestivum
tattgatttcagccacaagaacaagcttggccctatagagagcctgaagaactatcccagacaaaacgggccaaagcttacaatgcagaacatgcatgaggcaaagggggccaacacagaaattagcacccatgggaataacgaggccccaggtgtcggaaccgttagtagcagtctgcagaatgccgtggcacaaaataactaccagagtatgctgagaagctcaagtgcaaaccagggtttgcttcagcaggaggcgtcacagaatgccgcagcactaaacaattaccagagtatgcttagaagctcaagcgcaaaccagggtttgcttcagcaggaggcgtcccagaatgccgcagcactaaacaattaccagaacatgcttagaagctcaagcgcaaaccagct

SEQ ID NO: 450969 - DNA, 149 bp, Triticum aestivum
tgctgccatccaaacagcccccaaatgcgcgcgcctctcacatgccagaccgctgctgagcctggccgacatggccaccgcctcgatcgccgtccgctcggccttcggtgtcgccctggccgccttgatcgcggagcgtgccccccggc

SEQ ID NO: 450970 - DNA, 136 bp, Triticum aestivum
ttcgtctgtccgaacaatgttcgccctccgcaaaaccctgctccacggacgccttcccgcgccgtcggccaccgccgtctgcaggatctcctccttcctccgctccctctgcacatctccggggggcgagggggtc

SEQ ID NO: 450971 - DNA, 136 bp, Triticum aestivum
tcacgcgtccggcaactaccccggctgaagctccttctgctggtggtgtcagctactctgatgctggaggtgctggcactggcggaggaggaggcgacggtggaagtggaggtggtaatggagctggaggtggaca

SEQ ID NO: 450972 - DNA, 302 bp, Triticum aestivum
taaccacatcgccggctgacccatctctctccctatctctctgtctctctctctctcccaaggattccggctgtttgctgagcttgacgaagcagtttgctgcactctctggcttggaggcgaggcgtttcgagggagcgagcgagcgatttttagtatctgcgaatggcgactcagcggttctccaatatggtgatggacgagccgagtttcttccaccagtggcagtcggacgcgacgctggagcagtacacggagcagcagatcgccgtggccttcgggcagggggagatggaggcggc

SEQ ID NO: 450973 - DNA, 321 bp, Triticum aestivum
tggacgcgtgggcgcggccctgccgtatcccccagccgtctccgccgacgccgccatcttcgtcattagtttgaagactgatggattatgataactctagaagacacaatcaaagtacttccaaaaagaggactcgtttcaattctgatgatggaaagaggaaacggctaaactacaggcaggatggcggacatatgtcctctcagccaatagaaaccgtttacaggatattgtgcccaggaaaaaagatcggcggtgtcttggggagaggtggccatgttgctaaggcccttagagacgagactaaagcaaagatacggg

SEQ ID NO: 450974 - DNA, 458 bp, Triticum aestivum
gtcgactagtactacccctggcctccggctggatgcactgcatccagccctccctttccccgccttcgttctttttcttcctgctctcatctgcctgtctgcatctcccagtccatgaaccagcgatcgtagaagtcccggtcggcgctggagcactgccgatgtgcataccaagcttgatgcccaggaaaagatgctagctgatgtgccatcggcttcaccaggatttgtagattgccagatctgatctgattcagcgagaattctgagctaccaaagctgcttcgactcaaagctctaccactgccctatcttgcactttaagaagactcgatcgtcacggaaagagcagacagaggtatcaaattccatgctagctcctcatgttcttgagcgcaagaaatgagtcttccgagtcggaggacatccaagaactgatcaacagtggcctcaagtgc

SEQ ID NO: 450975 - DNA, 344 bp, Triticum aestivum
ttcccgctaggtccagatccacgacgcagagaaaaggaaacaatccactcttcacggtcagtgcgcttggccaataatcagcttgtccatttgcagcttcctatttactgtcagtgcattcagcaacctgtcctccatgcacagttgactgaccaagctctgagctagcatggccatggaggcggctcttgtcagcgtggcgacgggggtcctcaaacccgtcataggaaagctgaccactctgctcggcaatgagtacaagcgtttcaagacagttcgcaaggagctcaagtccctcactcatgaacttgctgccatggaggcttttctcctcaagatgtctg

SEQ ID NO: 450976 - DNA, 358 bp, Triticum aestivum
tatagttggtggtggagataatgccagtggttccactgatacaatcgtaatgaacgcttccaagtttgtctggtctgtggtcactagtgtgtcagttcgagatccacttgcttgtgagggtctcactctttgttcagccacagttgatggcgaaaagttcctaattgcctttggcggttacaacgggaagtacaacaatgagatctttgtgatgaaacccaagccaagaaactttgtgcaacctcgtcttttccaatctccagcagctgctgctgctgcagcttctgtgaaagctgcctatgctgtaataactgctactgatgagaaaactaaagatattgttgctactgatgatttg

SEQ ID NO: 450977 - DNA, 91 bp, Triticum aestivum
  unsure (1)..(91): unsure at all n locations
atcacgccgtgcgccacgccgcctccccccaaaaacctttcgaaaaccgccgcgccaaccgccacccagcccgcccctnaccacccccccc

SEQ ID NO: 450978 - DNA, 219 bp, Triticum aestivum
ttgacgcgtggggcccttggccccgtccggcccggcgcctgctgatgatcctgcccgccgccgccggcgccgccaccgccgccggcgccgccgggggcggctgctgcatcaagatcctgccccgtccgccagcccaaccagcaccccgacgacacacgcaccaacagatcaaccgccccaaacagggcacgccgtcctcggcttcaaggccaagcaggg

SEQ ID NO: 450979 - DNA, 385 bp, Triticum aestivum
ttcagcactgtggcctctccctcgtcctgtcggctgccaccattgctgtttgttccgggaggagctatgacgaagatgaccagccagccatatggtccttgatgtcatcggggagattgtatacatgattgatctgatcataacaagttgggtgcctaattcttgtccaagctctaagaggcttctgtctgtgttggtacatgtaacatgttgtcggttaaccaagagaattacttcaattgcctttttcacagagggcggaatgctgacttgaccaaaatgttagcaaacataacaagctggcacccaatagtgcttttaacagaacggaaggaggaaacaggaactatccctttacattttaacggaaggaggaacggaagga

SEQ ID NO: 450980 - DNA, 361 bp, Triticum aestivum
tccacgcgtccggagccacctaagttgcactcccacctaactgatattcaattaggttgcagtgatataccatctagatttcctcatattgagccttctatgagtgagggtggcccatcactggcaccatggaaggatttcaagaataaaacaggttatggtggggattttcctggaagcacatctgacaagtgggagaaagctgatgttggactggtcccaccatatatgccaaatccttttatgatggaaagtattggtgcactacctataaacataccaaacagtagttcgatccagcagaatgaatttgcatcaagttctcatgagaacattcttcttcattgtgtcacagatgggc

SEQ ID NO: 450981 - DNA, 302 bp, Triticum aestivum
tccacgcgtccgcccacgcgtccggcacggcccatccgtcgagatgaaccacgtgaagtcggctcttctgtgaggccaccgcgcgcaccggctcgcggcggcggcgccgcagcagctggcggccaccgcgtcgttccactccacgcctcccctgcagcggaagcgcaagacccagtggcggcacaggttcaatctttatgcaaaacgcatgagaaatagagacacaaaatgaacaatgatacggaatatgcctgagtatgcggagcagctcttcaatagttggcgtgatgaagatgagaaaa

SEQ ID NO: 450982 - DNA, 389 bp, Triticum aestivum
tctcaatgcgaggtgcaagagagcatgtgttgttctatgtctatcctgttaaatcctataggggaacgacattgtaagcttggttagtttgatgtcctacggagaagcaaaattgggcgtgcccaccgccagaagattcatctttgtactctcttctccatttatcagtgcaacgagaggcagagttagtcatggtgatgatcatattgtattcttatgatgcttgcagactgggagtgtatttatacttcatgcttatgagttatgatgaatcatttctatggcattacatacagtcagtgggaaaaggtcattagggactagcatgtttcactattgtgattacaaactaaaacttgtgcaagtatgataaatgggtgcattgatct

SEQ ID NO: 450983 - DNA, 363 bp, Triticum aestivum
tggagctttagcggcagctcgcgcggccgtcgatttggacgacaccggcgaccaggacctcaccggcagcagcgcatcttatccaagtttgcagatttcccctacaaaggccgaggtgggacactctgctccatcatcacaaccctgtggatcaattgccaccagtctttgggttgcaaaatctggacagagccttctgaagtttgacagtcacatcttctcaactgtacattgccgtgcaagatgccaaaaataaagaacctgtctgatgcatgtaaagtatcattttctccagatggacctatatctgaagaagcactcgagagagttcgtgcactgttagatgagatcagacctttagat

SEQ ID NO: 450984 - DNA, 306 bp, Triticum aestivum
ttcacgcgtccggaaatggtgagtcgtcagcgcgccactcacacgcacggcctccgttgtcttaatctcgagattaaaccggaaagcaaactctaataaatcccccacccccggatcgacaaagcttcccattcctccgcatcggcaggcagcagcaaaacaacagcccaatcgagggtcactccacaccaccaccactctcttcccccaatcccctcctcctccccgaaaccctagctggaatggagcccaaatccaccacccctccgccgccgggccccgtgctgggcgcgcccgtcggctacc

SEQ ID NO: 450985 - DNA, 309 bp, Triticum aestivum
tccgcgcgcggacgggtgcgcttgccgggcagaggaagtcgagagggcccacgatggggacatcgggcggctgcgcgcgcaggaggggagtggcctagaaggcacaaccatcgacgggtgcagcgcagccggctgcggaaacgcgcaaggcgcagtcagcacgagacggcgggaggcggcgagcagcggggaaaatcgatgctcgtagagaggcggagcggcatagaagcggcaagccggcttgtggagtggcgatgaaggcggcctgcgagctacggcgggttgggccaaggcgaggttcagcaacgc

SEQ ID NO: 450986 - DNA, 346 bp, Triticum aestivum
taacactcagtctgatccaccgccgccggcgctagcttgcaccaacatccacgtcacttcagttcgtaaatcatagaatgcctagcgatgatgtgccaccatggcgacattggagacatgcattgactaccagagacaaggacctactcgacacatcctctggccctctgttcatgctgccaaggagagaggagttgcttggtccaacttgtttcggcctcagatctgctacggaaaacttgttgagaccctgttgtccaacggacttgtgtcggcctgcagaagtttggtggaacgaaaatgtacacctaaatgacagtgttgttcaagttttctttttggcagg

SEQ ID NO: 450987 - DNA, 395 bp, Triticum aestivum
ttgtcccctccgccgccgcaccacgggccctgctcctccgccgccgggtactactacaaccaccaccacccgccgcccccgcacgcgtaccacggcccgtggcaccccgcgccccagccgccgccgtcgcagatgcccgcgctcaccggccccccgcccgagttcgtcggccaccagcaggcgctcaaggtgaagaacgacatcaacctgcgcaaggacaccatccgcctcgtgcccgacgccgccgaccctgaccgccgcctcgtctccttcaccttcgacgcggtcaccgacggcagtttagttatacattactttgccaaggaaggaaaagactgcaatttttcttcagtgtacccagacttgcagacaccaacaaagatacctttccagaa

SEQ ID NO: 450988 - DNA, 395 bp, Triticum aestivum
gttgccctctctcctttatcccgtctttggccccgccctcgccaactcccgacgctccgccgagtggagaaccaggaaggaggagggacgtgaagtggagaagagggggtgcgctggagaaggagccaagcctgcaggagagcacggagtgccggcgcgccgtgcccgccgcagctgctcgtggagatccggcatgtgctgcaccatggaggcgctcgtggagggtttgatgtcgaggaggttcggttcctacaccaatggttacagcgggctctgctgcagggagtggaagttttagaatgctgcggacaggttgagagcaatagatgttttttaagtcctaggacaatttgattttgggaggacaaaggtcaggcaaggatgagaatgggata

SEQ ID NO: 450989 - DNA, 270 bp, Triticum aestivum
tttcacgcgtccgcccacgcgtccgcttaaatcagctgatggaagaaggcatcaaagaagccgagtcgagcaagaaagcagcagcagccgagagcacagcgaccaaagtgggcgtcatggccgactcgacgttcgggagcatcggcgacgtgctcaaactgctgccgacgtcgacggtgatcgtgtacgaggtgctcaacccgatcgtgaccaacgccggcgcgtgcagcgtggccaacagggtggtcaccgcggcgctcctcgtgctct

SEQ ID NO: 450990 - DNA, 345 bp, Triticum aestivum
ttcgtctctgccgatacttcacacaagaaagatgagatcgccggcaactcttccactactatcttccgatcgtttggtcgccatggcgccgtgacctcgccgtgcttcagcgatggccccgcgctggacctctgatgaccagacaagacggaccgaccgcaccgtgactccgacagccactccgtggtggtaatcagtggagtgccgccaccgtcgatcaaaatctttgacctcccgcatccaccgccagttctgtctccctgcaagcaaatctcagccgccattgctcagcttctgagcagcggagcggatccgagatggagcccatccctctgctcacgccgt

SEQ ID NO: 450991 - DNA, 422 bp, Triticum aestivum
tgtctcacgcgtccgcccacgcgtccggcagctcacaacctgctcatacttaatactacttgctgcagttattcagatattcagagttccctacatacttgctgcagtttcagaaaaatgcttaatgtcagagttgattctctgctcgctgctctgtgtcatctgcacagattagttacatgcttgtaggacaacacatggaaatttacatctggcttgtctgtactaaccattgaaaacaagcaacacctgaaacaaatatgcaattttactatgcatatgctcatctcgttatattcagagttcaatatatacttgctgcagatacagaaagtgcttcatgttagagttcagtatatgtatcatctgcacaaattggtttcctattcagattatatgcatctgctaggctttattatgta

SEQ ID NO: 450992 - DNA, 361 bp, Triticum aestivum
ttgacgcgtgggccgagggtgcgtggcgtgtgcgtgtgcgtgcggcgatacgacacacgggactcacgcgcggcggcggcggcggcggcgagcgagggttttgcctgctgctcccccgacgcggcggcggcgggagtagccgtcggatccggagggaggggcctgcagcgccatgaggggcggcggccggggaggagggggaggcgggggcggcgggagggggcagcgggaacagcaggcccgcggcgcggcggcggcggtggcgggggacggggcggagatcccggcggcctcgcggaagctcgtgcaggggctcaaggggatcctcgccgaccgcaccgaggccgagatctacgccacg

SEQ ID NO: 450993 - DNA, 474 bp, Triticum aestivum
ttcaagcacacgcaacacgcatcccccatagccggaacgagctccgcttctccttgttcccgcggcggcggaacacatcgagatggccaagtacgtggagatgctggacatgggcgtgcgcatcgccgccaggttccactcccactgcccgcagacggcgcgcatgtactacaagccgccgcagtccgcctccacgtcgggcgccgccgaggccgccacgacggatcggacgaaggcggccggctttgacggcggcgaggacgtggctgctggcttccggcccttcgccgcctcgggagctctcggcgccggcgtccagccgcggttcggcttcgacaccgcgcaggtcgtcatctacgaggtcgtatgaggctgggaacaacgagggcgggctcttctgggaagagatctctcggatgaggatagttctgcgaccgaggaattggtcgattataacaccattctttaattagt

SEQ ID NO: 450994 - DNA, 196 bp, Triticum aestivum
tgatcgattattagcgcatttaccggtgctagattactgtaaataagcccgcgagggatcgagctagcaccgttaattagcttcattgtggtgtgatctgtatagttgtagattaatcagcagtgtggtgatttgggggtgtaattagcattattgtattgggatccatcgacatactagtatatttcattatcaa

SEQ ID NO: 450995 - DNA, 312 bp, Triticum aestivum
ttccaatctttcatcatccatctctcccaagagtcagcatggcttcaccttcagctctgaaggttctcgccttcgtctgcatcgtggcgctggtcggcctcaacctgagccagccggcgtcggcggcgagctgtgccgactgctggtacgacggatggtgtgatcgtttgtgcggtcttattgaatacgggtgccatgcgtgcgaacgcatacaaatgagagggtgctcgcccaggtgctaccagggttgccttgcaacctgcaggagcgtagatgcatcgtccggatcgatgtctgcctagagcgtgcgtg

SEQ ID NO: 450996 - DNA, 298 bp, Triticum aestivum
ggcacaagctaaacacgagaaatttactacaattgcaccaacattggtgcaagcatgcagtacatagctaaatatcatcatctcagagggaacctatgtcgatgttgcgagcctgcaacaacagctatagctccctgcatctcttgcggttcatctcatggttgctgcttgattctgctacatagcagctacacaagatcttctagtggtagatcaccggaaacaaaaaggtttcttacaaatggcgctgatggaaccacctgaaggaatcaaagaatcggagcaacagcaacaagat

SEQ ID NO: 450997 - DNA, 275 bp, Triticum aestivum
tccggcgtcagtcgccgtcgtcgtcctctgcatcgccgtgggcgcgctgctgttcttttcttcagaacgagcagttgcccgcttgcctgcatcttcgttgaccgagcacgatgccttagcactcacgtttgggccgcttctactccggtccagctgcctgcctcatccagcgcccccgtgggccttaggcaggccggacaaccgcgcctctcctctgcttcctgccgggctgaagcccatggtccgtcgggcgatgatgtctgcgcgacgaggac

SEQ ID NO: 450998 - DNA, 321 bp, Triticum aestivum
ttttcacgcgtccgcccgcaaccaaaaactaccccaaaaaaattcgcaaaaccaaaaaaatcccccgaggcccggcgggatctgctcctcctccccgctatataccgatcgaggagatagggtttagcgccgattcgccgggggggaaaatcgaaaaaaaaggaggaggaatcgcgatggcagcgcaggtggcggtggcgaacggcggcggcgcggctccggcggtgccggcggcggccgtggtccccgcgcccgtggccgcggcggccggaggggtcacgcagccgctcccgaccacgtcgctctacgtcggcgacctcg

SEQ ID NO: 450999 - DNA, 283 bp, Triticum aestivum
tcatctcacggaaacaaacaggggaaaaccatccagagagcttcacccagcgcgcgatggggaagaagaaggagcggtcagtgaatgtgtcgggcaagcccagtcactgtctcgacgtgaaccagccccaatgacaagaagggtgctggcggcggcggcggcgccggcaggagccggtccgcggccacggtgcggcggctcaagatgtacaaactaaggcccatgagggaccgcggtgggaagatcgtcaagcacgacctccagtccaaggagctccccaaca

SEQ ID NO: 451000 - DNA, 302 bp, Triticum aestivum
gttctccttaccggaggtgcgcctgcggtggcggagttcgtcggcggctgcgcgatgctacgggccgtgtgtcggtctatggaattgcgcggcgcggcgaggaggccgtggtggtcgaggcagcacagtgaggaggccgtggaggaccttcgtggtcgcggcttcaacgacacacagtggcatggcggcatggaggtactgcgctgcggctgaggccacatcggtgcagggcaataagccgtggcggcgaggcgggcgcgaccggtgcgtgttatgggtgcatactggacgcgtcgggcaca

SEQ ID NO: 451001 - DNA, 483 bp, Triticum aestivum
ggtgttccggggctgtacggggagcagcgtaccgcgtacgtacgcgcatcccaccggctacacgggccaccgccgcgggtacagggtgtcagcgcgggcgggcgggcccttttctgtcgctctttctggtgcgggccttcaatgcgtcgtcctggtggctgctgatatccatccgccctcccggactcctcggccgatcagattcggttctgttactcgagttcgccgcggaaagaggggaggagataagagggaggagggttggggcctgagccgggaaggcaggcattctgatccggattcagctcctgcaacctctcagccgtctcgaggaaggatacttgagaagccaggctgctgcggttttttttttcttcaacaagtttcagggatctgtttgagactgaacagacccttgacctctttgtgcaacactcattttttgtacaacttgtggcaagaatttggcagcaaatgggtcga

SEQ ID NO: 451002 - DNA, 355 bp, Triticum aestivum
gtttctttggcacatcctttgtcagccaagctgatgctgcgcccctgcattatcccgtggagaagcgcaccatcttatcacgtgcacgtggtgagcttggcctcagagttttccttaaaatgatccgtctagccagggcaatgagctgcatgtcaggatttatatttctcaagcactcccaccactgcccaagagcaggctgtcgccaatgctatcccaaatcctttccaagacaccaggataaatcaagtcagacaattccaacacttgccacgggaacagcagcagcgtccaccacccctggccggacagcaatactacgcacaaggtcagggttcatatggagagcagcaac

SEQ ID NO: 451003 - DNA, 362 bp, Triticum aestivum
gtttactgcaagagcggcagcgccaccaactcaggcgccgccaacggccactactagaagcaataccactactattaactcccgattgaagcgccttcataaatcaccttagctaatgagtccatgaatgatgtgcgtacgctgggcacccagggctgctgtgcactgtcgcgtctacttgagcgctctactacccttgaaagacctgatcttcatcttgtctcctttatgcctaccgtgcgtacggccgctactgtcaatcagacggataaccgcgaccctggttggcgaatccgcgaccctggttggcggatcactggtgttcttggctttctggaagaactatgacagtccaaagggga

SEQ ID NO: 451004 - DNA, 410 bp, Triticum aestivum
gggtgtgtcaccgccagcgctacgaccgacgcgacgccaccatgctggtcaagtacccgattatggatctgtcgatcacgcgcgactgcttcgcgatctgcggcggcggcggctcgctcaagtcgggcatccgcaacactgtggacatttacgagctctcggacacggacccgagcgggttcgagaagaccatcacggccgacacggggctcgagctggcctcgggcgtggcgttctcccatgatggccaactcattgccgtgtctgtgaacgcgtcgtgctggatctacgcgctggaccgcgaggcgaaaacgctcacgctgctggtcaagttccgctcggactttgccgacatcgagagttcccagacgtcagtgtgctttgtgggcaacagcacgctgctcacgggc

SEQ ID NO: 451005 - DNA, 387 bp, Triticum aestivum
cttacgcgtccgggattcctgctccgcctcccccgccggggcggcggcggcggcggctgcgcctgctgctggtgctgctgccgccacggaccggtacacgttcaggccggggctgcggtggcagccggaagtggatgagtacttcgcctcggcgtacggccgcgagcacttcgcccgcatctcccaagccctcgcgcatccttcttgctactcttgcatccgtgtgaatactctaaagtctagcactgatactgtcatgcaaaagctgctgaaattggtaaatgagaatgaactttcttgtggatttaatggtttgaagatcggtgagcagaatggtggagagcaagcacatgaagggagttacctggtgcacaaatgcccatattc

SEQ ID NO: 451006 - DNA, 203 bp, Triticum aestivum
  unsure (1)..(203): unsure at all n locations
ccttgttgatgaatgccaggcgtatgtagttagatgagaccaatgcatcgttgattgtatcgaaactgaaaactgggcatctgggacgattatttgattatttattgtgtccctgtgggagcctttctcagagttattgaaaatgtatccactactgttatccaagtcttctatctatactgaaacataagagcgtttngatc

SEQ ID NO: 451007 - DNA, 453 bp, Triticum aestivum
  unsure (1)..(453): unsure at all n locations
gtttatctgtcctccggttggacggacggatggatggatggggcgggccctgagcgcttccatgtggttttcgcctgctaaactctgttggatctatacaccttagaccttgtatcgcagttttgccgctcgatccgtgactcatgattcatgagctatacaccttagaccttgcatacatttgcccctatcatcagtataatgattcaaccattgctacccatccattccattccagccaaaggaagagtactagtatgcatttcttgtggtcatataagtattgttgattgatgattcgactgtattcttcctgctagatttggtcagaacaggtgcgggctgataagggttgctcggggttaatgccaaaaacgtagtcatgtgctgagttgcgctacactnttctgtttttatttaccaatacatgtccccaaagatttactccatcac

SEQ ID NO: 451008 - DNA, 460 bp, Triticum aestivum
tgtttacaacagaatggttgcaatgaagcgaaagaacctccttccttcagtggagggaatggacgctgttgactattatgttggcagctcctccaacagtcacttctctgattttgtgcagccaaatcctagtgcacttaccgagcctttgcatccgcgaatgcctttaaacattggtcgaagcaactggattgaccaacacttagttaatcaagaagtatctcagaggaatgtcagagcacgccatgatagtgctaatatttcattggaagctaggccagcttcaacttacacaccaagtagcaatcatcagctgccattccattcaaccacaagtgcttttgcaagtacgtcagcaggaaggaaccaagcacctttttctgtgccaacaagaacattaccttcaggtggcactgggatcactggtaggatctaccatcatcctatgcatagcagcagc

SEQ ID NO: 451009 - DNA, 434 bp, Triticum aestivum
gggggtgcacgacgccgccagcctgcggagctacaaggccaaggtgctcaaggccatggaatccctggaggaggtggacatgctgcagctgtctttccgggactcgtcggcaaccacggtgtcgccgggctcagtcgcccaggcctcgccggacagcgtcaagtaccccgaggacatgtggtcacggacccattcgccggaagccgagtacaaagaggatgacgagacgggaacaccccgagaagccgaagaggccgaggcgaagatcgtcgaaggggaggggagcagcatcgacatgagcgacgacgatgacgatgaccgctcctcgagcagcaagaagaagatgatcgcggcaccggtgtatgacgccgaattcgccgttgagaacagcttggagcattcggagaaggaaattatcaccataaacgatcatt

SEQ ID NO: 451010 - DNA, 417 bp, Triticum aestivum
cggttctcgtgggtccgcgtccagcgcatctccatggtggtcacagcgtgaagctccgccacctcgcgagttcgtcctcaccctccggccgagcacaccccagctcctccggccgcgcacccgagcccgtcgacaacgcgagctcctcctcacccgccagctgggcgctccgcctcgcgagctccgccggtcacgcaccgctcatccccgaactcgctcgtgtgcctccccgtggcgccgaagcgaatcagctcccgagggcggctgggccggacggcagcgcggctaagcagggcctggcggcggcgcgacgagcaggccgggcggcgccgcggcgggggttgggctggatggcggggcgagcagggtactacagtggagaagaagggccggattgctttttagttttatgtttta

SEQ ID NO: 451011 - DNA, 393 bp, Triticum aestivum
cttttgtgtcatcgtgctctggttcccgctcggcattgagccgtgtgacatcaagtacaggaccgagacgtgcgcgacgatccagctcacgcgcgcggccaacatccggtgcggagacaaaccattcaacggcatgtggaacccgcccgagtggtaccactggtcggccggcatcaaggaagtccagtgcttccgcgagcccgtactcgcgcactgggtgtcgtactttctcttttacttggccgagttcatctcgatcatgctgggcttcatgtactatctcggcatgtggaagcccgtgcgtcgtggtgcccagtacctcaaggattttgcaccgcacttcccgccgtccaagtggccaaccgtcgacattttgctctgtcactacgctga

SEQ ID NO: 451012 - DNA, 377 bp, Triticum aestivum
gtttggtgggccgaggcggggcggagacggcggagggaaggtggcggaggggaggcgggggcgtcctcgccggtgtttagcaacagagatggcgtgcgccgagtcctccgcgaggagagcttgtaagcaggaggcatgcttcacagtgccggctgcacgcaggtcagatgtcggtttggagaggagctcggcggagctgcgccgtcatgtccgccaccagcaagcttcagtcggtgggtgcgacggcagtcggcggcgccattggggcgcaaggaaggtgatcatgtttttattgagttcttctctgccaagaggaacaacagggacacaagccttatctaactatagtacattttctttatgtatagatgattcac

SEQ ID NO: 451013 - DNA, 353 bp, Triticum aestivum
tgcaaggtctgataacattgagagttgcttttcaccaagctacacctaatgaggtgctgtttcacattatacgattgccaaagggtagcacttattctgatttgatcgacgacttaaaatcaaaggttcagctatctcgaagtgatgctgagcttaggctatttcaggtcaacaataacaagatatggaaggtgtacctgcctactgagaaaatagatgcagttcatgatccaaatgtacctcttcatgttgaggagattcctgaagtagagaaaagtgccggtccgcgagaccgtttggttcatgtcgtccacttcttcaaagataaccagcacattcaatacttatggact

SEQ ID NO: 451014 - DNA, 400 bp, Triticum aestivum
ctctttcatgtctgtcccctgttactcaagaggaaaggagagggaacgcgcagcgcagcacatgaggtttccactgactagtacggccgcggttctaactagctgttgcgtggcgtcgccttcttaagccaaggccaagcaagggaccgccggggcgcgagcgcgcggatggcggccaggcactcgtacccgcccacgcgggccacgcggagcgcgccggcgcctcggccgccattgtcccgcctcggggagtcggagacggcggcggcccaccccggcgccgacccggaggcgcgccgcaaggccaagaagcagaaccagctgtggcccaagacggtgctgcgcaagtggctcaacatccggtcgccggactccgacttcagcgccgacgagggcgaca

SEQ ID NO: 451015 - DNA, 70 bp, Triticum aestivum
gagtccgtctctttttaaaaaaaaaaaaaaaaaaaaaaaaaaagaaagataaaaaaaaaaaataaaagga

SEQ ID NO: 451016 - DNA, 445 bp, Triticum aestivum
ttttacgcgtccgcccacgcgtccgaaatccccacctgtcgccgcggccggccaccgcgattcaccgccgccgtccgccggagatcggacggctgtccctgccccgacgccgtccctcgcgagccagtgccgccgcctcgtcctcatcgccgtcgccgccttcctcttcttccacccctagcttctccagaggcggccgagtcgccgagtcgccatggaggcctacaaggtctgggtgcggaagaaccgggacctcgtccgctccctcgagtccctcgccaacggggtgacatggatacttcctgagcgcttcgctaactccgagattgccccggaagcagtatatgcacttctgggcattgtaagttctgtcaaccagcatataattgagacaccaactgatggtcactcactggcctccaaggaacaatctatcccatgggct

SEQ ID NO: 451017 - DNA, 358 bp, Triticum aestivum
cttttaaaacccagcaaagtacaggagtttcacgatgtctgagtttttcggggccttcttcaaacgagaccttgctagcaaagctctacttgacaacttcaaattgtaagatggttcaagcgtcaccatacaatgtttaaacctgtgtacatgccagtatgtaaccatctcagcgcaaacgtcgtcctgtgagagtgaaatgcaattattctacctcatgtggtttctccatagtgcctcccaacataaagctagtattttttccaccgtgtaatcatcatattcttgttgtctcagtgggctgtcttatggagctgagtgtggcctcaaggctgttagtcttcacacatcgttgaac

SEQ ID NO: 451018 - DNA, 293 bp, Triticum aestivum
tctcttttcctcccacgcgttctcccacgcgtccggcggcgcctaccggtgcccccggagactgaagagcccagccgtccgcccgcccgcccccgcgatctccggtccctactcccgccgtcccgtcggtgcactcacattgtacactgaaggcagggctttttgtatattaaaattagcattagacccttcatgataagaaaccatggcaccaggatgcatggcatagaaaatagcagcattgtatgccggggcatggatgttcaatgttgtaacttcggttggcataatca

SEQ ID NO: 451019 - DNA, 400 bp, Triticum aestivum
tttacgcgtccgccgtaccattcttacctcaaacaaatccatcgactctgaatcccatcgctccaccatattaatttgcatctctgtggtgttggcgatgccatcaagcgccagggaggaagatcgtaacgcacccgttgtgaggaatgctgctcctccactggttgcctcagaagccaagatgattgtggccataggccatgaccattgccagcagttgaaggatgtgttgagcaaggaggatccttcgaccatggtagtggtgatggcctcaagcaaccagactcctaagccgcccaagcctcgctcgccggtcatggattccagactgctagcagtggcctgctctggttcgtggaagaaactgcaatcatttctcagtggggaagaccgtcaaacc

SEQ ID NO: 451020 - DNA, 363 bp, Triticum aestivum
ctgtcgcgtgggatctcacattcgcgatcacgtagccaaactgaaacaaccaagagaggaaatcttttcgaaacccaaaccctaggtgctcgcggggagcgccatgaagatcccgtttgtgaccaagtggtcgcaccgatccagcgagcccgcggggccgtcgaattcggctgcagcgcatcagcagcagcaggcgccatcgtctccatcggcgccgtctcctcctcctcccgtggcgtcgacagaggcggcaggggatgagttcattttgcaggaggaagagtaccagatgcagctggcgttggcgctatcagcgtcggcgtcgggcgccgaggaagctggggatcccgacggggagcagat

SEQ ID NO: 451021 - DNA, 426 bp, Triticum aestivum
gttgtttccatctcggtgctaactagctaggcttctgccctcgcatagtcaccccgattcagaaacaataatgttacccaacactcgccatctgattcggctgcttaccatcctcttctttgtgatctgcttctgccgactttcatcctcgcgcgactcacactgcaccggagtccacgacccgcgtaaacccccaatgttattctgcccaccatgctgctcataggaagggtaccggttctagataacggaatgtgcgtatatatggatggcggcttgtcttagaggcatctgtcgctcatagttttctccaagaccattgctcatgaaatcttctactgcctataaatataaatggagtgttcatcattcttcagaagtatttatgtactttccacatgtgtaatcctttcaatcaattacaac

SEQ ID NO: 451022 - DNA, 487 bp, Triticum aestivum
ttcacaatcattgccatattagccagaggcgctatacttactataaatgctggtatttatgggtgagttggttaagcaatagttcagctatcccattgagtgtggcacaatcatttcactgtaacacattatacacatagtacaaacatacgtagattatcccaagttattagtaatgtcccaacactgcaaataacagtttttacctgtaactgcatctgtggtatggttttaaatgcgggaccagtccttaaaatgtacatccacagtcccttttgtgcctatattccgcacatcacccttataaattcttctggccacagaatcaatcccaaagttattaataatgactcaacactgcaaataacagttttcgcctgtcattgtgattgtgatctggtttcaaatatgatattagtccttaaatatacatccgcataattttgttattagccctctcgtgcatatatgctgcacatcattcttc

SEQ ID NO: 451023 - DNA, 339 bp, Triticum aestivum
ttctgtcgaggggcacgcggagagagagagaagagagttaatgcggccatttcttcgtcgacctcgtcgcccccgcgcaggcgtgctccgtcgtcgtcgtcgtcgcggccgtcaaaggagaacgattccacacggagttgctgtttttatccgagaagcccggatactcgggattgcgcgggggaggcagcggtccattcctgcggtcgactcggttcttgataggctagtaaaaagagagagagggagggagggatggacgagaaggcagccaagatggagaagctctcgtcggcggcggctttcgtggagggcggcgtgcatgacgcctgcgacgac

SEQ ID NO: 451024 - DNA, 128 bp, Triticum aestivum
gtttgtggttacagcaaccgcgtggtcgacctgatccgccacatggccaagactcagtagagtgctctgctttccttcgaggcccctggtcagaggtgtccctgctttgggtatgcgaagaataaatg

SEQ ID NO: 451025 - DNA, 449 bp, Triticum aestivum
gtgttccagaagcacaagccggggtcacatcaactgaaggcgccaggccagcatcttcagggaggtcacttgagagaagatactcttttcttcaaagcgacgagcgccgtttcgtggagagcaggcctgagtgggtcggcgggctatcagatttctgggacagcataaccattgcatacttgtcaattttctgcagctgctgtgttttcgggtggaatgttcagaggcttgggttcggcaacatgtacgtccacattgcaacattcctgctcttttgcctggctccgttcttcatcttcaacctggcagcagtcaacatcaacaacgaaaccctgcgagaggcgctggggctcaccggcatcgcgctgtgcttcttcggtttgctgtacggcggcttctggagaatacagatgaggaagagattcaacctccctgggaaccccttctgc

SEQ ID NO: 451026 - DNA, 432 bp, Triticum aestivum
tggttcacctggccgtatttcggaaatttcagcggcgggcaagctacaaactcacaactggcgttttcttgtactggatgaagttgaccagctcttatcatgtaattaccgcgaggatatgcataggatactggagcatgttggaaggaaacctagcacttcatcttctagtcacatccttggaccacttgctaggcggtgtgaacgtcagacaatcttggttccagcaacagtgccgttttcagctatacgcgcaaccaggagtcggggccatgatccagatcttgttagggctaatagtgtacgtccgcttgactagatcactgttccaaggccgatgctgtcccagggtgaccctaactgtgattctgcaacaatgtcagagaatcaagctgcagttgacagcttaccaccatccttggagcattacta

SEQ ID NO: 451027 - DNA, 373 bp, Triticum aestivum
ttcattcgtccgcggacgcgtgggttccttccatcgaggcaaggcagatccagagtcacggagagatatatagaagtagaaagatctcagctgcaaacggggagtagtgatagtctagattctagaggacatggcggcacttgtcactccggctgcttcagtggtgtccgggctggtggtgcggggccgggagtccgccgccctcctcgaggccttgctccaggggggctcgccgcaggagcacggtgggatccgggagctcgccgcggagatccttctctgctgcgaccgcgcactcgccgcgctccacggccgcgacggcgtgcacgcggacgcgctcgccagcaggaagcgcaagtcgtctgagcccgac

SEQ ID NO: 451028 - DNA, 409 bp, Triticum aestivum
ttctttgaaggaggaggagagcatatgcctacgtttgtctgtctggccaaccaaggagggagggaggatgcagaggtacaccactagggacatatgggagatggaggaccgccagagcccgcgcatggggtgcagcgtcgtcctcggcgttgacggcggcgccagcaacaccgtctgcgtctgcatcccggccgtcatgcccttcgccgacccgctccccgtcctcgcccgcgccgtcgccggatgctccaaccagaactccgtaggagaggacaaggcgagggagacgctggagcgagtgatggcgcatgctctccacaaggctcgccggagacgatcaaacgtgagcgcggtctgcttggccgtagccggcgtcaaccaccccatcgaccagcacagaatgctggac

SEQ ID NO: 451029 - DNA, 364 bp, Triticum aestivum
tccattcgtacgcggacgcgtgggcttaggcaagaaagcaagccagcagtctatacatatttgagtcacatagaagcaagacctggttcttagaggttccgcgacaatgcgacaaatgacgaccatttcggttggcattgttgtgcttgccacacttgttttggcatccgagggtcgcattgcccggaaggacttaggcctaaaccttggtggtgtaggcttggggaccgatacaggtgtcaatatagggggtaacattggcataggtggtgccggctctgcatcggggtctggttctgcgtctggatcagggtcgggatcagcctctggttcggggtctggctcggggtctggttcgggcgct

SEQ ID NO: 451030 - DNA, 405 bp, Triticum aestivum
tcagttcgggaggagcccacctgcttgaagatggcgtcggagctcaggggactctccttcgccttccagtggactggggcagccgcgcggaagctgaacgcggtgaagtccccggggccgccggcggacgaggtgtccccgcttgagtcgcggcggcggtgcgacgaggagggctcgggggggccggactcgtccccagagtccgccgcgaagctggcacgcgcggccaccgcggcaccggagctcagccggcggcgaagcgcggccacgaagccctcgggggtgaagccgcctccacgcgggcgcggcgggcgccggtggactggcggcggggccttgatctcggcgccgttcgagtcctccattcaaggggctaggtttctctctctgaccctctctctctat

SEQ ID NO: 451031 - DNA, 457 bp, Triticum aestivum
tcgtagagagaggcggccctccctccgcagaccacagtccacaagttcttctctgcttttgtctggctctggtcgcgtctgctcttctggctttcggatcccggagagacttctgctggaaaggagagtgaaatagaaaatgggtgtcgggaatggatcagcagacgtgaaccagcagacggcgcgcaatgaaatacgagatgagaccgcgccgcttcttccggtcaaggtggaggaggagggattccatgagtttaatggagcttcattctccggggcagttttcaatctctcgaccaccatcgttggtgctggaatcatggccttgccagcaagcatcaagatgctgggcctcatccctggccttctgatgatcatctttgtggcactgctcacagaggcatccattgacatgcttatcaggtgcagccaccaaggaaagatcacgtcatatggg

SEQ ID NO: 451032 - DNA, 144 bp, Triticum aestivum
tcttgacggaataatacagttaactttttcccgtacatggtcgtcatgcctttgttttttctgtgttgtattgacaatttggattgatgtacatacatatcagatgatccggtgttaccgcaaagaatgtggctctagttttcc

SEQ ID NO: 451033 - DNA, 479 bp, Triticum aestivum
gtctagccagtagagagacggactagactagaccagatctcgtagcggggtctccggccgcctccccctcccggggccagcacgccctgccgtccgccggcggcctgctcggtcgtcggtgagtccgtgcagcggcccgaagaggcgcgtgctcgctccaagggcgaagggggacgcgccggatctcgcggggcaagtgcgccagcgacctgaggtaccttggtatggaatgaagtgaagagcgcagagtatcttggtcttactaatcaatgcatcatattatgtgcgcaataagattttgctatgctttcaccgtcgatgcccactggttggatcatgcttctgtttatgagctcattgaagtaactctctcgtagctcaaatgggccaattcctcatttgcgtggcacacaaaaccttcagctatccatctccatatcagttggtctctcttaattttgtaatcttctggaaatatg

SEQ ID NO: 451034 - DNA, 388 bp, Triticum aestivum
caaaccgcaaaaaccattggagcatcctctgtcttcctcctctgcctcctccttcctctacgtcttcctcctccacccccttcctcatctcaaccccacttcaactacagatccacctcgacctcgagcggcttcccatggcgtcgccctccggaaaccctaatcccaaccccaaccccaacgtccccttcgagctcagcaggctcttcaagcctcccccaaaccctaaccaccccacaaccgtgccgacccccactggcatcttcccgggcgccccgcccggcgcgccgatggtcaccgggccgccgggcccctactcctacccgcccgccaccccgcccttccaccgcaaccagtacctcaactaccccaccgatcccaacgccgt

SEQ ID NO: 451035 - DNA, 337 bp, Triticum aestivum
tcgtccacgcgtccgggagcattctgtgataacacctcaggggtgactggagccacaagctggacatgtgtatgcactgtaatatcgctaggtgaaccaaactccaacagcagcctgtcatccagttgcgactcctcgtgccattgcctacgagatgaaaacggcggcacagggtcatggaactgttcgtgccgctccgataaggcccttcaggaagaagaagatggtgtggtgcacagcacgagttgcttcacttcctgtaactgcacatctggaaattctgaacaagggaggaagcatttctctagcaaaacagtcattgcaacactcctggtat

SEQ ID NO: 451036 - DNA, 282 bp, Triticum aestivum
tcttcctagcgtccctagtataaaagtcgtaaagaaaaggccggcggtagagagcgagcacaaacaaacacacgagcaggcgccgcgcggcgctcactcacccgcagatctctcgcccggccctctcgatccacctgagtttcccgacggccgcaccgatctgacggtggcggcggcagaggaggcctctagggctagagttttggcgtgatgcagcggtctgggcggggtctgcagcggtcgggttcgaagcgtgtgctcgaccccaccaacggcactggc

SEQ ID NO: 451037 - DNA, 322 bp, Triticum aestivum
tgcccccgcagccgccagcgaccaagagcggcggcgaccggtcggcgggcgactcggctcccctgattccctccggtatggacggccaggctccacaccccatcgccgtcgcacccgaatccctgccgcacccacctccgactctggagacggaggcggaggatgaccccgtcgtcgtccccgacacctccgatgccgcttcttcggagccctccaaggtcggcgccctttcgacgtcgcctcttattaaggcggaggacgacccagtcgtcgtccccgactccgtcgaacccgcttcttcggtggcctccgtggttagcgc

SEQ ID NO: 451038 - DNA, 53 bp, Triticum aestivum
tcctcgcgtccgatttttttttgttttttttgggtgttttttttttttttttt

SEQ ID NO: 451039 - DNA, 395 bp, Triticum aestivum
tcgtagaccgccccgtgcgttcagccctttcctctccccattctccacaccggcacaccccacctctgccgccgccgcgcgctcagatgccaatcctccgtcagatttttcgtctcctccggcgacctggcgtcgccatctctcatgacccactgcgccgcctctcctctacctcgcgacctctcctctctttcatggcctctgccccgccttactggtcgccacaaccgcttgcacggcgaagtttccctctcatgatggttccagatctacctgtccgtcgtgtttcccgatttccacctggatctcggagcatgactagtgggacaaccttgcaagatatgaatactatagccggcaaacatgatgcatcttcgaatattgtggacatctct

SEQ ID NO: 451040 - DNA, 396 bp, Triticum aestivum
tttcatctcctgtgatataccgatggctcagttcattgtcaatatgaatgcgtcaatgcccgcaaaggagtatttcaaatagccattcttgaccccacacacatgttcatccagcctaatatgggagattacatcaaaagtaagatggcggagttcagagaccagaacagctatgagaagccaacgtgaagggccaccatccattaccgcggtgccagcttccatccattaccgcggtgccagcttcaagaaactccatcaagagatacctatgttgattatcgctatgtagaatggttatatgctgagactgaacgtcatgtctctcttgtgatgttctgtttcctacttctgagccaatttatgatacagagttctgcgtcttatgtatcttcg

SEQ ID NO: 451041 - DNA, 315 bp, Triticum aestivum
ttattagcgtgcccacggctgtgaaagtgcaaccagctccattggtgccgccgcagagctcacatcttggtcccagccagagtcagcatgctccgcagagtgctggctcaagcatggccgggcaagaagctgctggggctcccagacctgccgggacgcagtttggtggtgggcagtcgacgtggcaaccgccggactgggcaattgagccgcgccctggggtttactatcttgaggtgatgaaggatgggagtgccattgataggatcaatctggacaagaagaggcatatatttgggaggcaggtgcctgctt

SEQ ID NO: 451042 - DNA, 352 bp, Triticum aestivum
taataacagtgggaaaaagaggctgggctcctcgaatctctcaccatctatctcccgtggcttccttgtctgcctgcccacgacttgcctacgccttgccttcggggttggtgagcgagcgagctcgggatcagttggcgactacacacccagagttccaggttcttggaggaggggggaagccatgggcagcttcgccaagctggccaagaggtgcgtggagacggaggcgccggtcatggtgaagatacaagagctgcttcgaggggccacggatgtgatgtcgcttgcgcagggaattgtttattggcaacctcctgaggcagccctgaacaaggtcaaggaaattgta

SEQ ID NO: 451043 - DNA, 416 bp, Triticum aestivum
tcgttgacgcgtggcggacgcgtggggcgccgccaagcttgggtcctacaggagcaactaagccggccgtcgctccggccggactgaagtgtagatatgtgcgaagaagaaggccgcctccagcaaatgcgctatggttgctcgatcccacacctttgtcctgttcagtggctccagtctttgcatcatcagctgctaccgttcctcggcttgtgcatatgtcgatgtgaccgtccattcgtacgtcgacgtgttccggagttcgccatgtttgcttgctgctgtttcttccaagtgtgctatccatttactcgctctatgtatgtatgtatgcatgtggagaatttgtgaatcaaagaattggtatcgtttgtgaaattttattttacttgcaaagaaagagcttccacagcttc

SEQ ID NO: 451044 - DNA, 354 bp, Triticum aestivum
tctttgggttcagagatattcgattatgtgagcctgtgcttgtgttggtcgtgttcaatgatattgtgacggcttctccacttgaatcaaggacctgtatgccttagcattcaaatatgagtagcgatttccagttacaagtttgctcgacaatattgagtaggatgtaagcacatataaggaccagttgcaaagaggcgggcctggacatctgagtatgttgtgatacatagatatacgtacctgcactaggttattgtgattctgtttcaaataagttgtaccttgtgtaaaagacacagcttgtaaggcttgtctcttctttgctaaaatatatataatccctcatagtat

SEQ ID NO: 451045 - DNA, 283 bp, Triticum aestivum
tcgttgacgcgtgggcggacgcgtgggcggacgcgtggtggaagctggctgagagtgacggagtctgtcctctcttcttcttcttccacctcgcacctccttcttgttgttcccgtcacggtgcagcaagcaaacaaaccaacagatcgacacagatccggtggcctcacctcaccggatctccccgttccttctcgtcttgctctcgactcgactggagtggaagcaaagcaaaggaaagcaattatcttgactgattgatggggaagaagcccaagtggct

SEQ ID NO: 451046 - DNA, 363 bp, Triticum aestivum
  unsure (1)..(363): unsure at all n locations
tctttatcatgcggatgagaaggataacaaggatgctgcaaaacgatttgggacaaggcacgcccttgttctttatgacttcgcacctagcacacgcacaacagatttggaaaggatctttgagaagtttggagaccatggagttgccatccgctgggtcaatgattctgttgcacttgcagttttccggaccccatcatctgctaaggatgcacaagcttgcgtgcctccaagatacaaagtacggtcactaaaggataatgacgatctcttggcaaaaatcgacggtacagacctagaaccgccgacaccaagaccaaagacatccgcgagaacggcgcanaggctgatcgcccacgggat

SEQ ID NO: 451047 - DNA, 387 bp, Triticum aestivum
tcgtagagatatggagaagtccaaaggacaaactgtggtgctcagcactggtttgaaggacaaaactcctgcctcagagatgatgggggatgctgatgaggaggaagaagaggaggcgttggaggatttcaggatctccgaggatgatgatgatgaagatgaaggagaagatgatgaagtgactcattttggcttttaaggttgattgagttgaacagggcatttactggagggtgttcaggaggacccggtcgggagtggtgtttgtttcgaggttattacagtggaaatgaaatgccatcgatatcactaggtggatcactgccgttagtctgtaaatcaactcgcactataccaaactcgctgcaatctcatgatgaactgaac

SEQ ID NO: 451048 - DNA, 432 bp, Triticum aestivum
  unsure (1)..(432): unsure at all n locations
tcgttcacgcgtccgcgcaacacactgcaccgcagcgcgcgcacaccatggatctactcctgccactcgtctcgcttcttctgattactggaggaggcagtcatcatgtgagcttcgccaatgcggccacggcgaactcggtgacgccgagggcgtactgggaggcggtgcttcccggaactccaatgcccccagccgtcagcgacctgttactccaacaagaagtgcgtgcctctctagatggtgttgacctcaagtttgtcaaaggactacgaaaaattggaccatattataagaaactcaagtcagaagctgatcaaggggaagaccatagtcatgctgcatcacaagctgaacataatttcaaggaggtctctntgtcgtatggatcaaaaggtggagacaatttaaaggaggtctatgtgtcatatg

SEQ ID NO: 451049 - DNA, 245 bp, Triticum aestivum
ttatattccctcttctcgctcgttagggttaggtctcccccggcgcggcccaatccgcaaatctcgacgacggcgccaagcagcgagcggatccagtcgatctagtcccgcgccgacgagcctatggcgacggcggtgctcagatcccacgacgcgctcgccaacaggatgcatctcgacgccttcgccgcgtccccccaggccgccaagcagcgccgccggcgccaccccaagccggcctcgcc

SEQ ID NO: 451050 - DNA, 106 bp, Triticum aestivum
tatatgtccggccgtagcgggtgatagccccgtacacgtagaacactcattgtccttgagtaaggcgggacacgtgaaatcctgtctgaacatggggagaccactc

SEQ ID NO: 451051 - DNA, 396 bp, Triticum aestivum
ttttctcggcgggagggcgagagggagaggggctgacgttaccccccgcacagatcatcaatcaaaccggagcgagctcgcgtcaattccaccgccagggcgcgcattaatcagattggagtcgcggcctgagccgctccgcccgcgaccacccctcggatcgacccggcggacggaggaggcgcgcgcgcgcgggctgcggagcggggcccgggggcgactaccccactgcatcggcgatgccgagcggggcgtgcgcggcgcccgccgcccccgaccccgaggaggacgcgctgtttatcgatttactacatgaagctcccctgtctggccatcgagagcctaggagcatagtcagtggcaccttgtactgtatattgttggtagggtatgctg

SEQ ID NO: 451052 - DNA, 380 bp, Triticum aestivum
ctccaggcattcttttttcacaatgaataatgtctgctcttcgactggagcagttcttccctgttggtaatcagaggatacatgctactaattcttcaactgaaattaattttcagtttgatccaagagcaaatcatgaacctcaagttttcttagcacctatgccaaagagaagaagattgttgcttctggttgtgagtgaatctaagagttaacatggtacaatatcttctcgaagatgatgtattccttcataaaaaaggatgttcgagaagttattattgaagaggagttcagtctcatgtgattctcaagagctaaaatggaacaagaagtgcaggcctgtcatgtctacactaactaatcagaaaaaacgtggt

SEQ ID NO: 451053 - DNA, 309 bp, Triticum aestivum
tcgtttgcaggcaactccactaccctctcccgttacagtcggcggcgcgatggccgagacggaggacttcgcgagcggtgacggggaggtctggcgtgcggagctgggcgcgtacgaccggcggatcgcggtgctggacaagcccgacctactggacgccgactacttctaccgacacgacctccccctcctgctgcacggtcgtgacccggacccctacctcgccaagcccgagctggtgcagttcatgcagtggaagctctatcgcgggaagcggaggccgaggctgatggatttcgtgaaaagctt

SEQ ID NO: 451054 - DNA, 250 bp, Triticum aestivum
tttgttatcatctgtgacgagaagctcaaaaccatctttcctgggagggacacggttcatatgatggaggtcaccaagctcttgtcccctcatttcgtgaagactatctaaggctgtcgagtggggggccaacgcttgtgctttctgcccagggctagcgttggaatggaaggcttcttttgcgatccctgtccaagtcatggttctactaggtagttaagttaatacggagttcagacttcagactttg

SEQ ID NO: 451055 - DNA, 218 bp, Triticum aestivum
tcgttggctgagggtggtggcgtggagggctgctgggccttgcggggcatggtgcttgggggctggcgtgcttggatgcggtggtgggtgcgctcggagtggcggcgagggtttcccagatctgatctggacggtggtggatcctccggccgcttattcgcgggcggcatgggctgcggcggattgggcctgccagcggcgcgcgggggttgctacgc

SEQ ID NO: 451056 - DNA, 335 bp, Triticum aestivum
ttttcaggcaactccactcccctctccccttccagccgccgtcgcgatggccgagacggtggacttcgcgagcggcgacggggaggcctggcgtgcggcgctgggcgcgtacgaccgccggctcgcggcgctggacaagcccgacctcctggacgccgactccttctaccgccacgacctccccctcctgctgcacggccgcgacccggacccctacctcgccaagcccgagctggtgcagctcatgcagtggaagctctcgcgcggcaagtggaggccgaggctgatggatttcgtcaaaagcttggatgacaaagttgtagagtcagcgtcac

SEQ ID NO: 451057 - DNA, 309 bp, Triticum aestivum
tttcacgtaagcatctacggagtagcacacattacttgcttagctcaagaaatggccaagggagcggtgatgcttcttgtgctcttcacggtgctgtcagcggtgagccaagcccagctgcagcacgggcccggccacaggaccttgtcccacgggcaccgccggtccgccgaccgagcggcgccgacgcacctccacttcttcttccacgacaccgtgagcggcgcgtccccgtcggcggtgcggtgggggggtccggccgacccgtcgtcgcggaccttcttcgggatggtgaacgtgatggacgac

SEQ ID NO: 451058 - DNA, 356 bp, Triticum aestivum
tgattatgtgccatgagatgggggtccctttcctcggcaaggtgccgatggacccgcagctgtgcaaggcagccgaggaagggaggtcgtgcttcgccgaccagaggtgcagcgccagtgcgccggctctgaaaagcatcatcgacaagctgatcaaaaccaagtaagcagacagtgtttgtgcctgttggagaagtaccactagtcaaaaatgtaatgatgatatctgggatgtctcgttgtacaattgcttgttacacgcccgagtggttttgactctgttcttagtttcctaaagctttttggcttgtgtatccgggttttgtttcagaaatattgagcgttgatgcgataga

SEQ ID NO: 451059 - DNA, 233 bp, Triticum aestivum
tcgtcgccagcaagctgcttgctttgcttcgggtagctcgctgcgcggcgccgctctcggctcccccgcggccaggctgctaggatggcggggcggccggggtacgtaacgctgccgataatctcggagttcgccgcgatcgggtacagatactacaccgcggtgttcctcgcgatccccgcgtggctggggctcgccacggcggcgggggtcgtcaacgtcgcggcctacac

SEQ ID NO: 451060 - DNA, 118 bp, Triticum aestivum
tcgttgacgcgtggcgcggcggagctcgagaggggcctcgtttaacccaacggggtcgtggtcatcaccctccaccgtgccatggccctcaacgccatgaacctcgaaatggacctta

SEQ ID NO: 451061 - DNA, 151 bp, Triticum aestivum
tcgctttgaaacagcaacagccacagccacacgccgagttgcacacaccagatcgtcgacatgctatggcaaaggcagcggcaacgagggaggagatggtctactcggcgaagctggcggagcacgccgagcggtacgaggagatggtcga

SEQ ID NO: 451062 - DNA, 284 bp, Triticum aestivum
tttcctcccacgcgtccgctcatcagctctgctggagttttctttcttctacggctcacctttctgcctttctttctcttttctgttcaagtttagctagcttgccagggctgctacctgctcccgcgcatctcgatctgtttttagtcgatctagatctgcatccgagcaagcaagcaagcttctccattttcttttgcttttgatacacacatacattctagtacatctctccgcctgtttttgttggttggagctttgatttcctttgcattcctagttca

SEQ ID NO: 451063 - DNA, 280 bp, Triticum aestivum
  unsure (1)..(280): unsure at all n locations
gcggccagaactaaaangggcatggttggatttgaagaacatgtcgatgcgtggacgccgtttcttcctgaggagaaggaaacgctatcatctacagggagtaagagggagcatgaacggggaatcaacacggccatggatgatctgctatctagagggagccctcttctacaggttccatcccaaggtctgcatatccagtatcctctccccacgcacacaaggtgtgcgtccatctgcctgaaggcaacgatggaggcagaaaagagccttcaggagg

SEQ ID NO: 451064 - DNA, 468 bp, Triticum aestivum
tacctcccacgcgtccgcccacgcgtccggttggcattgcttgccttccattgagtcttatattctcgtttgtccggcgtccaaaggctgtcatcacacgctcacagtatataaaggaagctactgaattaggtaagaaggccaaggaattgaagaaggcagcggaagcccttcaccaagaagagagaagtgggaacaaaggcagaaaatggcgcaaaaacgtgaaggctgtcgagaaggagttgttacttttggaaaatgacatgaatgctctagaagagatgtaccctcaaggagagaaggcagaggctacctgggcttttacagtgcttgcttacattgggaaactcatattcggcattgttgggttaattgtatcgattgcttgtgttgcacatattatcatatacttgttggttgatcctcctctatcttctttcctgaatgagatcttcataaagctggaca

SEQ ID NO: 451065 - DNA, 100 bp, Triticum aestivum
ttccatgtgaacggcacttgcacatgggtatgctgatcctaagggaccgtgtaaccccggcagatagcgcgatcactcgcatccccccaaagggaatttg

SEQ ID NO: 451066 - DNA, 253 bp, Triticum aestivum
tttcctaccacgcgtacgcccacgcgtccgaaagaaagaagattgcgaaggctcagaaaatgacaaggccaagaaagggaaagataagaagagcgagagcaaagagaaggataaaaatagcgccaaggagactggacctgatgcagatgacagttgccccaagaacaaaaagaaggataaggacaaggcaaagaagaaggatgaaagcgatgaaaaacaagagaaagacaaagactaggtggaacatgagaac

SEQ ID NO: 451067 - DNA, 297 bp, Triticum aestivum
gactggcaagggctcaccattatttactcttcctaataaaaatacaaatcatgatctacatctgcaatcgctctaacccttccatctagctacatttctaactagccctatactaaagacaagcagacaactacactaaccacattagcttcgtcccagctaccatcggtgtcaggtactccgacttgatacatccgtatttagacaaatctaagacaagaattttgggacggagggagtaacatctaatctaatttgtcgaaggcgccttctgctcgttactcttccccagcccca

SEQ ID NO: 451068 - DNA, 162 bp, Triticum aestivum
tctacggcctgctcatcaaggacaaatacgtcgcgctcccaaacatccttggctataccttcggggtgatccagatggtcctttacgtgtcctacatgaacaagacgccggtggcaagccaggtcaaggaggggaaagaggcatggtaggcgcccgcagagg

SEQ ID NO: 451069 - DNA, 189 bp, Triticum aestivum
tcctcggaccgtgggctcaccccgaacccgcaggtctttttcgatgccgccgcacacaagatggtgaagggacgcaccggccagtgcggaggctctacgtccgcggaccatcctaggatacaagcggtcaagtcgaaccagtcgagacggcgttttggtgcagatcgagggggtgaacaccagggagga

SEQ ID NO: 451070 - DNA, 107 bp, Triticum aestivum
tttcctcccacgcgttcgctcgatcgctcgctcgtgaacgtcttccgagccaccgctccccagtgctgccggccatggacgcctccatcttctccaccacatcctcc

SEQ ID NO: 451071 - DNA, 105 bp, Triticum aestivum
ccctactttccacactccctgccccacagagaagagaaccatcgagaaaaatgccgcgccacctgctgcagaagcccgttgaccggctcgccgcactggccgcgc

SEQ ID NO: 451072 - DNA, 212 bp, Triticum aestivum
ttcctcccgtgcccgaaccccagccccagctccgggcaggcgccccgcctcgcccacccgcgcctcgcgctctcccaccgcatggcggcggcaccagcggcgatcgccgggccctccggcgactccgagcgcgacctgagcgcgtccgcggtatcggtagaggcatttggggccgtcgaatcctcgggcgatggttcggggaggaaggagcc

SEQ ID NO: 451073 - DNA, 310 bp, Triticum aestivum
taccttagcaatatatttgcaggttttaggtctaagtgaaatgtatcgatctctgtgaatatattgtaaaccttcacaaattcccttgattatttcatagcgctattttaaaataaatgatttgtattggaaaaaccaagttgtccaatatacatattcatgacttgaaaaagtaaaaaaatacagtcattgtatattgtgtttgacttagaaagaaagatgaaaaagctaaacaaaaagatgtgaaggctgatgaatgctttgcttatgcatgaatccatattgataaagcgctattgaatgatcaagg

SEQ ID NO: 451074 - DNA, 138 bp, Triticum aestivum
ccctgcatgacagcacgaggatgcattatcacaatatggaattgctctgcaaattgctgctgaactggaatcttctgaagatatatcctctgcatgccattcaaatcgtgctgtatgtttcttgaagttggggaaatc

SEQ ID NO: 451075 - DNA, 188 bp, Triticum aestivum
acctacctttgcgtccgcccacgcgtacgtggttctagtgattatgagataacagtcgaggatgctcctcttgcgcgtactgaactcccccaagatggcagagccccacctgtcgtaacaactgatatggaagctttccatgataaagctaagatgcaagtcattaaagaaggccatgggaagatacc

SEQ ID NO: 451076 - DNA, 212 bp, Triticum aestivum
tgcctcgcccaaatcccccaaaaccctagccccgaggaggaggaggcggaggcggcggctaccatggctgccgcagcggcgaacctggcgggccggccgggtgtgcgcgtcgtcgtcatcggcgaccccggcaccggcaagtccagccttgtcgtcgccgtcgccaccgagcagttcccccgagaacgtccccaaggtcatgccccacaccc

SEQ ID NO: 451077 - DNA, 73 bp, Triticum aestivum
tcctgagatcccactagcgtcctcctcacccaggactgacccaccgcgccggccccgactccgactccgacac

SEQ ID NO: 451078 - DNA, 72 bp, Triticum aestivum
tacctcccacgcgtccgattggtacctctccgacgccttctttttgggatcagttggcctgaagatcagcag

SEQ ID NO: 451079 - DNA, 257 bp, Triticum aestivum
gcctaagaggagcttgcacaggtaaaacatcttgaaaaatctcaagggtgaacgaagtttcttggcgggcatgcagggcacgagagacatgtctgccaagggcggcaaggccctggtccagtcggacgcggggaagtatgtggcgtggtcgggcgtcgaccagccggagctcgctgcagaggggctcgggtgtggcttgctcctgctcaggccgctctcctttgcgctgacacactacgccgactgccacaagttcg

SEQ ID NO: 451080 - DNA, 369 bp, Triticum aestivum
gttcttggtctctgtttctccagtctccccaccgtcctccctcatcccaaatcgaaccgcctccccgtcgcatcgatcccaatctgaccacccccaaaaccctaaccctcactcgcctcctagcacggcggcgagtcacggcggcggaggcttgagatggctgcgcgggcgtaagcatttcggaggcgatcgcggaggtgggggcttcctgtgacccgccagcggtctagctggtgccggcccgtgcccgtgggtatggcgacgtcgtcgtcggctagcgggggcggtgccgccgggggcgcgcctggactcaagacttacttcaagacccccgagggccggcataagctgcagtacgagaagacccac

SEQ ID NO: 451081 - DNA, 276 bp, Triticum aestivum
ctcacgcgtccgtgcacacttctctcccacccccaccaggccacaaccatctctccctcccctgtttctcgccttatctccattgccgcctgctgcgcgcttcagcctagccaaggaacgaggaggagcgggttgttgtcatggcggcgtcggcggcggctgtgatggaggagctgcggggcagcttcagggaggggcggacgcggccggccgagtggcggacagcgcagctcagggcgctcgtcaggatgatcgaggagaaggaggacgacatca

SEQ ID NO: 451082 - DNA, 314 bp, Triticum aestivum
gaaaaattggatagctacgtgcattcgccagaccaaatattttacagtaccttgcatcacagaataacaacaaatatttgaaatttgaccatagaggaacactacaatacagtcaagtaaaatatctgaacattcttagtttaccgtccaaaatacttgaaccacaggccggcattcatatctgacttgttctatttctcgcagatcatgtctttatgcgcaccacaaaagaacatgctggaaggtttgacatatctgcagagacagcacacggaattcccaagtttgtgagagcacctcttattaacccacat

SEQ ID NO: 451083 - DNA, 346 bp, Triticum aestivum
tgtgcgagcgtctccggaggccccaaccctagatcgagcagagcggccgacctcctccctcccacgcccggctgctaaaggcagcgggcgaggtcagcgcgccccgacgagcctccctcgcgcgggggagcggcgtcaagggggcgtcgcggtggggatctccggtgaggcggcgcgcggcgaggtgcgtatggcaaggcggagcacggccgagggctcgaagtggaggtgctgggcacggtgttcttcgcggcgtcgggcggaggttggaggggctgcgcacccaggccctagaggcagcagatctcggccaggagaggccgcactggcgatggccgggatttgc

SEQ ID NO: 451084 - DNA, 209 bp, Triticum aestivum
tgtcagtcctcctcggtcctcgcccccatccaaatcccccgccgcccccctcgcggaggaggaggccggcggccatggaagaggagaggaaggggttccagccccacctgatgggcctgggcggcgggaggctgaggggcgcggcgggggcgatgggcctgcagaagcagaactcgtggtcgcccgacatcgagcgggacgaggcgtgg

SEQ ID NO: 451085 - DNA, 181 bp, Triticum aestivum
attgtactaggtctcggtcattcctctctctctctcccttgcttggggaagaagaagatgatgatgagagggcaagcgcccccgtctcccgacgccgtcgtcccttgccgccgatctgatctcaggagccagcgaagatgcattccaccactctgctcctcgaggagcccatccggatggt

SEQ ID NO: 451086 - DNA, 247 bp, Triticum aestivum
gtcttcagcgagcggctgcagcggctggcgacgccgtcggccccggcggaggacgacgtggacgtggacgccgacggcgacagtaccacttaccgggacatccacccgtcgccggcgccggcgccgttgcggcagccgtcctgggacgtggccagccagcgctcgctgtccttctactgcgacgagcagttcatgtccagcagcatgggccgcgagttcatggccatggtggatgcggggggcgcgc

SEQ ID NO: 451087 - DNA, 345 bp, Triticum aestivum
gtcctccgctgccaatggggatggcgagggccctgctgccgcagcgcgcgccgctgctccggcggctcctcatggccggcgcgctggccgcctcctgcacctgcttcctcctcgtcctccaggcgcaggcctccgtcccgccgcgctacgacgggttcgcctacggggtcggggccgccgcctggaaggacgccgtcctcgtcgaggccttcctcgacccgctctgccccgacagccgcgatgcctggcacccgctccggctcgccgtcgagcgctactccccgatggtctccctcatcgaccatcccttccctctcccgtaccacacctattcataccatgcct

SEQ ID NO: 451088 - DNA, 64 bp, Triticum aestivum
aaaaaaaaaaaaaaatttttaaaaaaaaaaaaaaaaaaaaaaaaaaaaaaaaaaataaaaaaaa

SEQ ID NO: 451089 - DNA, 374 bp, Triticum aestivum
gtcgcgcctccccccgcaccacctcgatgacttccgagacccggctcgcctgccacctggccaccccgacagcctccgcgagcatcctcctccgccgcgccaccacttcgcaggccacggcggaggggccctgccccccgcatcgcacatggccgcggcgctggaggaacgtatcggcgcggagatcgaggaggcgcacgcgctgctcggacagaaccagcgactctctgcgacgcacgtggcgctcgtgcaggaggtctccgccgtgcggcacgagcttggccacaccgctcgagccatcggcgctgcccagcaagagggagatctccgtattcgtgaggtctatgagaggttaatgaaaatggaagcagagc

SEQ ID NO: 451090 - DNA, 117 bp, Triticum aestivum
cgtgctgcaagccagttcatcctgcgagcactacttttacctgctgtacgaagcaggctagcaagcaactaggagctaaccagccaggcaggcgaggagagcatggcatgctaccac

SEQ ID NO: 451091 - DNA, 103 bp, Triticum aestivum
ccttggtcctccggtgagaggtggcgccgaagccggtggtgacaccgtagctgtcggtgccgttcatcatgctgttcatgacccagtcgctgctctccttgac

SEQ ID NO: 451092 - DNA, 52 bp, Triticum aestivum
tgggattatggatttctgggtggctatacatccagatgcagaaaccaagcca

SEQ ID NO: 451093 - DNA, 82 bp, Triticum aestivum
gcgttgtatacgactgcaacaacgttgtggagcaggagctcccctgtggaggcgtcctcatctaccagagctttaccgtgaa

SEQ ID NO: 451094 - DNA, 64 bp, Triticum aestivum
tcacgcgtccgcccacgcgtccgctggaataaaagcccatgcaggtctcaacatcgtccagtag

SEQ ID NO: 451095 - DNA, 427 bp, Triticum aestivum
tttctttatgatccaattcaatagcagcttgtctgcgattgttttttcctctgcgcgtgtatgctgcctgatctgtatttcttgatcagattgctgttgtaccgaatcattgagatagcaaatacatgtagcttagtgtcagatgtacttgatttattaccctgagctatgtttctcctagataataagcatttcaggcagcttggaaaccgaatccttagatcaatgaaatctgtagacttttatgttacatatgcatggacctatagtctataatatcttcaatgaaaatatatgctgctgccatagaagcttatcgaagctaggtttctcttagatactaagcatgtcaggcagctatgtagaatccaaatgaaatatgtagaaatttatgtactgtctgtaatatcttcaatgaaaaaatatg

SEQ ID NO: 451096 - DNA, 138 bp, Triticum aestivum
ccacaatctaccaaactctcttggagttcacgagcggcgctgcgatggggtcacacggcaagccaccgctaccgtacgcgtacaagccgctgccctccggcgccgccgccgccgacgccgatggtgagcggaccggct

SEQ ID NO: 451097 - DNA, 190 bp, Triticum aestivum
ctggtctcgtgggcggccatttctcggtcatctactagcaccggtcttgctatatatatatatatctctaccaaacgaaaccaaacccatcgatcgatcgcctgccttccttccagcatatacatcgacagacggtcgaagaagatggccatgccgccggcggagaaggtgatcatggtggacgccaacc

SEQ ID NO: 451098 - DNA, 316 bp, Triticum aestivum
tttgactccccgcccagctatagacaagcgcgcgccccgatcgaagggatggccggcaccgttgaggacagcgggaacacggcgccgtcgtcgccggccgggctccgcggcgccgacctggccctgagggtgcttctgttcgccgtctcgttgtcggggctcgtcgtgctggtcaccgtcaagcagacggagatggtgcccctggtcctgacgccgccgttcagattcgggccggtgcccgcccagttcaaagactcgccagcgctcatttatcttcttgtggcgctgtgcatgacgagcttgtatagccttctga

SEQ ID NO: 451099 - DNA, 122 bp, Triticum aestivum
tctacgcgtccggtattctgcaccggccgacagcttctgagatttgatctctatccctatatgcaattaatcttagttaagcaagcaagttactagctgctagctaacaagaaatagaaatg

SEQ ID NO: 451100 - DNA, 345 bp, Triticum aestivum
tgtgatagagagagaaccgatttgcctgagaagtgactcagtcccatgcttgtccccttcacttcctctatctctcactcacaggcgatgtcgacaaggacgagacggagatattgggtgcgaggggagctccagaaaacgatggaggtgtgcccgtcccgtcccgtggtcgacagggcgtggcactcctgtcaccaggaaagggattcaaatttagagtctggctatggtgagggccgtagtgcatgagggagaagctggggcgatggattcacgagaaactcacccaaacgccttcttcagtagctgcctgggcggacggcgccggctcgacctacagcgaac

SEQ ID NO: 451101 - DNA, 257 bp, Triticum aestivum
ctcttcgtccgcccacgcgtccgagctcctctcccccgctctcctccacccctcccatggccgcccccagctcctgggcctccccgttccacgaaaagagagcttagcgctgccgagccctccgtcctctccacttcccggctgctttctccgtccgtccggtcgtcaatcttcgtcgagcagagagagggagggaggaggtcgtcagattcgcgcgagatccatggggaagtacgtggagctgctggacatggggg

SEQ ID NO: 451102 - DNA, 280 bp, Triticum aestivum
ttgagagccatcgcggcaaccacaaacaaacccagctgaaaggcgcacacaccaccgtgcaggttacatgggaggaggccgcggtctggtcaccgggttctacgtctggggctgggagttcctcaccgcgctcctcctcttctccgccgccctctcctgctagcttctcgatcaacccttgaatcttgattgattataatccagttctacgcatacatagatacaccaaacttactagtattaggtagagagacatctgttaggtgattgtgattgagcc

SEQ ID NO: 451103 - DNA, 109 bp, Triticum aestivum
tccacgcgtccgcccacgcgtccgtctcagcagaaatctttctttggttttggaacccctggtgactcatatggaagaggcttctctcatagtggtgggttcccacagg

SEQ ID NO: 451104 - DNA, 169 bp, Triticum aestivum
gctccgcgctgctgcacgtcgtctccgggtacaccacgccggcgccggagttcttcttcccggcgagcaagcaggcgtgctcggcgtgcgggaaggacggatgcctcgggtgcgagttcttcggcgcggaggccgggcgcgcggtcacggcatcggacgcgccgagagc

SEQ ID NO: 451105 - DNA, 356 bp, Triticum aestivum
  unsure (1)..(356): unsure at all n locations
anttcaatcaccgtgtgtgacagaattaaacatggctatgagaggcaacaatgtcaagaccattgtgatgatgctcgtagttgtgggtgttgtggccatggagcaaacccagcaagtacaagcatcccactgttgttatgatctcaactcggtcgatacctattttaagtgccgcgcaaaatctgatagcactgtctcagagtgctgcggtgtttccgctggctatatatcagaagccgctggatttgaatgcaagcccggttatatagatatagagactgcactgtaagccaccaactactgcaagattgggtgcacggctttcttgtgcaacaaattaactccttctgggaaag

SEQ ID NO: 451106 - DNA, 326 bp, Triticum aestivum
tgcgcaacaacaaacaacgctccctgtgccaactcacagcacattactgtactgtacgaccggagtaccgggcaatgatttcaaacaatggctacagcctggacggggcagcgcctctgccccggccgtacggggaaattcaatggctgctgactgaccccgtcactgtgcaaatctctgcatacacacgccccaggagtaaaaactcgtatttttcacctcccgacggtgaatgaacttacaacaatttcgctatcgctttgctaaattcgggcgcaaaattgacctgcatcatggcctagctttctaccggtaaaacacttttt

SEQ ID NO: 451107 - DNA, 219 bp, Triticum aestivum
cctacgcgtccgcggacgcgtgggctcctcagcatcttctcatctggcgacgaagaggcgacgtcggggcgctcctgctccgtcgcgacccccacgcccttctgacctatgtcggatcagggaatacatgctgcttctgttcgagacaccctctggctttgcagtctttcttttttgtgggtcactcattaacccacctagatctttggaggacatatg

SEQ ID NO: 451108 - DNA, 107 bp, Triticum aestivum
ctgacgcgtgggcagcgcgtcgggcttcgtcgccgaggtcgtcaccctcttcatcgacgacgccgaccggatcatcgtcgacatcgggagcctgttggaccagcccg

SEQ ID NO: 451109 - DNA, 224 bp, Triticum aestivum
tacgcgttcgagggatttcatctccaacggcgttgatggaatatggaatgatatgaacgagcctgctatgacaactactactaaaacaatgcctgagagcaatatacatagaggagatgctgatattggtggtgtccagaatcattcttactatcataatgtttatggaatgctgatggcaagatctacttatgaaggaatggtgatgtccaatacagaaaagc

SEQ ID NO: 451110 - DNA, 346 bp, Triticum aestivum
cctctcgtccgcggacgcgtgggttcagctaagctaaaagtgagtgttgtcttaaagtgagatggagcaatatgaaaagcttccaaaaggagatatggtattagaggccctatacaacaactgcttgcaactggtggacacttcgctgagccatttggcaactgagccatcagttgacaaagcacacgagactcattctgtaccattttcattatatgctctctctagaatgggatttaacttgctgaagagaaaaaatgaaactgaaaaggagataagctcttgtgctgtttgtgttggtgcgacaaaatctgtggaggctgctgtgcaagagtcatttctttat

SEQ ID NO: 451111 - DNA, 192 bp, Triticum aestivum
ctcaccaacctcgcggaaaccctaggcgagcgggagccttctccgatcccctctccccgatctctataaaacaccgcggatttcgaattctgtcttccccgcgggaatcacaccggcgcctcctccctcggcgcgcccggaccgggctcctcccgcggggccggggctggcaccaggggcggcggtgggggg

SEQ ID NO: 451112 - DNA, 67 bp, Triticum aestivum
ttgcttctggtcagaagtcaagtgtgacagtaaacacagaaaatgttaagaaagctgttgaggtttc

SEQ ID NO: 451113 - DNA, 124 bp, Triticum aestivum
tcttcacgcgtccgcccacgcgtccggcagaagatgcccatctgcaatcagccaatggagcaacatcgggatgacctggacttgtttatgcctgggcagaagacgtcaaattgatgggtccgac

SEQ ID NO: 451114 - DNA, 165 bp, Triticum aestivum
ttctttagcagaagcaaagcatccgaacttccgaggcgaggcagatttggttcgcggggcggcgtcggaggaggcaccgtcggcggtgagctcggccggctctaccgtgcgcgggaccgatacgtcgtcctccgccggcgcgagcaatggcggcggcgccgcggg

SEQ ID NO: 451115 - DNA, 164 bp, Triticum aestivum
tcatcgcgtccggccccgctgagcgagcaccagatgcgcctcacgcgcgccctggccaagaggcccaagaccaagatgctcaccgggttcggcgtcaaacccaccgctgctttctccaagccggcgcagctgcaggcgcaggcgctgatgtccggtgcgcagtc

SEQ ID NO: 451116 - DNA, 312 bp, Triticum aestivum
tcttcgccagtcgccgccacctcccacctaccgtcccgtcatcatcatccatcctcatcctcctccaagaacccggcagaatcatcgcgagagcaccatgtccaatcacgactccgcgtggccctcattttgattgatcttaagctgcagctcggggattggctcgctgttagcctgtcggaccacccctccatggcgcccgaagtgaaggtgccgctgctggagggtagggggtcgcgacgcccgcgcagacgttggggaacatcgtcgtgtccatcgtcggcaccggcgtgctcggcctgccctacgcct

SEQ ID NO: 451117 - DNA, 320 bp, Triticum aestivum
ttcgtcggccaaagcttgaccatacccttgttccttcaacatttgacggccggcaagctcttgtcctcagtgcagcgaaggcagacggccatggacggacacagcccggtgatgacggacagcgagcggagggcgtaccggtacatgcaggcgcccaaggtgcagggcctgggcggcatcaagaactcatggtccaacgactccctcttcagcctcagctacgccggcgcggggggcagggctcgtcgtccactcgtgcgtctgcgcgcccaccacgcacccgggctccttccgctgcaagcaccaccgccagagcgccg

SEQ ID NO: 451118 - DNA, 330 bp, Triticum aestivum
tctttacgcgtccgcccacgcgtccgccacgcgtccgggatgaacaaaatgtcgcaggccttacataggtttgtggtgctgaattcatagcaacgtaatttaggatgggtgattttatccattgatgatgatagcaaattgtgctaaggcttgggctcaatagggaaagaaagagagagagagagagccctttttatacttgggataggcatacaattggaaattttggttggctattgtctgttggttcattgtctagctataatgttttgcttcgctgcctaaatgcggctttgtagcctgaataatgtacagattttttggttgctc

SEQ ID NO: 451119 - DNA, 225 bp, Triticum aestivum
tgttcgaaagtcagctcagaaccaatccagccggaacgccgacgaccaacgatggatgtcgccgtggcgaagcaactcaggcggatccgcacgctgggacgcggcgcgtccggcgccgtcgtgtggcttgcgtccgacgaagcctccggagagctcctggccgtcaagtccgccggcgccggtggcgcggcgcagctggagcgcgagggcagcgtgctcaccggg

SEQ ID NO: 451120 - DNA, 105 bp, Triticum aestivum
tcgttcacgcgtccgctttcctggaggcatgggttgctggggtaaaataccctccgtcgatggacccttcgtttgagctgccggagtccgaggtgagggagaggt

SEQ ID NO: 451121 - DNA, 266 bp, Triticum aestivum
ttctccacgcgtccgggccatggtggtgcggcctgctcaggaccgagggtggtgtgttcttcttcaggtgtttctcttcggctgccctacctgtggtctctggcctgctctatgcatgctcatgcccatgctctgttgaggcgagcctcaggctcttggtctcgtcttggttcatctttgcttaatgacgacgcaatgacgcctccccgacttgctaatcgtcttgaacttccgtggcggagcgctcagtcaaggactgttggcat

SEQ ID NO: 451122 - DNA, 267 bp, Triticum aestivum
tttccctcgtgatgaagaaaggccaggatatgctgccgtgagagatacacaggctcttaatgcttcctatgagcgttttctgcgtactgggcaaattcagtcctatggcgctggacctgctggtggatctgtcaggcctaccgcgggagccagtgctggtggctaccaagctgatgatcgtccgggcatggctgctgggggtatgaatggcaggaatgttgcttttggctggtggaatgcctgagcctccccttcccccagatgcct

SEQ ID NO: 451123 - DNA, 244 bp, Triticum aestivum
cggcgatcaaggagaatcaagaagccggcgtacagaccgatccatcgatcgacccttgcctgagccggcagcagcagccatgaacaacctgttctcgagttcgtggaagcgcgcgggcgcggggggcgacggtggggacctggagtcggtcggcggcggcgtgcggtagatgacacgtcctacaacgacggcctggtcacggcccccgagctccggggcctcctggactagctgggcctggaca

SEQ ID NO: 451124 - DNA, 79 bp, Triticum aestivum
gcccgacgactcagctgagagacggacgggccctctagggggcggccatcaacgatggtggtggacgcagaggaaatgg

SEQ ID NO: 451125 - DNA, 429 bp, Triticum aestivum
ttcacgcgtccgcaggaatgaaaataacaaaaaagttcaaaaagcatgcagggatttctcataagaattagcacaaatgcctagagggatcaacatagactctcccaagctcacaggcagagctcaggaccatgcatgcattctgcaaatctttatccccccaacgatgctatgtgcttgatgtcttgtacaaggtgggttatgtgctgctgtgttgtttctgtccagtgtgaaaaagtggaatgccataaataaaatagaagaatggaagttgatccccaggaaataaaagaataggaaaacatgcaagttggtagtattattgtatttccaaggctgtagctgtactgatttctgaatgttaaattactctatcagtcttcgttaccatctatctattatatacctatgacagaagacatgatgacg

SEQ ID NO: 451126 - DNA, 374 bp, Triticum aestivum
ttcgtttcttccaaccaactcctccacccctgtcccaatcccaaaacctcgcgggctcattgcagcacacctgcgctgcgcgagatgttccccgcaggcgaccacctcctccttttcgcgctcgcttccctcgggggcgcagcggcggccggcgccggcgaggggttctgctcggcggaaccgtcaaacgattgttctcagtcgccgccgctctactcgaaggtcaccagtcccactctcgcacccgtgcatttgcaagatttacctggcttcacacgtagtgtgtacaaaaaggatcatgctttaataacaccagaaagccatgtattcagtcctttgcctgattggaccaacacgttaggagcatatttgat

SEQ ID NO: 451127 - DNA, 160 bp, Triticum aestivum
gtccgccgcgaggccgcctccggcctcgacatccgcttccaccgcctccccgccgtcgaccccccggccgacgccgtcggggtcgaggacttcatcgcgcgctacatccagctccacgcgccccacgtccgggacgccgtcgccgggatgccctgccctg

SEQ ID NO: 451128 - DNA, 325 bp, Triticum aestivum
tcgctggatttactccctccgttccagaatataaggtgtattggtttccgtgcaagtcaaacttgcacttgtttgacttttcaaaaaacaaatacaccttatataaaggaacggagggagtattatttatcaatgaacgaatctatctagctgtgccgtcagacattttatccgcggatgatcgacgcaaatcggcagcaaggacagtttttgttttctggcctatgaaagctatgtctctaaaggaaggatcactaaagtggttttttcattaacccacacataggtgcactacttgaaagtcatgcaccctgagataaacatg

SEQ ID NO: 451129 - DNA, 105 bp, Triticum aestivum
ttcacgcgtccgccctccccacctactccctcgccgcgccgccgcgcagccgcgagtgcagcgaacatcggcgccagtgccacgcttatggccgccacctcccat

SEQ ID NO: 451130 - DNA, 245 bp, Triticum aestivum
ttccctgctgctcctaaagttcccaagtcaagcgcagcacaggaacctaccgtcataccagcagtcaacaaccttgccaacccaaatgctttcgtctacccgcctgctgactttgcatcaaagcagccacttgttcagcctgacaacgtgccatatgttcccgcaattaactctgctgcccctgttgaagctcctgttatgaatatgtactctgaccagggaagcaactcctttggctgctctga

SEQ ID NO: 451131 - DNA, 385 bp, Triticum aestivum
tcgctttgccctcctccaaccgccacctccctcccccgacctcgtcgcgcgatctccgaccgcccgccgagccccagcgggaggagcttcgagcccgcgcccccggcgtcccatggtgggtacggcacatcggggccgcgagatctagggttttcgcgccgcggcgggagcgatggggcgccggaaggccacggcggggccggctcggggctcctcgagggccgaccacggtgtaatcttcgaaatccgggggaaacatagattggaattggagaatttgacactaacaaagcacccattcaggacattgcacttctgtaatttagctatgttgcaatacttgaaaagatcagcagcatatatcctgagtaaaagagctttgttt

SEQ ID NO: 451132 - DNA, 390 bp, Triticum aestivum
tcgctagaagctttggctgctgagctctatgcattgtcccggtatatgtcttctggaagactgccgggaaatccagagtgtaatgggcttattgaagacaaagagactgaaaataataaagagagctcaaaaactgacgagtctgagctcagattggcacagcttcaacatcagctacctgctaatgaacctggtgcgttaatgcatcttgtagaagaatcaactgctgatgatacagaagaggaaagcgttaaagagtgcaggactttattcaaagatctgaagttctacttaagtcgtgaggttcccagggagtctctcttgtttataattccggcatttggaggaactgtttcgtgggaaggagaaggagctccatttgatgaaaca

SEQ ID NO: 451133 - DNA, 137 bp, Triticum aestivum
tcgcccacgcgtccgaacacccctgagatgccacccgtgtccacccagataatcgcgagagatatttcgtcccggacgcgtccggcccgacgaccgaccgacgaacagcgtatatgtaggagggagaggatgagcac

SEQ ID NO: 451134 - DNA, 202 bp, Triticum aestivum
gtcgcgtggtgggaagacgagaaccttccaaaggccaaagcccataacccctaacctagggtttcgccgccatgggatccgacgcctacggcggctacgacgcagtgccgccaccgtcttctgcagcgcaaccacacggggccgcgccgtcgtatggggttgggctcgccggcatcctccctcagaagccggatggggatga

SEQ ID NO: 451135 - DNA, 129 bp, Triticum aestivum
gcgtccgcacctttgttcgcccttctcctctccctcgtgacaccactcccagagaaagagagagacagatggcgatgcgggcggtggcggtgctgctgcttctggcggtgggcagcgtgctggcggggg

SEQ ID NO: 451136 - DNA, 291 bp, Triticum aestivum
ttgccacgcgtccgaccacgatttcaacatttttttcaggagggggagatgagattcgtacatagacagcttgtttgtacttggcaatggagtggagatgtttggttcagctttttatgcttgaatttgggtacacttgtttttaagatcaatagcccctagatcatagtactagactactaatgcttgtgcaagttttccttaattaattgtgagacgtgctccttcagattgaagatggtcatgaccaatttgagtcgtgcaaaaccattcaacattgttggttgaatt

SEQ ID NO: 451137 - DNA, 130 bp, Triticum aestivum
aacaaagtgcgcgtgagaaatcaacaagcggtgcttgccgagaagagagagagagatggcggcgtcggcggcgacggcaacggcggcggcggcggcgacggcaacggcggcggcggtgggggcgggggag

SEQ ID NO: 451138 - DNA, 113 bp, Triticum aestivum
tgtgcgctgccgccgcacagagagagcgcgcgcgccatggctcctccgcctcgtcgccgtcggcacctcctcctgcccgcgctcctcctcgccgtctccgcgctgtggggagc

SEQ ID NO: 451139 - DNA, 212 bp, Triticum aestivum
tgtcggttcatttcttgcagttgtcatctttaacatgttagagcctggtaacatgtccagagctatttgtggcgaccaagtaggtacgttagttgaccagtcaggaaggataacttaaatcacaagggcgattagctgtgttgtagcattgggacatttgtattctctcacggcagtgtgcatcttcgttgattgcatggatctttgtggat

SEQ ID NO: 451140 - DNA, 132 bp, Triticum aestivum
ttgcccacgcgtgcggagcaggcaactcacatccatgggtgttgatcctactgctggtgggaaccgacttcgcagccagtgaagaggccgtaagcgtgagaggacactgagcagagctgatggtgatgatgc

SEQ ID NO: 451141 - DNA, 158 bp, Triticum aestivum
cccgctctcctccacccctaccatgggcggccccagctcctgggccttcccgttccacgaaaagagagcttagcgctgccgagccctccgtcctctccacttcccggctgctttctccgtccgtccggtcgtcaatcttcgtcgagcagagagaggga

SEQ ID NO: 451142 - DNA, 203 bp, Triticum aestivum
ttgttcttttctgccccggacagcagcactgcctaggtgtcgtgcaaaccaaaccaaaccaaaatctgctgaggtgtcctctactcgagcaagtgtgccaatcctaggctcgctcgcctgatcaatccttcgcgtcgccagcttcatctcgaggcgaggaggcggacgatttgaacccatggatatggcgcacgagagggact

SEQ ID NO: 451143 - DNA, 158 bp, Triticum aestivum
ggtggtaaccctagcttcgtataaacccaaaccccccgcctggcctggccggagcggcggcagcagtcgccggcagcgatggacgcgatgcggaagcagctggacgtgctgatgggggccaaccgcaacggcgacgtgcgggaggtcaaccgcaagta

SEQ ID NO: 451144 - DNA, 143 bp, Triticum aestivum
ttctgcccacgcgtccgcggacgcgtggcggacgcgtgggttcatcctcatcttcttcgcgacggcggcgccgatcgtgaaccagaagtacggcggcgtgatctcgccgttcgggaacgcggggtgcgcgggcctggcggtga

SEQ ID NO: 451145 - DNA, 382 bp, Triticum aestivum
gcacaattcctccctcaatcctcccgagtcaaccatgccgccgccgagcctctccgatggcccggcctcacgcgacaacgcgctcgcctccatccacaagccgccggcgtctcatggtgattcgtccactcgtcagccatcaataagaagagataatccagagaatttaaccaaagtgttggctgaggcagtgaagtgtgcacaagctcttaagactgatgatctgattactgacactagagttaaggaagcttttgcagagctgatgaacaaagtgtacccgcatctacctgagagtctacaggatcaactgattgctgatttcaaactcaatatcctccgtcgggcacaagagaaaaatactcccccagttgagttgatg

SEQ ID NO: 451146 - DNA, 495 bp, Triticum aestivum
ttggtcgccccctcctcgcgttcctcgtgcgtgcgcagaaccccgaggcctcggcagccatggccaccggcggcgaccacgcggcggaggagctcgtgtccgtcgagatgcccgcgcccgagggatggaccaagaagtttactccccagagcaggggaagatctgagattgtttttgtttcaccaactggagaggaaattaagaacaagaggcagctgaacagctatctgaaggcaaaccctggaggccccacttcatcggagtttgactggtcaactggtgataccccaaggcgttctgctcggattagcgagaaagtgaaggtatttgatagccctcagggtgaaaagataccaaagcgcagtaggaactcaagtggcaggaaggggaagcaagagaaaaaggaggatcctgaaactgaagaagacaaagaagctgaagcgggcaaggaggcccctagtgaagatgctgcaaagagcactgatgtggagatga

SEQ ID NO: 451147 - DNA, 139 bp, Triticum aestivum
ttctcgcgtccgcggacgcgtggggaaaaatctctttgactcctcccatttcctatcactccggcgtgcgagcggtagccatggtgattgcttcagtcgcgacctactcctcgtccctagcgccaccgccggcgaggag

SEQ ID NO: 451148 - DNA, 407 bp, Triticum aestivum
tcgtttagagtcaatcaaaagtcttagtgccacttcttgctgctactacattcatgatgaccattgtgtgactacatttgctgtcgtcaagcctttcaagtatctgctctcctgatgtttacacaagggagatgctactaaggaagcagaacatggagaagttttcctgatgtttacacaagggagatgctactaaggaagcagaacacggagaagttttcctgatgtttacacaagggagatgatactaaagaagtagaacacgaagaagtttcaatgaattagagagttatagatgccagctggtcctctacatacctgataaaaataagaaaaatatatgtcaatgtaatctgcatccattgcagctaatagctctcagttttgccaatggcaatgggctgctg

SEQ ID NO: 451149 - DNA, 456 bp, Triticum aestivum
tgcaactgggacgggtagcaatactgttcgctatactgcttggatgagctttgatgattttgaggtggaagtgccaattgtacctcagtcatcatataaaggtgctaaaaaggatattataaagaaatatcgtgttaatgcaatcagatcgaacttggactcggaggtcaatgagggcaagggtcctgtctctagtgtcctctctaatatttcctcgattgcttcttcgctctattctatccctatgttggcacctgttgctggcccgacagcctggatgaccaacttagcttctggcgttgcgtccgcctttggttggtgcaagccagtgttggactcccaagttatccgtgtctatcaacagcctcatgcttataatgctaacataaacgaatctgacgttactaatagtcttggcttgtttgtgacaataaggtttgcgttatgcctgatgtt

SEQ ID NO: 451150 - DNA, 411 bp, Triticum aestivum
tcgtaaaaaccccgacgcccaccccactcccagcttccctaacctccccacgactacctctttgctgtcgcccgagcctctcccaccagcgcgccgccgccgctgcccgaggcccctccgaccagcgcgccgtcgccgcccggggctccttcccaccagtgcgtcaccgccgcccctaagcccctccgaccaacgcgccgccaccgtcctgatccccctacgaccaacgcgccaccgctgccccgatccccctccgaccagcacgccgccgccggcgccaagcccctcacaccagcgcgtcgccgccgccccgatccccctcccaccagtgcaccacggccgccccaaacccccttccatgaccatatcacccgcaccatcggccgcgcctccctcctgcatgccacctgc

SEQ ID NO: 451151 - DNA, 150 bp, Triticum aestivum
tacgacagacagacagcacgaggaaggcgagccaaccacccaccaccgccgcgaggctagcaccacgggcgagctcggccgattccgtttgcgattccgtctgcgctattgaggtttgtttgggggaaggggaggcggttcggaggtgga

SEQ ID NO: 451152 - DNA, 373 bp, Triticum aestivum
tgtcgcccaccaatcaatggattttaggtatacggaggataggagaggagagatccatttggattcagatttcagagcggcagcttcctcccttccccttcctactctctcctactccttccccttcctactccactgacgcggccttcttcttgtcttcctctccccttccccctcccgccgccgccgccttcctccgccggggctggttcagctactaaccgcggccggggggaggagaaaggccgcctcttgtccggccacctttcggctggttcagcccacgcgggagccggattgagagatggagtcggccgccggcggcgggctgggcagcatgcgagccgtgcttgccatcctccagtggtggggc

SEQ ID NO: 451153 - DNA, 489 bp, Triticum aestivum
tttttgcccacgcgtccgccacgcgtccgggccatttgcctatacaagtatctgtccactcaatcatcaggcgctcaatcatcacccaaacgattaacttattcatacaatcacccgcgaccaataatccactgatcagtttgccgcgtgtccacttgagttatctccacaattgcccacaggaccatcggcccattcactttgaccgtcattatcgcctaaactttttccggtgctgaacagcaaggtcctccatgaatccattcgcagcaaatactgccaaaacatttttcgacctcatcaagtcagagagggatctatattcgcttgaacctgatcgtgagccatcccaatctcagcttcgtttgtttgaacgaatatgtgtgctattgaatggggaacatacatcaaaatcgcgcagcactagaacacggcacgaaaaggaacaatcaagaatccagagaatgtacgaaaagcttccatccgatc

SEQ ID NO: 451154 - DNA, 423 bp, Triticum aestivum
tcgccacgcgtccgccacgcgtccgccacgcgtccgcccacgcgtccgcccacgcgtccgcctccctcttctccgtccgtcaatccccctctatctcctccccgcaccagctcttgtactactcggagcacctccacccctgaccccgactccgaccacccatccatccgcttcttgcttcttccgctgtccgggccaagaatctgagatcctgtccggcgccgccgcttgtttcttgatggccgcatagatggcaggatcaacttcattttgagcttgtcccacaaggttgcaatcaccagtatgtcagctaaggcttcagaacgtacatatagatgctcagatgattcacaaatggcgtactacaacaactcggtgcctttagcagaaaatggacggttctatatgatgcaaaatcatctg

SEQ ID NO: 451155 - DNA, 201 bp, Triticum aestivum
ttgtttcacgcgtccgcccacgcgtccgcccacgcgtccggtgaacttcacggcattggttgttgtgctatttggtgcctcagttgttgtagctgctgttgccccagctcgccttgaagagccacaggattatgctccaatcccagaaaactagtacagtatgtgtgaagtgtactacgtaaacagaaattcactaagttt

SEQ ID NO: 451156 - DNA, 336 bp, Triticum aestivum
ttcgtcacgcgtccgcccacgcgtccgcccacgcgtccgcccacgcgtccgtcgtcttctccctccctccctcctgtctcctcctccgcaagcaaccctcttgcgtcgttcctgctgattggctccggcgggagggaggagggggcgcagtgagatggggaacatctgcggcggcgcggggaaggccgatgtggcggcggactaccggccgtccagcccaggaacatccaactacaagacgagcggcagcgtcaccaccagcaacagcaccacggggaagctctcctcggggggcagcagcaccttcatggcctccgcgggcagcggtggcaccag

SEQ ID NO: 451157 - DNA, 371 bp, Triticum aestivum
tgtgtttgggttttttgacgccctcgccggcccgccgccacctcctcccttttcacaagcgctgcccctccactaccaccgtagcaccaggatgacggcgcagactgccgaggagctcgccgcgcatatcgagcaggagcagctcgaggcgaagaaaactgaggcagaagaggacgtggttgaggatgatgatgatgatgacgacgacgatgaggatgatgatgacaacgatgatttggatgggcaagaaggtgatgccagtggcacatcaaagcaaagcaggagtgagaagaagagtcgcaaggcaatgctgaagcttggcatgaaatccatcactggcgtaagccgtgtcactgtgaagaaaagcaaga

SEQ ID NO: 451158 - DNA, 159 bp, Triticum aestivum
tggtacaccgcgatagaaggcgcacacacacaatggcaggcacaaaattactagctcttggttttgttgtcctgttgagcattggattggccaatgctgcaagggtggctaggtactccagtgcctctggagtaggaacgggaggaggagagggtgggg

SEQ ID NO: 451159 - DNA, 353 bp, Triticum aestivum
ttgttttttttgagatcatgatgtctgtctacttatcggtaatgcccagatcgacaggagaatgcttatgaaatcatgaagtgcaagtcgaagcaattaacataacgggagatacatggacagatcacgccccgtcaaaaataaaatgaaatacatggacagatcacgctagcatatcagccagttgatccacagatgaacagcgtgccgatcatctgcatacaagcagctctactagtactaggcaaagctgatgttgtaggccttggcaccgacggacctgaagatgccgaaatggcgctcgaacttggcgccgggcttgccgtactggtcgtagaggtcgaacaggaaca

SEQ ID NO: 451160 - DNA, 368 bp, Triticum aestivum
  unsure (1)..(368): unsure at all n locations
ttgctattttctccacagncgaagcaacagaacatcacaagattcagaaaagcacctccatctcccagtcccagcctctctggtgaagagggtcgccgccatggggtcgggatcttgctgctgcatcgggtgcggcagcaacgacgacgacggcggcgacgggggcggcatggggctggaccccaaggggttcctgcttgccatgatgatcgccctggtgctcgtcatgctctgccacatgcccaagccccgccgcaacaactacgtcgtctaccgctgctagccatccacccagatgaaccagcaccggccgtggacggacggatggtggctcgcccgccggcggccggccgatggccgaggtttga

SEQ ID NO: 451161 - DNA, 72 bp, Triticum aestivum
gcctgcatgatctgcccgacccgactccgggaacctggagtgcacgcgaggggagcagtatgtggggttggg

SEQ ID NO: 451162 - DNA, 387 bp, Triticum aestivum
cgcgtgggcagcaagcaaacaagattgagcattcacggatggtggccgaggccgtggcgcaggcgtcgtcggtgttcgccgccttcgacaaggacggcgacggcaaggtgtcggcggccgagctgcgcggctccatgacggcggcgctgggcgaggaggtgtccgaggaggaggcggcggcgatcctggccacggtggacgccgacggcgacgggctgctggaccaggaggagttctcccggatcggcctcgccgccgccggagacgacggtggggcggccggaggcgacgacgaggaggtgaggcggcggtgcctaagggaggcgttcgcgatgtacgcgacggggggcggcgaggagcatggcgccaggatcacgccggcgagcc

SEQ ID NO: 451163 - DNA, 257 bp, Triticum aestivum
tgctggccaagacttgtagatgttgtcaaaggctctactttagagaaggttgtcagagttgttgtcatgtccttccgcaatttgttggcaaagggtgcatttgcggcccaaatgattgatcttgggttgccgcatatagtacagaatttgaaagctcaagcatggagtgatgaggatttgttagatgcatcgaatcaactggaagtgggtctcaaagagaacctaaagaggttgaccctcatttgataagtacaaac

SEQ ID NO: 451164 - DNA, 436 bp, Triticum aestivum
tttcgcccacgcgtccgcccacgcgtccgcccacgcgtcctcggacgcgtgggggaagggagtcaatggttgctggattttatcatgtgggctatgaagatccattgcttatgcttatgagaaggagaactgttcatgctggattagttgtgaagggtgaggaaggtgcactttctttgacaaccaaagaaagatcggcccatgcttccaaagggattccagtgaaccactgctcagggttccggacaccaagcagggcaaacttctgcgaaactgacggtatttctagagagagcttcagagttgctgtgaatgctcaggaacttggtttcaaatccactgaaactccaagaactgataaatcagtactgaaaaacttggagctgggtttgtcagcgctgggtggagacaaagggcctgcttatgaccgaatagt

SEQ ID NO: 451165 - DNA, 365 bp, Triticum aestivum
ttgttgacgcgtgggtcccccgcaagcagccgcaagccgtcgaggccgacggcgacgggagccccccaatccccaaatcctgcggcgcggggcctcaaattcggcgccgcgcagcagcctcggtccggcttatggatccagatgttctcgtgggcccgtagcaagcagtcctcgcccgcctcctcctccggccgccgcggcggggacgccgccgccgccatggactccggaagcagccgccgcagcggcggggggagcgggcacggcagcggcagcgggagcgggagccgcggacgcagcccgcggctggagcggcgcaacgcggcgaagcacatcgactacgaggcgggcgcggcggcgacgac

SEQ ID NO: 451166 - DNA, 54 bp, Triticum aestivum
tgtttgggtcggcctcgtcaaggccttccagagcgcctacttcgtcaggtacgg

SEQ ID NO: 451167 - DNA, 245 bp, Triticum aestivum
tgttgcccacgcgtccgcccacgcgtccggggacgctttgtttgcaaagaaatgtgatggattgccacttgcacttggagttttgggaggttatctgtctaaaaatctaaatgcacaaatatggtccgatatactctttgattggccagcaaccaaggatggacaaatgatgagtgtcatactggcacgcagctacaaggacctaccgaatcatcatttgagatcttgtttactttattttgctg

SEQ ID NO: 451168 - DNA, 336 bp, Triticum aestivum
tcgggtctcccctcaccagcaacccaccgcaccaaacaccggctcctccccgccgctctcccgccatgaagcagctccacaagtcccccacccacgcgccgtcgccggcgcacgcgccggcgtgcaagatctccaagcccgcgcgccccgggccgcgcacctgggtcggctacctcctccgcgagcagcgcctcctcttcgtcctcctcggtgcgctcatcgccacctccttatttctcctgcggccctacctcttctccctgtcagcctccaaccccaccgagcgaagccccatcttctccttcaccggccactcgtcggactcccgcggcgtcc

SEQ ID NO: 451169 - DNA, 387 bp, Triticum aestivum
cgttctcctgatccgccgtcccgccgggtatctaccactgaactgtgagataaagtgctttcagttgatgcaagagggtgtgcacacatcttcatctatggcctactattgattgctctgcagtgatcagtttgaagtcttctttcttcctcttgctacgagttttcttgcttctctggtgggctacaggagaggtggaagcagataaaggcagacaggcagctcagccattctatgtccagggacttggattgtcctgttcagacacagatggctgttgcagtcctggatcggagtttcagcagtgactatcctgcaagtagcaaaactgaggggagacctttgagctggaagagagtttttgttcaaactgataatggttctgtc

SEQ ID NO: 451170 - DNA, 302 bp, Triticum aestivum
ttcgtttctaatttgacatacactatggatgatcgcactaagttatcagagcgcttccatactgtatcggatagcgttggaatgaagtcagaagttaaggtcgtgccggttcgcgagcaagctactttcttgagaaaacgattcgttccaggtgctttcggaactttacccgtacccagctttggccgtgtgttgtcaaaactgcctgtgagggcgaattttaacgcctctgtcactgacgatgattatatggcgggcaagctactgtctgccgcctatgagcatcggcacattgctagttt

SEQ ID NO: 451171 - DNA, 243 bp, Triticum aestivum
ctcgcctacgcgtccggacggagtcacaaccattgatgttaagtcataggagtacaagaacaaacaagctgttggacatcctgtgaacagctggatgaatgcaaagattggcttggcagccgaggacattgctttgccaagtgctatttctgccaaagttgttcatccatgggatggcccgggaacataccatggaggacccaaactttcaatttatggcttgcctacggattttgctggccc

SEQ ID NO: 451172 - DNA, 252 bp, Triticum aestivum
accacctaatttaggtgtactaggttttgcgccaatattgtttaacctcccgctaaaaggtcccaaattagcgtctttgttcccaccaaaaaattatggttccgctaaataccttgctaacaacccacgaatatataattctagaccaaacgacggcgtcttcacgagcgattggatctgagctctcgtctcggttcatctgtgctgccggcgtcatgacggcgtcaatagagcgaaccacgtcaggtgcac

SEQ ID NO: 451173 - DNA, 408 bp, Triticum aestivum
ttcgctcgccacacaccacccgtctcgtcctagctgcttactcctaccgctcgccactcctccgccccagctctgctcgccctcgaccgcggctcgccaggaaggtctggtttgcatttcctttcaagtataaaagcaactatattcagcatggcatttgagtaagcatcagaacctcaaaagccaagtttgtcagcaatattatacctttattggtgcaacacttccgtagagaagatggtggatgacctgttttatgagggcaacactgatcacagcatcagctctgaggacgaagacacacttgtcaggagttgtagtaatctcagcgtaagctttggatattattgcaattcttatcagagtttccctcttgaaaatgatgagcatgacacctctccccagatg

SEQ ID NO: 451174 - DNA, 335 bp, Triticum aestivum
tttcgttcgcgcgccatggaggacggggcttcggatttcagcgtctgggaggtgctatctgcatcctcgggggtcggaggcgatgacgccgtccttgtgtccggggaaggcggcgacgtcctccacgaccacttcgccctcgactcctcttcctccactggcttctccggcgagggctcgtggtcggaggctgcctccgacgacgtggaaattgaatccgggttaggatcagtggacagatttggttctgctatgcaagagcagacggatcttattggggtggtggattccagcgcacagttgcaattaggctggattgatgtgactgcacaagc

SEQ ID NO: 451175 - DNA, 292 bp, Triticum aestivum
tcagtctgtctccttgtctcatgcgactccggccttgcttctatggtggggacaagaacccggacgtggatttgtacttccacccgtaccgtctccagcagctgcgatctatgtggcgtgatgacattggccttctttgccgtggcaagggggagttcgtggtggcgcagctcacatttggcggccagctctgcgtgctacaccataaacctggggaggagcagggcgacatgaattggagcgtttaaaatatgcccttacctgacggcgatgacatcccaaacctgctgcg

SEQ ID NO: 451176 - DNA, 365 bp, Triticum aestivum
tcgtttgacttgcgcatcccacctaacaccgcccgtggtctgggagctgccgccgccgccgcggagcaggggactcgatgggattcgacgggctggtcgttgtgtccgacccttacctgcagcgccgcttcacgcaggcggacctccgcgcgctccaggcacagtacgcggggctgcgggacacggcgcccaccggcaggctgcggctgcgggaccttcccgccgcgctgaccggcctggggagccccaccgctatggccgccgataaaggggaagcgctgcgcggggacgccgggaaagagatcagctcgccgcccgagcgggcgctcacggacgaggagtggtcctccgtgctcacggctgtc

SEQ ID NO: 451177 - DNA, 131 bp, Triticum aestivum
tccagatttggccgccccaccggcgctggcccgccgccagatcggagcgcggccccggtccgatcccgctgcgccctccccagggacatgggaatggaggtcgtcggagctgaagctgcaccagcacaggt

SEQ ID NO: 451178 - DNA, 243 bp, Triticum aestivum
tcgcttcgcgtccgtccacgcgtccggacagaaatcgtcctttcgttaggctagggcgaggcgagagtagattggatctcgagctcagcacgcggcggccatggaggacgaggagcacgaggtgtactgccaggagatccccgtcgacggcgaggacgtcgacatgggcgccgggggcgacgacgccgccaagctgcacgagctcgactagatgaagcgccgtctcaaggagatggaggagga

SEQ ID NO: 451179 - DNA, 394 bp, Triticum aestivum
ttgattggtggtaatggttctctgcagagattttctgttttcaatcacaggtgaatggcgtgcggcaggatgagcaagctgaagcctaggaaacttgtgcacatacagcttcgaagagaggtagagaccgaagtgagcagctgctgccgaaaaggccttgaaactcggaaccgagcttgcagacaatgtgcatctgtttccctttgccatttctggcgcagggtccggctcgtcaaagttgggatgaagcatagcaaggttttagatagatcaagggggaaaattttccggtccggtcgtgttatttcttggatagcgtttgttcattctgggtcgactctgtttttccgtcgtcgcaatttttctggacagagcagagtgtgcaacctgtaag

SEQ ID NO: 451180 - DNA, 265 bp, Triticum aestivum
ttcgttcgccacgcgtccgctccgcggcatgtacggttacgcccccacgccggcgcccgaccggccggcgtcgccccccgtcccgccgctcccggcgccatcgcggcaacaggcgaccgcgcggcggacggcggacgaggtgtggagagagatcaccggcggtagcggcggggaggaggaggcggccccggcctccgctggcggggccggggagatgacgctggaggacttcctggcgagggaggacggcgccgtcgtcaggggg

SEQ ID NO: 451181 - DNA, 220 bp, Triticum aestivum
tctcgctcgcccaatcccaccgtggtgctggacgcctgcctggtcgtgggccacctcatccccatggtggagctcgccaagctctccctcggccgcggcgtgcccgtcgtcatcgccgacccgaccccgccggcatccaccgccgacttgttctgctcctccgacttcgccgccgccgccatcgaagccgccaacccttgcatcgccttccaccacctcc

SEQ ID NO: 451182 - DNA, 331 bp, Triticum aestivum
ttcgtcgcccacgcgtccagagcgaccttggatcagctatattctgcatccatctcgtcatggcagcagcaatgcacccgaggctcgttgccgtggcggcgctggtcgcgctgatgtgcgccgttgctgtgggccaggtacctgccgccggcggtgcgccagtgtgcgacggtgttgatcaggacgtcgtgaatgcgtgcttcaagagctttggagaaggtatgaaaaatgccattgcagacaggcatctttcggggggcaaggtcattaaggttggagtggactgctgcatagcctttggaggccactcctgcctctgcaagatgaagaa

SEQ ID NO: 451183 - DNA, 178 bp, Triticum aestivum
tctgtgtgatactacaccaactatttatttttttctgtttcgaggactcattacacaaccatgttagaaatgagtgtgtattcttcataaaaacgatgcccggtcggcttgtaaagcggaactatttgcgcatctgtagatgattttcctccattgtgcgcatcttcagagagtgaac

SEQ ID NO: 451184 - DNA, 88 bp, Triticum aestivum
tcgtttgcctctggactctgctgttctatcgggtatgttgcattttcttggccatgaacaagctcaaaaagatggctctcatggtgat

SEQ ID NO: 451185 - DNA, 363 bp, Triticum aestivum
tcctcatcttcttgtgcgagagatcacacgttcctttcattcttcaaccaattcgattccatcgatgtcgtctgccctctccttaccggcgacggtgcggccggcatcctccgggcttgggcgccagctctacgggtcgccgccgcgccacggtccagtgctgcgaccgaggaggccgcaggcggagccatgccacggtctgctggcgctgcgaccgaggacgaggcgctgcggcgctttcgggcaggaccactacggtggcgcgctggtggacgagggcatggcggtgctccggcggaggatccgagaggcgcggatggccgtgaccaactacgaggcgccggcgggatgggcggactggga

SEQ ID NO: 451186 - DNA, 362 bp, Triticum aestivum
ctagtttctagatcttgtgtggccgcccttgtctattggttttttgtggtgtttttttgatagtagttccactactttctcggttccaaggttcaattacatattttgcgcgcacatcctgggtgcgcgatttccaccacaaaaaagcttgatgttacaccaccatttcacctatgacatcgtcgttaatcagcgatcacctgaccaccttagaataaaacaatgcacccgaagaacgctatacttcagcaacgtagtatgttcagagctggtgctgatgttgttgctgctgatcattgcttaacattgccgaaaagggtctggagaacggtgttacctaacccggggaccggcgacaggaa

SEQ ID NO: 451187 - DNA, 280 bp, Triticum aestivum
gatgtcttgacctgatacctctggaggccccaatattagataatactcataaatgcaaaactggcaaaaatcatagagcaaagcgcgaatatgtagtagctacccacacattgtacctctcagcaggattcagttttattcaatttaatacacagaattcaagctatgtgcatatagttgtgggcttgtggcatgccaccatctgtgatatgtgaatctgagggcaaaacactcgaactgaatcaacaatgcctgaaatgtatacttcttgagctctcaa

SEQ ID NO: 451188 - DNA, 228 bp, Triticum aestivum
tgtttacgcgtgggcggacgcgtgggcggacgcgtgggctttttatgaattgcagatatcaaaaggcgcatgtagaaggatgttaatgaagtgacaaaagttgcacggctcacaaaatcaaaacttcagcaattgaataaagagaatcttgcaaacagagaaaagccggactttcacaagggatcaggtgtggaccgatctcggacctcagtgacaattacattgact

SEQ ID NO: 451189 - DNA, 255 bp, Triticum aestivum
tctaaagtttaattcacaatgggaatgattgtggctaccaaggcggtcaatatactgtcagagttggaggcaatgctatgaatgctggtctttatgatacacagggttactacaatatgagcatgaatcatccacatcagcctgttcatagatctctgccaaatttaggcgttgattcaggctatggcttaccatcaaatatgtacaacccttgcatgtcaacatctatgaacagatttgtctttcatgctcaga

SEQ ID NO: 451190 - DNA, 308 bp, Triticum aestivum
ttgtttagtttcgcctgagccagcaggtcgcgccccaaatgtccatgaaggcgatgcatatgatgggatcttgaaattattttcaagaaaagttcttgctgtaattctcaaagtactctctcttttgcgcttgttcactcgccatgagcaacagttggaaaatgttcatccacatactgcagccgtacccagtaatcaaccaaatcttcagatagttaaggaagaccgagtaaatccttgtctggagcgtcttgaaagacttgaatcgatgtgtaatcaactcagcagaaagcctcctgagatcccac

SEQ ID NO: 451191 - DNA, 131 bp, Triticum aestivum
gtgttgtccttgttcctggacggacacattcttcatgtcgacggcggtggcgcggcccttcggcgggttccctggatcggggagggccaagggggatgagctgctcggcaagaagatgagcgacgggttct

SEQ ID NO: 451192 - DNA, 363 bp, Triticum aestivum
tgcccacgcgtccgcgttccatcatttttaactgttttttttcactggttttttagtcccctccccaccccacaggcagcaaaaaaacacccgaaaagaaaacactcccatcgatccccttccaatcgatccctttgtcgccgccctcgcactcgcgtcaagcgccctcgatccctgcgctacctcccttcgccgccgctgccacagatcccttccccgcttcaggagccgccgatgatcccttccaggagccacgggtatcttctctctcgggacgctgctccgacacgatccggtaaggagacaggcctccgtgtgcggcaacgaaggcggcgagtggcgggcgacggccgacccttcact

SEQ ID NO: 451193 - DNA, 416 bp, Triticum aestivum
tttgtcattggtgctgaaaaatgttcacctctattaagactgagtgaggaacggatgatatcgaggattggagttccatttgaaccttgcaatggcaacaacaagtatgtccaggtaaaaagggaggcgggctcgttgccttcaacaattaccagtgagtgggactctgaaggacatctgtgtaactcagtttgcaatcatgtggagatagctatgcaagctctctgtgctctttatcgccaaaggaagttagcaatgggggatgcaagagaggaatacagggcacatacgttggcggaatttcttttggatggtgatctgcagggaccaatgagaaaaactgttgcggaactagagaatcatgatgcgacaaatccactttttcttatccaagtaacaatcagttgctctgggca

SEQ ID NO: 451194 - DNA, 316 bp, Triticum aestivum
tttctaggggagggagcccgaacgaaacgaccaaagcaaagcgaaagagaagagaaatcggccggtcttccctcgctggactaactagcgagtagagagagagagagagcatcagagcaggcgaatcacatcgcagagccaaggcagcagcctcatcgccgccggtggttcgcttcctgccgccccaccaagccccgaatcaaagccggggctgcgcctccctccctgctattggtgttggtttatcgcgcggctggccgggggcgctgtcgtgtgctgcggagaggaggaccggagggggcggagcatggacgga

SEQ ID NO: 451195 - DNA, 348 bp, Triticum aestivum
gctccacgaccagaggagccgacacccaacccagtaccaacgcgctccgagcacaccaagacaacatgcgtccatctcaggaccttcggctggccgagctcctcctgttgtcagcctccgtcctcctccccacagccagagcccagcaggaataccgggaggaggaggagttcagctactcgctggacgcagagaatgggccggcgcactggggcgacatcaaggaggagtggtccgcgtgcggcaagggcaacatgcagtcgcccatcgaccatcgcagcccgcgcgtctccctcgtgcgcggtctcggctacctcaaccactcctacgccccagccaacgccacca

SEQ ID NO: 451196 - DNA, 239 bp, Triticum aestivum
tactgcggacgcgtgggtccttcctccccgccgccgccgcctctcccaccagcgcacgatggaccagacgccgcagcgccgccgccggagacgcgccgaggtcgccccctccgacggcgctccgggcgcggcggagtacagcctcgacgagccgaccttggcggagaagctcgcggccctgagcccgcccgccgaggcggccggtggcgccgccgtggtgccctccagcgcggactccg

SEQ ID NO: 451197 - DNA, 225 bp, Triticum aestivum
agagaggactatgagaagaggatcctcacttccctcaatggacggcagctgacccgagatggccggatgaggaatcctgatgagaagcccatatttattgaaacacagcagccagcagcacctgtgcaacaggagcctatcccatcaaaagcgcccttgaaacaagcaaaggaagctgctgctcctcaagtcgtcgctcccaaagaagagccccttgcaaaagca

SEQ ID NO: 451198 - DNA, 116 bp, Triticum aestivum
gctcaaaccccacacccgcacccaagaaagcaagcagagcatcccccatccccccgttccactttccccttcctcgtcatggcaacgaaggcccccgccgtcgcggcgctcctact

SEQ ID NO: 451199 - DNA, 204 bp, Triticum aestivum
tcgtcctcgcgtccggccgcaacctgccgcaaaggcggcgtttttcctgcccttgcgacctgcccaggccgcagcagagcgccatgtggtcctcccctaccctcgcgccagacgccggggccgccgtgagggccgccgacgactcgtcggagaccgaccagctcgactccatgtccacggaggacatcgtccgggccacccgcc

SEQ ID NO: 451200 - DNA, 279 bp, Triticum aestivum
ttctgtccacgcgtccggcgcagttcctcacggccgtcggcgagatggcgcgggggctcccggagccgtcggtcaagccgatctggtcccgcgacgccatccccaacccgcccaagccgccgctcggcccgccgccgtccttcacggccttcaacttcgtcaagtccaccgtcgagatctcgctggacagcatcaagcgcgtcaaggaccaggtcgccgccgagacggcccagcgatgctccaccttcgacgtggtgaccgccatcatcttcaagtgcc

SEQ ID NO: 451201 - DNA, 205 bp, Triticum aestivum
acacacgcacacactcacacacaccctgccgatcttgcatttgctctgagaaatcggagaggaatcctacaccggcgagaaagaagctacgagcagagagagatggaggccgtgcatgagggcaatggaggagggagcggtctggtggtgacggagctgagccacagtaaggagctggtgaagcagctggacgtgcacctggggg

SEQ ID NO: 451202 - DNA, 162 bp, Triticum aestivum
ttgttgccgccgccagccatcctccccatggaccactttccccgcccgtcccgctcgccgtggccttcgccgatgaccgcggccctgcgcaggacagtgccgagctcgtgagaatgagaggagaggagccgccacccaacccaacccacacaaccaaggagc

SEQ ID NO: 451203 - DNA, 371 bp, Triticum aestivum
ttttgcacgctcaaaaaccttcatttgagcaacatcgtgtttcaccagctgctacgaaaagaactggcccagtggcttctaggatgcacacgcaggcatcagctcagccaaaagcagaactaccagttcccaaggttgctatacctcctcaggcagcaaaatctcctgctaaagttgatgtgacacccgcaaaagttcatcagtcatcggttgcaccccctcctaaagtcgactatgccattgacctctttaacatgttatggatggacggaacaactgagaaagaaccagtgtcatcttccaatgatgataatgcttgggatggcttccagtctgcagaaccagcacctaactccgagaaaaaggatact

SEQ ID NO: 451204 - DNA, 335 bp, Triticum aestivum
tactacgccgctcggcaccctagtagacaacaaacaagcggggcaagaacatggcgatcgcgatctcgcaggaggccttcgatgacatggtccggcagaacatggaggacctcggaatggaccccgacgaggacctcgccgacgccgttgacgccctcaccctacagggcgccaacctctccgggatcatcaggcgcgtacctggggacgccgcggcggaggaggtgaatccggtgatgcggttgctggacgagctgaaggcctcctccagcggccggtcggcggaggatcttgacaggctggtctctttgctcgacgagttgctcgagctgtgc

SEQ ID NO: 451205 - DNA, 161 bp, Triticum aestivum
tttccacaacacactcccttggcctcctcctccgcacctcattcacaccacccccaactcacgatcgatcgctagcctcgccggagcatgaggggttcacggtggtgctgctgctgcttcggccggggcggcagcagggccactcggtcggggcgcgtggg

SEQ ID NO: 451206 - DNA, 75 bp, Triticum aestivum
ttgtcggctacacttccctgacagacattgttaggccttgtcagggaagctagctaggtaagaaaaaccatggcc

SEQ ID NO: 451207 - DNA, 343 bp, Triticum aestivum
cccacgcgtccgtgccccccgagccgcacgccccaaccacccctaaccctagatcccgccacactcaccccgcacacgcactctcactctcccactccgcctgcttgtcagttgtcactatggaggccgggagcagcaaggccaggctggcggtggcgtgcgcgatcggcggaatcttgctgggcgcggccgacgtggcgctccacgttgccgggcccgtggccgtcccgggcctgcccccgctcgacgcgctgcgccgccggttccgccgtcggcgccgacccgtgcgcgtctacatggacggctgcttcgacatgacgcactacggccactgcaacgcgct

SEQ ID NO: 451208 - DNA, 69 bp, Triticum aestivum
tttgctacactaccctgactgacattgttaggtcttgtcagggaagctagctaggtaagaaaaaccatg

SEQ ID NO: 451209 - DNA, 297 bp, Triticum aestivum
tcggatcgagccatccgcatcgccgtcgccctcgatcgccttcccttccgtccctcgcttccacacaactcccagggcctgctgctgaaacctgcttcttcttcttcttcttcttcgtcgtcgtgttgtttgctgtggatatatccgacggggggagatcgaccagatgactggctgccacggcaacggcaacggcaactcgtccgtatccaccatgggacagcagacggtcactgagaagaagttcggaggaatcgcaccaaagaagcctctgatttcaaaggaccatgagcgcgc

SEQ ID NO: 451210 - DNA, 423 bp, Triticum aestivum
tttccggtcagcgctgtgatgcccctaccgcacctgcagacgtaggtgctgaagccggcgggggctggaaccgcagggttaggcgaggccgtatcccagatgaacgggaaccagatgcacagcgagtaagtgcactagagaaggcattgactggcttcgcggagaggcagactgatgttgttgttaatccaacagtggggacctgcttcgattcgattacagaggcatatgatttttataacctctattcctgggaaatggggttcggtataaggtacggcaagagcaggcggaatgcaaagggtggtaaatgcatgcacgaaattacttgtgttaattcgggtaaaccaaatatgggcgggaaatcgcgcatgtgcgagtgcacagcactaattaggctactcagaactgatgacaacggat

SEQ ID NO: 451211 - DNA, 293 bp, Triticum aestivum
ctggaagatggaggtacggccgtgccataaaaagagtctgctttggaggaggcgggtgcaatggatgctgacttggtgactgcacataagtgatacaaatggtttgctgaactggaataaactatgaaatctcagactgaggaaaagtctcgcctatacgagagtacattagaggaacgtgttaacacatgtgatgacatccttcaacaagtggatgggacacagaacttatttgaagaactacaatacttgcactcaagtgttgccataaagacacaaactttgcatgatgc

SEQ ID NO: 451212 - DNA, 407 bp, Triticum aestivum
tttcttaaccatctatctggtctgatcattggtcaggacaacaatgatcctgagggctgtgacttgattcaccttagagccatgtctgaattgaggtaccttcagattgagagacttgatagggctacttccggagcttctgcactcgcaaacaagccattcctgaaggttctacacctgtctgagcaagcagcattaattgaagaagaagagaatgaggaagaacaggagaaccaagagggcgcagagaaagaagaaaaggacaaacatgaagtaaaaagtgctcagtggattagagatgattcagctaaagtgagtgaaaagatatggaatgagctcaccccacccaatagcgttgagaagctggtaatcaagaactaccaaggtcgaaagtttccaaactggat

SEQ ID NO: 451213 - DNA, 222 bp, Triticum aestivum
agttttgtggcggcgccccctcccccggcaacccatcctccctctctttcccccctccccgccgccgccaatagcccccgccgggcgaagcccgcgcggatctggcggcggtgggctgccattttccgtgtggctcgttcacgggctggaggagccccgtgtggcggctaccggcgtggcgtgactccggcgcgcagcggttcatccagtggaggctgggga

SEQ ID NO: 451214 - DNA, 440 bp, Triticum aestivum
tttcggcccctgctcccatcccttccacctcccctcccgctgcatcggctctccgctcagcatccctcccggtcacctccatccctcctgcatccgcctccgcttccttctccggttccctccaccgcgctattgcccctcagcccatccaccccagccactccctcccggccttctcggccgcttctctccccgcggcagccgacgtctgccctccgcccccgggcccccaccattccaactcgctctcggagttcgccgcttccgcatcccaatcccgcgtccaccgccctcccactcgcgccgcggtgcgcgcggaccgcccgcccccgctggagctgcgcccgaggccatcgagggagtcacagtctggcatcgccctctgtgctctcgcctgctgtgctgctcctggtgccgggacctccactcacctctgggcg

SEQ ID NO: 451215 - DNA, 127 bp, Triticum aestivum
gggagatcacggagtgcgatcgacaccgtgcagtacgcagacgttgcctcgccgattgcccggaccggcgagcgccaaagcgccagccagcaacggaacgcaaggaattgcaatgggagatgggccc

SEQ ID NO: 451216 - DNA, 437 bp, Triticum aestivum
ttgtaaaagacaaggataaggagcgccatagggaccgtgacagagatagaggaagagacagagatcggggtcgggacagggatctagacaaggatcgggacagggacaaggatcgggatcgccaccaaaggcatcaccgtgacaaaagggagcaccgagaccgtcctgatgatcacgatcgtcacagaagccgtgattctgaaaggagaagggaccgcgagagagatggacatcgcaggcatcgctctcgttcacggtctcgttcaaggggcagggatgatcacagatctcgatctcattcaaaaagcaagcgagtcagtggattcgacctgggaccaacagcacaatccgtacttcctcagttccctaccattccaaccccaagtcagttacctggctcttctattcctggaatgttcccgaacatgctccctttt

SEQ ID NO: 451217 - DNA, 56 bp, Triticum aestivum
tggacgcgtgggcgtcggcggtgtgctgcgaggacgtcgacgccgaggaggaggtg

SEQ ID NO: 451218 - DNA, 118 bp, Triticum aestivum
tatctccggggagcacctcgaccccgcagcctcggcgtccgcgtccgcgcccgcatccgtcgcggaggtcaacgcgtggctggcttccctggcagcggagggcggcggagtgggaggg

SEQ ID NO: 451219 - DNA, 251 bp, Triticum aestivum
tcttcacgcgtccgcccacgcgtccgcccacgcgtccgcggacgcgtgggtggcattatactgctggagatattaaccgggagagtacccttccctgagcaagacctgccacttgaacagttggcgtccatctattttgaaggcaagatgcctcttgcagagctgatggactcgagcctgggctccttccctgaagaaaccgcgcgcgcgttgtgcgacgtcgcgaggtcctgcatcgacccggacccgag

SEQ ID NO: 451220 - DNA, 302 bp, Triticum aestivum
tttatttccttcacgtataaatggctccctcctgcggatgataaggatgaagatcgccgtcagcccaagggccttaactttctccatgatgccaacctgccggtgatctacaagcaggccttcaacatctactggactagggtcagtttgagccttcacgagctcgacatcggagccagcactctacatgcttatcgacgcggtggccatcgaggtcaaacttgtccggaaatatttgtcggagtaatggatgtatctatacgcatgttagttttagacacatccatttttatgcatttctt

SEQ ID NO: 451221 - DNA, 407 bp, Triticum aestivum
ttgtccacgcgtccgcccacgcgtccgcctgcacctttccaccttgcctgcccccctcccctccgtctcccccacgcgaccgcacgaggtgcaggacgggatccgtccgttgcttcccacggtcgcctccgttccgtggactgcaccgggcccgccgtccgtccgtccgtccctgaaagcaacgcctgatcggattcacgagggggtcgactgccgctgctcctcgacggccaccaccgtcacctgccgcaggcaagggaatcttcaaaggagaaatctgaagagcacacaaacttggtcttctgagctgaactcctggccgacgaagcagaagccatggggtcaggggactggttcaagaccatcatcagcaagaagaagtcgaaacggggcaagtcaaagcacgc

SEQ ID NO: 451222 - DNA, 308 bp, Triticum aestivum
ttttcttcccacgcgtccgaacacaatcagtcttgctttctttacttatccagtgaagttattaagatatttgggtctgatccatcttgtgcaagctatcttacatgtctgatacagacactctttaatcatacaatacaattgctcagaactattcaggattttacagctagacccgacatagctgatgattgctttctgcttgcgtcaagatgtattcgctactgtgctgatctatttgtacctacagagatttttccaagattggttgattgtgcaatggctggtgtaactatacaacataggga

SEQ ID NO: 451223 - DNA, 361 bp, Triticum aestivum
cggttatccgctcctgagtgattgcaaataaaccgcttgagggggttcggtgattcatttcggtaatcacaacatcatcatgtattccccgcaaaaaaaaataaaaaatcatgtattaatgctggaatctcacagggggtggtcttttggtcctgaataagttattctgcccaatcttgacaatttcttcttgtatttatgtttcgacgtcatgacttcttccccagatccattgtatactactaatactactccctagtgcccatgttgaaaagtaaatgacgtttctggcattattgatatgttgccaaacacaaagttttagccaatatttccttttgcgagatggtactttgcttgt

SEQ ID NO: 451224 - DNA, 446 bp, Triticum aestivum
ggaaggaagtggccgccggcgagcggtacctcgaaagacggacaagagatggcgtggcggctggcgctgccgctgctgctcttctactcccgcatcctcctctgctcctcccaagtccaagacaatgatccctccaaactgctcaagagcgcctcctagatgatgagcctaaggaaatacgacggggcgctcggtctgctcaacgctgtcctcgagctcgaccccaaccattccgaagcttacaggcagcgcgcaacagtgcttcgtcacagatgcagacacaaggaagctgagagtgactataacaaattactggagctcaagcccgggactgcttcagtggagaaggaactagctcagctgctgcaggctcaaaacgcattggaatccgcttatagccagtctgatgctggagaattctcaaaagtcctggagtacgtcaacaa

SEQ ID NO: 451225 - DNA, 325 bp, Triticum aestivum
gaggacaaagccacccacccaccaagagtcagtctctccctccttcccctcgtgcggtagcctccaaatcatccaacgtccaatccacttccaacaagataccgccaccatcctccgcctgatccgacctctcttccatcagcgacagcgaccccgcaacccccggctccatcgaccatcgggcgagggaatggaggaggagggcgcgaggaaggcggtgctcttccggctgttcggcgtcgaggtccgcggcgcggaggaggaggatgacgcggagcccatggagctcaagaagagcaccagcatgcccaacctcgcctgcgcc

SEQ ID NO: 451226 - DNA, 389 bp, Triticum aestivum
tttcccacgcgtccgcccacgcgtccgcccacgcgtccgcaacaagtacattggagttatctcagtgcatcagaattgtttctttcatgcagagtttctgctgctatttgttaaatcttaaagaaacgtctgttcctgaggtttacaagtccccttgttcaaatatgaaaatgatttatttgcaaacttcaatgcaaaatggttagtcagtctcgaacaactgcatgtatatatactttctagctatgctattgatgccacatccagattacacttttcttctctttttcttttcttgggagtagaaaggtctcactcaaggatcgagcaaatgcagctctaatgcttgtgtcgtctaattcaaagcatgatgactctaaatgttcatg

SEQ ID NO: 451227 - DNA, 94 bp, Triticum aestivum
cccacgcgtccggtcaatgtgggcaacattgaagtgcccgccagtctgaggccgtgcgttcacatgttcttaatgtttgtgctaagcccggaca

SEQ ID NO: 451228 - DNA, 312 bp, Triticum aestivum
tttctcattgatgctgtttcgtgcatggcgaagaactccaattatgtgaaagctatgttttctggctcgatggatggggatattcgactatgggacattgctgcaaggaagacagtctgccagttccctggacaccagggtgctgtgagaggtttggcaacatctaccgacggcgatcttctgatatcctgtggggtcgattgcactgttcgactctggaaagatcctatgcgtaagatgatggacactaatgatgctattggagatgcttcccagccgtcagcagtctatacatggaagcatgcattttgg

SEQ ID NO: 451229 - DNA, 376 bp, Triticum aestivum
tttcggacgcgtgggttgtagtaccacaaggaagggataggagctctgtggctctctctgctttctgaggttgtgccgagatgaaggtccctctccctgtgaggagcaagagcttcaagaagagcaggggagcttcatgcagcctccccctgctgctgctcatcggggccgtccagttcttggtgatcggcaagccttttccgtcgctcttgatggatagcagcaggaggagggccttcttcaatctcgcagaggaggagttcatcccggagcctcaggtgagctgcgacttcaacgacacgagatccgactactgcgagatggccggcgccatccgcatccgcgggagcacgtcggaggtgttcgtcatgacccc

SEQ ID NO: 451230 - DNA, 329 bp, Triticum aestivum
tctggccgatctccgccagccatgtcgcccgacgacgtgtcccggaagtcgcccgtgccgccgccgtccccgccgccgatggactcgtgggctcggggagggcgtcgctccaggcgccgtggcagcagcggcagcgccagctctggcggcggcgtcgagtccgaggaggagtacctggcgctctccctcctcatgctgtcccgcggcgtccgcggcgaggtcgaggacggcggcatcggaggcgtcaagggcttgggagcggcgccgaccaaggcgcaggggtacgggtgctccgtgtgcggcaaggtctacgcgtcctaccaagcgct

SEQ ID NO: 451231 - DNA, 248 bp, Triticum aestivum
gatgcccacaaaaaaaattctccagttttttcccaatataataggcacccttcctacttgcgacaccattattttgggtagtcaagtcacatcacattactcatgtgattaaactaaacgacgcgctagacacgttacactagtgtttgacttggtacagaaatgaaataattgaaaagatactgttcatagctcatgtctgacgaccttgcaagcttgcaatatcatctgcttcttcgcttttcttt

SEQ ID NO: 451232 - DNA, 167 bp, Triticum aestivum
cccacgcgtgcgagtcagggtaactggagacagggctcaatgactggaaaaacactttacgtctcgaagagtctggtgcgctctttacgatccttgaaaatcaaagggaaagaatgattttctcacctagtggtactgataaccgcagcaggtcttctaggtgaaca

SEQ ID NO: 451233 - DNA, 138 bp, Triticum aestivum
  unsure (1)..(138): unsure at all n locations
ctttcctgttagcaaggngggactatcgccagggtgcttagtgacattcgacaggggtgggcggacnacaacagagagaacctcctccaggaagaggaggagcaagtggaagaggcttgagtgccaagcaacaaacta

SEQ ID NO: 451234 - DNA, 425 bp, Triticum aestivum
  unsure (1)..(425): unsure at all n locations
tttcgcttacccgtcccgcccgccactccnggagtccggggttaacttaaacctgggccggggcacacaaccagccgtcaagccacgccgccgctcgccccagcgatgccgccaccctccctcctgctcttccactgccgcgccccgctcccgcaccgcccgctgcggatgagctctccgtcgccgagcaggagggtcgtctgctccgcctccaccgccgaggggtacatctccgcggcgccgatcctccttccagacgggccatggaagcaggtagaaggcggcgtcacggcggcgaaggggtttaaggccgcgggcatctacggcggcctgcgcgccaagggacagaagcctgacttggcgcttgttgcttgcgacgtcaacgccaccgtcgccggatcttttacaacaaatgttgttgctgc

SEQ ID NO: 451235 - DNA, 104 bp, Triticum aestivum
ctttacgcgtgggtgatgtgtgggttcagggagggtgtaacattaactgggtgagagggtaagggacctatcctatatgtatgtctaaaatagtaacatgtaac

SEQ ID NO: 451236 - DNA, 293 bp, Triticum aestivum
ggttaagctacgcataccactacttcacttactgggtcggggaaaacttgcaagtgagcatgggctgcagacacgacatgcacggcggccacaacggcggcgtgaagggcttcgtgtccaacctcgtcggcggcggcaaaagccacgggtacggcggccaggggcacggctgcgaccagggctacggcggccacgggcagcagcagcacgggtacggcggccacgggcagcacgggtaccctccgcccgccggcggggcttgccccccgtacggcggctacccggcgcaaggc

SEQ ID NO: 451237 - DNA, 247 bp, Triticum aestivum
gttgagtcttgtagccgagagcaaagcaagcatcagagagggagagataagcaagggtagcggggggagaggagaaaggagaagcgggccaggatgtgtggcggagcgatcctcgccgagctcatcccggggggcgcgccggcgcggcgcgccgcgtccggccacgtctggccgggcaaggccgccgacgacttcgaggccgcgttccgggacttcaacgaggaggaggacgtggtggtggtggtgg

SEQ ID NO: 451238 - DNA, 383 bp, Triticum aestivum
gttacttatctaggtaaccaaggcaggcaacatggacaagggaaattttaaggtgggagggtgctcactagcactaccactttgaaggtgatcatgtgcctgctcatcctgagcctcaccgtaaactcgaccaccgcagactgcggctgctgcataagcttagccgcaaaaggatgttgttctacttgtatttttgcgggtggctctgactttgcctgcaagaacacttgttgtttcccctgtattcttgaagattctgtggttgctaagatggatgaaatgggagtggcttcgaagatggaaggactgtactaaaacgatatgcttgcattgctaccaacatggatgccattcatcggcatatgttggattgcttcgatcta

SEQ ID NO: 451239 - DNA, 329 bp, Triticum aestivum
cttctcttcctccgccccgccccgccgtgccgtgcgaggattggagaggagaggagaccaaggagatttgccgttttttctcttcacgacgcagccgctgccgctgcgaggaaacaaaacaatcccgtgaggcaaggacggttgtgaagcaaaggggtgacaaagccttctgcagcatggagtgcagggagaacttcatggaagatgagatggaaggtgaaccttcgataggtcactctgatcccagctgcccatcctttgacaatcgtcgcattttccaactgatccagtgaccagcgagcatcagtaaacacttgatgtggtcgtat

SEQ ID NO: 451240 - DNA, 376 bp, Triticum aestivum
cctatcccatcgccgatcgccttcgccccaccctgaaaccgttcaaactccaacgggggtccgatggccaaccagccccgcgaacgcgggtcccgcgccgcgcgcaagggccgccccgtccgcacgccagcgaccctgctcgcccttaaccccacccccgatcccgatctgtccgcgcaggcctctgacgacgtctctccgtggggccgctcgacggcggacgagctggaggaccgcctcctcaagaggctggaggaggcctacgcggcggcgctggccggcctcgctgagctcggctacgccgaggactccgcgctccgggccgtcctccgcgcgggccactgctacggcaagcttgacgaccctgtcgataaca

SEQ ID NO: 451241 - DNA, 393 bp, Triticum aestivum
  unsure (1)..(393): unsure at all n locations
gttgcacctccgcaccgcaccccatctccatcggganccggttgaaatccccaccgggaacggatcgaacggccggcctacccaccccacccccctacccgtcagcctagggttttgagtccgacgcctccgcctccgccgcgcaccatgggccccgacgagctccccaaggccgccgccgccggtgccgacgagatttccccgttctccttcagcatctggccgccgacgcagcggacgcgggacgccgtggtgcggcgcctggtggacaccctggccggcgacaccctcctctgcaagcgctacggcgccgtgccggccgccgacgccgagcccgccgcgcgcgccatcgaggccgaggccttcgacgccgccgccgtcaccggcggggcc

SEQ ID NO: 451242 - DNA, 302 bp, Triticum aestivum
gccacccccgctcctctcctctcgcccatgcccgccaccgccgaagaagctgccatggcggccggcgacacgggcgcgcccgcggcgggcggagcggggaaggacggcgagcccgagtcgccgcgggagccggaccccgatcaccacgctccggtgtcgccgggcgcttccgaagaggaagagggcgccagcggcgcggtcgaggcggggcaggacgacgacgcgcctgacccggaggacgagccggaggagggcggtgacgccacggaggacgatatggacgaggaggaggaggaggagga

SEQ ID NO: 451243 - DNA, 393 bp, Triticum aestivum
gtctcgccctttttttttttttttttgcaggtaaggtattcttacagtttcagtaggggtttcagacatggacagagcataactaatccagcgcccactgaaatcagaacgtcacagcctcatcctttctacataatcttacccttacattttgaacttgtcaaaagtacccagtagcataaactacaagcacaatgcccgccgacgactaacaacgaccaagatttgcagcaagtccagcccgccttgcttctcagttgggcttttcctcctggcacttggagcaggtacacgtgaacccgtagtccgcgagctccgcctgccgctcctcgtagggaagttcttcgtcgatgtaggagatgggtgatctcttcgcccttgctgataggcccc

SEQ ID NO: 451244 - DNA, 453 bp, Triticum aestivum
ctttgcgtttgcgctgctggagaaggaggaggacttccggggcgcctttgaagaggcggagggggaggcaaagaagtgtggctccaagaggaaggtggagttggagcgggatgaggagggggcagcgttcctggcgtggatcgagtccaccaagccaccgacagaccaagtggattactctgatggggatgtgtcggacggctaccactcggaggacgacgccatcggcagcgacagcagggacaatgatcggtatgagcgccgcgttcaggccaacaacactcgctggcctttcttggtgggggcctaatcccatccatgacggtgctcttgctcttgtggtctgagaagctgacgaggagctttaccaatcctatcccatctagtaccaaccatgtatctatcttatctatctatatattactagatgatcctgtggacatatatatatgt

SEQ ID NO: 451245 - DNA, 285 bp, Triticum aestivum
tttcatttcaaggttactgcaaagtgtcgccttggtctcattgaaaactgcctggggatggaccatcaacgacaacgcaagtcgtctctgaatataatctagcactcttaagtacaactaattatgctctatgatgtgatgaacctacagtctacttttggacactgctatcaggtacttttgaagatccaacacctatgtcgttgcctatgtaaactctgctgttgtcactttccataatgacactcttgtgtacaactatttatttctattgctattctcttc

SEQ ID NO: 451246 - DNA, 394 bp, Triticum aestivum
cattcacttgcacagcacacaaaacaagtctcgtggtatagagaaacggagctaaggaagctagccagctcgaccatgggtggtgttcggcagcagctcatggccgccgtcctcgtggcggtggcgctgatggccacggcggcggaggggtacatcactcagaagacgtggggcgccatccgccgggcgaaccgcgccgggccgttcgtcggcctcgtcgtgcccaacacatacgagatggtccccgtgctcgagtcgcccagcttcgtggccagcaagagcatccctaacatggacatccaagggcgaaggtttcgcttcggaaccatcgaaagccaaagcgtcgtcatggtcatgactggactgagcatgctcaacgctggtctgaccaccc

SEQ ID NO: 451247 - DNA, 347 bp, Triticum aestivum
cttacccccatgtccgacggcggcggcggcgagcccggtgccggcggctcggcgccggtgtgtaactttgtccggaagccgccgaagaatatccggaagcgtcccgccgcgtccgtcggctctgacggcgaagaaggtagcggcggcgacgattccggggccatcgcggcggcgcgatctaagaagccgccgtctactaccagcaagctcttcttctcctccgccgacaactcacacgagccccgccgtttccagttcgagtcgtcccggacgattcagtcctccaccgacaaccgcgccactgcgacgctcgagacggagacggcgtacgaccgtgatgcgcgcgc

SEQ ID NO: 451248 - DNA, 443 bp, Triticum aestivum
cgctatcacagcacaaacaacggcggggagggcgacacgatggcggcctgcctccgctgccgccgccgcctccccctctcccctccggcggcgccgctggaagacgacggcctgctctctgagaacctcctccgcctccccccgcagccctcctccctcccgcgcgcctccgccgtctgcagccgcctcctctccgaccccgccttccgccgccgcttccgcatccaccaccgcggcagcgctctcctcctcggctccttcatccattaccccggaatcaccttccagccagcgcccgacgcccccgaccgcctccccctcgagcaattccgcctgaagctcgacgaccactacatcgccctcggatgccgccatggcctcgcgctcttcttcctcccgatccggctccaggtgctcgtgtgggaccccctcgccggccacca

SEQ ID NO: 451249 - DNA, 343 bp, Triticum aestivum
cttacgcgtccgctctccctcccgctcccttccggtctcactgacacccgggactgggcagccgacggtttccccgcctcgccggactccggtgccggcaacgacgacgacgcctgctccgtctgcctcgagagaccctgcaacgtcgccgccgaagtgtgcgggcacgagctgtgcctcaagtgcgcgatggacctgtgcacggtgatgaaggcgtacgaggtgccggggctggccggcaccgtgccgtgcccgctctgccggagcggcatcgcctccttcaggaaggccgtcgccgcggccaccgcgtcgcccgaggacgaccagcaaagcatgagcggca

SEQ ID NO: 451250 - DNA, 356 bp, Triticum aestivum
gtttttgctgccacttgtaaaacgactgaggatggttttactccagcgagcacgggacgagaatttcctggtctcaaattgcttgcagtggtggaaagcatcaagaaggagctcccaaccatcacgcgatttctggagcaacggtcacttcccgtcgaggtagccacgtcgtttgctcggatccatgaactactggaggattctaacttgaaggaaggaaatgccgcagtggatgctgggggcgaggggacctctgagttgactgcaccgcaccctcctgccattccaccgcatgggcctgtgcctgatgaagcggtgcagaacggcagcgatcatcctgcgccggaatgctgtga

SEQ ID NO: 451251 - DNA, 63 bp, Triticum aestivum
tttcgatttaaaaaaaaaaaaaaaaaaaaaaaaggaaaaaataaaaaaaaaaaaagggaaaag

SEQ ID NO: 451252 - DNA, 95 bp, Triticum aestivum
  unsure (1)..(95): unsure at all n locations
cataaggttgagtctgagtttgtaccgggctacatttcagattgcatgggggttactacacngactcccctagcttcaggggttctcactgggaa

SEQ ID NO: 451253 - DNA, 317 bp, Triticum aestivum
  unsure (1)..(317): unsure at all n locations
atagatcatntgatattgttcaaactccattagggtgtacaaaacgtacgcacgctagaatatatacaaaaactcctgctgcatcatccatcatgacatgcagcatcgcacacaacaaaggataaagctggacaaaaacaggtccaagaggagctgctactgctcttcttctaagattcactcgatctactgccgtagcgcgatacgtactaccgtatgtatctgcgcggccttgtgtacaaaaaccgtattgacagcgtcggccggtgcgtctcgatcgccgactatttctacttctctgcggagccggggtccca

SEQ ID NO: 451254 - DNA, 367 bp, Triticum aestivum
cttacgcgtccgcccacgcgtccgaccggtgaagggatactctagtgtggaagcgcttcggcctcggcatctccacatgccacaagctcgtcctcgaggtctgcggtgccatcaagtccgtcctcatgccgcgtttcctccagtggcccgacgaggccgccgccggcagattcaaggagggcttcgagagatccttcggtgttccgggggtcatcggagccatgtacaccacgcacatccctatcatcgcgcccaagatctccgtcgccgcctacttcaaccgtcggcacacggagcgcaatcagaagacatcctactccatcacgctccagggggtggtcggccctgaccgcgccttcaccgacgt

SEQ ID NO: 451255 - DNA, 437 bp, Triticum aestivum
  unsure (1)..(437): unsure at all n locations
gttgatctgaaagaagttgaggtacgcgcatccagcaaggatgactactgtgaagatccagcacctaatagcaaacagaaccctgctgctgctatcatgccatccaatcctccacaattgattctcccttccaacatggtagaagaagccaaggcatctgggcaatcttctcagactgaagctgacgaggtcaacgataatctctgcgtggagaaagcaaggccagcctaccaaagaaccttatcaggtggcctgcaaagccctagagatgccgtcgtctcccaggatgcaattcttgagagagtgaactccaagaacaagtcaaaatcctatcagctcggcgacaggctgtccctgaaatggagcactggaaatggtccaagaattgngtgtgtgaaggattatccaatagagctcagaatgcaagccctggagat

SEQ ID NO: 451256 - DNA, 465 bp, Triticum aestivum
cttcgcagcacacatccgccgtagccagcgctcggtctagcttgcttggggcgtgggtcgccggcggcagagaaagaaggcagacagaggaggaatataccggtcgagatgtcgaagtacgtggagatgctggacatgggcgtgcgcatcgcggccaggttccactcccactgcccgcagacggcgcgcatgtactacaagccgccgcagtccacctccacgtcgtcgtcgggcgccgccgaggccgcgtcgacggatcggagggccgccggctttgacggcgaagacgtggctgctggcttccggcccttcgccgcatcgggagggttcggcgacggcgtccagccgcggttcggcttcgacaccgcgcaggtcgtcatctacgaggtcgtatgagtcgagggcttgaacaacggcgacgaattctaatttctaaaaggagagaggtctctttgatgagatttt

SEQ ID NO: 451257 - DNA, 83 bp, Triticum aestivum
ggctccagcgcgctcgttcaagtccccggcgccgtcctccatgctggcggactgggggtcgccggacgggaagctggactggg

SEQ ID NO: 451258 - DNA, 178 bp, Triticum aestivum
cactgtttttcggagaacaatctcgggagtcgcataatcactacaacatgaatcgaggctgttgcaaaagcaggtgcaggtgcccatgtttacaagacttgtcttcttgacgaagccgatgcttaaaccttgtttacccaaagaacttttgggagtgtgggtgcctgccctgcccatt

SEQ ID NO: 451259 - DNA, 170 bp, Triticum aestivum
gctccagcgcgctcgttcaagtccccggcgccgtcctccatgctggcggactgggggtcgccggacgggaagctggactggggcgtgcagggcgcggagctgcgcaagtccacgtctttcggggtcagaagcagcagcagggcgcatgatgcgactaggcaggaggacat

SEQ ID NO: 451260 - DNA, 68 bp, Triticum aestivum
caagatgctggacaagctgtgggacgacgtggtggccgggcctcgcccggagacgggcctcgacaagc

SEQ ID NO: 451261 - DNA, 282 bp, Triticum aestivum
cgatgcaaagcaaagtaatggtcaaatccatggaaagagtgtaatgcatacagttagaggtggtgtgttcctctttggtcaagcgatatcttgcttggtaaatactccaaaacatagaattagctccactgcggcaattaactatgagttgggacgatctagaacaacattaacctataatggtgaaaaattgactgttgcttcccgtggtgttctggatggtgcaccttctggagaacctagtgatgcatacagagatgacaagtttccagatgctggctt

SEQ ID NO: 451262 - DNA, 177 bp, Triticum aestivum
cggcggcgaggactggctcgcccagctcctgcccgaggcgcgcagtatggacgtcaacaagataatggaatgtctgaagaagcatctgccggtatctgtgccagagggactgaacgaacttcaaatcatcgttgtgcggttcgaagacaagatttatactgcagcgaccagccagtc

SEQ ID NO: 451263 - DNA, 205 bp, Triticum aestivum
gttttaatcgtatgctttttactcatgacactggagcccccactgcacacaagtcgtggtggaagtttgtccagttcggagaaaaaagaaacaaagttcaaaaagaaaaatcatgagttcaccttccataaagtttgaattacagagatatcaccttgatgagtatgtaatatgattgcaaatttgcaattaggaatgggtgtgt

SEQ ID NO: 451264 - DNA, 246 bp, Triticum aestivum
ttgaatcaaaaatttatgcagcatctggagaccaatccggatcatgagtgtctcaagggcctgtttgattggatgcactcgtacttccgtacttgcccagattccctcaagccatgtatcttctacctgtcaattttcccttgacaccacggcatttcggcaaaggcgactagtaaggaggtggattgcagaaggttacttttgagacagtgatgaagaatctgccgttgacaaaggggagaactt

SEQ ID NO: 451265 - DNA, 321 bp, Triticum aestivum
ctctctcgaccggcgccgttttctcaacccacatggctctcgaagcgcgcctacgcctgccgttcgcggagccaactccggacaccgttttgctgtgaggatccaaccacaaacccaggcacatatgcttgtccctcaaacccgcctgcacttctatcttcgccgacaatgcgccgccgcccatcgtggaggtgggctccgccaacgcggacatctacgtcgaggtcgaccgtctccctcttgtcggcgagacggttgccccgagtgccggtcacagccttgacggcgggaagggcgccaatcaagctgactgcggggggc

SEQ ID NO: 451266 - DNA, 436 bp, Triticum aestivum
tatatcctcccggcctgcacacgcacaagcagcgagccttcctcctccagtcctcatctttctgccatgaagccccctcacttcaccggggaggccgccgccggcgcctcctgggctcacgaggtcaagcaggcccttcgtgacaagctccggtggacacccgccgcgggcaccacgggcaccggcggccacggcgccgcgaggccgccggcggcctcctcggctgtgaccgccgagccggtggcgcagccggcccacggcgccgactgccggggcttggccgccgccgaggaccccatcaggagggtcatgttcttggccccctggggccacacataaacggaaaaagcaagtgcacgcgcgcacggccatgccttggccggatctgcaactgcacctcaacaaaaatatggactactacgtacatatatatatg

SEQ ID NO: 451267 - DNA, 334 bp, Triticum aestivum
ttttacgcgtccgcgcgcgaggcagcggcagcagcagcagcttcccccccaaagccagccagccaaattcccctacccacacaactccactccccaggttagggttttgggatgtcggatcggcagccgtcggaggagccggaggagcaggtggacctggagggagacgacgacgtcatggacgacgaggaagggtaccgtcgtcgtcgccacggtggcgaggactctgatgaaccggaggaggagcccgaggagcctcaaatcgaggttgagggcgatggcgatggagatggccgggaggaggacgccggtatggccgttgcgagtgatgaac

SEQ ID NO: 451268 - DNA, 51 bp, Triticum aestivum
gaagactgcaattgaaaaggctggatacaccggacaggatgttattggaat

SEQ ID NO: 451269 - DNA, 422 bp, Triticum aestivum
ttttacgcgtccggagattccatcaaccggatctcttgttgaaattttcaacaaggctattcttgaacgctgtctgaaggtatataaggaaaaactggagggcttacgtctacctgtaccagtagagaaactgcagcaaattcatgaggtggcgaatggcgaagccaaattgctgtttgataaacagcactttggtaagcatcatgctgtacagtcaatcctcaagcttgaagatgagattacaaaggtgtacaaaaacttccttctagctaatgagtatcaatcgtccaagctttgcgaagcacgttttttggaatgtgaagatcaaatggatcaccttcaagtcttgaaacttccttccatggcaaagttcaatgcaggctttttttactgcaatcggacttttgtaatggaatgtgtgg

SEQ ID NO: 451270 - DNA, 152 bp, Triticum aestivum
ttgtcgcctcctgtgcgccccaaaccctagcttgtccgcagcgccgtggactcggctctcccatcctgcaccgggaggcatggtgacggagctgggctacgcgccggccatgaagtccggcaagctcgggtgcgagggaacccaggaggggc

SEQ ID NO: 451271 - DNA, 419 bp, Triticum aestivum
cgcgtgggctcgccggcatgcaagccagcagcaactctcctgtgccggctgggccacgagcttcgccgtgccccactccgagcagcacacctggagcatggccgccggcgccgctgctcgcgccaacgcgcggctggcgcgactactgctgcttgcgcccacgcgctgcctgtgtggctgctgctactctcgcagcggctgatgctgctcgcggccggcgccactgctcgcgcccacgcgctgcctgcgcggctgctgctgctcgcgtccggcgtcgctgctgcttgcggccgacgccggtgctgcataatggcgggtggacagggaggcgcacgacagagcttcgtcgccgcccgatgccatgccccgcatcgggctccgcccgcccggcccggcgctggcgccggtgaaaggttcac

SEQ ID NO: 451272 - DNA, 367 bp, Triticum aestivum
ttttgcaagggcgaccgtgtccgcttcaagtccgacgcgctcgagttcaacaagatgtcggagctgttcaaccagcggagctcggtggaggggaagatcccgtcggggcagttcaacgcgtgcttcgacctggacagcgggtcgtgggcgcaggacgcgtcctccaccaagtccctcgccatggacggctacttcatctccctcttggacctccgcctcgaccgccgcccgctcgccctcgccgcccacgtcctccgcgacgtccccgccgcctgggaccccgccgccatcgcaagcttcatcgagaagtacgggacccacgtggtggtggggctgagcatgggcgggcaggacgtggtgtgcgtgc

SEQ ID NO: 451273 - DNA, 429 bp, Triticum aestivum
gggttcgtggcgttctcggcgccactggtgctcggcggcggggtggtggcgtcggagcccaggaaggaggtgaacctgtggcggcgccgccccatgtcccctcccactccgctggagctcccctgagagcggtcgccgcagcagctagcagcagctagcaggcctgcatgcgcgcatgcaggccatgccaaacgtgtcgatcgtctgttctttcatccctagagtttgtacagtagtggtatacttctacgtgatgctcatacaaagtaggtagtatcgatttgattttgtaaacgcgtgatgatccctattctggaaggaattgaagaagttttttttaaaaaaaatcagcaggagtgaaagcataattttgcaaagtcgacgaacgagcataatttcgcacacacgcatccttgcttgctttggttg

SEQ ID NO: 451274 - DNA, 250 bp, Triticum aestivum
tttttgcgggggcaagaatgctgctgggtttccgcgacgcacacaaagctaggaccatggcgccagccggaggacgcactacccatctgctcctgctcgccctcctgctgtccttcgtcctcgcctactccgcggacgggagctacctggagcaccccagcccgggcgccgggggattcttcagtggcataccgtggttccgcggcggacagacgagtggagcccgaggtgccggaggcatgggcgccgg

SEQ ID NO: 451275 - DNA, 323 bp, Triticum aestivum
gtttgctagctcaagaagaaagaaagaatctgatacattaagctaggcagcatgtacatgatctccagcatgctgggccggaggcagccgccggcgcatccgcagccgcagtagcacgcggagggtcacaaggacaacggccacggccacggcggacgccgggactaggatgtggagccagtgagcatagacatgctggagccggtcatggaggccatctcgctgactgctttcggacgtggcggttgccgcccagcgctgggcctgccggtctccacgacaagcatggactggaaggagacacctaccgcgcacgtgtttat

SEQ ID NO: 451276 - DNA, 431 bp, Triticum aestivum
tttgtcgcgtggatgacgatgcaggtcctgctgctaagaagcagcgaggaactccaaagggacaacagtcagcagcgaagaaggaagcaagcggatcccagaaaaagaagaaggcgaaggtagacgaggagctctctgatgaatcctatcaggatgacgacatgggcgaggaggatgatgatgacagcgacgacgactgggccgggtaaggggagcgacaaggagtgcccagatctgacatgccgtgaaaagggcggatcggggatgagcgaccctccctccctcactggcgtgcgtagtagagcgagtgtgtgtgctctttttagctgatcaatgtgaaacaatgcttgtttgttgatgtacaagttgttctagagcatctcaagaatccgatcccgacccacgcggtttgtaataggagtagaaattgc

SEQ ID NO: 451277 - DNA, 262 bp, Triticum aestivum
tttcatggcaccgagccgtcttgtcttgtagcatcatcttagcgtgtgtgctgctaatcctcttttcaagcatgggtggaggccacgacatgcacggcagccccaacggcggcgtgaagggcttcgtgtccggcctcgttaacggcggcaaaggccacggctacgggtcatcgtacggccaggggcacggctacggcggcggccatgtacagggctaccagcagggataccacgggcatggacagagctaccagaccgggta

SEQ ID NO: 451278 - DNA, 319 bp, Triticum aestivum
ggagctaggagaaggagttctcgccgcaaagcatcttgcaggctaggaaagaaaggaagaagggaagggcacatgacgtgcgcggtggcaccgggctcgccggtcttctcgccgtcccgcctcggcctgctggagcagctgcagctccaccaccatcacggctgctccagcggcggcgcctccttcctcccctcctcgccgatgcgccccttcgccctccgcgcgcgcatccaccccgagccctccccgtgcgcctgctgcgtgacggcgctgctccgcgagggcggtcggcagctggtggtgtccggcgcgggggact

SEQ ID NO: 451279 - DNA, 98 bp, Triticum aestivum
ttctcgtcccgtcctcagccaacctcccatctccgtctcgtgttgcggcggcagttccactccctcgccatgggcaagattaagatcggaatcaacgg

SEQ ID NO: 451280 - DNA, 150 bp, Triticum aestivum
ctcacgcgtccgcttgctgcctacatccagttatgtaaactctgcatcatactgcatgcgtccagaactagtcttcctgtaaccttccttgtctcatggattcagaagttaaattcaaataaaacaagttatggaaaaggtattcctctt

SEQ ID NO: 451281 - DNA, 75 bp, Triticum aestivum
ttgatgcgtggggtcgggtggggttgggagtggatgggggcatggagctggaggaggtggtggcttgggatatgg

SEQ ID NO: 451282 - DNA, 471 bp, Triticum aestivum
ttttaatttcctctgttggtctcatgacgccaccttgcttatcttccctgcacgcactccccacagttcaggtcgttggtgcggccatgggtctggtctaggtaccgtgcgcctcctcgatcccccaggcccgtcaatagtgaggaggcatagcagggcttgaggagcagttgcgtgagggagtagttgatcagttgagctagtcgaactcgatggtggcgttgccgtcagcgtggatcgtctcccctgcggtggctgggaggtaagcgagtgaagcagcatggagtttgaggttcccccgtgcgcgatgttggagctccagcatgcaaggcacttttcagcctatgatgaatgcaggtttgtatccacaccggctagttgcaaggtcgctaaggatgtggataagccaatacagtatagttcaaagtacaaagcaaattaagaacagattttaggtaatgtagtcagcat

SEQ ID NO: 451283 - DNA, 298 bp, Triticum aestivum
ctcttgcgtccgcccacgcgtccgcccacgcgtggggccactcttacgtggccgggcggtctcaccacccccacgcgcacccacatccgcacccacctccgcatcacccgcacccgcaccatcacatgccgccgccgccgcagttcgccaagcactacgcgccggggccgccgcctccccctgccgcggccgggcgacgcacgccgaccccacccgcggccggatccggcgggaacggctgcgaggagaataagacgatctgggtcggcgacctccagtactggatggacgagaacta

SEQ ID NO: 451284 - DNA, 392 bp, Triticum aestivum
ggtttggggaaggggaagcagtgtgtgtcggcgcggcggagcaatggcggacaagccgagccgggcgctggtgctctacgccgccggccacgcggcgctgctcgccgggggcggaggggggaagggccacctcgacgcgttcgcctccatcgcctcctgcggcttcctctccgtccgcacccccgccgtcaacgaggatggaggggacaagaacagcggcacgatccttgagctggggcagctgctcgacgtgtgcgatgccctctatcctgccaaggatggggaagttgcccgggtggatccgcaggagctagtagtccccaagctatccgagaggttcatggggctgagagctgctatggtcaccaattgccccggtgttagctcattcg

SEQ ID NO: 451285 - DNA, 348 bp, Triticum aestivum
ttgtctcgcggatcgtgagtggtggacgattcgcgtttccaaatacacgtctaagcgaagggattttgtggccttttgcttgtgacgtctgaatcggttgatgcctcagatccgtcagtttatgtcatctgcttcatgttagcatgccgctgtggatgtgatgtttatctccggggaacgccactcctgctggttcacaacgggccacggccaacgccaactgatatcttcttcaacgacggtcggtggttaagttaaagaatgctttcttgaggcttcctcgtctctgatcaaatgatgtccgggttgctttttgctcacaagatgatgctggcccgtcttcaaaca

SEQ ID NO: 451286 - DNA, 185 bp, Triticum aestivum
tgcttcctcctctcgaaacacccgaacggccgggtggattggattgggcagaggaggcgcccactggtggtgatggcctcctcgttgactacggcggcgcattcggtgtttcggggtggggccaaccctctggccgagctgaccgaccgtttcaggtcgctggaggtcggggtgcgctagtggat

SEQ ID NO: 451287 - DNA, 279 bp, Triticum aestivum
tttgttattcgtgggttgttggtggtctttctgtctgtcatttgtacctgatgagcaccaaccagactacctacgagaacttcaggtatcggtacgaccggcgggctaacccgtataacgtaggtgtggtgaacaactttctggagatcttgtgcactgctgtccccgcttccaagaacaatttccgagctagggtcccagtagagcaaggtttacagcaatcacgcccaccaaccaggggtttcatgagcccaaacatgggcaaacctgttggagacc

SEQ ID NO: 451288 - DNA, 267 bp, Triticum aestivum
caaatccccaacccgccggcgatggctctcgtctgccgccccgggaggaacggcggcggcggcggcgggtgcgcgcgctgcttcctgggattcctgctcaagttcctcgccttcctccaggtcttcgccgccgtctccgccgtgctctacgccgtctccatcctctcccgctgggcgcggcaccacgagctgcacttcgaccaccttctcccagacctatggttcgcgtgcgtcgtcatggccgccggcctcctttactgcgccatc

SEQ ID NO: 451289 - DNA, 112 bp, Triticum aestivum
ttctgctgacgcgtgggcggacacatgcgctaatgcagatgtacgttccatggaccccggcgacgcgccctcgcaagagttgttcaaccgcacggaccatccacgcgggcag

SEQ ID NO: 451290 - DNA, 194 bp, Triticum aestivum
gcccacgtggccggacaacatggtgatcgttcttagaaactggctcagaaagcattgcaagagccaggtcggctgggccgtccccacagccgatcagctgccggtgactccaaccaaagacaagctcatggagagtgcaggagctgcagcgcggcgtttgaaggccatgaaggctctggaggtcgccctgcagt

SEQ ID NO: 451291 - DNA, 354 bp, Triticum aestivum
tttctgcgaatattttggttactgcctctgctgtggcagcctctttgctggaccagtatatgagatgaaagattaccttgaatggactgaaaggaaaggaatatgggccagctcaactccttcaccattattacctactctgcgtgctctagttcaggctggaatatgcatggggttatatttgtatctgtcacctatgtttccgctttcacgatttagtgaacctctatattatgaatggggtttctggcaccggctcttctttcaatacatgtcaggatttactgctcgttggaaatactactttatatggtcaatctcagaagctgcaattattatatctggcctgggttt

SEQ ID NO: 451292 - DNA, 203 bp, Triticum aestivum
ccctccgcaggtcaagctcggcagctccagctccacctcgaaaccgaagccgccgccgccgccgtcggcagcggaggaggaggaggaggaggagggagatggcgtctggcctggtgactgatgacgtgacagtggggcggctggtccggatccggcgcacggtgatgcacatgctgcgcgaccggggctacctggtggtggag

SEQ ID NO: 451293 - DNA, 363 bp, Triticum aestivum
tgctagtatggaagtcactcaaggtccaatgggatgactcggtcgcaatttgcaacggccctgagagggtttctccttgggaaattgactcatctgatgcctcctcacctgccatcagtgcactgctgcaatcatcggcgaagaacaagcgtccaagggagacaaatgaaaactttgatcttccatcacaggagccgactcaggagttttggctgtctggaatgacacagcagcatgagaggacatatgttggttctagtgaccccaaccgtatctctgggtatcatcaaattctttggccaagcagtgatacccgcagggtatggtgccatgagcagcagttcggtttgtcaaactccattg

SEQ ID NO: 451294 - DNA, 198 bp, Triticum aestivum
gttggaacaaataaaagttctaatacagtaacagatgtctgctcttcagccttttgatcgcagtaaccttaacagattcagttcaactgatcagttgccattgcaccgacacatattctcgcggatgataaaaccgacagtaacaaaacggtccgattgctttagcaagtaacgaaaacaaccactttgacatgaatt

SEQ ID NO: 451295 - DNA, 367 bp, Triticum aestivum
ttcttctccctccaccaccgccgcgacggcgaccccccattctcacgccgaagcgaccccctccgccccgaccgcgtctctccagccctagggtttccgcctcctttccgcccatagccatctccacgcggcacgccgcagccccgcggattcctccccccttttcgagctcaaaattgcggcttttccgctcgattctcgggcacgaatcggccattgatttcctccggttatccaaggttttcccctgatttttcgcggcgcgagcgggggcttcccgaggcgattggtgctctggagcggtctcttgtccgccgcgggttcgggctgcggctgaaggcctcgccgatttttccatgagcgtggg

SEQ ID NO: 451296 - DNA, 350 bp, Triticum aestivum
tgattaaatcagccgccggcgccgcacattgtgggggcatagtaatatcatcatccaatcctcacaagaggacgaggagggggcacaagggtgttctgcagcttcaccatctgcctcttgatactttaagtgacattgtgtcattgttaagcttcaaagaggctgcgcgcatgagcgtactgtccagccagtggagacatctctggagatcatgtatcagagacctggtcttcactagggagacaatgtgctgccccatgcccatgagccgagtggaacatgatcgagaagctttcatcaggaatgttgagtgcgtattgtgccaacttgatcccaccattgctagggac

SEQ ID NO: 451297 - DNA, 399 bp, Triticum aestivum
tcttttctgccgttgcccgaccaacaaacactctgcctccttccttctgcttctcccccgcccgtcctctgatcccgcctccgatggactccgccgcggcgtcgtccctcgtcgtcagccccgcctccgacgaccgcttctgggacggcctgcgcacccgcgtcgacaccatcatcgaggaccgccgcctcgtcgcctccgccgcgtccacgtgcgcggcggcgtccgggcggcccaagcggctccgggaggactcgctgatgctggtccgtggcctcgactccgtcgccgcgtccctcgcgcagctctccgacaccctcaccgccgcccagaagggcgtgaacgctctggccatgtgctcgttccaggcgagggaacgcgagagcggggaggaggagc

SEQ ID NO: 451298 - DNA, 286 bp, Triticum aestivum
ttggtctcggaaacacttaagttctgcaccatgctcactgtgttgtccatacgtaactgccagcttttgcactctctatcctcattgcagtattttgatccactaaaagttctggtgatcgagagatgtcctataattactgcaacatcatttccgttgaactttaggagcctttcatctctcaaagcgttgagaatatcatactgctcagagctccaatctttaccagcgtacggtctgccatcctcattggaaacacttcatattattgggtgccacccggagt

SEQ ID NO: 451299 - DNA, 308 bp, Triticum aestivum
tttctgtgagtgagtacaagtgttgagattgcacttaggtgtgtggacaaggaccgaaaaaaaaggccatgtatcaatgatgttgtccttgaactggagaaactagaagctaagattaaggaaatgtcactagcttttgatgtgccaaaagacctcacagtccagagaagctgtgacaccaacattatgtctgtggatccaaccatggagctgcggtttctctttgagcaagggaaggaggcgtcgtgctgcctgcagctgaccaacaagacgggtggattcatcgcattcaacatagagatcaaccc

SEQ ID NO: 451300 - DNA, 285 bp, Triticum aestivum
ttcttttggagacgaagaatgagaagccaccatcttctccatcagatatattgtctccagaacaaaggaagattccgatagctgatgctccatcttcccagtgtggtttgttatctagagaccaaaggaaagctccacccgtagattttattaagccatctgaaccacctgcgtgtcatatggaagctgatatggtgatcactgctgcaactccctcctcggaggctcaaggtactactggtaaaaaagggctacttgaaaggattcagatactatggactggtc

SEQ ID NO: 451301 - DNA, 320 bp, Triticum aestivum
tttgttccccacgcgtccgcccacgcgtccgcccacgcgttcgcccacgcgtccgcccacgcgtccgcccacgcgtccggttctgacgtgctcctccatgtctcccgcgagttcttggtgtggcgatcatggctccagatagcataaaatcgacatcatgggtgtcggtgcagaatgacggaggagcgggagaagcaggagctgctcggacgcgctagcgccagtgagatcttccagcatgcgccgacggacaagccggctttcacgctggcccagatcaaggaggcaatcccggctcactactttcagtgctcgttgat

SEQ ID NO: 451302 - DNA, 246 bp, Triticum aestivum
tttctgtcgcgtgggcggctgccctcggagttcgcgcggtggggcgccggcgagatgggcagcgtggacccgtaccagatcacctgcgactaccggacgctgttcgtctccgactggacgcggctgggcttcgccgaggtggactacgggtggggcccccccgcccacgtcgtgcccctgacaaacctggactacatcggcacgtgcatcctcgtcaagccctgggtacacaagccaggcgcccgg

SEQ ID NO: 451303 - DNA, 341 bp, Triticum aestivum
tttttgtcacataaaattccagtcaagggaaaagtggtgcaagaatgagtttgtcatctccctgagtgagacagccaatgagttcaggtcatgatacacctaaaactgcatgagctccctccgtaacatgtgctcaagcgatggactagagatgcaagagatatactactaccggagtatttgcgctaccagaaggaccatgggcccctgaagtattcttctcgtcgacacaacactttatacttgttggcagtggatgtggttaagttaggtgacaacaatgtggaagcatatgcacttgcaatggagaaaatgcgagatgtcaaagtgctccccgagcc

SEQ ID NO: 451304 - DNA, 360 bp, Triticum aestivum
ccgcctgcggtccggtccggattcctgggtcgcccactgctcctcccacgcgtccgcggacgcgtgggtttggatctctctcacctgccattgctttccatcgtccagcgcgccaccaccccttccacgctccagcgtgccgctggcccacaccacgcgttgccgcagccggcccacgcccctccgtcgtgcgccgtcaccgccggccgcctgcccgttcccccgttcctccggctgtgcgaggcacggtggcggtgggaggaaaactggcggatctgggcgcggccttgagagatctcgcggctggtgcggcagcttgctacgatggcagcgacttgtgaggcagccatacaacgtacc

SEQ ID NO: 451305 - DNA, 115 bp, Triticum aestivum
ctgaagccgcaccggtctgaagctgcatggctttagctggagcggggatggcaagctgcatcgactgccacccttgctctcggggtctgcagggaactgccgctgatgatgatga

SEQ ID NO: 451306 - DNA, 99 bp, Triticum aestivum
ttctttgtgacgaagaactaacacttcgctagctgtgatagaaaacaaacattgaaaacatagacgctcacaccatggcaaccaatgggtactccaatg

SEQ ID NO: 451307 - DNA, 328 bp, Triticum aestivum
tcttttgcccacgcgtccggaaaaacacaaagaaacaacagcgcgccgctccagctccagctcccgaggcagctcaccggcggccaccgttcgacccctcccccgcccattcccgcggcgctcccctccgcccgctcgccgccggctggtgatgctacgggcccccggccccgccgcggcgacaccggctcgcagctagatctggcccgcaggaggttcccgggcggcatggggcggttcgcagggctgcggtggctcctcctgctgtgggtggcagcaggggcgctggccgcggaggaggatagcaaggcggccgtcggggcgcccg

SEQ ID NO: 451308 - DNA, 393 bp, Triticum aestivum
ggcgctgggatcgctgaggctgaaccagctaaacctgtcatccaatgacctcgccggcgaggtcccggaggcgctcgctgtccccgcctacgaccgaagcttcctgggcaaccgcgcgctctgcacgggcgcggcgtcgtcggggaacctcgccggcgtgggctcgtgcgcagcccggtcatccgacaaggtgtcaccaggcctccgcatcggccttgtcgccgctgccgccgcgctactcgtcgtcatcgcggcgctcgccttcttcatcgtccgcgacatgaagaggcggaaggggctcgcgccgcccgaagaggcctggaagctcacccctttccagccgctggacttcggcgagggccccgtgctgcgcgggctcgtcgacgagaacct

SEQ ID NO: 451309 - DNA, 308 bp, Triticum aestivum
tttttgtcacgcgtccggtgggccacgtcccgaccgtgattctggcgaccagtgagcccgtgcgagaggcacgacattctcaggtcggccacaccccgacaaccaggttctcggggttctgcaagcccgtgtggccgacacggcactcttcaacaagtctcaacttggaggcaatgaagagacggtcatggggtggcaaggcctcgaccgagactacggcgaccatagagtccgtgcaggaggcacaacactctctggtcggctatgccgcgaccccgacgcgctcggggtccatcgagtccgtgcgg

SEQ ID NO: 451310 - DNA, 251 bp, Triticum aestivum
tggctccgtgctgcccatggacggggatgaggtcctcgtggcttccgctgacgacgaccacgacgacgatgcccggccgcgccccggggagaggctgggctcgtacgtccgcgacaaggtcggccgcgcgctgtcctgcctccgctgcggctgccgtgactcccggtcggcggtgggcttcgaggacatggacggcgtctacgaggttggggccaggaagatcagaggcgcggcggggcccagggtgttca

SEQ ID NO: 451311 - DNA, 288 bp, Triticum aestivum
catatcatatctggcatgatccatgacttattatcagaaaaaactaagctttcggcgactaaagaatattgccggccgaatgaccctgcagcaggaacagggacatggcatctacaacttaattgcccaaaaaagcatcgttctaactgaacaggaccataacaagatatcccccaaagaaaggtacatggtgcctcatccaacagtgcattcctcctgagctgaccgactgattattcagcatttcagcatgtatgttagtatgtgctcggtgacattgcggtattc

SEQ ID NO: 451312 - DNA, 85 bp, Triticum aestivum
gtcggctcaccagggaaggacccggcataccgccggtcgagccgattctcgtgagcgggtcgttcatcggtcatcacgcgatggc

SEQ ID NO: 451313 - DNA, 415 bp, Triticum aestivum
caccacaccagactctagaaaaaggaagaaacaaactcaacctcccacccccaacagaagagccgcaaatctgccaccactccgtcgtctcccagccccgccgcccacgcatccgcctcctccctcctccctcccctagacctaccccgccgccctcctcgcgagcgctgccgattcttcgcggaggaagggaagggatctagccacctccggggctgctgctgcggttccgttcgcgtcgccagccgccgggatctgtacctggatttccacaaggaggaaccatcttagggaatgcagagagatgtgtttgcatgctagagagctaccttgcgagggaatcggcagggtagccacccctgttcctgctttgattgaccttgatgacaccgcttcacagcagcacacaacacac

SEQ ID NO: 451314 - DNA, 366 bp, Triticum aestivum
tggtccggggaatcggtcgtgagtgtggccgtgtggtgttttgggttgggtgatctttcatggcgtccacggcgtacgcgcgcgggtccaagccgccggccgggcccggcgagcggaggcagccgcggctggccaaggagctgagcaggatcgagcctaagaagctcgggattgggctcgtcgtcggctgctgcctcgccctcctcacctacatctccttcgcccgcctcttcgccatctactcgccggtcttcgagagcacgtccatggtgatgaagaacgcgccgcctgcgtcgacggcggtgcccagtatggaggaggccgtgccggcccagaagaagatcgaagtcgagggcggggaagatc

SEQ ID NO: 451315 - DNA, 98 bp, Triticum aestivum
atttgttatgtcccagccaaactccccacctgagagtgtgttctgaccggatcggcccggtaagaccgggccttggacccaaaaggaggggacatgcc

SEQ ID NO: 451316 - DNA, 375 bp, Triticum aestivum
ttgtcccacgcgtccgctcagttcatcccgacacggcgcacgcacaggtgaacggactgggcgctggcgctaaccctaccggacatctggatcggagcagagcgccgccccgagcgtcggcgcgccacccccgcgccgcaggcacgggcccaagccaccgagcagcgtccccgcgcccgcacgctaccacgcgctcgcctcgtccttgattgctcggcacttcggcaggcacgaccaggactgcgctcggagcacgctgaccgccgtccatcgtaacggcctgggtcgcaacagacagcacgcaggggctaacgccaatccactgggcctagcctgttacatttcaaaggtcaaattctgtcatgaataccacac

SEQ ID NO: 451317 - DNA, 349 bp, Triticum aestivum
gctccagctgggaccatggttgcatatgtgggggattatgaactgtattgcacgacatatacctttggttttgatgatggcgaaactaaccgatggacctaccgtgctggagaaagtggaaaggtccatggacttgctgagtatatcgctcaggaagagatggaatggaagatgggattctggtggtctcctgatagtaaacaccttgcatttactgaagtagattcatcttccattccactatacagaattatgcatcagggtcaaagttctggtggtctacatgctcacgaagatcatgcttatccatttgctggagcagttaatgttaaagtgcgacttggagttg

SEQ ID NO: 451318 - DNA, 71 bp, Triticum aestivum
gagaccacgccgtgcgccacgccggctgcccccaaaaacctttcgaaaaccgtcgcgccaaccgccaccca

SEQ ID NO: 451319 - DNA, 125 bp, Triticum aestivum
cccacgcgtccgcccacgcgtccgggaaattctgctctcgcccgaacgcccaacacccaccactggcggtgatgagcaccaccgagggaaaggcggacgccgctgcgctggaggagatggcggtc

SEQ ID NO: 451320 - DNA, 92 bp, Triticum aestivum
gtggtggtaggccacaatcagcaactgaccctgtggtacctttcctagctaggtgtggtttgtttgtttgagccaggatgttggcggtgttc

SEQ ID NO: 451321 - DNA, 218 bp, Triticum aestivum
gcgtccatcgcgttcgcccacgcgtccgaccggagccaactaattggacatcgagaggaggaggacgtctttagactcagcccaccggaccaagagaggagaacggtcatgcttgacgacgcctccgtccacggcaaggagtgcgacttgacgaggggagtttcggatgggggaccatgtggtggtgaatgtggacggttctgcgaacaccaaggatg

SEQ ID NO: 451322 - DNA, 271 bp, Triticum aestivum
ttggtgtgacctctgttctgcaccttcccaaccggatgttgttagagtggcagacgttggacaaccgggccactcgtccgtcagctctagaacgaaggcgcagacaatacggttgctgggcttgaatactgcaaagtatcttcgatggagctggatcaagcaggccatgatatgctttcagctgaaggggtaaggatggatgctgagaaggaaacactgctacagactactgtttccttgcaagaccagcttaaggaatctcaagtggctc

SEQ ID NO: 451323 - DNA, 458 bp, Triticum aestivum
tctttcttccacgcgtccgcccacgcgtccgcccacgcgtccgcccacgcgtccgggatcttataaagtagaacaacaatatgcctaaatccatcgtcttggcaatctgccgctacttctatctataggatgaagggtgcaagctgggccacatacccggacctgtcacctaagcctaacatctaaagccgaaggcccgactgagccatctgtcaggtccagggcacaaaccggtccgacgcactcacatgtgttgtcgccgccatcttccactcgtccatctttagagcagattgacgtgtcaaccttggcaggtcctctgccatcgatgccaccacgacgccaaacgacgacctccacctacgcgagccttggcaggtcctccgccatcgacgccaccacgacgccaaacgtcgacctccacgaacgcgagtccatctgcaagcaacggacgtaga

SEQ ID NO: 451324 - DNA, 327 bp, Triticum aestivum
tgtggtgtcccaaggacaacgagctgatagtggaggaggactctggcggcggcgatcagcaggaggccgaggtggaggacgacgacatgaactggagcaagatttacgagggcgtcctgcgcaccaggatcgccgaggaaggccgcggctcgtcggcgctcaaccgggcgccgtccatgccggtcacgtcgtccgcaaccatgggtgacggcaacggccgccgacccgccggggtcaccgagtcaacgccgagaatgcccaggctcaggcactcccacagcacgctggagaggcactaccgctcgcacacgcccaccaagcctgacc

SEQ ID NO: 451325 - DNA, 418 bp, Triticum aestivum
tgtttttgattctgctcctcggcggcggaaggcgaacagcgtggaaccctaaccctaaccctaaccgcgctccgatccgatccgatccgcaaggcctgcgacgatggcggattccctccgcgcggcggtcaagaggatgctgcgccggcggtgcatccaggggaggggcttcgcacccagcaccagcagcattccggaaccccccgtgccttggatgaaggatacaaccatgcatcgcaaatccagcacaagaaggaggagttgtacaatctcatcgccaaggctgtggcggagcccactaccacctggctggacaggcgactgctcaaggctctctccttgcaaatcaagcctagaccaaaggaccctcactggcgcaagataattttgaccaaggtggccacccattgtacatatg

SEQ ID NO: 451326 - DNA, 287 bp, Triticum aestivum
gtggtattccccattccccatctccctccctgtcgatggccgtcgccgccgccgctgcttccatggcccgcaggctggtctcccccaccacctcctcgccgtgcaccgccatacgcctcctcatctcccgccgcatggcctccgtccggtccatcctgagcgccccggccgcggtggcgagggagatgctcagcccggcggccggggcctgctcgtccttcttccttctccgcggcgccgggggcgccaggggaatggcgcggcggccggggggcgacgggtactcc

SEQ ID NO: 451327 - DNA, 260 bp, Triticum aestivum
cgccgatccagcccccgccgcgatggaactcgccctcgtcgacggcgagaagttctcgccctcctgctccacgcttgtcatgcccgcgctttcgatcggcaacgtggggcagctcgccgtggacctgctgataccttcggcgaaggcgaggcgcgtggcgtacctcgacgagccctccgtgctgccctgcatcggcaacgacgccttcggaccggacgccgggggcgacctcgcgctcgcgctcgaagaatacgaatcac

SEQ ID NO: 451328 - DNA, 161 bp, Triticum aestivum
gcccacgcgtccggttcgcatctcctcatccacgcaccagacaacgcccgtcgatggcgctctaggctctcccgccgccaccctgtcgccggccccgtcgctctcccaccctgtcgccggccgcgtcgctcccccgccccgtcgccggccctccccggccc

SEQ ID NO: 451329 - DNA, 348 bp, Triticum aestivum
ttatcggacagagagaggtagagagagagatagggggagggtgggagaggagaccctgaccaatgccaagaacaagaagagatcagtgagaaggccaggcgaaaatccccaccgggcgagaagagacgagctccggcctgctccgagaacaagaacaagaaggaatcccggagcacgagggaagaataaagcgggcggaggagaccggaaaggccgaggagaaaaaagctcttgattgatggagaaggggatggatccggagctgctggacaacatcatcgccaggctgctggaggtgaagagcctcaagcccgggaagaacgcgcagctgtccgagtcggagatcaa

SEQ ID NO: 451330 - DNA, 368 bp, Triticum aestivum
ttctggtctcgtctgcgacgtccgcgccagagaactccgccgcggcactcgacgtcatctcctcgctccggctcccggagcggtgcctggcgcgcgccgtcgacagggatggcgcggcgctggtcggcgcgctcgtctccaccctgcagggacactccggccccgacgcggatgcggcgtcccgggcacgcgcagccgtgctcctggcggacgtgatggcgtgcatgtcgccgagcagggcggcgtcgctcccggagcaggcgttcgtcgaggctgtgcggctgctccgcggcgacgacggcatgggcgcctcgacctcgatggcgaccaaagcggcgctgcgggtgcttgcaggcgcgaccgcccac

SEQ ID NO: 451331 - DNA, 393 bp, Triticum aestivum
gtcggatccggatgatgctggtcaatattttgttcatgaaaatgtgaagacagaaccagacccagatgataatgatgccatgcctgttgatgtaacaattgtgacatcaggaccagcaggttttgtagcatctacagagcagaataccataggttattctgagcctgttcttgatgatgttgccaagaaaagctctgttggttacctagaacctgatcctgatgattccgcagatgttgacatgcttaacaaggacatcaatggtgagcatgataatgaacctgatcctgatgacggcactagtgaatttgtcctagaatctggaaacaagatggaagtggagatggagccgagaactgactccacagttctgaaatctgaacctgatcctga

SEQ ID NO: 451332 - DNA, 420 bp, Triticum aestivum
gtctctgcgtcaaccgaacgaccccgtccgcccgccgtatatcacaaggagaaagggatcgaccccgccgccgccgacgccgagagacgatgagctatcagcaggtccctccggaggaggcctacccgccgccagggtattcgccggtgtacccgccgccggcgcccggcgcgcagcagggcccgtactacccgccgccgcagcagcagccgccgccgccgccggggtaccagggatacttcagccagggccaaccgcagtagccgtcgccctactactacccgtcgtcgccgacgcacggtggccatcaccaccacggccaccaccaccatgaccaccacgccgaggaccaccacgccgaggaccaccaccaccaccatggccaccatcaccaccaccaccacaacgatgatgactgct

SEQ ID NO: 451333 - DNA, 419 bp, Triticum aestivum
ccctctcgtccgcttttttttttttttttgcatgggaaatattgaccttcatttcacaaatattgtaatctgggggtggccagtatagataccaacaaattttacatacaagatacaaaaatgattgaccaccattacagaggaggagaatgcaatgagggagagggagaaaaatggaattatacctatgtgacacattggccgcgattatgtacgccgcagcataatccctttattaaacatatggttttgctacaaaattaactttgccgccttcatcaccgtgtcttttggcagtaaaaccttggcctggaaagcttagccaccaagcctgtcgtcctctgcagcatgcacttgcccgatcagtctaatggcaccttgcgacccatgatgattcatgacgagttagctgacccatt

SEQ ID NO: 451334 - DNA, 245 bp, Triticum aestivum
ctataaaccttcatcaagggcgcgctttaactgcctgggcggaccagttatagccttctccatcatctgttgctacctgcatcaaaccatctgccacatgtcgcacctgagcatcctgaccttcaagttcaacctatcgaagctccggttcaagcccttccgtacggccggacggctgctgtccgctcagggaccggcagcagtccgacctgatgatgtacaagcctgacgaggaggagatggcc

SEQ ID NO: 451335 - DNA, 336 bp, Triticum aestivum
gttatgagtacttccagagggagccaaggaggagctctgttgtgaatgggcaacgggttccctgctgcgatagttcacattgggggagtaatgaactggaaggggagaatgatcaatgctgttgtcaagagccaatcaggaggtgattccagttccaatggatcaaatgatcgtttccttacaggcctttatgatgatctggctcaagactgccttgcctggacaagcagagcagactacccttcactctgttgtctgaacaagaaattcaatacgttggttaacggtggatatttgcacaagctgccgtggaaatatggtattgctgagcattgg

SEQ ID NO: 451336 - DNA, 447 bp, Triticum aestivum
tgttcgcgtggggcgcgcctggctcgtccgggaccgcctcgacggccgcttcctcctcgaccgcgccgcgcccgccggctccacggccttcaccgaggtcgccgtctgcgacccgcttttcccggcgctgcctcctgctcccgccaatccccgacgccctcgccgtctccgtcgacaacccctacctccagcgcggcggcgacgacggggggctccagtcgcgcagcaacgagatcttcctggcttctcgcggcaacgacgaccgcggcgaggagctgccgttcgccgtcatctggatggcgtgctgccgagggaagctggtcgcgttctccttctgctctggatctcgggaatggagcgcgctttcgccgccggtgcaccacgcgctcagcatgcggagggtcatgggtgtccgactggggcagcgcaaccatgcccacgggtgct

SEQ ID NO: 451337 - DNA, 443 bp, Triticum aestivum
gtttttagtgctgtgacccaaagcattggaccttcaattcataagctgaaaagatttgataatttggatggtagttactttggctttccacctgatccattttccgcatcacgatccagacaacaggttgcaatttcgagcgagttggagcaaaggaactgcctgatgtttgaacattcagcagcacggcagtctcatgggtatcctcagtccacaaacggcaagggcacaaagaactttaatttgaatgaagcactgtcagatggtctggaagagcttgtagaacaggatgggagatctgttggtagtttgcagcatagtaaaggtgaaggatcagtatttgggatctcttggctaaaaaataaagctacttgtgctgacccaacaaggctggaaaagcaaagaaagatgcttggccattccaacgggactgcagcagacac

SEQ ID NO: 451338 - DNA, 410 bp, Triticum aestivum
cctatgcgtccgcgcgtcgctcccgtgcgagcgacacgggcggaacccagaaacctagcgcccccaccgcgagatccacccctcctctcccgccgccgctggaggaagctgcagggcaaagccgttgcagccgacggcggcgggggggggccttgctcgcgtcgtgggatggccctggtcacggccgtgcctccctcggtgaccgcggcggcggatttggcaaggcgctcggattcgactcgtccggctccggtggcctgcctcatcgtcgacatgaaggtgctgctgctcgagcgcggcccatggtctgctaggtggtggaggggcgctcgggggtggcgctggcgcccagatccacctcgtccttctcaggtgcgtcgggggctggcctgctcctttccttcggcgct

SEQ ID NO: 451339 - DNA, 317 bp, Triticum aestivum
tttgtcgcgtgggcgagctagatcaaacacaaatcgccgtgcgatcatctctccgtgtgtgctagcttctaattctctaatcgatcatgggtggaggccacgacatgcacggcggccacaatcggcggtgtgaagggcttcgtgtccggcctcgttaacggcgggaaaggccacggctacggatcgtcatacggtcaggggcacggctacggcggtggccacgtgcagggctacggcggccatggccagagctacgagcacgggtacggcgggcatgcgcagcacgggcacggcggctatgagcacgggtacggcgg

SEQ ID NO: 451340 - DNA, 91 bp, Triticum aestivum
gatcggggacaccgccacatgtgccatcaagcaggttgcatttggacgttttggtgttacaccaacatttctagttaatgctgaacaaatt

SEQ ID NO: 451341 - DNA, 125 bp, Triticum aestivum
  unsure (1)..(125): unsure at all n locations
cttatttcgtccgcggacgcgtggggcccatactaaccgaagcactgtatccaattcatgacacgtttctacgttatcctgtagtatgttttatgactaaaaaaaaaaaaaaaaaattnaattat

SEQ ID NO: 451342 - DNA, 287 bp, Triticum aestivum
tgtattcatttctcaaggcggccaggcacctggagtgtgctatgcaacacgttctgtccagttccagattgtcgcctggatagagtaactgttgatgaccgcctgcattttcttgttggtaaggcctttccatgcaagctcttgcttaggcctcctgcaacgactcaatccagcacaacccttttgcagctagccaggcctaggcaggcagcattcatcatcgacagacaggtcaccttgtgcgcttgcatcaacgtgcagactcgcacgttgatcaaaggatggtt

SEQ ID NO: 451343 - DNA, 208 bp, Triticum aestivum
taacatctagcttgcaaacaactgaagaaaaggccatcttgtgttgcatgtcgtacatagtgtagataagtgcaacaattaataaaagatcgtgctcgtctaatccttggattgatgcatcttgttaaggagtacaatcgcgttatgtgttccatatttgtccctcaaaggtcaaggggtgaatcaaattgtgttattagaaagctat

SEQ ID NO: 451344 - DNA, 374 bp, Triticum aestivum
tgtaacaggctattctccataccctggaaatagtaaaccatctgatactcgagcttggaccatacattgaggaactcaagaaaacacatggcgccatttctgaatttggaaaattcaaagtatactgactctaccaagacagcatttaaatcctccactcgtcttgagtgcatgatgcaagactatgcgaaaacactacctccaacggcaaaagttgggtttacggtgatggatgcttggcttgcatatgctcctgtaaagaacaattctgaagatgcatctaaagttccaaaaggcaatccttttcatagtgcaaccttaggagagatggcaatttacagggcaaacagcctcattttaagaaaggccggtgc

SEQ ID NO: 451345 - DNA, 196 bp, Triticum aestivum
tttttgtcatggcaaatgtttgctagcagttacgtagattagtgtcagcgtgcgtttgtctcctctcaatcaacacacatgcacattaaggacagtagatcctgctcacttcgtgggtagcacgtgtcctaccttcggttgtaagtaattctgtatagataggcacccgatcaatggaaaagttgtgttgaatcat

SEQ ID NO: 451346 - DNA, 259 bp, Triticum aestivum
cctctcgtgcgattcttgttgctccggctgcgtgtctttcgttaaccagatatcaattatcaccggcgtgagacacgagcctgattgaacatgtccgcctcacgcgccctgctctcgagcccgcacggcggtgcgagccggaccttcacgagagcgccgacccgcctcgccgcgggctcgatcccgttcgcgcgctgcggcgctctccgcgcccggaccgcgatcctgtcgtggccggcggccactgtgccggtgacct

SEQ ID NO: 451347 - DNA, 486 bp, Triticum aestivum
tttttacaagaaggttgaactggcccaagccacagttgatggagtcaaagttgatgggcttgatacaaacctggtagtgatgaaggaattgttatcaccggtaagtgacctttggagggtttttggtgtcgttggcattgtgggatgagcctttgaagtcattcgtcttttgcttgttatcttcttctattatcataaggggatgggtagtctattttcttgttatggtcatactgttatcagcaacggtcatgctgctgacaagactaactagtcaaggaaagccaatgactgaggtcaaggtgacatctccaccttcaatgaacactatggagcagctcttagctgttcaaaatgctatttccaaagttgaagagcttgtccaggatgcaaatattgttcttctgaagataagagctctactgctggctttttcatctcaggccacagacaaagctatccttgcgctgttattgatggctcttg

SEQ ID NO: 451348 - DNA, 466 bp, Triticum aestivum
ttcggccagggcggcggtggctacggcggccagcgtggtggcggcggctacggcggtggctacggcggcggcggtggcggctacggcggccagcgcggcggcgactccggcgggcagtggaggaactgagcggcggggccctccagttatcgatctatctaccatctcgtcgtcttcgtcagcaagttatcttcagtgtcgtcgtcgtcgtgttcctgtgtcagtcagtcttgagtcgtgtgtgtcgttcggtcctgtggtgtttttgatcgcgagctcgagtgtcgctctgtccggggttaattagagctggttacgcgaggaagaaacaacatgtgttatctttcagtcggtcgtgttcgtcggtgatgcagcaatcccttctgtcatggattgggatgtgatgttggaatcctatgtttgaagtcagcttaaatggatgaagaaaatgcaagtgatagctgcg

SEQ ID NO: 451349 - DNA, 268 bp, Triticum aestivum
ggctgatgacggccaccctgcacggcacgggtgcttttggcgtaataatgcccggcctcttccagtcaacgtgagttggtccgactgggcggaggagagcgactcttatgtggcctggcaacctgtgtcaatatgccttcgacgccaccaaaggctggtacaaattcagaaaaaaggacctagttggaaatttgacattcgccaagagacttggagagggcactgttgattcgcttgttcttgactggtcaattagcgatgggagatg

SEQ ID NO: 451350 - DNA, 92 bp, Triticum aestivum
tcgtgatgctacagagccaacagccgcccccgtcgccgtcttcatgaagcgaggcgcaaaggccatggcaaacatcaggaagagaccggcca

SEQ ID NO: 451351 - DNA, 394 bp, Triticum aestivum
cgtatggcgaatcccaagagcgaactcagatcatcctacgaccagacgcgaccacacaggataagatgctgctgcttaatccggcgtccgaggcggcggcgctggacagcatccggcagcagcttctggaggagccggcgcggccggcgtactgccggagcgcgagcttcggcagcctggtggcggaccagtggagcgagtcgctcccgttccgtcccaacgacgccgacgacatggtcgtctacggcgccctccgcgacgccttctcctgcggctggctccccgacggctccttcgcggccgtcaagcccgagcccctgccctcccccgacggctcctacgacggctcctgcctcggcagcttcctcgcgccgccggcgcccgggccggacgc

SEQ ID NO: 451352 - DNA, 372 bp, Triticum aestivum
ctcagattacaccgcgctctcttcctcccttgggcataacaagacgaagcgccggacgccgctccgtcccatcccaccagccaccggcgcctcgggcctcggcgccaccgcccagagttcgttcgttccggcgggactgttggatcgatggccgccatgaaggtcgtgctgaagctggacctgcacgacgacaagcagaagcagaaggccatcaaggtcgtctccactctccacggcatcgaccagatcgccgtggacaccaaggacgacaagatgacggtggtcggcaccgtcgaccccgtccacgtcgtcggcaagctgcgcagcaagctctgccgcacggcacagatcgtctccgtcggcccggccaag

SEQ ID NO: 451353 - DNA, 178 bp, Triticum aestivum
agctgatctagctcacagctcacgagtactacgtgcatgtatacgtgttgatcggggcgaagttagcgtatacaagtggcgagcggtacctagaggcaggggagagggaagctagaacagtggtcgcggccatgggtgcccaggagatcaagtacttctcgcaggcgaagcttggccg

SEQ ID NO: 451354 - DNA, 177 bp, Triticum aestivum
gtagcgcaaccaccatgacgcctacccgctacctcgcggtgctggccgccgccgccgcgctactcttcatgctcggcggcctgcacggcgttaaagcggggccggcggacacctgactgcgccgttgcccagacggcgttcggcgactgcaccggatacgtcgccggcgtggaggac

SEQ ID NO: 451355 - DNA, 197 bp, Triticum aestivum
gtacagcgggttgggggcggagatgagctgtgtctatgtgggccaccaccaccaccaccaccaccaccgattcgttccgtcgcagaataaaaaaaaaacacaccactaccacattgtactggttctacatcaccaggcggaagccccccagcccttccccaattcattccgttcgttccccattcccctcccgcaat

SEQ ID NO: 451356 - DNA, 88 bp, Triticum aestivum
cccacagcacccgcagcagccggtcggggatgatttacgaccaggccgtttccaagtcccgcaaggtgatctccatcctcgaccgtac

SEQ ID NO: 451357 - DNA, 192 bp, Triticum aestivum
tggacgcgtgggtgcgagtgatggatgcctaggcgcacacgaccgatgaaggacggggactcccgccgaaacgggtaggcgagccggagtcaggctttgaccctaccatctccgaatggggcaaccccaccaccgtgatgggtggtgatcctgtggtgaatctatagtcacaggaagggcaccgggggaact

SEQ ID NO: 451358 - DNA, 355 bp, Triticum aestivum
cccccgggacggggcccatgccgacgggtttggttgtgcatttatagcccccctccctcccctcctcgctccctgggcgagcgagattgatcctcctccctgccctcgcgccgcaagtatctgacaggcgcgctgatttgggggggatgggctgcttcgggtgcttcgccccggcggcgcgccgaggggccggcgacctcaagccctccaagctcgcccaccactgcaccgacgacgactcagtcgcggacccgcagaggaaggtggcgccggacgtggggagcggctgcgcgcacagcttcaccttcaaggatctgcttcgcgccaccggctacttcaacgaggccaatttcat

SEQ ID NO: 451359 - DNA, 246 bp, Triticum aestivum
taccgccacgccgcgcggcccatcccctgacgacgacggtcatggcggcggcgatgtcggtgtcggccgtggtcccgccggcggcggcggtggcgcgcgcgcggacgctgctctgcgtacccgccacggcgcgcgcgccgcgggagatggcggcggaggtggctgccgcagccgcttctcggcgccgacctggctgaactccgcctcgaccgcctagccgggttcgccccgcgccgggacctgccc

SEQ ID NO: 451360 - DNA, 97 bp, Triticum aestivum
tttgtcgcccgcaaccaccaccaccggaccaccgagaccggtgttgaaggcacgatgagggagatcctgcacatacagggcgggacgtgcgggaacc

SEQ ID NO: 451361 - DNA, 397 bp, Triticum aestivum
tgtcgcccacgcgtccgaaaagaacaaaaataaaaaaaattagacagagagccacccccatcgcctcgtctctcctctcctcgcagatctttcccgtctccggtcaccatgaactcctactccggcgaccggtcctcctcccgtcccaccacaacctccttcgactcctaccagtttgacttcggggccaacgcctcccgctcctccacctcccgccccctccgcgaccagaggccaggcggcgccaccaacccttcaccgaggccaaccaccacaaacacatggtcacaccagccggtgaagacgtcctggactcatcagccatccccgtccgtcgccgcggcgctcggatccgggcctgtgtccatggtcggcgacatctccggccggagctggt

SEQ ID NO: 451362 - DNA, 60 bp, Triticum aestivum
gagccccgcccctcctcctcctccttctgctccttgtactcctccaacaacagccctccc

SEQ ID NO: 451363 - DNA, 380 bp, Triticum aestivum
gcccacgcgtccgcctacaccggcgaggcgttggtttgcgcccctcgccgcgcccggcacacctccctcctccactccccccgcacccgaccccttcgcccccgagcttgtttctccagctaccgcaccggagcggcatggcgctcacgcgaccatcgacgggctatgaaggaggaggagacatggcatggaggtggtggccacttggtagccttcgtctgcagcgccataccactgtcggggtgccgcgcaagaggtcaggtccgtcgccaccgcgagccaggggacgctcgttggtgatcctacgtgcaggaagccaacggggggcacggtatcaacaagccgacaggaggcggggtcttcccactgggatggaggag

SEQ ID NO: 451364 - DNA, 183 bp, Triticum aestivum
tggatggcgcaagggatgacaagtatggcggtagcatctgcagcagacgctatgggcctgaccgcggaggtgaacgctattctggaagtcgagatggaggaagccccggcagcggtggcggcgatcgatacagccgagacaggcctggaccgtatgatcgacgcagccgagatgaatactgat

SEQ ID NO: 451365 - DNA, 238 bp, Triticum aestivum
ggcagctccaaggggctgacctcggccatgtccaatatcgcgcgcggctcgagccggatggccgagagcgacggcgctgctaaggacaagccctagcacgatctgtgactgagggagaacgcacacacaagacggacattgccagtgagctcatattttggattccccggcttctgaaaatcccagatgatgagaagagaaacgcgaaaattccatggaagctttaggtaggaaccaa

SEQ ID NO: 451366 - DNA, 92 bp, Triticum aestivum
tgcgttcgcccacgcgaacggccacgcgtccggctcgccactgtaccactagttccaccactgcccccccggcctgctgctgcagctgcata

SEQ ID NO: 451367 - DNA, 84 bp, Triticum aestivum
tcgcccacgcgtccggccgggcagtccggcgagggctttatctgcggctacaactgcaagtgcaacccctgcaactgttaagct

SEQ ID NO: 451368 - DNA, 101 bp, Triticum aestivum
  unsure (1)..(101): unsure at all n locations
tcnttgacaccaccgcagtcaccgcccggagcagagaagtcagggagggatcgatcgcggacgatggcggcccggggaagcggcgcggaggaggcgcctcc

SEQ ID NO: 451369 - DNA, 312 bp, Triticum aestivum
atcgcggacccgtgggtctggctttgctctcgtcttccttaaggccatccatcctgccttttaaatcagtatttctcctggctggaatgctcgatcctttcgtggcttaactagaacttaagccaataagtagctattatgtcgagtagctgcatcttcataatgctctattcatgtttagcttatcctttggtgtgctttgtcatgagtggagtcccaggttgctttatctctagcttaaagctagagtagcctcactgcttatggaccaaattatctagtctgcatctctattctacagaatcatatatt

SEQ ID NO: 451370 - DNA, 267 bp, Triticum aestivum
tccacgcgtccgccccagaccacgcagttcgtgcccacttcggcctcggtctctgtgccgcagccggcggcggccagcaagacacctgctgcccctacgagttctacaactgctgctgctgctagtgcggcgcccgttggctcttcttccaagaaagaagaagagaagaaggtcgagaagcagactccggagaaagccgccgctgcagcagcgcccactgtggccgaccctctcggcagcgcgagggggaaggtgcaggaggaggtg

SEQ ID NO: 451371 - DNA, 243 bp, Triticum aestivum
gtcgctccctctcagctcggcctctccccctctccgactttttccgtccgtccggccggtggaacctaggcggggaggggcagggatgacgacgctggggaagaggcaccggaacagcagctccatgcggcggaccaccagcatgtcgggcttcgcggtgccgccggaggaggaggcggccgggcgccagcccacgcgggcggacaggggcgcctcggccgtgccggcgcagacggagtgggg

SEQ ID NO: 451372 - DNA, 407 bp, Triticum aestivum
tttctagctcgcagccatcggacgtcgccgtccgtgcgaagtgccgccgcccgaacctcccaccacagcacgccgcaatggaggccgaccgcccatggcatcgcccgagctcacctcccagcagtcattctcctttgaattcgtcgggatccggctggatccggacgccagcgccccgttcctacctccccacctcgcttgggtcgtcggccagctcgacgatgtcagactgctcgcgggatccagcgccaccgctggctggccacttcctcctggaggagacgcccccacatcggcgcctccccatatgagcagcagcagcgaacgcctcgctaagggcatctctggtggtgtttctttataaattgttttaaagaagtttgccagatctgtgactgaaaaacaat

SEQ ID NO: 451373 - DNA, 53 bp, Triticum aestivum
tgtcgaaaaaaaaaaaaaaaaaaaaaaaaaaaaaggaaaaaaaaaaagggcgg

SEQ ID NO: 451374 - DNA, 143 bp, Triticum aestivum
tagcacccgccaccccgctaacagttaacccggaaattttgccggcgcgggcattttcctccacctttccgccatggcggactcggcggcgcgctccctcgcgctcttatcctacgacggctcgctcgggctcggccgcgcct

SEQ ID NO: 451375 - DNA, 332 bp, Triticum aestivum
ctgatctgaagagcaacactgaaggctctttttttcggtcagttgagattgccatacctggtgctgacctccccaaactgaaggatgtgagcgaatcaactttaaagaacggtactatttcagggagcttggaaccaaaagttgctaggcctgatcagttgaagaagaagcggaagaaggcagactcatctaaggctgttcatccaaacaatgctgactatggttacaacgttccatttgaccctgcatattgtaaccctttcaatggtgcatattcaatgggtccatttggtgtacctgatccatacatgtacggctcaatgggcatgccc

SEQ ID NO: 451376 - DNA, 210 bp, Triticum aestivum
tatcgatggctcctcacgccgctggcctcctgtggctctttttgctcaccacctgcgcggtggacacgcacctccacttgttcctccacgacgaggtctccggcagcaacccgacggcggagcaggtcatcaagggtcctgcctagtcgtccaacgccctcccgggcgtggccttcggcgacacgaccgtcatcgacgacgcgctgacgg

SEQ ID NO: 451377 - DNA, 277 bp, Triticum aestivum
tgatcggtcagcgagagagcagacggcgcccatgggttcctttatctgccccggcagcagcttacccaggaaggcagccgcgccaagaaccagcaacaaaacccgagcgtaggagacgagaggagaagagagaacctattctccccccactcccactcctcgccacacttggagagtcgtcggacgatcggcgccagtgcacaatgtttcaagggtgcggcctgttcgcgtgcgtgagccggcgcggcgccgacgttaggaagcggggcgaggcggg

SEQ ID NO: 451378 - DNA, 130 bp, Triticum aestivum
cttccaagaaatagaaatggcggcgtgcggcaaagccacacgtttggtggcttggccttgctgctcctcctgtggggtgccaggccagcccttttggcactggagacggtactaccacacaagtgccccc

SEQ ID NO: 451379 - DNA, 191 bp, Triticum aestivum
caaggcacttttctgtcgccaaaggataaaggtgctgctgaagaacctttgaaggctgtgggcacaaaacggctgcatactgatgctccttcaagccccgcttatcataatgtttatgtacggcgaaaggtggcaaccgaacataataaagtgaactcgcctccggagatgaaggttattggcaaggacaa

SEQ ID NO: 451380 - DNA, 233 bp, Triticum aestivum
tatttatacgctttcggaaagtgggggttggtttcgctttgagctttttatccggggcagccagccagccagccagccgccgggccgggacttctgttacgagtgcagaggctagatagctccggccgtatccgattccgccggggccgggcgtggatacctaggctaggctaggcgccgccgatgtcggactgcagcacgggcacggactcgccgtgggccgactccgtcga

SEQ ID NO: 451381 - DNA, 319 bp, Triticum aestivum
ttcaaaagttaatctggcaaacagaagtgcacaaaggagttagatccccttccttatagtttagtaaattattattccctgttttttgagaacctattattcgttttcctatatactgatatactatgtgtgtatgcactttttagatggggtatgtgaagtgcagtgagttactgttgctagcctgagttgtgtgtacgtaatagaagccctcgtgtaaggaaactgcttaaaacttgtgactactgtgtctgtgtgtgaccatttcaatgtaactccccagtgtgtgttggtggctagttggctttagccacaccaa

SEQ ID NO: 451382 - DNA, 331 bp, Triticum aestivum
tctttttaatgctaagaggggagagatgattttagggatatttttgtcaatggagaacattgacaaaaacaatgaatacaaggagcttgcagccatgatggaatgaatctttgcgtggcagcctgcttaccgcccagatagtgagcccctgagctcctgaagaaaggacagttgaaggagatgaaagaagcgaacacaaaggatcctacgccaaagaatgaagaggccggggaaatgattgaagggggtgcgtggaggacatgtgcatggcggaagctggcgtgatgactgcgaaggtcaaaggagagaaggcttgcactagactcatttt

SEQ ID NO: 451383 - DNA, 407 bp, Triticum aestivum
ttctcgcgtccgccgccgttttctcaacccacatggctctcgaagcgcgcctccgcctcccgctcgcggggccaactccggccaccgctttcctctcaggatccaaccccaaacccagtcacatatccttctccctcaaacccgcctccacttctctctccgccgccaatgcgccgccgcccatcgtcgtcgtgggctccgccaacgcggacatctacgtcgaggtcgaccgtctccctcttgtcggcgagacggttgccgcgagtgccggtcacagcctcgccggcgggaagggcgccaatcaagctgcctgcggggggcggcttgcgctggggcccacctacctcgtggcgcgcgtgggggacgacgccaacgggcgcctcctcgagggggcactcgcggacgcc

SEQ ID NO: 451384 - DNA, 405 bp, Triticum aestivum
tcgtccacgcgtccgattagcagcagtcgctaactccctctgctcatctcgtttcaagcagcaagtgtcaactctcaacaccacctctacaaaagcaatcgtgcactctggtgatgctctctggtttgtgccgccatccctgtcgatgaagacctccgtggcctccttctagtgccccgtgccgatcgccgatgctttggccggaattcttgcaccatgccgccggttcctgacatgctcgtgcggctcctcgtcgcgtccgtgctgctcggcgcagccagtggcgcgtttacccccgcggacacctacctcgtcctctgcggcacgtcggcgagcgccaccgttgccgcgggacggacgttcgttggggacgcccgtctgcccgccaagtcgctggccgcgccg

SEQ ID NO: 451385 - DNA, 395 bp, Triticum aestivum
ttctcagatggacggcggcgcgacggccgcggcgctcggcgcgtgggaggctgtgcagggcttcttcacgccggcggctcgggtggtccagccggccgtgctggaggaggaggagcacgacgacgacctcgtagagcacgccgcgaggtcggacaccgagttcactgacaactacaacagcttcacgacaccgccgccggagcaggagccggaggaggagcagtactaccgcgaggagtacgtgcctccatacaggccggcgccgctggcgcgcgcgccgtccgtgctggagcgcctgcgctccttcagcctctaccgcttcaactccggcaacctgttccccgagctctccccctcgccggaccatgccgtggcctccgtcgcggcggcggacg

SEQ ID NO: 451386 - DNA, 419 bp, Triticum aestivum
ctgttttaatgggcgaccaatccaaaatgtgcctgtagcatcatcggttgtgccgcttctggtgtcgggctttcgcagagggtttcctccatccatcatagaaggaaggaacggaacccttggcttgacttctccatggcttctactaattcctagtgtagagcttctaactccggtccattgtaaatattggctgtagttgaggaagctttcggcctcctgtaacccccctcgcgaagatgtcgtcagctggtgtcatagcgcttgctccgatgaccgatgacctcgccttcttgcccatcaggtttgatggaagtcgttcagcacactgcttctccgggtcacagctgcaggattccattctcatcttcctcgctgtgcctggtgcgccaccaatgccgatgagtgtgctgggcact

SEQ ID NO: 451387 - DNA, 394 bp, Triticum aestivum
tttatctccacagacacaccaacaacctcaagacagaggccggaaactgaggcgcaaaggaaggaagcagagcaaagtcttctctccgcctccgcgtcttacgagagaaacaagccttcggttcttcattccaacaggaaatggagaaggcaggacacgagcatgtgatcggcatcccagtgagcagcactgccatcggcatcgaggagcccgagttcaccagcgatggacctaccaatgtccacggtgatgcaaaatactcgacgagcacgcgtaccggcggcaaatcgggcagggcagcggacaaattcgctcgaggaatcagagaacatgtgagtctcggcccaaaactgtacgagaccgtgaggggcaagctgtcgctgggcgcgagaat

SEQ ID NO: 451388 - DNA, 265 bp, Triticum aestivum
ttaggtatgtggctctgatgacatatggggatgacatcatcatgggtgtgagctgtgctgtgcgcggttttgaccacacagggatgcagatcgaattagccaagatcggcgtggtttacaccatggccgataaggaagcagaatccgttccatttatggatatctcggaggtttacttcttgaagcggacgtgggttatctcgcctgaggtgggatcccatattgcgatattggagcacgattcgatcgataaaggtctcctgta

SEQ ID NO: 451389 - DNA, 63 bp, Triticum aestivum
tcttccacgcgttcgcctacaccggggaggcgttggcctgcgcccgtggacgtgcccgggaca

SEQ ID NO: 451390 - DNA, 87 bp, Triticum aestivum
tttttaaaaagaagtctcttctattactgggacaaggtgctgctaaggacactcacatggcgacttccatgagttgcctggtggtgc

SEQ ID NO: 451391 - DNA, 211 bp, Triticum aestivum
ttttcttcgttatgccatggtgtggcctctccagtcgggatacctgctgctagaccttgtgagcagagtctggtggcggtcgtagttgacttctacctcgccttcatggtggaggggactggtggacattggatctggcagtatccctaccaataagctcagtctgtccagcatctaggagccacggtggttccttcctctgtttcttgcc

SEQ ID NO: 451392 - DNA, 435 bp, Triticum aestivum
ttctctcgtccggcttcctctgcgacttcggggacgccatggtcaggatgggcaacatcgcccccctcaccggctccgccggccagatccgcatgaaatgcagcgccgccaactgagccggcgccactgcatctagcttgccggcgaagaagacagatgctgcatgcacctgaccttggtgcatgcccatctcgcgttgtcaacagtcatcatatcgtgcgtctggatgcgtacgtgtacgtgtacgttcgtgtgaaggttgtcctgtgtaccgtttcgtcgggttcaagctagctaggattctccagccaggagtaataagctggctcgtacagtgtgtcggttgacgggtgagtgagtggcactgtggtagtgcctatcagggctgcgtgatagtagcgcacaaaatgaataatggaatgtgtagctagccgc

SEQ ID NO: 451393 - DNA, 93 bp, Triticum aestivum
ttcttgcccgagatacaggctacggtggcggcgccggtgacggggaagatgttcaagggcctgtgcctgtgctacgcggtggtggtgaccacc

SEQ ID NO: 451394 - DNA, 491 bp, Triticum aestivum
ttttcgtcctcacccagcgaagaaatgggatcatattggggctataaagtccgctatgcttcaaatttaagtggtgttatcaatgattcaccatacaaggaaggatatgatcatatcattggcacttcagagcatggcgaaaccattatttcatctgagctaatcttaccttcattcaggcaccttttaattgcgtttggtggactggctggtctggaagaaagcatcgaagaggacccaaatctgaatggcaaaggtgcaaatgatgtattcccatcttatttgaatacatgccccaaccaaggtagcagaacaataaggacagaggaggcacttctcatatcccttcaatacttccaagaccccatcaggcgagctgggatggcgagttagagggttttatgcgacacatgcaaatacaacattgcacttacccaaggattggttttaacgcttggaacagacatggaatgctgggtggtcatgtcatg

SEQ ID NO: 451395 - DNA, 240 bp, Triticum aestivum
ccctcatacctacctgcaggttccaagagagagggccgtttgagagagagagagagacatgggttgcttgggatcggaggtcgaccatggcggctgggagatgttccatggtcacgccgaccccgtcgtctatgagctcaacaagctggtgaatctcctcagagaaaaggaacgagaactaggacacgcatacagtgaaataaaaggtctgaaggtgacagaagctctgaaggacaaggc

SEQ ID NO: 451396 - DNA, 317 bp, Triticum aestivum
tctttctatgatccctctacacctggaaagggcgggtcctttagattccctggggtatacaccacataaaaatcattctcaggaggaccaaatcacccgacccaagccaaaaccaaaacaaataccatcacacagtcagccagccagacaagccagggagcaaaaaaatcccccccaccctccctgcaatagcaaacacgcggaaaaaaatggaggcatgaacacgccctcctactactcctccctctcctgcgtccccggctacccctatcccgtcgacagcccatgggccccgcccccctgctccctgcgggaac

SEQ ID NO: 451397 - DNA, 359 bp, Triticum aestivum
ttttcgcgagtctctttctttcccctttctggggggcgttgctgtaacttggggggtgctaatgacgttaaattcggccctcctcttcctctctcctccgccggcgctgccggccggagtggggaaggaaggggagtgtgtccgcttgttgttgtgtttgttgtttcgtttcttcttttcccttttcgcagtggagatgggtgcttggagcttgcaagtggtggccagcgcctgatggcggtgctctcctcgtctgaggcgctccagaggacggagccaggggaggttgggctaatcgtcggctccaccatctgaataaacttgcccggttcccggatctgcaggaggaaccccggttt

SEQ ID NO: 451398 - DNA, 328 bp, Triticum aestivum
cgttctcttgggcttacattcatcgatttctcatgagggtttattttagcattgagtcgggtgaatcctttcgatcttaaagagatttttatattccactgacatttttgtttgagattcgtgagtgaatcgagaatggttgatctagattctagaagctgatgaaaaagattagaacggtcaataactcctaccccaaattttggttgaagctagacttggttgatagagtaaagaaggtacgacttcaacatcaaggtgttcccgggcgaacaatatgctagtcactggtcagtgcaatttaattttagaatcatggtgagcttat

SEQ ID NO: 451399 - DNA, 374 bp, Triticum aestivum
ttactcgtccgcccacgcgtccgaccaagcatctggtttggctttgctttcctcctgcatggctcattacagaagagggagctgggcactttgacccagagatggaacttgaggaccattggctacatgctggttttctgtgttccggtgttcttcgctcaggcccttcttgcgcttgttgggcctacatttgctaaggatgagaacagcgcacatggaaggagagtgcttgctcaatacttcattcagacgtgcatgccagttggggacaccaatgttcgcacctattcgttgtttggcaccatttttctgggacttatcgatgccctcctgatgagctatgtctcctatgttggatctcgggtgttatcctt

SEQ ID NO: 451400 - DNA, 213 bp, Triticum aestivum
ttatttggcggttgacggcgacgttaggaaggggggatctttcagagtggcctggggaagagataccttttctggttaacggcctgccaaccctggaaacggttcagccggaggtagggcctcacaggccggaagagcaccgcacgtcgcgcggtgttcggtgcgcccccggcgggccatgaaaatcctgaggaccgagtaccgttcacgccc

SEQ ID NO: 451401 - DNA, 423 bp, Triticum aestivum
tccacgcgtccgtctccctctctttcccctgcctccttctccagcaaaggccgccgccacggccaggccggcgtggggcgcgccaccggctccacttcgccgccgcacctccgcactccatccatccattcgctgcaccgcgacccatccaccataactaccacgagtcccttgctgcacctcatgccaccaatctgaatctcttcttccttcttgctgctgttcatcccaatctcgctgctgttcatctttgctactgcccgcagctctcttcgtctctctcaaacttgttgatgcagatgccctcaacctcctgctgctcctctcttcttacgcccctgctgttgccccttctacccctacctcgctgctgctctgcttctttttcatccccacgctgctgctactccttctctctacgcc

SEQ ID NO: 451402 - DNA, 252 bp, Triticum aestivum
ttttgctcaaccccgcgggggggccgtcgtggggggtctgtcggctcaagagggcgcggtagctcgacttcgacctggagatgctcgcgctggaccagtaccagcagaagctgctcgacaaggtgtccaacaacgcgcactcgccgagggcaagctggggcgcgcccaacggcggcctcggctcgccgcacgccgccgggtcgcccgccagaaacatgccggactacaccgacctgctcggctccatggacc

SEQ ID NO: 451403 - DNA, 479 bp, Triticum aestivum
tttctcgtccgggaatggttgctccaggtgaaagggtggctggtgctcgtcggccggcggcgacggcgcgcgtgggcgtcgttatcctccttggaggcgtcgtcagggatctttgcagccctactcccggatcaagacctttaggtgaaaatcaagatcctgctgtaggatcgggcggtggcgtcgtcttcagcgtcgtttcccctcttgagggcaccgtcttgaagatcttgatcccaatggtgctttttacggactggatgtgcatggtggcttcagtggcaatgatgatggggtgagcaaggtcgaaggcatggcactggtcgaggtagtcgtctcttctccggcgtgtccgtgagattgcctcggctgtttgttgttgtgaagtcgaagctgcggtggagaggcccaggtggcgtacgcgacaggtcgtccgttcggcgatcctccatgatgcctactatgcctagcttttcgta

SEQ ID NO: 451404 - DNA, 423 bp, Triticum aestivum
ttcacgcgtccgtgcaattgatcaattggaggttcagttcaaccaatctgactgtaactttgtcatggttagtgcacaggaagattcttctacgttgaattcagatgtttatggccaagtcgtccattctacttctcttacattgttcagcaataaatggatgcggttgacgcatgaagttaaatcaggacaaagtggaaagttggaatgtttatcggtgaaggcaataataaataagcaccttgtggtttgctgccaggctgaaagtcctgcttcaatggaagacttcccgctgtggaaatttgaggatcaagtggagacattgcctacaaaggatgctgcactcgccttttccgggcagaaactgattcaagtcgaagagccagacactcaagttgaccttgtcttagattctactggccc

SEQ ID NO: 451405 - DNA, 190 bp, Triticum aestivum
cacggatgatgctgaaaagcaaataagggggcgccttaaagccgatctcgggctgacaacgatgagggaggacaatggcggtgccctgttgccgaggaccggggaaggcttggcgctgaggccaaagtcgggaagtcggccagacatgaataacagccagcatgatctcatcgcggcagggttcgtgcct

SEQ ID NO: 451406 - DNA, 218 bp, Triticum aestivum
ttctttaccattccagctccaccacgcggtcaggggggctttcacatcgggagagccttagatcccacagctccatccccacttgttccgatccattcatttcacctttggcgcgtgtgggtacagccatcaggcatcagccatggctgccggaggagtggtgctcaacctgcgcgtcccgtcggcgtcagtggcgccggcacggcggtgtgggacgg

SEQ ID NO: 451407 - DNA, 326 bp, Triticum aestivum
tctcttcgcgtccgtccacgcgtccgctgtatttggggtatgttagcatgagtcggggtcagtcaaaccattggtggcctcatcagcatgcaattgtttttgcactctcttaacgatttcagctgatttatgtccgtgcttgcaaagagcgtctggattgctcttaccacctggataaatatcttttcatggatcattcaagaaacttgaagtgcagatatccttcatacctttttttgtcaagaaaatatgactaagacaataaatgggaaatatttcaactggatttgagataggagatcaagagtcaaaatcattcaaccatt

SEQ ID NO: 451408 - DNA, 247 bp, Triticum aestivum
ctcccacggcgcgacggttgaccagtcttgatttcaccgctccggccgctgattgatcggtcgaccgccgcggcgatgggaggagggtcatggcggctccgttaggggcttcttggtcggctccctgttgcgatggcgttcaaggccgttgctgagatagtcgatgacaagcaatgcagtaaaagcgccgccgagtcgtccgaggcggtgccttctcggaggcagtccgaggagctaattgggggag

SEQ ID NO: 451409 - DNA, 397 bp, Triticum aestivum
tcgttattttgcaggtgaatgccttcccaatcgctgtcatgtttggcatgtgctccattttcctattcatcgcagcaattttgcagaggcggctgatgtccgtgtccgaccttcacagatcaactagtatgttgtctttattcgtttcaattttgatgcaagcaaatgccattttctctcttggaattagactccgacttaacaaattgctaaccacaagatcaaattcctgcagaagccgcagagatgacagcagaagatgagccactaaacccttgaaacacaccagcagccattgacgtgaaccgggcatggaacggtctccaacttcatctgcttctctgcagggctgctgaataagatgggaaaccgaaagctgcaacaaaacctcgtttag

SEQ ID NO: 451410 - DNA, 290 bp, Triticum aestivum
ttcattgcaaatcaatatgtcccctttatagttgctggtggcaaaaaatcgtacttcactacaggtgctgttgctcgaattgcactggccgatggggttcttgtgatcgccctcattttggtgggactattctctttgcgacagaagagaacgaacacggaactaaaataacgaatcaccaacccttttgcttcatggggcgcggcgcataaagacagcggaggagctccacagctgacaggagcgaggttcttctccttcgaggagctgaaaatctgcacggacaactt

SEQ ID NO: 451411 - DNA, 376 bp, Triticum aestivum
tttctctgactccgggaggcactgaattctcggggggggttctctatactgccggggggtgatctgatcgggtctcccgcatactattcgggcctcttgcttccggacacagttcgggccgaacaacgttgactaaaaaaacagagagagagaagcagcgcagagtggctacctcatgtcctcttcaggctatgtcgctgttctcggtgctcggtgatcttcgatggcacaaactatgcagagtttacaggtttcatgcgtattcacatgcgcggtcttctgctgtggggcgttctctctggcgaggtaccctgtccgccctgccctgttgcttcggttgcttctgttcccccagtgcccccggtgcttgctgttg

SEQ ID NO: 451412 - DNA, 378 bp, Triticum aestivum
tacggtatccgtgatgttgacaacgggagtctggattctctgaaggagctgctgttccttggaatcactatttatgcagaggatgtgctaaagaaattgaacatgcctcgtcctttggcaaagtcaacacatcgcttaaacttgaagtattgtgcagatatgcaatcaatcaaaatctctgacctcagccacatggagcaccttgaggagctgtatgttgaatcatgctatgacctgaacacagtggttgctgatgctgagcttacaacttcacagttgcagttcctgaccctgtcagttcttccctcgttggaaagtgtccttattgcaccaatgtcccataattttcagtacatccgcaaattgatcatttcacac

SEQ ID NO: 451413 - DNA, 226 bp, Triticum aestivum
ttgattcgtgggggtgttcaatcctgcccaccagtatattcttagttaaaaatggatcattcaaaagggaccaccctcgcctttttcttccttataaattgtataagttccaaatttttggttcctagcttgatcacatggcaattggcaacatatgtcataaaaaatgatagtctataaaacgatcatgcacgtctggacaagcatggatgaatgggaggggatt

SEQ ID NO: 451414 - DNA, 227 bp, Triticum aestivum
tttactcgtgggcggacgcgtgggattgttttgtttttatatgtttacggttattcaatcacatgtgcaggtgtggtgacacttaaaaaaattaaatgtacaggtgttgtgtacgtccgtacgtgtgcatcgtatacatgttccatacgggctagacgacaaccacaggcccggtcatttgacttgattattcagtactcatacatgtccaggacatgtgtgtgtgc

SEQ ID NO: 451415 - DNA, 99 bp, Triticum aestivum
tttattcacctgtaccgacccatgtccggtacaacaaccgcctcaaggacacaaccatgcacgggcgccgccatgtggacgactccctggccagagccc

SEQ ID NO: 451416 - DNA, 482 bp, Triticum aestivum
tcgctatcgcgtccgaatcattagctacatacagataaatgtacgatgtattccatgttaggattttctgaagctcgattgccactacttctctagctcatatgtgataatgtgatcatgcaattgtcatgggtttaactgaatcttgttatcaattgtcatgtatgacagtacgacacatttgtcttgtacaggagtgcagttctgtatgtgatcagattttcttaggctgtattgttgacggtcatgtctgcttgttgttgtcatggcaagaaatatttttagaatattctgcattgatgatttttatcattaatcaaatgctacataaattgtttattgttctcagcaatactgccgctgatttcggcgatcatcactgttgagtctctgttcgtgacacagagtctatcaccaaagcccggcggctccaaagcagcaccggaagagaccttgcatagtcaaaaagacaagcagtgatc

SEQ ID NO: 451417 - DNA, 319 bp, Triticum aestivum
atcagttcctaatggtcattctgatgttgttaaagaagctgtgcataatgctgtggttcagaaggttgtcacggcttcagcgtctgtatcagcagaagcagtccccacatctcatcctgtgcaccaagatctcttcagtctgtcaatagcgcaggactcagcaacttcttcttcccctccgtcagtggatctgtttgctggctttgaccaacagctgccacctacgtctagtgttcatcatattacaccagcagctccattgcctgctaatgaagggtgggcattcttcgacacacctcaatatggttcgtcaacttct

SEQ ID NO: 451418 - DNA, 85 bp, Triticum aestivum
tttgttcctttttgtatattgtaacaggaaaactgactacaccttgatttttatacgaacgagtcaactcgtgcccgtcttgtgc

SEQ ID NO: 451419 - DNA, 425 bp, Triticum aestivum
atgcactatatatagaggtctgtactattaaatggttctgggtgaaactggcttacgagccggctcggtctgagccgagccatagccaaagcgagccgagccggttgaagtaggctcggctcgtgtccagccctactctgggggcgctgtgccgcggcggaggctggtcctacgcggacatctggcgctccgaccgtcgcgacccacggtgagtcatcacagagcaacacgcatcgcctcatgcgcctgcttcttctcctagatctgcatcgcctgggagggtctcttgctaggtgtctagctcctgccggtagctcaggaaaactctggctctgagtttcttcagaaattgtccgcgcaactttacaccgcggcgttcattttctcgggatttcccatggagtgccgagatcccagcatcaaac

SEQ ID NO: 451420 - DNA, 258 bp, Triticum aestivum
tttggacgcaaaattccacgctcccgaaccgagccggcgagtcggaggcgcgttctctacgccggcggcggcgggtggaccagaccgaacaaaccaacctcaagcttctcgccgtcccgggaacgcacgtgccccgggcgtccaccacgacgcctcgatccaccctgctgccttcatgagactactccttgtcgcggcggacctggtgggctgcgccgccgcgcacgagcaccacggcgaggctcccacctgcgccgg

SEQ ID NO: 451421 - DNA, 448 bp, Triticum aestivum
tcttttaatgtgaggtccgtggaagaggcacgcagtataaggttgatggaaaaacagagaattaaagaattgtcattgcagtggagcggaggtgtgagttctgtggaacacatggagttgctaacagagctagtgccaccaagctctgtaaagaatttcaagataacacgttacaaggatgtcatgtttccgcactggtttatgcatataaacaaatatcttcctaatcttgtgagtttggagatgtggggtgtgctttgccacagcctaccaacaacactcgtcccactacccaacctacgaaagattgttctcagcaacatgcataacctggaagagttcaacacagcatgctctataggcgaggatggtgcaaatgagctcacgttggctaaacttgagtatctggcgtatatcacgtgctgacaatgtgctatcgtcatgggga

SEQ ID NO: 451422 - DNA, 435 bp, Triticum aestivum
  unsure (1)..(435): unsure at all n locations
ttgacgcgtggccggcgctcggccttctccccctcgcaatcgcatcgcgtcgcccggattctatattcctccgcggaaacctcacgcaatcccaacagatatcccccctcccaatcccgtcccctctccgcggcaatctgttccgatcgtagcccgttctgcgtctcatccatcccgtctcggatcccatctcctcacgccctcgtaagcgactttccccctcctcgattgattgcagcagagcgactcctggccggtggtgcgtccgtactgtatcgacaccgtcggcaattccggccattggtttggtttctgaggtaacaggtccaagagaagtagaagcaaaggtccactcaagatgttttacgcgggatatggttaccatgctagtaattntgagcaaacgtaccgctgctatccagcatctttttttga

SEQ ID NO: 451423 - DNA, 376 bp, Triticum aestivum
gcggggatgatgatggacctgggcgccgcgcgcgcgacgccgccgtcggcgcatgaggcggccgaggccgccgtgcgcgcggtcggctgcggctacgacctcgccgacgacctccgcctcttccgcgccaaggaccgcctgctcgacctcggcggcggcggcgagcgggacctgtgcctgccgggcggggccgtggtgaccagcgtgcccgcgggggtcgtcgccgacaagggcgagcgcgcgcggttccgctccgacgtgctctccttcacgcagatggcggagcacgtgaaccagtcgctgtcgctgacgggcaagatcccctcggggcccttcaacgccatgttcgactaccgcggctgctggcaccgggacg

SEQ ID NO: 451424 - DNA, 120 bp, Triticum aestivum
tcgttcacgcgtacgccctacccccatggcggcctcgctcctatcgcgcgcaggctcggccggattcgccctccgcggcggcgcccggatactgcgcaagggcagggacggatgggcgcg

SEQ ID NO: 451425 - DNA, 64 bp, Triticum aestivum
cgtggcggcagccccttgtttgacctacccttggattctggcctgagcttgtacggcacggggg

SEQ ID NO: 451426 - DNA, 466 bp, Triticum aestivum
tcgttcagctcagcctaccttcagttctgacggcgtcgcccatggatcctcaggcacagctataattgagagtttatccagatcgatgaacctcgagcaagcggccgtgacccacatcacctgacctcgagcaagcgaccgtgacccacatcacctgaccttgacccacatcgaacaagagtgcaaatcgaccatgacgtccagcctcggccacaagtatttcttcacccaccgctgattgtgatgattgggttgccatcatgattcatagaggataagcaccagcaacgaggaactgggaaggagaggttgatacttgagataggttctacgatagcaatggtggtggcagcgtcttgcaattcacataaatggggtggagaatagcaaggattaatcttcaaatccaactagccaacacttcacaatgtatggctacgatggtggcagaatggaggagctcatt

SEQ ID NO: 451427 - DNA, 404 bp, Triticum aestivum
tctttcacgcgtccggcaaaacgatagaggcgtatccactatggcggcaacctactgcgcctaccccgccgcctccgccgccgccgccgcaaaccctaccagacgccgcctgcaaaccctaaccgcgccgggcgccctacctgctgctcggaaacccagccgccaacccccctccttcctctctttccggcgccccaatgcagcgctgccgccgctccgcgtcgctggcgctgacccgcaggttgtaaatggcgaagatttccctcctatgaatgacctaattcgactatacaagaaagcctttctagatggaaacgaagatgttgttagtgacatcgagaaggcaatcactagcatggaggaagagagaagtaaagcagcttctcagtttgaaagtatcacag

SEQ ID NO: 451428 - DNA, 447 bp, Triticum aestivum
tttgttcactcgccgccgcttccagccgcccccctcaccctccgcaaagcccatagacaagttgatctcatgtattcaggaagaacagtggcatccagagtttcctgttcatcgggaaacaacggaagcttcccaccctgccttcacccgggattccttggatttcctgttgtctccgtgaacttccacttgttcaaggccattgttcgcagccctgcatcttctgttgtcttgggtatttgtggaaggagcctcccttagacagagctgccccataaggtgttcattctatatttctgagaattggtagtgggaagccgtgcagctaccgctagctttcatcaagattctcaaagtgttgaatcttggttcctgaagatggtttcctctgagataccttcagttacaacaacccatacacaacgccccaagctctttacagggatg

SEQ ID NO: 451429 - DNA, 94 bp, Triticum aestivum
gatcaacatggcctccattggaggctcagtccgatatgcaggctctgtaatttatgctaccacaaaaggtgctttgaactaacttacaaggagt

SEQ ID NO: 451430 - DNA, 348 bp, Triticum aestivum
tttacgcgtgggttgcgggcgtgttcccgtgggggaactgatggtgggttacatggagtggtcgcacgactggctgctgtgggacgccttcttggaatgcggagggatccggaggccgtccattagatagcggccggggaggagggaggagcggaggaccacgaggaggaggaggccgccattagcacccaccctggctgccacccaccaccccgacgcccgactcgccactcacctgacggacggtcatgggggaggacctcgtcaccaccctgtacatggagaacggcggcggcgaaggtcaccacagactctgcaccctgctctccatggacccctacggccacc

SEQ ID NO: 451431 - DNA, 75 bp, Triticum aestivum
ttgttgtgcttacccagtcagctaacgaacccgcccactccactctagcttggcagccatgaactgcggaagggg

SEQ ID NO: 451432 - DNA, 418 bp, Triticum aestivum
ttctgtctgccgctgttattactccgtccaatgcagcctcattcctgtcaagtttcactcagctgcgccgccgtcgtttaccttcagtgccgctacacccagctactcgtcctgcggctgttgtagctccatgtggaggcgtgccggaggagcggcccagctgctactacaggaggcgacacgctgagcttccacttgctgaggctacacccagatcgacaacacatcttctctgccattggtcacatccatctatctgagagaaaaattatctgacaacaatggcgatggtgctggatgcatttgtgtcctacctggtggacatgctcacgcaggcagcaagagatgaggtgaagactatgttgggcgtctccggcgagatcgacaagatgggagacaagcttcgagacctcaagaa

SEQ ID NO: 451433 - DNA, 64 bp, Triticum aestivum
ttcaagctgagcgagttattgcttcttgcattgcaagctccactgtgcatgacccgactaagat

SEQ ID NO: 451434 - DNA, 384 bp, Triticum aestivum
catcttattcgagagagagccgcagacatcaggaagatcatcaacctgagaaacgacgcgggcctcaccgccctgcacatggctgtggttggctgcgtgcacccggacctcgtcgagctcctgatgaccacgccgtccatcgaccttaacgtcgaagatgctgacggcatgaccccgctggcgctgctcaaggagcagctgcgatcaaccacgtcggagaggctcatcaagcagatagtctccgccggaggggtgctgagctcgagcgtgctgagaagccggtcggccgtcgtttcgcagataaagatgcggggagggattgcgatcagtccgggcaccatgttcaggatatcggatgcggagatattgttgcactcgggcatt

SEQ ID NO: 451435 - DNA, 210 bp, Triticum aestivum
gtgatgttgatctgcactactcgatgcaagaaccaccaccacacgtgagtgaacgtgcgagcaaggaaaggcagggagagatggcaatgaggccgctcgtcgcgctgtctatacccgcggccctgaccggcgtggcgctgcgaggaggccgcacctgacggggccgttgagtgcgggaggtcctcctccgaccggatggccctgcgcatg

SEQ ID NO: 451436 - DNA, 227 bp, Triticum aestivum
tcgctgacgcgtgggacctgctgcttcctacacacacattgcaaagcacaagtaagaagcctgcaaagagagggaatgggccaagaaggggcagctgcttcgttgctggatgggaagcttaaggcgaggagaaacgattatggccaccgaaaggccgcagcagcaacaaggaaaaagaagtggtggccgtgccttttggatgccgaggaagccgcggggcaagtggc

SEQ ID NO: 451437 - DNA, 321 bp, Triticum aestivum
gcggcagcttttccagcggctcacgcatgggcgttgccatctgcaccgatcccccctccacgcgctaccgcgatggccgccggcggcagcggcggtggcggagacatcggggctgattccgagcggcgcctcaagaaggctatggacaagctctaccacttgcccaagcccaagcctagccccagccccggctccaaaccctgctgctcgtccactcccagctcgtggagggcggggaaggcggcggatgccgggaggaggttcggggttgtgcgggggtcgcggctcccgccgcagatggccgccatgtcagcgatgtct

SEQ ID NO: 451438 - DNA, 259 bp, Triticum aestivum
tccacgcgttcgattgtccccttgctccgaccgtccatccggccgtccaattcctgctgctgccttgcatcggctggactctgctgcctgctaaatctatctcatctgctgccaacggcctcctggccttatccccagcgcgcaccgaaccggacgcatctcccgcgcgccacacattcctagactgcgcctgctcccacaaccctgtcttctgccctgcccaccccgccccgatttggattcttacgccggccacctc

SEQ ID NO: 451439 - DNA, 313 bp, Triticum aestivum
tccgtgcgtgtggataaataaaacctactagtacctatctatctatgtactatctagatggcacctggaactttagctgttatccagggtgcccgtaagtcggtccgttgtgtcgggtgccgctgggaacgttcccatggatgttaccgtttgtggtgttggcgttgttgaaccaaccaacctgaccctagcttaaccttgcttggattggatgatgtgctagctagctagagctagagctagagttagaccatgcatggctgatggtatgtattgagggatcatatctatctatctccatcctgacttggtg

SEQ ID NO: 451440 - DNA, 259 bp, Triticum aestivum
cttactcggttgtcctatgtccatctggaccagctagtcttgtgcccttatcttggcgtgctatctccggcgactccattcttcatcgcggctgaacaagaagtggttgtcgatttctgtcacgacttaagatcgagccagcttgcgttttgttgcggaaatcttgggtgcgatgttggccgggggatcacgatctttggtgcgccgctctcctgtcccgcagatcgaccgagccaactacagttcttatttatctcgc

SEQ ID NO: 451441 - DNA, 392 bp, Triticum aestivum
taacaagactagccatctcacaattatgcttcaaatttttgaagttgccccatcaatctttatggtggaactagagagatctgctggagaaacttcagagtataataagttcgtaaacaactactgctccaaattagatgatatcatctggaaagtttctgctgagaagggaaaatctaggacatcccggctatcgaagcgctaacttatgcacctattacaatttaactgtaaccatgtgggtttgctgcaggtattgcgtatagctgtttcgcttgggttacgtacatcacgggcttggctaatgagtgtactagtgcagtttatcataattgatctatgatctttgagttatatactaccctgacctaagacgtcttatatttgtttac

SEQ ID NO: 451442 - DNA, 390 bp, Triticum aestivum
ttaatctcctccccccacgtcgctcccgcgaggcgaccggggggcaaccctaaatcccgccggtctccgccccctctcccctccccctccctcgccgccgcccgtgggcgcggctgggcaaagcccagccgtcgccggcggcggcggggcctcatcgtcctcctgctcgggcggtgctggcgcgggccggcgcctcgggtcggagcgtggagctgtgccgggcgacacggcggtgcagcgggcagaggcggagctccggtgcctctgctccccctcgacgggcggccaggtgttggtgcgtgctcggctctccgagatcggcgacggcgcggccagatctgacgggcgcggctggatctggggccgggcgacgcgggccgagggcggcac

SEQ ID NO: 451443 - DNA, 71 bp, Triticum aestivum
tccttcgttccctactagctagccatggcatcttgcaagagttgtcttgcaatgtttgcactgcccatagt

SEQ ID NO: 451444 - DNA, 132 bp, Triticum aestivum
tgcatctacttcccatccgccccacgagaggagagactattacgaagcgtgcccaactccatctgcttccttttcctcttccccccgtccccgacgacccccggccgaaaccctagcgaggcgcgatgttcg

SEQ ID NO: 451445 - DNA, 306 bp, Triticum aestivum
tcttgacaatgaacttactgacctgagttcggagtattttgtcctgggaaaagactctacaacggcaaggagggagcagaggccgcttacgaagctgtcgtgcaaaagctgagaagatgggttcaacatcctgccctggtactaaatcagatcatagacacaaagctggcaactcgaatgaagccggtatagaagctcctatgcccaacaagttctacatagtgccccaagcaggggcgacgaagctaactgtgcaacaggaggagaaagttaaggagaaggtccgggcgattggatctgaattcc

SEQ ID NO: 451446 - DNA, 52 bp, Triticum aestivum
tgccggaccaccccgaccacgacgacgcgccacagtagttgggagactcttc

SEQ ID NO: 451447 - DNA, 121 bp, Triticum aestivum
ccacgcgtccgccacgcgtccgcggacgcgtggtctcccccgcccgccgtcgccgccgccgcagagccgcagggagagaaggcaaggaggaaggaaggggaagacgccggcggggcacggg

SEQ ID NO: 451448 - DNA, 207 bp, Triticum aestivum
agcatttgggatgcttttcagtttactggtgcctcagttgccgttttgattggttttatctttcctgccatggtcatattaagggatccttatggtatcgcatccaagcgtgacaagatattggctgtatccatgatcgtgcttgctgttgtctcaaactttgttgccctatacagtgatgcgatgaacatcttccgtaggaaagag

SEQ ID NO: 451449 - DNA, 85 bp, Triticum aestivum
tcgctgacgataatctcctccccccacgttgctcccgcgaggttaccggggggcaaccctaaatcccgccggtctccgtcccctc

SEQ ID NO: 451450 - DNA, 103 bp, Triticum aestivum
ttttcgcggacgcgtgggcgcgcacttctagacgtgggtgtcatggctgccatggcggttccggcggagaggaagatgaaggtgtgggagctggtgctgcggt

SEQ ID NO: 451451 - DNA, 297 bp, Triticum aestivum
tcgtagcgagccgcaccagacgccgcaagaaccaccaccacaagagagcgcaccccggaacaaggaaaggcagggagagaaggcaaagaggccgcacggcgaccaggcacaggccgcggcgcaggccggggaggcgccgcgagggggcgccgcggagggggccggcgagagcgggaggaccgcccccgaccggagggcccggcgcaaggccccgggcagcgcggcggcggacgagccggactcggcgcccaccagcagcagcagcacggcggagcacacccgagggaagagccccag

SEQ ID NO: 451452 - DNA, 223 bp, Triticum aestivum
cctcgccacgcgtacgccgacgcgtccgcgcgggacctgttacggaagaccgggcgtgtcagccgggtccaggcgaggactaggaagccgcgctggcaggccagccgccaggaactgcagctgcgtctgcgatcacccaacaggagactccagcatgtccggatggggctccagaagatgatctgcctctgcccactccacctccactgacccagcatgagga

SEQ ID NO: 451453 - DNA, 135 bp, Triticum aestivum
  unsure (1)..(135): unsure at all n locations
cagaagccacacaagggagcgcaacggacaacaagcaaggagaaggcggcaacgggccagacaacaagggaaagcaagaggaaggacaggaaanagccngaaagacacaaacgcaggcagcgacacagggacccg

SEQ ID NO: 451454 - DNA, 82 bp, Triticum aestivum
tcttgacgcctggggagggctccagggagtgcccattgttggggagccctccggtattgctggatgaacggccaaaccagtg

SEQ ID NO: 451455 - DNA, 94 bp, Triticum aestivum
tcgtgacctacgaacgaaacaggaaacagagagcgctctctgcgcgaacgacgccgaggaagaagaggaagaagaagaagcagagaggagcacg

SEQ ID NO: 451456 - DNA, 341 bp, Triticum aestivum
aaccagaaacaccaggcgaacacgggggaacagaagcagaagcggacaccgcccaagacctaacggaagagacagagcaagaagccgggatgaaaaagcaaaccctggaacccaaaactgcagaaagagaaccggaacaagacagcggacccaagcaaactgttcaagtggaagatgtaaacgatgcatcaggtggacacaccaaggtggacagaaaaactgcagaagagataactatgactgaagtcgtgaatgagggagctgtggagacagaagctgtagcaccagaggaggaaactgtagaagaaaaagctaccgcagggacacagggggaagcacca

SEQ ID NO: 451457 - DNA, 392 bp, Triticum aestivum
tcgtactccgctcagccctagacgaaggcagaaagtttaaactacaggatctccaaggcatgtaatgaaagatattgaacatgatttcctagatttgaaggaacagggaggatttgatggaattaggatgctagatgtggtagaggaaactaacagattacatgatgaatatgatactatgacccctaaaagaagttcatgtagaagatatcaaaactggggttctgaatctccacccacgtctccgcgagttggttatggacagagtttgagtctccctgcaaggaggtcactagttgtctcctttgaggaatcccttttgtctggccgactttcttatggaaaagataatcagacaattgatggtttcttagctgtcctgaatattgttg

SEQ ID NO: 451458 - DNA, 182 bp, Triticum aestivum
caccaccaacaacaaaaaaacacgcagggacgatacgaacaacccagccgcccctcgccggcgacgagagccaggccacggaggccgactacggcgagccgcgcgagcacccggaggagcagcagaaccggacgcggtaccagcccgagcggccccccagccgacagggcacaacagagagg

SEQ ID NO: 451459 - DNA, 77 bp, Triticum aestivum
cggagacaccccaagaaaagcgaaaccgagaaaaaaaccgcgatccttagaaagccaatctggaaaaatggaaaggg

SEQ ID NO: 451460 - DNA, 210 bp, Triticum aestivum
tcttccacgcgagcgaaccaggcaaccaaggcgcacccggccaccacggcaacggccagggagccggacgagccgcacgccgcggagaagggcgaggaggcgccgcagcagcggcggcgcgccgacccgcgcgaggaccacagcccgaccgcggaccacgccgccgacgcccgggcggacccgaagcactaccacccggcgcacgccggg

SEQ ID NO: 451461 - DNA, 387 bp, Triticum aestivum
tcgtggacgcgtggggaagagactctcgaacccgatttctagcaaccgagcggcgagcggcgcgggcgcgggagctgccaaggagtgcgaccggcaaccggcaaccggcgcggcttgctgacgtctcggcgagggcgcgcccagatctactaaagcaatcacatggcaactctgaaagatgcagtagcacggaagcctatactggcaacaatccgcttgctcgttccagctggtgctgcccgccctgcaccaccagttggtccggcactgggtttctataggctcaatgtgatggcattctgcaaggatttcaatgcaaggacccagaaatataaggcagaaactcctatgcaggacaccctaaccgcctacaaagatagcactttc

SEQ ID NO: 451462 - DNA, 198 bp, Triticum aestivum
  unsure (1)..(198): unsure at all n locations
caccacacagcgcgcgcaccacagggggaacagccaggggaagcaacagcagcagcagcggagcgagcgcagggaccaacgcgcggccaaggggcgaggcaacggacaaggggangccggcggagaggaggagggagagggacgcggaggcggagcgcaaccagccgccgggcgagcgcgagcaccccaccgacgacg

SEQ ID NO: 451463 - DNA, 197 bp, Triticum aestivum
ttgttcgcagacgcgcgcacacgcagacgagccagattcctacagcgcagcgcccctcctcccacgcgccgagcgcccgccgcccgccgaccgccggagaggacgccagggcgccggagccggaggacgacagcacggcggagaagaacccgcgcccacacgacgaagacgacagcggccaccagaagaccaacggg

SEQ ID NO: 451464 - DNA, 175 bp, Triticum aestivum
gccggcgctagctctgcaccatcgccgcacgaatgctgcgccccccgacttcagctcaagggttcgaccgagagccaccggccggagctacccgggtagagattcctcgtttcatctggattactgggctagaagatagagccatgcagtgaatagtgcgtcagatccttcacag

SEQ ID NO: 451465 - DNA, 94 bp, Triticum aestivum
acacgcgggcggaaacacagaaggaggacattgtgagagcagacaccccaccaccagcagagaggagggagaagcccgacgcgagagcgcccac

SEQ ID NO: 451466 - DNA, 385 bp, Triticum aestivum
atcgtgctggactacccgctgaggaaaagcatataaattagttgaggagaagaaacttacaaggattcccctagtaacggcgagcgaaccgggagcagcccagcttgagaatcgggcggctgtgccgcccgaatagtagtctggagaggcgtcctcagcgacggaccgggcccaagtcccctggaaaggggcgcctgggagggtgagagccccgtccggcccggaccctgtcggcccacgaggcgccgacaacgagacaggttgattgggaatgcatcccaaatcgggctggagactcctgccaaggctaaatacaggcgagagaccgatagcgaacaagtaccgcgagggaaagatgaaaaggactgtgaaaagagagtcaaag

SEQ ID NO: 451467 - DNA, 335 bp, Triticum aestivum
tttcaacaatttcagcagcttacatcttatgcaacgactgtgaagccaatctatggagcctattttggtgttttcacgcttgtcttggttggggccgtctttgcttgttgcaagtttgcagggacaaagcgcgatggtggggtcccatatcagcagcttgagatggggtctcaggctcaagctcctgactcatcaggtgcaaacaacactacaagcacaggagatggctgggaagatggatgggatgatgactgggatgacgaggaagcacctgcaaaaccttcagaaagaggacctgctggaagcatctcggcaaatggcctttctctgagatc

SEQ ID NO: 451468 - DNA, 175 bp, Triticum aestivum
tcgttcacgcgtccgccacgcgtccggtgatgcgtgattggtcgcggcggcgctaggtgctcttctccggccgcggcgagcgaggccatggggtgcatgcagtccacgccgaagcggaggcagcaccctgccggctacgaggaccccgtacacctggcctcccagaccgccttca

SEQ ID NO: 451469 - DNA, 84 bp, Triticum aestivum
tcgttttaaaaaaaaaaaaaaaaaaaaaaaaaaaaagaataaaaaaaaaaaaaaaaaaaaaacaacaaaaaaaaaaaaggggcg

SEQ ID NO: 451470 - DNA, 277 bp, Triticum aestivum
tcgtatgcgtccgtcataatgactatacatggcattacattttcaatcacgccgataagcacctcggaaagagatcttggcactaaagatacaaccaaggggaaaaatactcactgagctgagccagacctcctcccttgactaaaaagttactgcacagttaccgtctttttctttagatactctagcggctgaaaagttttcaatgaagggcattttatatcatgtatttttggaatgtctttctctgagatgatgttggtgccaattaaaaact

SEQ ID NO: 451471 - DNA, 447 bp, Triticum aestivum
ttggtcattgtaaagaagaaaatattggggcgtttgagcgcccgtggcggcgttcgtcgccggccagaaaatcttgtgtccactgttcttcttccacctccgttcgagtgagaggagaggtagctagagggctgcggttccaacaattggtatcagagctggttcatcttgggtgtcgtccccttgccggaggcgtaccggcggtggcggcgttcggcggcggctgctcggtgaagctctgggccgtgtgtcagtctatggaggtgcgcggcgcggcgaggaggccgcggtggctgcggcggcacggtaaggaggccacggaggacctgcgtggtggcggcttcaacgacacacaacggcatggcggcatggaggtgccgcgctgcggctgaggccgcaacggtgcagggcaataagccgtggcggcttcaacgacacacagcggca

SEQ ID NO: 451472 - DNA, 327 bp, Triticum aestivum
ttaacttggcgaagcgagtggattcggcatcaggatcacatccgccgatggccggcaacgagggtttcgccaccaagcgcgtgctggggcggtgcacggccgaagagatttcctccaatcccgcgcagcagaagtcagccatcgacgggttcggcacgccggagcgatgcgccaccgagcctacggcgttaaaccgcgagtatgctcttctgaaaaggaaggccaaggaggcagatcaggatcatgatgaagagcaggagcaggaaaaggagatcaatgagattctggccacggcaaaactccccagacgcgctgatgttgtgtctg

SEQ ID NO: 451473 - DNA, 221 bp, Triticum aestivum
tttcgtgtccgggcgacgggaaggacacgccgctcctgctcaatgaagggcaggacgtgtttacgttctacgccagcggcaggcgcttctgccagggggtgctcgccaccatggagatgcgcgcgcggcacgacctgctgtccaagctgctggagctggtcttcctcagtaaggacaccatcacgttcgaggtggtgatgaacgaggaccccatggaccac

SEQ ID NO: 451474 - DNA, 97 bp, Triticum aestivum
tttgatatgggcgaccctggcatgccggcgaacaccgctgatatcactgggccgccggctcccaacacctgcgcggcctgctggcagcgccccctct

SEQ ID NO: 451475 - DNA, 128 bp, Triticum aestivum
tcgtgtttgcggaccaccgggcaggccaaaggagccgccttttcatttcttccttctcgggaggaagggagggagggttcttggggacgcgcatggaccatggcggcggcagcggtgggggtggaagt

SEQ ID NO: 451476 - DNA, 174 bp, Triticum aestivum
gtaaatacgtggttggtggagacaattcagagccctctgattgtgtatctgactttaagaatccagcgacgccagaaaagaagaagttaagaggtacaaaaggacatgtgtcttgcagtcctcctcagagtctgaattgcatgcctcagacaaggaattgggtgataacaggat

SEQ ID NO: 451477 - DNA, 290 bp, Triticum aestivum
tttgttcagcaaccaacaagctagctagcgcgaccgagcaagctaaactgagatcaagatcgaattgattgatcttgttggttctacttctcggtagcaaatcaagatggcgtctgcttctcccgcgccagcgacgctgctggccgtgtgcgccttgctcgccgccatggcgctcttccagggcgcgcgggcgcagcagctgagcccggcctactacgacgagtcgtgcccgcacgtctacgacacggtgcggcgcgtcatccaggaggcccgcaccgccgacccgcgca

SEQ ID NO: 451478 - DNA, 178 bp, Triticum aestivum
tttgttgtggaccccgcgtgcccctccctggaaagcctggctcgggctagggcacgcagccaccacccatacccccaccctgaccgatcgcgtcctcccattcttggaccttaccttgcctgctcgccctttttatggcctactactgccgagtgcacccctactactgactgaaccc

SEQ ID NO: 451479 - DNA, 193 bp, Triticum aestivum
ttgcacactacgcgtaaaagactctgggtgcggcttgagttcacctttgctggattgcagctcatgtggagctacagtgagaatctgggactacaaatgcgttccactctcttctgatcttaatctcgggaacattgatgcacctgatgcagggacgaaacctatgttggcacgtctaattagcgctaccagt

SEQ ID NO: 451480 - DNA, 499 bp, Triticum aestivum
ttgtgtgaccgtgacctccctgcccgacgagcgctctacgatggcatctcaggattccaagcccgcgcaagtcccggccgccgccgagctgacggccccggcggctgccgccgcaggggaggcgccgaatcccacttccccgacagcggcccaaaaccctagcgccgccgccgccggtggggcagccacggatctagagaagaagatgcgccgcgcggagaggtttgggacgcaggtggttatgtccgaggacgagaagcgaagcagccgcgccgagaggtttgggactggatcttctaatgaaaagatggaggaacagaagaagaagtccagggctgagaggtttggccttcccacgccctcctctgatgataccgaggctaagaaaaaagcccgcttagagcgatttggtcagagcacagaagttggcaaggcggaagaagagaagcgaaaggcacgggcccttaggtttgccggagcagcacctagtgggtcatct

SEQ ID NO: 451481 - DNA, 90 bp, Triticum aestivum
ttcggtggcagttgtccaaccgaacgggggcgaggtatggactagaagctgcgcgacccgaccaagggcctcggagccgggggcatggac

SEQ ID NO: 451482 - DNA, 418 bp, Triticum aestivum
tcgttgcctccaccttcttcttccaccgaggcgccatggccaacctccccggcggcgctcccaacgccaagcaccacctcccaccgcgacgtcccctccgcgcaccacggcgtcccctcctgtggtgctccccccgtccatcctgcgcgccgacgaagccatccacggcctccccgcgatgagccaatgccaaatccggtcagccgcgggctcccacgacgggccgttgatggatccaaccatccacggccttcggcgatgcgctctctccggatctgccccgcgctcctcccccggtcccctcccacctcacgccccaacccctccaccttatacaccgattcgccgccggtggcccgagccgccgtagcctccacaccgcacttgtcttggagctcgcagtgactctccgcacgag

SEQ ID NO: 451483 - DNA, 391 bp, Triticum aestivum
tcgttaacatttgcctcttcctccctccctccgtacccccctccccctctctctctcccaacgcccgtccatctctccggcgaaaccgatggccgcgagctcaggcgacgagtcccggaggcccaatcccctcccctcggggctcgtgtccaatctgcagtccgtcctcgcctcccgccgcccgccttcgcccgaggacgccggctccaccgcggccgaggccgaggccccgacagcggagacggcggccgatgacgcgccggctaagcctgtcgtacttctgacctgcgccggcgggatccagtcgccgggtctcgtggcgctcgtcgacgccctcgtcaagggcggccgatgcgacgtccacgtgtgcgcccctgaatcggacaagcct

SEQ ID NO: 451484 - DNA, 424 bp, Triticum aestivum
tcgtttacgcgtccgctgatgggccttccgttgagtataagggagttgttccagcagatcagttacaggataagaaaatccagttggaaaaggaggcgaatgaactgattttgaaaggaagcaaggttttggtctctgtttttccttatgaggaggcggctaagttatgtggaggtgctctgcctagctacatttcacaagacagcactccccgcattgtgaaatttggtgactatcctggttgtccttgtggaggcactcatgtagctgatatcgcagacatcggcaacctaaaggtcacaaatatacgggtcaagaaaggcgtgactaaagtctcctacagcatcaacccgtaattttttctgcgcaactctcgcacccagaatttgtcagagtagaggaaggataattatctagagaatca

SEQ ID NO: 451485 - DNA, 303 bp, Triticum aestivum
ccttctcctccgcctactcttttttcccccagctggaaccaaaatccgcgttaaattcgcagaattcattagcgggcgtcgcctctgagtgtggcctcaaagcttagctcaagatggtgcttgctccgatcattcatgaactcttcctgcgtgcgtgcgtgcgtggctgtgtggctcagagcttagctttgctgctttgaccatggcggtcgtggctgtggcgccgcggctggtgcttctgctgctgctgagccgcgccgggcttccggcggccgtggggctcggggtgaactggggcacgat

SEQ ID NO: 451486 - DNA, 272 bp, Triticum aestivum
tcgttacgcgtccgcatcccggccccaccaccggcagtacctactctcttggtgtgaacaacgaagcggaagcagtctaactagctcttgggcttaactgattatctgaatcttcatttggtactcttgatcgatgataatagattatagctgattgcaccggtgattagcacagtatactcatgtttgtgtggaaatggaaccacgagtagtagcactagtatagatacgtacaataaaatgtggtagcggtggcttaagtttggtcaatg

SEQ ID NO: 451487 - DNA, 420 bp, Triticum aestivum
tcggttagaagaaccgggagatctcatagatcttgctctgtcaatggggggaaaaggatacaatttaactttgcaaaggtgttgaggggaaagaggaggagaacggttggggaaaggcattgttgtgctgacatcagaatggagcctgatagaagcataactaatgaaccttaatccaagtttgattataagcacatcattgtttgtcacaacttttgatgtgcattagatatttttcaattgtaaaaagtaatactgtttgcatgtacattaactttgtttttcgcttagtttgagacgcttctttttctttttagtgacgcaaaattgtttagttttaattgcttactgttactttactttgtaacgagttggattcacattcgagattgtttccaagaaataaagttatgttgatgt

SEQ ID NO: 451488 - DNA, 365 bp, Triticum aestivum
tcgtttcctcctgctgctgctacacccccgaagaacaaaattagcaggtacaacagcggctgctcctcctgctgcttgctccactcaacacgaggagatctagaggagtcgatgactggcagtgccgtctttaaccggaagcactgtgccacattggataaaaagaagacaccaacagcaggatatatcaaaagtgttttcgatgatccgtgttcttctattgcttctcttgccatatgtaccccaatgggcatcagtgagagcattcaacaataagactgatgtggattccttgctagtgttcaaggcaagcattgccaaccaccatggtgtcctagctgcatggaacacaagtactgacttct

SEQ ID NO: 451489 - DNA, 328 bp, Triticum aestivum
ttatcgtttccgcaagagggggcggagggacggcagtgcaccctcgggaaagagaaggcggcgatgatctagtgttccctgaggaacaaactcgtttggcggttgacaaccaaagggaagccccagacgtacccgtttatctcatccagtgtgtttgcgcctagttatagtagcccaaaacgtaatagaggtcaccctcaagtctgaaccagttaaaagagaactccgaagtctgaactcctatgttacatagattccagtgacatggtgaacttatgtcggttaatgtactgtccctgtgtttgtggatcaattaggttgttaaaaa

SEQ ID NO: 451490 - DNA, 234 bp, Triticum aestivum
tttgttgtcacaggtcacgtgcctgcgctgcgggggtgtcgtgctcgggctggcactgcaccactccgtcgtggacgcccgtggcgcggcgctcttggtggagacctgcgcgagcgtcgcccgcggctccactaaagaggacgtgcccctgccggctagcttggaccacaggctgctcgcggagcgccaagagcgctcggtgccgtacgaccacccggagtacaagccggagcc

SEQ ID NO: 451491 - DNA, 413 bp, Triticum aestivum
tgtgcgtcccatcaatcgccatggcctccgtggacctgcaacgcctgcgccacatgttactcaccaccggcgccgccgccgccggcggtcaccaccagctcgcctccgccgctgctatgccagcaagtgagccttgttatggctctgcggcgtcgtgcgagcgggggcaccagccgtacgcggacatcttcacgctgccgccgccgacgacgatgacgccggccccgtgtcagtgttcagagttcttggcgatggccgcggctgatctggcgaagaagggcggcagccccgacggtgttcaggaaatgatcaccaagaagcggaggcgtaacgacgttcttgcggcccacgcgcagcagcagaccatggacgtcgaccgcatcctgctaaaacatgcgaaaaatatgtggact

SEQ ID NO: 451492 - DNA, 434 bp, Triticum aestivum
tcgttcactcccccccctccctcctcctcttgtcacaatcaatcaagaacgtactggaaggaaggaagaggaggaagaaccaagaaagaaccgcctctcttaacgagaacgcagagtctcttttgaatctttgctagctgcggaaaggccttcttccgtcatgtgctctggtccgcgcaagccgtcgaccccgcctccggtggcggcggcgccgaaggattcggcggccatggcctcgcttctcctcgagctggcggcggcggataacgtggtggagttcaggcgggtcgtggaggaggagaaggcgtcccttgatgctgcgggatcgtggtatgggccgtcggctgttggccttggccggctggccgcggagagccggactccggctatggtcgccgcgctctacgggagcacggccgtgctggcgcacgcgc

SEQ ID NO: 451493 - DNA, 236 bp, Triticum aestivum
ctcacgtttccgctccacctgcccgtgctccaccgcgtggttaccgtggggttcgacgagctggacggggagctgcacgtgcccgggctgccgccggtaccgccggagtgcttgccgtgccccgtggtggacaagaagagccccaactacacgtggttcctgcgcctcggcggcagcttcatggacgccacggggatcatcgccaacaccgcggacgggctcgagccggggcccct

SEQ ID NO: 451494 - DNA, 374 bp, Triticum aestivum
tcgttaacgggagtagcggtcaacaagatgctgacgggactgggtgtaatagccaggcagaagatttaactgtgagccaaagaagcgcaagtttgtcagtcagtatggatgattccacttgtgaccctaacacggagaagcttgggtcagatggaatgcagcgatcaagcagcggaactcaggcaaatggccatctcgacgaggatccagtcagcagtgataattccagccaagctatttccaaaaatgctgacaagaagatatcactgctaggacacgggcaccacggtaaacaagtggtcgagcttttgctggccaacggtggggaggaggccgttcaccagttttgccaaagatggaggcatgttttcgtc

SEQ ID NO: 451495 - DNA, 354 bp, Triticum aestivum
tccacgcgtccgcccacgcgtccggaaacgtaatgcactccaccaaaagtggcttcaagatcaagatgccgctgaaacaaataatttcattcaaagattaaaatatggtcatcaggagcagaaagtgttgatggaggaagacgaagatgatatcgaagactgtgaggatgaatcagaaaatgaaaggtcacatgacttgactcccaatattgtgcggcagaattctgagaaggcaaaacaaatgattgccaaaatgttcacagatgagaatgacacttatgagcactctgatgatgaggaaatagaggagcatttggcccgtcaacgtatttcaaagcgagaagttcatagtac

SEQ ID NO: 451496 - DNA, 300 bp, Triticum aestivum
gcgacgccgagaccgacgtagccgcagccaccaccgtccctgaacccctccgatgcgtccatgtcccctacgacatctacatgggcgggctcgagctgggcgtccctgcatcgagcggatcgacgccatcctcctcctcgagcaccaccgccttcttcttcaacttcgtcgtcgtcctatgctttgacccctccccgagcatgctcttgcacaactacaggtccgatgacggatcccaggagccagaagacgccactgatgactactagtacccggaggatgcctactactacgtgaaga

SEQ ID NO: 451497 - DNA, 367 bp, Triticum aestivum
gccccttactgccatcccaccaacgccgacgcgctccggtccctagctagctcgctcgctcgccggtggtccccgcaaatcgtttcttgtttctggctagagcacaaccttttggttttgtccagcctcccgcttcgcattcccttgcgtgaggccatggccgaggtccctggagctgccggcgccctcggctccccgcccagggaggtcgtggacgccccagagcgcgcggctgctcttccctccgcggccggcgagctcggctccgccgacgatgctgataaggaggttcctggaggttcggaggtcagcggcgctcttggcaccgacaaggcagacggtctgtgttccggcgccgagctcgaat

SEQ ID NO: 451498 - DNA, 362 bp, Triticum aestivum
ttccggcctccctcctcctcttgtcctccgcatgtaaccagctcggtcgatcgatcggctcggacgagaagcaacccgcttcaatccccgacccctgatcgtagtggagtgtggtatataggcggagctagcagaggacatggtgaagttctcgcgggagtacgaggccagcatcatccccgagtggaagggcgccttcgtcgactacaagtgcctcaagaagctcatcaagaagatcaaggtcgcacggcgcgacgccgagtccgaaggggactcctcgccggagagcgccgccctcgccgccggcgtcgagagcgcccgctatggcgccggcttctccgtgctcgaccccgtccgcgccc

SEQ ID NO: 451499 - DNA, 444 bp, Triticum aestivum
tggctcttccccccagccagctctagtcccagacgccctctcctgctgcctgcctgctcctcctctgtcccggaatgcgcgatgccgggcactcgcggtaccgccggcgggccggcctgccgatgctctcccttctgctcgcgctcgcgctgttcgccgggggtgccagcgggcagccgccggtgccgccggagatgaggggcgtgcaggcgcagctcacggggctcaccaacgacgtcgcccacaccatctccgaccgcttcagcttctgcgtctccgacacgcaggaggactggaacggggccttcaactactcctccgacctcggcttcgtgcagcgctgcctcgccgacaccagaggtgacatgccgcagcgcttatgcacgccggcagaagcgaagttctacttcacaagcctgtacaacccgaaaggcgagaaaaacc

SEQ ID NO: 451500 - DNA, 433 bp, Triticum aestivum
tttcgcttcgtgcctggtgccgtctcttctcccccctcgagccccttccagagccttcattcccggcctctctcccatcttcctccggcagctccggccgccggcagggagggggagaggggtggggccaaatactgtgtattttaggtcgcttgctttcttgtttattttgtaggttcctcgtatcgcaggagatggcaagctgcatccggtgcttgctggcagcaatagtccttgctacggtgctccaagggctggagctgaagttgagggctggatttgctgctgctgtttccaataagaagcttgccaagtccctgatctggagggcagccttctgttggctctctgctcgtcaaatcaccatggtggtggatggtgacagaggaggaagcagacgactgaagctatcagatcgggtccgagctcatag

SEQ ID NO: 451501 - DNA, 399 bp, Triticum aestivum
cggacgcgtgggcggacgcgtgggcgtctacctccagatctccggagacccctccccactcccatccccgcgccgctgacccccgctcccattccccccacccggcggcgagtaagcagaggcggggctgctcgcagcgaaccctagccgccgcccgcccgcctccagccggcgccggcgcgacggtcggcgggagatctcgacgagggagatccagcagggccatggccagctccggcatcgcctaccccgaccgcttctacgccgccgcggcctacgccggcttcggcgccggcgccccttccaccgccgccatctcccgcttccagaaccgacgtcgccctcctcctctacggcctccaccagcaggcgacggtcgggccctgcaacgtgcccaag

SEQ ID NO: 451502 - DNA, 322 bp, Triticum aestivum
tttccttggacgcgtgggcgacaacggaagcaataactcgagccacggcgacgccgccagcgatggaaaccacctaccaatcaaacttaacattcctcccgtggatgcgagcgaggattcgatggagagctccgaggagatggtgacgccgagggcggaggcggccgaggaggaggagaagaagggcgccacgtcggaggtgccggtggagcgcgccgtcgaggtcgctgatgagggcgccacgggggaggccggggaggaggtcatggttgacgctttaccgcctgaagctgctgaccgggagcaagagggtaaggtggat

SEQ ID NO: 451503 - DNA, 288 bp, Triticum aestivum
tgaactctagctaccccgcccccacctcgacgcatgccctctctcccccactatcttcgccgtcgccgccacctccccctccggcctccgtccgcgagggaggccccgtccctccccgctccgcgctccagtatttcttgccgggagcagcgacggtatgccggcggcccaatcgagcgggagagaggggatcaggacagcgggcgggggaggaagagcgaggtcctcgagcggagcactgcagagggcgaggaggagcaggatggtttcgctgtcgacgtggttccg

SEQ ID NO: 451504 - DNA, 415 bp, Triticum aestivum
ccattccccccggtctctcttctcttccggtctgcctctctgtccagcgtgccgggatcgatccgagcttcggttggggtgggttcgccgattgatgcctgtgaggcaatggcggtctcctcgccttcttcagctccggagaagaagaggaaatggctccaaagcaacaggaaggtgatcgacaggtaccttcgggaggcgcgggcgattctcgcgacggcgccggataccggcggcggggacgctgtggcggcgctcggtctcatcgacgccgcgctggagctttcgccgcggatggaggccgcgctggagctgcgggcgcgggcgctcctcgcgctgcggcggtaccgcgaggtcgcggagatgctccgtgactacatccccagctgcggaaaatcctgctccggcgaggatg

SEQ ID NO: 451505 - DNA, 272 bp, Triticum aestivum
cccaggtcccaaccaccaccggaccgtcgctccgtcgtccagatctcgcccgcgcgcgcgatggccgtcggcgaccccatgccggtcgcggagcccgcggacggcgacgagatcgtctacgagtacatgccctgcatccgtatctacaaggaccgagtggagcgctacttcggctccgagttcgtatacgcctgcggcgacaccgactccggcaccggggttgcctaccgtgaccgagtgatctcccccgaggtctatgcgcgcctatacct

SEQ ID NO: 451506 - DNA, 437 bp, Triticum aestivum
gtgatgaagaagattccgatgatgaagaagaggaggaaattggtgagatgccttcacctgaaagacgcattcaaggggttgaaccaggggaagaggctgagctagcaagggtgaccgaagaagcgagggaggcttgcaagtcaaaacgatcagctggaccacttccagatgaggcagatcacccatctcagtttattcgtgacatagctcgcgatgtgcgctcaaagaggaagatggtcaaggtttcaagtcttgtgaggaggaatagggtgaagaaaggtaagttggttgttctggatgaagagggggaagcttcggaaagtgaagatgatcaggaagaagacaaagaaagtggtgatgaagaagattttgatgatgaagaggaggaggaaataggtggggtgccttcacatgaaagacgcactcaagcggttgaa

SEQ ID NO: 451507 - DNA, 492 bp, Triticum aestivum
cccacgcgtccgcggacgcgtgggcacacgggggtggtctattgtccgtcgactctctgcttgggttgcaagaagcgcggggaagacgccggagatgggttcttgcgcgtcggtccacaaggacgacgtcgggctgcccaagaagcagcagctgctcgcctcctcgccgccgcccaaggacggcaaggccgtcgacggcgcccccgtcggcgacgtcctcgtcgacctcaagcgcaagatcgagggcttcggccccagcaggacccctgacaccggtagcaaggatgagatgttcttcgagtctcaaccgtggttagattccgactgcgaggacgacttctacagtataaatggagatttcactccgtcgcgcggcagcactccggtccatcaacccagggcgcagaccgtgatgagcagcgtatttctacctgacaacgccgtgcagagtcccaattcatcggaggcttctccaactggacggagaaaata

SEQ ID NO: 451508 - DNA, 255 bp, Triticum aestivum
ttacgttttcggtttagtaatataatgcttattgcattacttgtggcccaatatgcattgctagggtcaggactactgcaaaaatatgtgttttcaattatgttgcaatgctcacttgttgtgtgtatggccgcattcataagaggcgtgatcaagcattataagctcacaacatatgtattcatatttcaccgcatgattggaaatatatggaataagcagtttttatccaactaaaaaaaaagtacaatagat

SEQ ID NO: 451509 - DNA, 410 bp, Triticum aestivum
tcacgcgttcggccacgcgttcggcgaggtcttcttcctcccttcctccccctagcaaaaggctgggcctcaactcctcatagcccagccatggagtttcttccttgtgaagatggagtccatcttcatcatgccacaaggcaaacttggtccttgctccacatgagaacaagagcctttggtcggtcctccacctcagaacagaagaaaggtgctaattgtttcttccgcacaatatagaagccagtcgtgcgactggcttctatcttggtcgagagaagtaaaattaggttggtccaggccttcaatcaatcctcaagtatataatggtcagtatttgatgtcgatttggttttatattgcatcaaaaggtaaaggcttctcctggatttcggtctgggtggttttgg

SEQ ID NO: 451510 - DNA, 335 bp, Triticum aestivum
actccgcactcgtggtggagtggagagcgtggctggcggcgggcctgcctcttcctcttcctcttcctagcggcactagtaggagtagccggtaaacccgcacctaaaccgcagtctcccatcgccacaccccgcggctcggcacgggcacggcacagatctccccactccaccccgccgggtagcgcgcggcggccgaagcacgcgagcgagcgagccctttccggccgcctacgcctcgggggcggacgcgcgcggatcgcgtcatggcggaggcgggcaagcgggtcgacctggccgcgccgctgcgctcggcgcgcctgccctaccacaag

SEQ ID NO: 451511 - DNA, 402 bp, Triticum aestivum
gagctgtagagtctgtagatgacaaatttgaagtattctacattgattttggcaaccaagaagtggttccttacaaccgcatccggcctgcagacccatcagtatcctcctctcctcctcttgctcagctctgcagccttgccttcataaaggtgcctggtctggaggatgataatggtcaggaagcagcagagtatctcagcgaatgcttgctgagcagttcaaaacaataccgggcaatgatcgaagagcgcgacactactggtggtaaagtgaagggacaaggcactggacctgtactcattgtgactcttgttgatccagagacagaatccagcatcaatgctgccatgctcgaggaagggcttgcccgacttgaaaggggcaagagatgggacacca

SEQ ID NO: 451512 - DNA, 453 bp, Triticum aestivum
tgggaagaagaattctggctctgggaaggatgactccgatggcgactccgggaaggagcacaacggtggtttcactgctaacggtacggttgccaagggtggccaggagaatggtgctgttaaggacagttctcgcgccgcccgggctgttgttgttgacaatgatggcaaggagaacggggaccccaacgacggggccttcgatgtaaataccttgcgtaagaagacaggaggaaagaagggcggcggtggcggtaagaagaacgatgtgaagaaggcggccaagaccgagcccaagaaggttgtcaagcagatgagggtctgggatgacaaaccgccgaagaacgagaagctggacttcacggacccggctgacgagagaggggaggaggtgatagagaaaggtgcttaccaaccagggggacagcatgatggataaggatgaagatctga

SEQ ID NO: 451513 - DNA, 436 bp, Triticum aestivum
gcgctcgtggcgcacatccagggtctctccgggagcccggacgagctggcgcagctccacggcctcctcaagcaggccgacggcgacgccctgcgcgtccactccgccggcctcctgcccttcctctcccacctccaccccggcgcccactccctcggctacctctacctcctggattctttcgtgtcgtcgtctgctaatctgagggcgcacgccggcggggaccttcttgtgaccgtggccgatttcctcacctcttgctcggccgaccagatacgcatggcgcccgacaaatttgtgacatgtctgtagggtgctcaagaacgaggtcatgcagctcaatgcgccgatccgagggattgctccgcttcgggctgctgtccgcaagatccagacatcgtcagagcagcttaccccactccacgctgaatacctg

SEQ ID NO: 451514 - DNA, 467 bp, Triticum aestivum
aaaagcgacgagacaaggaccaaacaccaaaatgctctcatccaccgctctccggccgctgtcgccggcgacggcgacgacgcccgcgtaccccgccaccgccacctcggccacgcccgggcggcgctcggtggcggtgcgcgtgctgcgggactacggctcgatccccaagcgggagcccttcagctccagccgcagcatcctcgacgagttcttcaagcaggagaagcctctcgtccagcgcaccaaggaccacatcacagattattgcacgacccttgaaggcgatgattgctgcagctgctgggatgcctattttgaactcaacaaactcgagcaagagctaccgcaagaagaaatctcaaggatggtgaaggactcgcggtcagacccaaggtacctcataagcagcatccaccaccggtcagacctacggaagaagatggccgagaaagctcacaattcag

SEQ ID NO: 451515 - DNA, 458 bp, Triticum aestivum
tttttataatacagatacatatgcgaaggtgcacgaatctaaggataatccgaagcttttgactagtggcacatcctacaaccgaaaaaactcttgccatccttcttttaatttcatttagctacttggccatatctttgatataggtttttgctcctgcctttactgtggttgcagattttttttagcccagaccatgtgggtaatgactcggaatctgttctaatattttggtttgcgatctagctctccattgtttgatttgttacctttaactcttgatccctgtgttctattggtcttctgcaagtgttgcaggatataatagttaggagtttgtgcccaaacctttgctctgtacatggagtcaggtcagtgtcttgtagatggtctgtttgtttcatttgttagcgccacctccatgagttggcttgcaggactggatctggatctggcct

SEQ ID NO: 451516 - DNA, 468 bp, Triticum aestivum
tggacgcgtgggcgattttcggccgacgggttctaccgtgatgttcgtttcggcgctatcgtccagggcacggccaattcatgttgaccggaaacaacgatatgaagccgccgattcctaaacgaccccggcggatggctatgtcgccggaatcagcacctttagcctccggcagtagcagcttcatcccagatgatataatcttctttcagatactcgtacttcttcctgtgaagtcccttgtgcgcttccaaaccgtctgcaagtcatggcgcaccacattaaccagcatcagtttcgtgcgctggcacctggagctttccaagcgaacaaggtcgaccatggtcctcgtgccacgcaagtatcaggaggaccgacggaaggcgtgttctagattactcagtatcttcagcttccagccaggggaaagcaagtgtgcggagcttatcttccgaaaggaatttcatc

SEQ ID NO: 451517 - DNA, 473 bp, Triticum aestivum
ttgcctacgcgtccggtggctcaagaacctttggcggaaggggtcctgttggctttgatggttcaacataccaaccgtacaataaccgacatggtttctacaatggctatatgccacaacctgttcccacacatccctactatcatggcctctattttggtatgggaggcaatccctatgcaaatgcatatccaaaccatgcagtcatggcaaatgttccaaacatggtggcaaggcgtccagtatatagcccatatcccccaatgtatcctggctatggttttgcatacagaagtggttatgcgggtgctgcaccttctgttcagtatggcgttaatggtggcagggattacatgaatgaccaagactctatggatgtacaagaacttgacagcactgctaccattgctacaaagtttgaatacatgaagctaggttcacaatgacgttctgggcaattatttttacactga

SEQ ID NO: 451518 - DNA, 209 bp, Triticum aestivum
tgggtgaccgcgccacgcatgctcctcccccgcctgctccccgtgcaccgcctcctcgccggcggaccccgccccctcctcctcctaccaagccgtcgcctcgctccccggccgcccgccgccgactccatgtcctactactgctccgcgcccgcccgccgcaggggcccgctgcggggggtggtgtacgacatggacgggaccctgac

SEQ ID NO: 451519 - DNA, 359 bp, Triticum aestivum
ttctgctccacgcgtccgccaaaccagaccaaaaacttcccctccccaactctctctccgcccctgcgtgaaccgcggagcaaggaaggaggagcccgtcgggctactaatctcgggggttccccctctgatccgggcggtttcggccgttagctgctgggggaggagccgcgccggttcgtggcgccggcgtcggtggccgggggtcgtcggtccttccttggttctctcgtcatcggaaaaataaatcggtcgatctgcctctgattgcctcgcgcggttgggcttctccggtggggcaaaggcaggattttgagccactttgcccctaaaattaaatctgatttaatgggcgacca

SEQ ID NO: 451520 - DNA, 102 bp, Triticum aestivum
agctagcttgttcatcttgatctagcaagtcttcctgctgggtctctcttcggggatatgagtgggaacaactttggggacagcatggggtggggcagatcg

SEQ ID NO: 451521 - DNA, 242 bp, Triticum aestivum
ccggaatgtccgtatcactggacagcggacagcacaaaggaaatttcgatccaactttattgatgcgtcaaataacctacaagatcgcactatccctatatacatcatcgcactcgcgtacgtctctactcctctttgtccacagggacaatgtacaatcaactagcactgctactctttttccaccccctcccattctggttttgacctcttcaagcagcatgtgcaacccaggggagtcg

SEQ ID NO: 451522 - DNA, 253 bp, Triticum aestivum
tggtacgcgtgggcggacgcgtggggtgcaggttggtgaggataagggggagtggaaggttcaacataccaaccgtacaataaccgacatggtttctacaatggctatatgccacaacctgttcccacacatccctactatcatggcctctattttggtatgggaggcaatccctatgcaaatgcatatccaaaccatgcagtcatggcaaatgttccaaacatggtggcaaggcgtccagtatatagcccat

SEQ ID NO: 451523 - DNA, 150 bp, Triticum aestivum
ttctgcccacgcgtccgaaattatatgatatagttaaccactatttatattaacttcttctgtacacaatgttcatgagttcatgtattttattgtgtcacttgtgtttactctttttttaatgcaagtttacagctactcggagttcct

SEQ ID NO: 451524 - DNA, 104 bp, Triticum aestivum
tggttgaggcaagcaactcgcgttctgctcaataaaaaaaaaaaaaaaaaaaaataaaaaaaaaaaaaaaaaaacaaaaaaaaaaaaaaaaaaaaaaggggcgg

SEQ ID NO: 451525 - DNA, 359 bp, Triticum aestivum
agctcatccgtctcatggatagctgccttggttacacttatgtcatgtcaaccccgaacacgtgcacgtctgatatgaaaatagttgattcgaccgatacagagttaaaaggctacagaaaaagcccgtcctggagacggtccgcctgcacgaagaacatggcgtctggcctctccgaggcccacaaactgatcagctaccgtggacactggaatagcatcatcttgctcttctccgatgggctcatcaacaagggggactactttgatggagccaaggacttcgtctcaaaagtacctgtccacacgtttactctcggcggagacgcgaacaaccacgttcttcatgccatggcaaag

SEQ ID NO: 451526 - DNA, 381 bp, Triticum aestivum
cccacgcgtccgctccagttgaagatgaaggtgcagaaatggagggggaccaaggacaatcagctccgggcttgtctgaagcgaaagatggacctgaagaaatggaggagcaacaagaagagtcagctcaggacatgtctgaagctgaagaaatgaaggagcgccaggaacattcaggtcaggacatgtctgaagctgaagatgagcctgcagaagtggaggagcaccaggaacattcagctgtggagatgagtgaagctgaagacgaacctgcaggagtggaggagcagcaagaagagtcaggtctaggcatgtctgaagatgcaggcgatcctgcagaaatgaaggggcaccaaggacagtcagctgaggacatgcctg

SEQ ID NO: 451527 - DNA, 284 bp, Triticum aestivum
tttcttatcgcgtccggtcaaccctggtttctagaaccttgcagataagctaccatatgggctcgagagtatgtcttgccgcggacgtggaggtcgaggccgtagcggccgcggcggcggacgtcgtggcagaccgggcggagtgctcagacaagctggtggcgctggcgacgtgcctgacgactagagcaggggcaggggcaggcgccgactcccgattgttgccgcgggctgaagacagtgctgcacaccagacacaagtgcctgtgcgggctcgtcaagga

SEQ ID NO: 451528 - DNA, 92 bp, Triticum aestivum
tgggtttggctgatcttgttactcaacataggagggccgtgtacttagacccggacgcacagggcacggtacaagggtgtcatgggggaaga

SEQ ID NO: 451529 - DNA, 192 bp, Triticum aestivum
tgttatcttcttcttcttctgattctgattctgaggttgatgaagcgaaccaagagaatggcaatgggattactgatgcactgaacgaacgagttattgagctagaagatgagctcaaggaagcaatggagaaacttgaggcactcgaggaaaagaatatgcggtgccaatgtgaaaaccttgaagagaagt

SEQ ID NO: 451530 - DNA, 412 bp, Triticum aestivum
tggtttgaactacagaaggacaactcaacagggtggcagccggggccagagcacccctggcaccggagcttcaaccaactagcagcggcatctatccaacatgccatatggccatggcgtcgccaagctcaggtgagttggaggtagctgagcacccccctaacaccgtgctcgacgacgctcgacacccgcacgcatgaacaccgatggcggcgggcctgttcataccttttttcctgactttttgtacctgtagaatatagaatgtacaagtttttgcaaatatttattccgacatataagaagggacaaaaggctttaggtcagacttcagaggaggaaaaataagcaagcagttcatgtatgtatgtatgtatgcgggctcaaattctgtacattaacatggaagagt

SEQ ID NO: 451531 - DNA, 365 bp, Triticum aestivum
tggtttgaaaccagcagcaaatcccacatgcgactccgccttcccttccttttcctacccccgatcgaaacagagagctagcttagagagatattcccgcgaatcttctgctccgattccaagcccgtcccggtctcggtcgcgtcccactcccccttcaatccttcaatccttcttcaccggaacctgcggcggcagatcgagtccaatcgtgaggcagagtaacagggcgaacgcgggagccagagcgagaggtcgggaagaagaagaactcaccggcgggggcgaaccggacatgtgcgtggagggattcgaggacgcgcagatcgagaggccggcagatttcgcggtgggtaaaccccctc

SEQ ID NO: 451532 - DNA, 407 bp, Triticum aestivum
ttctcccacgcgtccgcgaggacctcgagatgggcgtcatttacgccaccttccccatgaagcgcatcggcacaaagctggccgccgccgacatggctcgcctcgccgccgccgccacccgggaggcccggcgctccgccaaggtgtcctccgtgggggccgcggcggcggcagcggctcagcccgagccggccatcaccttcgtgccggccgcggaggaggcgccgtcgccgagggcgcggctggacgagatggtggacgacgcggtggccgccgagatcgacgtgctcaagcaccggctcagcagcgcgcgctccaggcggcccaacctcgagaccatccacgaggagaatcacctactgtgcagacgctgaaatatactgctagcagctcatttttcttcttct

SEQ ID NO: 451533 - DNA, 209 bp, Triticum aestivum
tgcctacgcgtccgatccagtacagtggctgagcactcgagtgcagagccgattagccttccggttccggaacctgcaatggctgctgctccggcgacgacggcggaggtggtgccgcggatgaagctgggctcgcaggggctggaggtggcagcgctggggcttggctgcatgggcatgttcgcctactacgggccggccaagcccga

SEQ ID NO: 451534 - DNA, 283 bp, Triticum aestivum
tttggtagtccagcagcactccttagctgcacttcggtcacttgcaacgatctccacaccacatagagacagagcgagagagagagggtgtgtgttgaagcaaagatgaagcttatggggagccggaggagcggaggaggcctgagcaggagcctcaaggagcacatggccaggctctacatcatccaacgctgcgttgtcatgctgctgtgctggcacgactgactccgatgcctcgctccatggatggatcttgttcttccattccatggatggtgtttga

SEQ ID NO: 451535 - DNA, 454 bp, Triticum aestivum
  unsure (1)..(454): unsure at all n locations
ttggttcatggttttctttggtcatgtatgagtggaaaagggaggcaggggagttccagtttgtgaggacagtggcgacatggttgactgaatggcaataggaagaaggcacatctcatataattgttttattcaagacaagtctacactctcttatgtcaaatttgcacagatttccctgccctaggcttatttctannagggggagagaagnanngtgttatttttttggggnggattacaaagaatggtagcgcatgaggagtattagccacggaggagggaggagactgacatgaggaaaacatattctggatcgatttggttctcatggtggcatcttccctgctttctcctttctttttatttccaacactctttggtacagagcgattaacaaacaactgaactgaatattgctttttctccttttcagataagttagtttacatta

SEQ ID NO: 451536 - DNA, 239 bp, Triticum aestivum
tcctgatcgagccgcccacctcgagaggccgccataattcattccatccattcatccgctgccgcgtatataagcgcggccattggggcgctcgtggggtgctcgtcacatcgtcgcatcaggcgcgcgcaggccgagatcagatcggcggcggcggcggcgacggcgacggcgaccatgttcagcgggacgcagcagaagtgcaaggggtgcaccaagacggtgtaccccatggacca

SEQ ID NO: 451537 - DNA, 499 bp, Triticum aestivum
tggtttcatttagcatggcaatgcccaataccaatagcatgttgagcttttcctgtatagcttatgcagctattgtcgtcctagccctaggcagtagaacctgtagttgcttgcagtttacttatcccaacttcaacgcaatcaatatggatgatttcaccttcagcccaggctcaacaattgcagatggtgccttgcagatcaccccaagtaccggaaacatgcgccaccggtcggggagagtggtttatgcaagggaaaccctcaagctgtggaacaacaagcgcatggcgcccacctcgttcaggacagatttcctgctcaacatccaacccggtcagaatggggctggagaaggtatggcatttgtgctcacaaacaatccatcgttgcccagcaacagcaatggccagtggcttggcatatgcaatgacacgacagacggcacgaatactgacccagttgtagccgtcgagtttgacacgagaaagagctatga

SEQ ID NO: 451538 - DNA, 339 bp, Triticum aestivum
tgctacgcgtccggttttttcatatccaatttacctggtgcaaactgctatttactcgagaaggatattgatgtgcacaaatacattagctccatacaagtcttccaagggaatggagtgaatggtgtgctcagttagcttcaacaagtttgggtggatgccaagtggaaacagccgaactcgttgctccaaagactgccatcatttcttcaaccatccccggtgcagtatactgcggtctgttataagatatgattggacaaagtgcatcaggccagagaatgttcaacagaatcagattatgtttatgttattttgtcaaagtcattggacaactgc

SEQ ID NO: 451539 - DNA, 94 bp, Triticum aestivum
tttgttagatcgagccgcccacctcgagaggccgcgataatttataccatccatccatccgctgccgcgaatataagcgcggccattggggcgc

SEQ ID NO: 451540 - DNA, 69 bp, Triticum aestivum
ttgctacgcgttcggtcgtgtgcttcgagaccatgaacctgcacctcttcggtgaggacgcttaggggg

SEQ ID NO: 451541 - DNA, 70 bp, Triticum aestivum
tttttcgcgtccgcggacctggggcgacgcgcatgccttaggaaaaagaaaaacttctccctggaggaaa

SEQ ID NO: 451542 - DNA, 348 bp, Triticum aestivum
  unsure (1)..(348): unsure at all n locations
tgnctgctaattcctgccaccacccacgatttcccagcaccccgatctggcgcgcctccacccacctccgtcggccaccggcgtgccgcccaccccaagccaccggcgccacgcctccacccaccgccgccggccgcagcgccccgcagcccccactgccgcctgccgtcggcggggcctcccccaatccccacgcggcgcgtcctcccgagctactcgatgcgccgtcgtggtccgcctcaacctcccaccggcctcctcccgcgacgctgccgccggcctctcaatcgcgcgtgcccgccgcatccaccgaatcgagcgccgtcgcccgccccgaccacgcatgcc

SEQ ID NO: 451543 - DNA, 339 bp, Triticum aestivum
tttcgactggccacatccaccccttcaccgagcttgccgttagcctcgccgtgtctagcccaaacgccaccgtagaagccatcatcgcagtcacgccggcgaacgttccgatcgtccagtccttgctggagcgccatagcgcagcaactgtcaagatagttacctatccgttcccaacggtggagggcctgcccaagggtgtcgagaaccttgggaaggcggacactcacgcagatgctatgcgcatcaacatcgccgcctcgaccgaacccctgatgcgccccgcgcacgagacgcatcgtcgggcgcagtctccagacgccatcatcaccgacatgc

SEQ ID NO: 451544 - DNA, 123 bp, Triticum aestivum
tctccgggccctgctcgtcaagaccatggaggcccacgccgacgtcgtgctcctagacccgaaggactactagctgatcacctgtgctgactagagatcaacggttgaaccatcttttgctga

SEQ ID NO: 451545 - DNA, 318 bp, Triticum aestivum
tcgttcgtcgccaccggctctcccttcctgctcctcctctctccctccctccaccggcggcggctctcccctcctgctagccaccccaccccgcagcggcgtcgtcgtcggcggcaagatgccgaagaagagcaagaagagcaagagcaagcgggtcacgctcaaggcgaagcacaaggtgctgcgcaaggtcaaggagcaccaccgcacgaagcgcacggaggcgaggaaggagggcaagaccggccggagcaaggtcgagaaggaccccgggatccccaacgagtggcccttcaaggagcaagagctcaagaacct

SEQ ID NO: 451546 - DNA, 212 bp, Triticum aestivum
ttgttcgcccacgcgtacgagaggcgaatcgcgtgcgctactttgcttcctcctgacgtgcctcggcctccccgattcccgttcccaccgacgacaggagcgagcagaggaccgcgatgcagcatccgcagctgcaggcgccgccctcgagggcgtccgggcccgacctcgaccggcctgctcccaccaccttccacaaggcattcatggag

SEQ ID NO: 451547 - DNA, 345 bp, Triticum aestivum
ttgtcctagaaaccagagcagcggccggccgataacccctgttgcccgtctccctcgctccacgacgggccggcggatctgggactgggagacgcggctgcgctggcggcggtccgttggttggtggcggaccggcagagcctcagcgaccatcgattggaggcgaggggattgggggcgagcaatctacggcgaaagaaaacggagggacgatcggagcggcagagatcgatcgggggccagcagcagcacctcagatcagaagctgcgatccacaaaactaagaaaggcctgttgtgtttgtgcctccgccatgtctgaacatcaaggttgggcagatctacc

SEQ ID NO: 451548 - DNA, 345 bp, Triticum aestivum
tggaacagatagtcttgaagttaggccatttatcatgcatggagtcaattcatctgtatttgttcctcggcatctatatgatgcattggatcggaaaactgtaagtaccggtaacttagctcaaccaccataccagcacccagatttgttgtcatcgagtcaacaaaatcaaggtacaaattttggaaatcaatctcagcctcatgatgtgccacagtttcatcctcattcccattcccatcctccggaggcatttagaagctttgcccccagcatgcctatagctcccccccaaaatccattccaaggacaaggaggtagtgcagcagtaccaccagttacacc

SEQ ID NO: 451549 - DNA, 338 bp, Triticum aestivum
ttctcacgcgtccgattccctttccccatctacagttaggagaggcgaccgagccggcgatttcgtttcctccggcgagccctgctctctttcctcctcccggtggcctttgtgctgctggaggtgggaggggggccggctcgccgggaggatccttgtacaggtaggctgcctaggtgtcggggtggcctacttggcgtcgtcctcggtcccggctgggtggcgatggtggcggggacacctgcgcctgggttctgcatctgctgctgcatcgcttcgtcggcttcgtcggtgtggacggttgcaggtcacgtgctttcgtgtgcgttggatcgagt

SEQ ID NO: 451550 - DNA, 136 bp, Triticum aestivum
cccacgcgtccgcccacgcgtccgcccacgcgttcgcccacgcgtccggtcggttcttggtttgctgtggacatgtaatttaataccctggagatttatcatgaatgttcaattgtgttgtgccggaactagtcac

SEQ ID NO: 451551 - DNA, 339 bp, Triticum aestivum
tatcgggcggctggatggccaagatcttctgctgggtcgtcatcgtcttcctcatgttcttcgtccccaacggcgtcgtcagcttctacgaatcgatttccaagtttggatctggactgttccttctcgctcaggttgttcttctgttggacttcgtgcacggatggaatgagaactgggttgctaaagatgaacagttctggtacatggcactgctggttgtctcagttgcttgttatattggctcattcgctttctctggtctactctttcactggttcactccatcgggacaggactgcggactcaatatgttcttcattgtctccacactgattc

SEQ ID NO: 451552 - DNA, 202 bp, Triticum aestivum
cctgatctcggctggcgataaccttcctccatgggtcgtaagcgccgccgcgcggaccatagcacgccggcgccacctacggccctccggactaaatcggctgagcggaaacccgtggtcggcttcggccacggcgccggcgccccctcctcctctgattggatgacctgctggaaggagatggcgaaagaagcacctggat

SEQ ID NO: 451553 - DNA, 154 bp, Triticum aestivum
gcctcggacgcgtgggagcgactccgactccgagggggttgtggatctggcgccgtggccgccctcaaggaagcccgtccctttcgacctcgacctgaactgcccgccggcgggggagctctgatcgggcgccggagtctatgtagctgatatg

SEQ ID NO: 451554 - DNA, 191 bp, Triticum aestivum
tgctgtgggccattcctccccctccccccttgcgcatccttatgtgttctcggatccggcgatgctcgaggcggaggtggttggccggcggtctcggtggcagtttgggtgcggatttactcaaagtctcggcctctggtgatcatcaaggtggtctggaggcagagcggcggctctggcggctggaggca

SEQ ID NO: 451555 - DNA, 437 bp, Triticum aestivum
tctttcccgacgaatcacgcgcgcacattcacactgggcttggactcaccgctgctgctgccgcttccggagctaacaaacagcaacggaagctggttccggtggatcctcgccgccgccgccgtagccgcagctagcaagccgagcggaactggatccggcgcgggagcaggaaccgcgcgcgcgccggggctatctcgagggagaagaaatgtaagccgcagataccgtcgatcagctgaattacaggccatcttgagagctggatagtactgaaaatgggtgtatggagcttcaagaggaaagctctgatgtcggggctctggtctcagcaccatcaaggaacctgtcatcctcttcctccacatttgtttctgccaaccagtcacctttcttcacaccacggtcactgtctgcttgtcgcccggagcatgctc

SEQ ID NO: 451556 - DNA, 199 bp, Triticum aestivum
tctccacgcgtccggaggatggggatgggcatgaaccctgggatgatgcggccttctcagatggggatggctcccggcggcatgcctggctccagctacaaccagatgggtgctggatatggcggccagcagccatacggcgggtacaggtgagattacacagcgggggatctaacagccagggtttgagaaaacagtt

SEQ ID NO: 451557 - DNA, 280 bp, Triticum aestivum
tctcctactctctctcgggggagctgcatctccgtcaatcggcgcgtgtggtcggcggctcgccgccgccacggcagaggacgccttattcccccgccaccgcccctaccatcgtcaatacccggcaccacctacctgtatctacaagtgtctgacccccaccaccacacatccggaccgatatccgaaggcaaggggagagaacaggagctagagaggcgggggggcgatggcggcggtcggcgttctcgccctgcagggatcctacaacgagcacatg

SEQ ID NO: 451558 - DNA, 71 bp, Triticum aestivum
actggctgacccaagaaacacaggagaggagagggggcaaaggatcgatcttgaccggccggcgaccatgg

SEQ ID NO: 451559 - DNA, 396 bp, Triticum aestivum
tgttcgcggacgcgtggcggacgcgtggcgacaggctcggcgtccccaagcttccaggctgggttaatcgttttgccaatgctggcgatactgctgtggtggttgctgagaatacagcagttaaggcaggctaaaacagaaattgtcaatgctagtagagtagcatatagatttatggcaggcctgacttcgaaaaaccaggcttcccaagagtctcctggtgaacaaaatagaggcagccctactttccaaggaacatggttcaagaatgttgtttcagctggggcgaagccatctacaagtgggtcgactccctcacaagaagatgacgacaccccccccttgcagcgccaacaatcaacagagcaaccaacaaggttgtagccgctgtcacag

SEQ ID NO: 451560 - DNA, 72 bp, Triticum aestivum
ttttcgattgaatgtgtgatgattttttcgtgtatgaacctattgtgaccttctgctagggtttgtgacgct

SEQ ID NO: 451561 - DNA, 262 bp, Triticum aestivum
ttcttcacgcgttcgtcacgcgtccgctcaaggcgctatctagctggttgtagaatagaccgatcgagtagcatcgtaagaaacacctataaaccgatcatggcagcgcgcgccattgttgtcctctggctcatcctcgcgctggtcgccatcaccagcggaggagcgtcagcgcagctatcgtcgggcttctactcccgctcgtgcccgggcatgctcaaagccgtgcgctcggcgctgcacccggccatcgccagggagc

SEQ ID NO: 451562 - DNA, 339 bp, Triticum aestivum
tttgtcgccacgcgtccgcccacgcgtccgcgtcaaccgaaaaatccgccccatcttgaggtgctgggtcactgctgggctaagcaacacggccaaccacagcgcgaatcccccaaagaaaaaggcttcgtttcagaaatcaagaggttcacttgttgggttctcgctgtcggagttcggcggcggacggagacggagtcgtagtcggagcgagaggtctagctggtggctgcggaggcgaggcccggaggaagcggctgattgagtaagcgcgtctagcacaggaaccaagaggaggaagaggaacccaatccaatcatggactcggagcactggatc

SEQ ID NO: 451563 - DNA, 148 bp, Triticum aestivum
acctcatgaacaagcgcaggaatatatccatccatgtacatttgcgagcataccttccttgccttcctccgagaggtccattgcaatccagaaaccttcaagtatgggcagatctgcaatttctcaggcccttccggtgcaccaggaa

SEQ ID NO: 451564 - DNA, 147 bp, Triticum aestivum
acctggtgcccgcagcggcagaaagaggagagagcgcctttttttggtgcacgtcaacttctaccgcaactatggtaagacatccaagaaaccaaggcgtccttatgagaaggagcgtcttgatgcagaactaaagctggtcggtga

SEQ ID NO: 451565 - DNA, 74 bp, Triticum aestivum
atcgtccagaggcggggccgctctggacctgtggcgccgttttggcgtaatatagcttctgggctagatccggt

SEQ ID NO: 451566 - DNA, 289 bp, Triticum aestivum
gcgccggtggtggtccgtcctaccccacgcccggttggaccaccgatgtcgccccgttcctcggctgggtgcgctcgcgtgttccagccagccgtccgcgttgagggttttgactgcctcgacggtggccgtagcggccgtggccatggcatcgccgccatggtctagatgcacatacaacatcgaataaccaggaaatcttctcccctcagtagtgcaaaagcttggagggagagagatcagagtgaggagatgagtgagaggagcttaagttcaaaatttaacccct

SEQ ID NO: 451567 - DNA, 374 bp, Triticum aestivum
tttggggggattgtttacctccaccgctttaactctactggtattaccagctttatatgctcaatttggacggtttttacgtccatcggctagcgttactactccagcatcaacccccattaatgttctgacaaaagtttaaattttaatttatttatgaagttctcaatccccaccaatcctgttatccttctactcatagtttttctgctcaatgcctgtggtaatcaaacttcgccaacagatatttccgttagtccgaccccgactcctaccgtttctcctacagaaaatgttgaggagaataaaactgaatcccatggaggccagggaggacaggtaattgaaatgggggattaccatttagaattact

SEQ ID NO: 451568 - DNA, 540 bp, Triticum aestivum
  unsure (1)..(540): unsure at all n locations
ttaagatttttaaacatattttttatcagggatataaagaactcataaatattgatgtaaaagttgatttacaactgcaatagtgaatcctatcaaagctcccaatgggccaaagaaaaatattgaggtcattgctaattccaagggcttgtcctgaacattagtggagaaattattgacaataaagattccagccataacaccaaaagcataacctaccaatgcagcaagtaatgcaatacctataaatttgagcatatttctagtttcatttaacccaaagaaaaaagaataaactttaatatcaagaaggcaagaataaagatgtggttcccggcactttatggtcgtcgtccctccctttttttactgcctccccatccccccgccggacaaaagctaactatcaaggcctagagccactgaccggcggccccccgagtgggggcgagaaagcaagaaggcangaggcgtttctaatattcgacgataaaacccgttggtatggtcggttagagcaataaatatttcactggacta

SEQ ID NO: 451569 - DNA, 356 bp, Triticum aestivum
atgcatattccagcctatggccccatgccggtgctcacctacaaggctcaactggaaaccctattggcggcagggcaatggtatcgggatagtcggggcagtaatcaatttgagggccagccccagatgctctcctgtggtttacccctgcccaatctgggggccatcaaggcacaattcctggccactggcggacaacccgcagattttgaggagcattaccaccgccgctcccaaagggaagtgttgcaaaactttggccgtcagcgggctaaccgctacccccgccagcagtttacccatttcattatcaccggcgacccccagcacaataccatccacgacctaggctgggt

SEQ ID NO: 451570 - DNA, 243 bp, Triticum aestivum
aggatctttttaccggccgcggctagcacttgatgtccagaagcagtcttaagattgtttggtgtgaccgtcatgacatttaccagggaagtatacttttattctcacagaggggcttagtcctgtttatgaggtagctcatggagagaacgctgacctgttcctgatgtcccctatggtctaatggaggttcatgagcctccccgacaatgtcaccatgcagatccccgggtaccgagctcg

SEQ ID NO: 451571 - DNA, 80 bp, Triticum aestivum
ccttgcaggggattgccctggatgcccaccacagtaaacgtatccgtctttgcttgatcggccaaaattgggggttccaa

SEQ ID NO: 451572 - DNA, 304 bp, Triticum aestivum
caggtcgactctagaggatcaaaaaccctctttttggcggttcaacatccaggggaactcaatggtctgcttgcaaacagagatagtcactatgcctttaaccaccacgaatggcgaaccgtttctgcaaactcgtactgtcccgttacagtcccattggccgaatagtggagatatgctatcccgtccagcagtagtaaccattcagcggcggactcgtcagccgtttcattcgtcttagatcatgattatttgatgagtaaagggtcatggtgcggagtgagatccccgggtaccgagctcg

SEQ ID NO: 451573 - DNA, 276 bp, Triticum aestivum
tgctcccaacaaatatcaaccattggcaaaaccccgaattatcctttggtgactttactgtactttctagctatccaacagtctcaaaaaaattaccaggggtttcgagaataaaacggattcttccaatgtagtcaaaaagcatttatggcaactgactaaacatccaaaagtccaagtacgcaaatatttggtaattcgcatacgcatcaggctacaaactcaactaggtgaaagttcagttcatccaacaaagatccccgggtaccgagctcg

SEQ ID NO: 451574 - DNA, 400 bp, Triticum aestivum
tcgccctgttgactctttcccattatttttggcaatttgccctgcgattttacactagtgcttctagttgagtagaacaaaaaataggtttggacagagcaaagttcacgtctacgaaaaagtagaaatgaaaaccattgccccgccccttaacaactaacttttactccgtaaattttatagctatttgaaataaaattaagacagtaagaatttctgcaaggtttagattaaaattaccttggttatttatattgccctatgcttagttgaattagctataaactaaatcagtcaattagtcagctaatttaattagggttgtaacttatttgtttgctgatcggtgccccctggggattctgcaggctgaatcgatggaaaataaccgagtatgcca

SEQ ID NO: 451575 - DNA, 65 bp, Triticum aestivum
actaatcaacccgtgaccgctgactttgaccggactacaaaaagggggaagggttagggaagggg

SEQ ID NO: 451576 - DNA, 360 bp, Triticum aestivum
gatcgccacccacggcttggataatttccaccacttcggcgatcgcctctgggagattaatgcccagcaaagccaaaatttccgacggcagatcctccaggtgggaaccgagccttataggggacttataagaggaacttcccagttcagttgtatccagtaatgccttggtaaccttggtgagggtagctcccccattggtcaacacatcggtcacattgcgacgactgcaacctaacttctcggcaatggcactgccggtggtgaagccagaacggatcgcctcgacaatatgccagcgggcaatctgggaacgatcgccagcgtggggagtaatttcaaaaccatggaggcaaacat

SEQ ID NO: 451577 - DNA, 273 bp, Triticum aestivum
ttgggagaaagattattgttgccggaacgtttaatggttctttcgcagggaaaaggaaaggctcagcgggaggggtttctagtcagtatccgcccatcctacattggcgatcgccgccgggttgttcggaacatcccagcaaaaaagcctccagccctcgataatccgctaacctgaaattaggtacttctcccccatttacccaaggcgttaaagcattcaggggttgattttttaaggttatgcaaacaaccagtgacgttctcattattg

SEQ ID NO: 451578 - DNA, 65 bp, Triticum aestivum
ttggctttacctagcattcagcatcctctttatttgcctgaggatattcttgttcttcttcccaa

SEQ ID NO: 451579 - DNA, 192 bp, Triticum aestivum
tcgcttactgttgattcatctcttttgtgctgcttggcaatcccatttgtttggtcattgctgtttgattttcggcctgatgacaattccatcaaatcggctctggcttgtattgatgcccccttgattctttctgatggaaatcaacttttactcatttcgactgacctgaatttcctttctttgacttct

SEQ ID NO: 451580 - DNA, 233 bp, Triticum aestivum
tcgcccacgcgtgcgccacgcgtccgtggtcatacacccgctccgccccgctctgatcaccctcgcaccctgttcctcctgcgcgcgctgcagctctcgccctccgcggatgggctccgccctctgcgcgccggtgggctccgccgtcgccgccgcccggtgcaaggtgttcggaggaggaaggaacgatgggagggccgggtgccgcgtcggggccgcgaggaagaatactg

SEQ ID NO: 451581 - DNA, 375 bp, Triticum aestivum
ttgatttctgcaaccaacagccgatcaactagcagaggcactgcgagctcgccaggcttccagagcgtacaaggcgaccgatcgatcgatcgaccgaccggcaagcaatggcggcgacagggagccctaagggcctacggttcgctgcagcgtgcggcgttctcagccgctgcatcaaggcggcggagacgcggccggcggccacggtggtcctccccctcatgcctggagcggaagtgcccgcgcaagacgaccacgaggcgggtcctgcgccggcgaacgcgcagatgaccatcttctacggcgggcaggtgctggtgctggacgaggtcccggctgacagggcggccgagctgctccgcgtcgctggtgtct

SEQ ID NO: 451582 - DNA, 169 bp, Triticum aestivum
tcggtctcgccccccgccgacgccgccgtccattgcttggagagacagcgtgtaggcgccggacgagcaggccacctgcgtaaccgatatccagctagcgagcctaacaaacaccgccggttggagaggactagctgctgctcgagagagagagatgtcgaccggacgg

SEQ ID NO: 451583 - DNA, 303 bp, Triticum aestivum
tcgcggacgcgtgggtgaaccctgttctcttgcggcccagcatccgcggctgttgcgagctcctaaagccgcgacccccgacgccataatccctcaacgatccccagagcagagccatcctctctctctccccgcgagccctcacaagcgagaggaaagagaccagagatgggcggcggcaactgcaaccccaaggacttcggcgccgccgcctactgggacgcccgctactcctctccctccactggcggcaagggcggccgctgctgcgggttcttcgactggtaccagtcgtactcggcg

SEQ ID NO: 451584 - DNA, 263 bp, Triticum aestivum
tcgcggacgcgtgggcgcgtgccgacctcagcaacgatgggcacgggcacgggcacggcactagggccggccatggccgccgccgcctccagcacggcccaccggcctgggccgctgcctgccgcggcgaccgcgaatcgcagcgccagtcgccccaccgcctgcgcgccgcccgggagaacgctggtctgctccgctccccggcagtctgaggcctgcgcggcgcgccgtcgcgaccacggtccgggcggcggaggccgggg

SEQ ID NO: 451585 - DNA, 345 bp, Triticum aestivum
ttgcgtgtcgcgtggggcctcctccctggcctggttctggttgaacaagctccttccttgttcgagtctcaagcacattagttcaaggaggaattatgaagctcagctaccaccaacaccgacaccatcaattcatctcctttccttgacctgatcgcctcctaccacatgcacattgtagacctacatattccggtcctgggagaggtggcgacaccagtctgagctgagggaagccagccacgcctcactggcgtgttctgaccagcgctagcaccaggcttgaccagtccgctcagaaatcaacaagaacagcctaccttcttcatcttcttcttcttcttc

SEQ ID NO: 451586 - DNA, 244 bp, Triticum aestivum
tgtcgttcgcaacaaccggccctccacagggggacctgctgctcctgctcccaacactcctccttccccccgccggcggtcacaggcaccctacggcactctgccggtgctcttatcttgtcctacgcgtcgccagatcggaagccgagggccaggcataaccgccggccaagggagaggacaggacagaatagcttcccccgtgccgagatctgccggccagatctgacctcggagggaggac

SEQ ID NO: 451587 - DNA, 372 bp, Triticum aestivum
ttcgttcggcagggtaaatacaatggaaggaaaggactctagagaaaggatatcaaaggcagaaccaaagcatcaacattctcatttagagaagagtgacagtgtaccaaaacctgcagaaaagccatccccagtttctgccgaggtgtcaggaaaagagacacctagggttcagagaaccaaagagaagggaggtatagcagaaaaggaaagagagaagaaggacaaagaggcttctcgaagactggaagaggcaaaagaaaggcaaaagatattggagaaagaaagagaaaatgccgaagtcagtgaaaggaaaaaattggaagaggaggaaagggagagggaaaaggaaagggtaaaggataagcttgc

SEQ ID NO: 451588 - DNA, 323 bp, Triticum aestivum
tctcgttcgcacccatcgtcacctctcttgcagcttcaaactttcagcgccagtaccaacctgctgcacattcttatacctttgagttagcttacaggaggttgcactgcgggcaggcggtcagggtgatcgatgatgatgaaggttagcccaagggtcagcgttcacgtttgcttgtgcagcactagacatgggaaggagtgcccccattacaacaataaaagaggggacagcgccacagccgattcaccagagaaaatgaagccggagcaggccgcccacaacaagatgaccactgcgacgtcctccccgtcccctgtcgt

SEQ ID NO: 451589 - DNA, 386 bp, Triticum aestivum
gttccccgaccagcgccgccaccatcctccggccgcgcgcgcagcgcgaggccgccacccgccacggcgcgccgcgcccgtcctaccatgcggtgacgcccgaagccgccacaccgagcccttctgaccgcctcgccgccgcacgcacatgcagttccccccgtcgcccgcgcgctccatggccgcgcccgcggccgtgcccgccgtgtcctgcctgcgcctcctcctcctccccgggttcagcgcctccctcctcgcggccccgcccgacccggcggccatgctgcgccggccggccgccgccacgacggccgcggaggagcgggaggccgacgcggacgcctcgctgggctctccggtggacgacgagccgcccgaggagggga

SEQ ID NO: 451590 - DNA, 82 bp, Triticum aestivum
tcggttagaggcacatgcccatcccctctgtcattggccaggcacgccggcatgggcacccgacgatggcctgtgcacccgg

SEQ ID NO: 451591 - DNA, 164 bp, Triticum aestivum
ttcgatttgcaacgcctcctccaatggggatggggccccggcctctgatgcaccgccacctccccgcgcgacgcccatacaccttgaccaggccggaggcggcgccgctgggtcgagccccgccacggcggccgacccccggaagggcaagggaatctccacca

SEQ ID NO: 451592 - DNA, 78 bp, Triticum aestivum
ttgcgttcggctcgcgtccgtgagaaaggcatatatgatgaagctgaagcacaaccagaacgggcttaaaactcactt

SEQ ID NO: 451593 - DNA, 357 bp, Triticum aestivum
tcgactccgtcgaccagtcgagctactacccaagcgccatgggaggtggaaacaagcagtgcggcaacgacaccaacagcagaggccttgggggctactacccaagcgcctactcgtctccgcccatcgcgtaccctgcatacccccctccacaagccgggcatggatgccctcctgcctattaccctccacagccacagggatatgggcatggctatccatcagcaggagcatacgggtgtccaccctacagctatccccaccatcaaggtggctatcacggtcacggaggatctttgcttgttgccggtggcgcggccgctgcggcggcctatggcgcgcatcacttgagccatg

SEQ ID NO: 451594 - DNA, 294 bp, Triticum aestivum
tcgagttcaccaaggtttagcaaatcgtgtgccgggccatgtcactacgccggagctcagcggctgcgctcgcggcgctgctggcgctggcggtgctgctgggcacgtcggcggacgatggcggccagggccaaccaatcgtggcgcgcgtgagcaaggacgcctccacctccctctacaccatcgccatcaaggtcggcggcgtgccgctcctcgtcgacctcgccggcccgatgctctggctcgccaactgccccaccccgcaccgcatcatcccctgcgtctcccacgact

SEQ ID NO: 451595 - DNA, 435 bp, Triticum aestivum
ttgctttttttcatctcatggaaaactagaacgagtaggtccaacgtgaaacatcagccattacaccagtgtcgaatcagatttatccttacacattacatcagaacaacatcaggttatgtcttcttaggtgctccgccaatatatacattcagcaacgactaccacaggaacaaaaaaagaggcagttgcggacgcgtgggtgtgcataaaaatgttggcgatgatatgattaaatattgcactattgaagaaaccagttttctcaaaaccggctggaagaaacaccctcttaaacaaggatatttcttacctacactcgagaaggattcaatcgaaaatcaactgaattggatctcaaaggagggagatgcggttgaaaataccaaagtcaactgcaagaatgccttacgacaagcatttggtcatggacgc

SEQ ID NO: 451596 - DNA, 78 bp, Triticum aestivum
tcgcttttgcagggcgccacgatagtggattggggtgtcatcgtaacaccagccactgactatgagctaccagctgat

SEQ ID NO: 451597 - DNA, 73 bp, Triticum aestivum
tcggcttcgacgccattgacggctcccagccagaggcggcgaggtacacatgctccctttgctccccgctgaa

SEQ ID NO: 451598 - DNA, 365 bp, Triticum aestivum
catccgccgcccttttccaccccacgactgtggttcttccccttctttactcaccccgccgtcgactattcgccgccgtgggctcatatattagccgctgcgtgccgtctgccttcacattcacacacactcgcccggggacaagccaactcttgcgctcccacctccacagcagctcattagcagccgcgcacagagccagcgtgcatccatggcgcccctgctcctgctcttcctcctcggtggcctatgcgccctattctccctgggctactgctgctcgcgcggcgccaagaagtgctgcgacgtcgacggcgagaaggccaagagtcaccacggggagcaagaagccaaggccagcaagg

SEQ ID NO: 451599 - DNA, 424 bp, Triticum aestivum
tcgctcggcttctccctcgccttctacgccgcctctcccaagccctcctctttcatcccccgtgccgcctcctcccgcatctccggtcgaacaccatcatcccgcggactcctcctcaccggcggcatcctccgccaccttaggaccctcgtcgccgttggcctcatgcttggcatgattgctggcttcctagggggcagcgtcttcttctcctacaagatcggcctcgagggcaaggatgccgtcatgtccctcaagtcccatgtcgaaaatggcaactactccgaaaagattggcctcaagaagttgcttgacgacaatgacatcccgggcttggtggagcagtactcagggaagctcgtcgaaaccgtttgggagcaggtagaccaattggctgtacaatacaaccttactgatttcacta

SEQ ID NO: 451600 - DNA, 111 bp, Triticum aestivum
ccacgcgtccgcggtgttttagcgagctcagggaggccgtccggaggcgacgaccgccgtcggggaagaagaagaagacgccccaccactcgtatatgtcttcttgcccct

SEQ ID NO: 451601 - DNA, 138 bp, Triticum aestivum
tcgctcggctcctgcctagccttgtacgccgtctctcccaagccctcctatcccatgcaccgtgccggctcctcccggatctccggtggaacaccatcatgcggaggactcctcctcacgcggcggcatcctccgcca

SEQ ID NO: 451602 - DNA, 360 bp, Triticum aestivum
gagccctatcctgcccaaaccctcccctcccctgccctagcggatccacacctctccctagcggcggcggctgcggccacagcgggaagcgacaactcgaagcatccccccagcggcgagcatggccagcgtaggcacgcacgcggcgggagcgggcgagcagacaccgctcaagaaggcgggcgaggcggagcaagacgaggagctccaggccccctccggctggaccaagaagcttaattccactcggggtgggaagcctgaggacgcctcctgcgcaccaactggcgaggaggtcaagaccaagagagctttaaccacatacctaaaagcacaccctggaggccctgctctttcaga

SEQ ID NO: 451603 - DNA, 337 bp, Triticum aestivum
accctaggtttcctactcttttgcccttatctcacccgaccgatattctttttctcctcatcgatatggaagtagtctatgctcagaggttcctccattagcttagtgtaaatattagacttgttggggtttagtttgctagaaggaattagtctctgcttggtgttcatttctgcttgctacaatggctgcgatgaacgaaaaggtgttggctaaatgtggacagaatatagttagcctcaagaggaagcgggacagccccgctgcatatcatgctgatgcctgccacacctctcaatcgcatcagcattctactggaaactctgatatcaggttg

SEQ ID NO: 451604 - DNA, 324 bp, Triticum aestivum
agacaagagtagacgatccccatccatcgccacctgaccaaccgaatcactcaccattcaccaagtgaaagcaaccatggcaccgccgcgttgcggttacatacgtggccccgcggccagccgacaccaacaacatccgtcgccgatcgatcgataggccccgcccaaccgatcctcacttcttcttactcttcttcttccgcgggcttctccctctccctcctaactctctcctcacacggatgcacctctacaggctacggcaacgaagctagcttgctacttgttggccttgcccagcagcttctcatcttctccccggct

SEQ ID NO: 451605 - DNA, 309 bp, Triticum aestivum
cgggagaccgacttcgcgcgcttcccggactccgcccccatcgtcatcgacaacggcgcctccaccttccgcatcgggtgggctggcgaggcggagccgcgcgtctccttccgcaacatcgtgcagaggccgcgccaccgtagctcaggtgaaactgtgacagttgtaggagacactgatccagctctaatgaagtactttgactgcacacggacatcaattcgcttagccttcgatgatgatgtcgtctatcagttcgagtacatggaatatattcttgattatgcttttgaccgatttggtgccaca

SEQ ID NO: 451606 - DNA, 99 bp, Triticum aestivum
atcgagggcctttctgtacgcacctgacctgcatcagcagtcaggtgccatgccatgcttgtaaacaggcccctaaataaaatctccctggtttaactc

SEQ ID NO: 451607 - DNA, 322 bp, Triticum aestivum
ataactcccccgaaggagtgtcagtgagatcgtgggggcgttgatgagcgcgtcggcctcagccggctctttgtcggtcgccaagattcaggccaggaggcagataataacccgggtggtcctcaagagcctccaagcggacgacgtcgtcttcaagaaggtctcccgggcggtccactgcgccttccgtggcgtcctcctcggcggcagcggtgccaagggccagaagctagtggatgcagccctacgccgcatcggcgcggggaagctcgctgaccgtgtggtgaaggcggctgaagtgctcatcagggtggccacggtc

SEQ ID NO: 451608 - DNA, 339 bp, Triticum aestivum
tagagtagcactttgctctttcttcattccactggtgcgttgccgttcggaatggaagaacctaaatgttccaaggctgaccgctcgacaaactatgcaggcaattttccataagttgtttctctagttttaaatactgacagccagtctccctgcttcttgccccattttgtttggtgatgtgtatctaatgtgtacgacattcgtaaaatcagctcccccttttagcaagttggctgagaacggctgtagtgctgattgttcttgttctgagttggaaaagctcgaggcaccaaacaaaaatgcagtttactcttttcgctggcaaacaatgttgct

SEQ ID NO: 451609 - DNA, 305 bp, Triticum aestivum
accatctccattaccgtcagggtctttattgtatccgtcgctacacgacgttctgccgtcaagcagctaccctccgccgggaacgacgggctcactgtttccgtcgtcaaatttcggaccaaacagtagctacccgccgccgtcggcaccggccactgcatatccgccaccgccgccgtcgtgcacagcctgcccggctcctccggcacaatacatcagcagctatccaccttcactgccgagctattatcctcctccaccaccgagcggctacccaccttcagcacggatgaacccggagttcc

SEQ ID NO: 451610 - DNA, 257 bp, Triticum aestivum
  unsure (1)..(257): unsure at all n locations
acatcttctgcagtcaatannggttaccatgaaaatctgtcgggtgtttgtcaatcactcgcatatgattatctcgttgtagctactggccatgtttttgcttctgctggaagcagaacagagaggcttgcagaattccagagagataacgggaagataaaatcttccgagtctgtgttgataattggaggtggtccaactggtgttgaacttgctgcagagatcgcagtagactatccagagaagaaggtgacact

SEQ ID NO: 451611 - DNA, 241 bp, Triticum aestivum
acgcccgcttcatcgccttcggcgtggcgttcgcagtgcagatatggtgcatcgaccgcgggggcccggtgttcgtggccgtgtaccagcccgtgcagacgctcgtcgtcgccatcatggcctccctcaccctcggcgagaagttctacctcggcgggatcatcggtgccgcgctcatcatcaccggcctctacctcgtgctctggggcaagagcgaggagaggtcgcgcatcggcaagga

SEQ ID NO: 451612 - DNA, 353 bp, Triticum aestivum
ctttgaattaccctaccaagctccagataagctttccacatatataaagtcgatagtgaacacatcggccactggccagtgaggagtataattatgtgatgagagtaattccggatcatgacgaggtaatttcgctagatacctcctctcggaaggttcgcaaatgaataaaattattggctgctcttgttttcttttgttcttgacattgaagtcaaacctcctagttacctgtgttcaaaacttgatcgctatattgttgatgctgttcgctctcataaaatggaacccattccgtactggctatgaataggagttgttatttaagcttgtgctcaattgttagcctgcta

SEQ ID NO: 451613 - DNA, 320 bp, Triticum aestivum
ccaagtgccaggccaacaatgccaatgctggcttcaacgcaggctatctctccggcttccccgagtcggagatcactgcggtcgaggaccgcacactgactagtggtaatgtcccgtggtactcgctgcacaagacaatggcaggtctgctggacgtctggcgccacatcggctctgaacaggccaagacggtgctcctcaacatggccaactgggcagacactcggacggccaagttgtcgtacgccaagatgcagaccatgatggacaccgagttcggcggaatgaacgatgtcctcaccgagatctactattacact

SEQ ID NO: 451614 - DNA, 296 bp, Triticum aestivum
aaaagccaggaaggaaggaagcacaaagactctccacccacctactcgaaaccaaaatcccctctccgactctcagaaatccagcgcggcgattctgatctacatacagatccccttgagctccctcgctcgctcgctccggccggtcgtcgagatttggagtgcctgagacgttcatgggtgtggagtgagatcgagagcggggaccgtgaattcctacgagggccgccattcggcttgcgcgtctgcatgaactgtttcgtcaatctgggactcaactccaactccaaccacta

SEQ ID NO: 451615 - DNA, 276 bp, Triticum aestivum
ccacgcgtccgcggacgcggtggggactttgaagacttgaaggggctctgctgcgctatagctgatggccttgttacctaagcctgcaccgtatgcaagcatcaacaatgtgtgcagcggttcattatgtaaaatcacccagaatgttactgcaactataaacatatcgtgtatcatgctctcccattccccgtgtttagcgtgttatgcctaaatactatgaaacatatgtctcaagacatccgggttgatgaataaagcttgctgttctcctca

SEQ ID NO: 451616 - DNA, 317 bp, Triticum aestivum
ttcgtcgagaggcacgtgaatttgcaaatgaactttgtgcaagtacgaaagcaccaaaaaatccagctgtttggcttgaaggttctaataatgctggccagaatggcagtagtgctgatacttcaacagtatctgatgcatactcaaagatgcttacgatatttatcccgctgcttgtggatgagagttccttctttgcacattttatgtgcttcgaagtacctgcacttgttccagctggtgctccttacgttaacaagcgttgatctggagcaaatgaccctgatgatgacgacctgagccttatggatccggat

SEQ ID NO: 451617 - DNA, 291 bp, Triticum aestivum
tcaaccccccgtcgatcccggggatctttcgccccgagaaaaggtggcaacccaaggaaaggagaaggcgacgacgcgacgacgacgtcggcatcgagtagaaagcagagcagagattttccttggggtgccacgggaggagccgatgccgatgccggcgccggcgcaagaagcggacgacgacttcaccttccccacgccgccgccgcttctcgccgcagccgcgtgcagctacggccaccaccgccacagcaacagggtgtcgccgtcgccgtcgccctcctcctcccc

SEQ ID NO: 451618 - DNA, 209 bp, Triticum aestivum
ttcaccatcacaaagcaaaaaaacaaaggaatatttttcgtagaagtgtgaaggtgtactcaactcagcagcaggtgatggtctgacacgtacgtgcttgtgcctgtaggtgggtaccgccaagatcaacggcagcacgccggacgaccacttctgctggaaccggccggaggacatggcgtacccgcggccggtccagcaggcgagcg

SEQ ID NO: 451619 - DNA, 293 bp, Triticum aestivum
tccctccgtctatcgactgggtgggttctgcagagaagagcggagcatagcggatcaacaaagcgcatgaagcggaagccatggggttcaggaagggcctgctggcgtgcttcggcccgggcggcggcggcgacgaggaggcggagcatgaggcgcgggcgacgccgggggcgcggcggcggcgcacggtgatgaacctgcggtcgctgtcgctggaggacctgtcgcggacgctggccacgacgaccctgcacgccttcaccctcgacgagctcaagtccgtcaccaagaac

SEQ ID NO: 451620 - DNA, 241 bp, Triticum aestivum
ttccagatgcaggacactcggccaatgaagttggcgttgcggatgaactggtattagctaacgaaaagcttaaaggcatgctgaaaaaatgagcaggctgactccatagaggcacacagcctgtggcaaagaatttcagctcaattttactggggtcacgttgcaaaataagaactggtactaccattttagcatttagcacagcctgattgtacgtgtcaaacagttccctattcaatca

SEQ ID NO: 451621 - DNA, 187 bp, Triticum aestivum
aacagatacgtaaaagtgtagcagaagcagatgatctactagtgttagctgtgccgccggtaattatgctatgatccgcttaatcgtactcattctttgcgagtgattactactacatatataagtataaaggaggaagtactagtatatgaagtgaactgttgataggaactgtagtttctagaag

SEQ ID NO: 451622 - DNA, 178 bp, Triticum aestivum
tggagaaactgatgaggatgctgcggttggtaaccatgaggcctgacagttgcttgcgacaaatgcatattcagctaccaaagctggggctgaaatgcttgtgatggcttatgggaggccttatggtcttcctgtgattacaacccgaggcaacaatgtgtatggaccaaatcagttc

SEQ ID NO: 451623 - DNA, 150 bp, Triticum aestivum
ggggccggcttcatgctctcccccaacctggacctcgagaagctccaggcgatggcgttggagctccaggccgtggcgtcggagtacctgcggtccttctgaacataccgtttatactgagaggggagaggggagaggggagagaaataa

SEQ ID NO: 451624 - DNA, 253 bp, Triticum aestivum
caccagaacacctacgcatggaagcccaacctcggacggaagatcaacgagaccgagcccggggacaggatgcggcctctgtcggagatcaccggcgtctgccagcgctgacgggaccaaatcgactggaagcgcaaatacggcaggtacaagccgattgatgagcctgcaaaatgccagaagtgcagaaaacgaaacgtacggcaggcataccacaacgtctgcacaggttgctccaaggagcttgggattt

SEQ ID NO: 451625 - DNA, 127 bp, Triticum aestivum
cgctggtggcggaggagcacgagaagaggctcaagcgaggggcgccccgcgtctccgccgacgaggaggcgttcatgggcaaggtgaacttcctggcggtgaccaaggtgtggggctcctgggccga

SEQ ID NO: 451626 - DNA, 198 bp, Triticum aestivum
ctatatagtcttgacagataatgtgggtgttttggaaagataaagctctctgtcaaagagctagctatcagattgttttcgtgggtgttaaattgtccgtggcgctgtttgtttgcccatcatggttttactatgtccgctttgtactctgtactcgccactccgacagacttgatacattgtagtattgacttgtct

SEQ ID NO: 451627 - DNA, 173 bp, Triticum aestivum
gaagatcaaagtggagtataccaaatggagtgcaacccaatgattgatctttttcttttctatatgtggctgtctttttcttcttcagtgccgagaacaacatcagctgttacacagtacttacctaattatgttgttatatgcctcttatgaaagacttctatccataaacc

SEQ ID NO: 451628 - DNA, 192 bp, Triticum aestivum
gaagcgcgcggcggcggcaggcctacgactacgaggccgacccgcgctgggccgactactggtccaacgttctcgtgccgacgcacctcgccgtccgccccgacgtcatcgcccacttccgtcgcacgttctaccagcgctccatcgatcgtgatttggtggacgagcctatgtcaaccactggttccactc

SEQ ID NO: 451629 - DNA, 64 bp, Triticum aestivum
cagggatcgcggcgccggcggacggcggagcggagacgcgtgcctggtgggcggaggggaggat

SEQ ID NO: 451630 - DNA, 202 bp, Triticum aestivum
ttccggaggtgggagagtggaggggcccgggttctgtgccttaggtgtgtttatagtagcttaggtcttcccggtggcagcggtggggtggtgccggcgtcgcgtctgtggaataaaggttcagctgctcgtcttacacctcggcaccgtattctggggtgatgtcgtcgagcggccgctctagggtgctcgtcgatctatg

SEQ ID NO: 451631 - DNA, 160 bp, Triticum aestivum
acatactgctgtaggcactgttcacagtggcgacattggctgtcactgcacccatattcctttcataccgactgcatgggatcttccaagtactaacggtgtgtgctgcaacatggaacggtggaagcttcatcctggaggtgatgcccagacaaggtgt

SEQ ID NO: 451632 - DNA, 195 bp, Triticum aestivum
ccatggcggaggaggagggcacgcagcaactgccgttcgtgcgggagacggtcctcaagaagaggaaggacaacgaggagtgggccaccaagaaccgggagcgcaaggcggccaagaggaagcgccgacggcacgacgccgagggcgccatcaagcgtgccgaggacttcgagagggagttccgcaacaaggagc

SEQ ID NO: 451633 - DNA, 216 bp, Triticum aestivum
accaagctttagtgctaatttggtaataatcctgggttctgaccacgtcagtagcgtccactagtcgacgacggcggctcaaggaaatcgaggaaggaggcgagtccgtgccacggagtcactgtcggggagcactaagggagctccctgtcttggctagcaacaagtatgttcagcacgccgcctccagccacaagcatcgccgggaggaggaca

SEQ ID NO: 451634 - DNA, 272 bp, Triticum aestivum
  unsure (1)..(272): unsure at all n locations
ctcgcgcccaagccgncggcggaggacactacggcagaggcacaagaccatgacgagaactacgacatcgaggaacagccgacggacggcgacggcgaagagaagccctctggcggcgggtccgagtacgtgtcgcagctgttcgccgcgctgtggggcttggcgtcgaagctcgggaaaggcccgctgcactacgtgatgaggccgatcgctttcgctgtcaaggcgccgaggaagatgctcaccgtcgtgccgggcatgtctggcatgaa

SEQ ID NO: 451635 - DNA, 120 bp, Triticum aestivum
agcaccagacgcgatcatccgatacacctttgggacgccaccaccggcgagcttcgatgcacttacagagcatacgacgccatggatgagataacggctgcactttcaatatcgtttaat

SEQ ID NO: 451636 - DNA, 309 bp, Triticum aestivum
ccaccggacacttttctctctcaccaatggcggccgtgaacaagtccgtcgaccggctggtgcaacgcctggtggcgccgtccgagtccacgccggtcggtccgctccgcctgtcctggcttgatcggtaccccacccagatggcgctcatcgagtcgctccacgtcttcaagccggctcttgaccggcattttgacggcggcgacgacgctggcccggcgaggaccatcgagcgggctatggcgcaggccctggtgcagtactacccgctcgcgggacgcctggggttcacggaggaaggtgggctgc

SEQ ID NO: 451637 - DNA, 251 bp, Triticum aestivum
gctgtcgctatcagcgcaccgcagccgccgccgtcgccgtcaacgccaccaccgccatcgccatcggcttcctcttcttctccggcaagctgctctcaccggagattcatcgatggacggtgatttggtggaggctgctacttgttagattggtgcagacaaagagcttttgcttcaaatttatgtagtttgtctgaacatatgatgccatccctatgaagaacttatgtatagttagttatgatgctagc

SEQ ID NO: 451638 - DNA, 256 bp, Triticum aestivum
ccatcgccatttcgtgaactcgaaacggattgatgattagacggagagaatagtgtgacagcatgctcccaataccaagggaatttaggttcagagttccaggaatggttgagctgaccctagtagtgcttgctgctagatttggcgtcgaggtggtaataaagccttcagagagcatatccacaagatcacaatgttgctgatcttaagatggaataagctcagatggcgcattgtatcaagttcgccagggcac

SEQ ID NO: 451639 - DNA, 268 bp, Triticum aestivum
ggtcatcatcggcatgaccggttctttccggcggccaggaacctgcaaggatggcggacgtggttggcatccccacggagatcctccgcctcgcgctggcgatcaggcaggcggctgacacggtgaggcagaacagggaggactgcctcgagatccagcggtgcgtgaacaggctccacggcatcatgtcctcggctattcgcggcacaggcacggacatgatagcgaacttggcagtgagcgccgcgctgggggacctggaacggat

SEQ ID NO: 451640 - DNA, 301 bp, Triticum aestivum
  unsure (1)..(301): unsure at all n locations
cgccgccacctnctacccttcgcatcttcccttgccgccgctggaggcagacgccggcaagcccacgcggtcgtcgatgagggcggcggcgaggtcttcggccacgattctttctcgggaacgggcctagggttccaggcggcgacctggtggtgtgggcggcgccgtcccggcggcgttggctggagctatggccgcctcccctcggctgcatgggtggcgagtcggtggtggacctgtgtgtcgggcggcaggacccctgtgacctgcttcgccagatctaaagatggcgcccgttcgc

SEQ ID NO: 451641 - DNA, 362 bp, Triticum aestivum
tagtgcacctcccaaattacatatgagtgaggaactgaggattgtgtgagccatggcttcatgttaaacagtatgatggtcaagtgccaaaccctcactccaaagggggctatacacatcttttaacacaaactagataaacatattggaataactaatggtttcaatttgaaaaaaaacgagtaatcgacagtccgaatttgaacagactgacatcagcatggagtgcacaatttttgaggaacgagaaattacttacacgaacaatctcctcgtaagtctcatcatcaatttcaatggaagtcactatctcttctacatctccaagtatcatattgagatgttgatcatacgcatggagc

SEQ ID NO: 451642 - DNA, 51 bp, Triticum aestivum
ttttagtggcgcgtgaacctgctgtgccaaagacgacgaccaaacgaactt

SEQ ID NO: 451643 - DNA, 291 bp, Triticum aestivum
cccccccccccttccgatcgattcgattcggttcggcccccgaccgatcgccgccgccatgtgggccgcgtcgtgcctggcgtcctgctgcgccgcgtgcgcctgcgaggcgtgccgcaccgccgtcggcagcatcggccgccgctccgcgcggatcgcctactgcggcctcttcgcgctctccctactcgcctactgggtgctccgcgaggtcgccgcgccgctcctccagtccatcccatggatcaaccacttccacaagacgccggaccgcgagtggttcgagacgga

SEQ ID NO: 451644 - DNA, 294 bp, Triticum aestivum
ccgtaccacgcccccgcccccagcacccccgcctatcacgcccctcgtgcccatcgcctatcccgtttcctctcaccgcagcatcgcgtttccgcggtctccgccccttccgcaaccttcggtcattggtttgtgagagccttcaagatttgagcaccacaggcaacagtcttctacatcctagtgtcggtacttggtagggtaatcttccctggtccccagaagctgacctgtatatgagaagattgaacagagcatgtgaaccatcctgaaatctgatgcacatgtgaacca

SEQ ID NO: 451645 - DNA, 273 bp, Triticum aestivum
gacaagggaggagggtgatgcagaatgggtaattagccgggtcatcgacctgcaaaatttgctcccacctgctgctctcgtggatgcagaggctgaagtgatggtattgggatttgccgagggagtgaatgtcattttcgttaacacggtggctggcctcttcacaatcgagctacagtcggagcgggtgaagaaggtgtgtgataatcatggctttctgtaatttgattccagttgtcagcttctgcactcctgtggaccgtctcaaatacc

SEQ ID NO: 451646 - DNA, 285 bp, Triticum aestivum
acgcacagagctcaagctgttggcacggtggcggcaccggcgcttgcgtcggagcagcttcggcttcggcggctgccacagctgctgcgccctcggctagcccctgaagagcgagagcccgccgctgcactggttgcactccctctgcatggtccacgcgccgagttttcgacctcgaccacgcccaaccgtccggtggcagccatggaccgcgacctccccgatcatgccccaccatctcacattccctcctcgcctctagagctccgccgatgcttccgtctc

SEQ ID NO: 451647 - DNA, 175 bp, Triticum aestivum
tcagcggcaaggcgatgcaggtctgggtggactacgagagcgactccacgcagatcagcgtgttcctggcgcctctgaagaatggagccaagccttcgacgcccctggtgtcagccaagagcaacctgtcgaaggtgctcgtggagccggcgtacgccggcttctcgtcgacgac

SEQ ID NO: 451648 - DNA, 251 bp, Triticum aestivum
aaggtgaggatcatcgaggcaccacccaggatctccatggaggctgtgaatggagccatggggagcgacgagttgccggagaggatttccacttcagaagatacagaattagagattgagcaagccaaggagatgggagaggaagcccaggagagggatgaggtggcaaaattggagattgaggaagctgaggggatggaggagaagatgcagactgggatgttctttaatatctactgtcgcgccttgga

SEQ ID NO: 451649 - DNA, 85 bp, Triticum aestivum
cacgctcctctgcctctacatcaccctggccaccgggatcaggtacacgcaccaatgcgactccaccgtcaacaccaccgacgcg

SEQ ID NO: 451650 - DNA, 289 bp, Triticum aestivum
gacaggtggtcctgggagcgcgcggacggcgaaggacgcgcacctcccctaagactgctccacttccctggccccgtcgtcccgtctaagtcgccggcggcgtggacgcagcgatgttgcggacggtgctgcgccggggaggggcggccatgaggcaggccgtgctggccgagggatctacggggaaccttctacggctgagcgtggcggagcgggagcgctctcggcggcgtcggcgcgacccggggcgcgacgagttcttcgtgccaacgccggagtcgcttaaatg

SEQ ID NO: 451651 - DNA, 282 bp, Triticum aestivum
aagccatagttcattttccttctttccatgtgatgtcagcagtggtgccatttcgaaaatttatatgcgatggttcactaatgactggttgaactgagaccatttttgaacacccctattagcactacttgtttcgtccagactcataaactatacacatattataggcatgcaacacttgattacttgaacgcctaaaatgaagtggaaatatttagcgataagtgcaaaccatggaaaaccacaccaattgttttgtgttcctcactaaacattgtaaaa

SEQ ID NO: 451652 - DNA, 263 bp, Triticum aestivum
aagctctacgcctggaaagttcgtgaggtgcaaagaacggtttgtgatcagcgatgactggacaatcacgccggcatccacttcgctgattcacaggttcagctctgaatctgaggccgccttccccgggtttgaggaggtggaagtgcgtgtcagctggcccaaggttatatccatgctgaaggcttctctgtcgtcggataccatattcactgatattttcttacccatgggaaccggtggtcaggatgctcgtgccactg

SEQ ID NO: 451653 - DNA, 215 bp, Triticum aestivum
ctgcggctgcaagttcgccgaccccgacacggtcgttccctccgcggcggcggcgtcgcatcgcgtgcggccggacaccatgagctgcggcagcgacgggtgcagggacggcggcagcggcggcggcagcgaggggttcgggcggtcgcggccgagcaaggtcgcggccgacgactcggtggagcccgcgcggtgctcggacgccacctcgccgt

SEQ ID NO: 451654 - DNA, 298 bp, Triticum aestivum
catctgagacaggaggtcttattagtgttttggttgaagttcccgctgcatccatcactgaagcctctcaaggccaccaaggatcgttatatccttctgttgaggatttgctgtacacctccaattccggaggtaacagttctggttgcaaggatatgactgatgctcaaagtaaggggaagtctgtcatgccctctgctgaaccactcgctcgtaacactgttcccagttttcgtccaagtcatccaaatgcatctggaaatgaatggttccagacacgaagatcggtggatggatg

SEQ ID NO: 451655 - DNA, 354 bp, Triticum aestivum
agagcagcagagcggagggtccatctctatcctctgccgcttccgtttccgccgcccgctggagttggcatgggtgaggcgctcgggatcctcctgtatatactaatggtaggttttttgttgttgtggtggtattcggccttgtgctggtctggcgtgatgccgatggagtgttggccgccgtcgctcgcgcgcagcgttcggtggctgtcgacctcgtcttctgcttcgtctccttggtggaggcaaaagggaggcggcggatccgacgctagctcccccaataagcgcgtggctgcctcagttcgagccgctctggtgttctcccgtcttgcttctagccgtcatggtggc

SEQ ID NO: 451656 - DNA, 389 bp, Triticum aestivum
cgtgatctcgatgtggcttcatttgatttttctcctgaggctgaagaaataattggggagccaaagccagaattcagcacagatgaagaacaaagtccaaagaaagatgaatcaaatatggcaggagagaaaacttatgatgagaaaacaaagggtgcacaggaagctaagagtctcactgacgaagcgaaaaccaaagttgaagaacaaggagtagtacagaaggcgtcacacaatcagaaacgtgatctcgatgtggtttcaccaacagaagctcctgggactgaagaaaatgttgtggatataaaagagccagagttcagcacagatgaagaacaaagtccaaagaaagatgtatcaaacatggcagaagagaagagttatgaaaa

SEQ ID NO: 451657 - DNA, 154 bp, Triticum aestivum
ggcactttgatttgcttagcgcgcgacgaagcaagcaagctaagtgagcgcgatggtggtgctcatggagtacgcccccggcgtcggcgtgaccatgaagaggaagggcgaggaggagccggggctgttcgcgttccccgacgacggcgacggc

SEQ ID NO: 451658 - DNA, 276 bp, Triticum aestivum
gttcagttgcataactcacttccaattaagcaagagctgcgaaatgggtccatggtgtctgttaaacctcttcataccccacaggcacctacaaatgtgcttgacagtccaatggctgctgccaagcattcaccaaaggcaaaattatctggaaatgattgttttgcatgtgtcggatctgatcctcagaagtgggcttcagctgagaaatttcagcctacttcaaagtcgagtggtcaactaaaggcacatggctctagtaatgcggagaaacat

SEQ ID NO: 451659 - DNA, 151 bp, Triticum aestivum
tcgatcggaatcgatctcatgtggcagctctgcccatccatctgagatcgattgatcgatcgccaggtgtgtatacccgttaatttccatgggaggcgacggcaagttgggtgccgccgaggccgccgtctgctgcatgtgcggcgaccat

SEQ ID NO: 451660 - DNA, 356 bp, Triticum aestivum
ttccaagctccatctcgctgtgtgcccgtcattgccaacacgccgccgttttcctttcccaacacgcccagcggccccctcttgcatctcccctgagccgccttcccccgacgacgacaccattggcggcacggccgcgagacgatgattcagcgcgggcgacggcggtgacatggtcgagtagcggcgccgaggaccatgccagcggccgtatccgcgtagagggagatcgaagatgaggaatacgcagcggaaaccatctattctcaacttcgatgctggatgcggatcttccttgtcttttattgtaataggcttggtgggatgcaccctcattgtctgcctatttttcatca

SEQ ID NO: 451661 - DNA, 296 bp, Triticum aestivum
  unsure (1)..(296): unsure at all n locations
gcctctgaatccaaacaaatggaaatttcaaggntgttgctaccgttgttctcggcggcggaaagttctatgcccagacagtaggtgaccagagagtagcttccatccaacaacagcttgcatccttgaaacttaaggaggcaccagtcattggtgcttttaatcctgggaagggagaaatagtccttgctcagtttagcctcgacaactcttggaatagagccatgattgttaatggaccccgaggagctgtagagtctgtagatgacaaatttgaagtattctacattgatttt

SEQ ID NO: 451662 - DNA, 372 bp, Triticum aestivum
caggagctaaagcgggtcctttggttttatcgagcacttgactttgtgtaacaggtagcgtttggaagggatgagagacaagtgatcattgcaatttttgtgggaacattgcccaagatggcgaagtgcaggatctgccgccactattggagacaccttgtcaagcaccacggctacgcagatcgaagccgctgtcacgtgccgaagagtcaccatcgccagccatcggtttcttctgcggcaatggctaatccagcccaacttcaggcgcgggccggtctccgtcgacaagcaccgtcttctgccacaagaaccgccacccattccgaatcccagcagtattttcaggtccactacaccaaagaaaagctg

SEQ ID NO: 451663 - DNA, 284 bp, Triticum aestivum
  unsure (1)..(284): unsure at all n locations
gacattgggttctctctgaatgcagatttttggnctagtttctctgatgtccagatggcgcggaacaaaagaacccggccaaggctagcttattttgtactaccacaaaagaaggaagggatctgcacaaaattctgaattgagagtgaaggtgttgccatctaccgtcgatatgcgacactgtatttaccagtgtgccctagtttttctaatcgaattaagagcgtccccgcgtagggaggacacatgctaacagggggggtcctggttttggtggttcgact

SEQ ID NO: 451664 - DNA, 281 bp, Triticum aestivum
tcgctcgctcgctcgccggtgtctgtttttgcgatcgactccgggtgcttcagccggagcggacgcctctctgcccgctgagctccctcgcgcccctcctcgtgagctcgaaatacatgaagatgtcggaacattctgagagcacggctgaaaagctcatgggcaacatcatggataccattgctgacaagctccctaagcagaagtctgacaatatcatgagcaacatcatggataccatttctgacaagctccctaagcagaggtctggccggttcgat

SEQ ID NO: 451665 - DNA, 298 bp, Triticum aestivum
  unsure (1)..(298): unsure at all n locations
ctgcccgctcgaccacacctggaagttcaacgacctatacatcgttttttacgggggcagcgccgnctcgccggcctccgggccggcattttccgcctggtagagggagcgcccgtagctgcactgactagacacagtgattcttttgttggttgggcggttcttggcaatggcagtgccgctgccgtcggctgtacagggcggcgagggagggtcgccggcgattgcggcgcgaggaggagggaggagaggagtggtggatagagaaaaagaagagcttgttctttttggtagaaat

SEQ ID NO: 451666 - DNA, 198 bp, Triticum aestivum
gagacgccgacgacgcgggcgcgcgcgcccgggccaccgaggccgtgcgcgaggcgtgccaggccaccgggttcttccgcgcggtgaaccacggcgtgccgcacgagctcatggcgcgcgcgctcgatctgtcggcggcgttctttcgcgctgccggacgaggagaaggccaaggtgcggcccgccgagggcgccttc

SEQ ID NO: 451667 - DNA, 275 bp, Triticum aestivum
cgcgctcaatctcaatctgaccgttgtttcgccgccaaacacgaactgtcaggcggcaggtgcccagccacgctagccagatcctcctgcaaagaacagaaatcccccggttatttcccactccgctccactcgtccgaaccacgccgcgctagccagctgcatcttcagccggcatggcccgcctcggcctccggcgctttccgccgctgatgctcctcctcctactcctcttcaccctcgtcgtcgcggaggtggcggcggggaaggggaaag

SEQ ID NO: 451668 - DNA, 342 bp, Triticum aestivum
cctcctgtgtgcggcgccgccggtgcgtagaggccacatctcctctttctcctcgacatctgcggccaaggcgctcacttctccggccctcctccacatctcctcgcctccaccccatccacttcctgtcgaagactgcggcaacggagctcggcggctgcggcccttctccaagactgcagcatggtgctcggcagctgcggcaacggagctgatggagcgcgagccgaccagttcaacggaggcagtagcacggggcagcggcagcagcatggagggcgtccgcttgactggaaagagaatgtatttgttgatagtgagagtgaggataatgatggggtg

SEQ ID NO: 451669 - DNA, 202 bp, Triticum aestivum
ccgccatgaggttcgcgtgcttcggcggtgcggcggccgtggccgacgaggcggtggctgcgacgacgactcaccggactcctcgccgccggtggcggttcttcttcggtagcaagggcgagaagtcgccgtcgacggggaccaagaggatcacgtcgccaggccgccgggcaacggactacgttgcatacgacatgatcgc

SEQ ID NO: 451670 - DNA, 243 bp, Triticum aestivum
cgttgcgagatcgcaggaaatctgggcgctcggctcggcaggaagctatccatccaagaaaaagatttggcgaggcgaaggaaaggggagaggatatcgggagaggaggcgaatagacatggcttttgtgaggcagcgggcgatggggaggtggcggagatgagggatgctagcttctgcgatggattacctgagatcttgctggggtccgacgtcgtcgccggacgggcgccctcgcagggg

SEQ ID NO: 451671 - DNA, 243 bp, Triticum aestivum
gactttcagataatacatgtgtcaatttcgcagaatcatatcgagcatatgggcatcgttgacacgtagtgcatgacacattgcgcgattaagatgttcttaggccagctaagtaacataagacaacttttgtatgaagatcggttgttcggtttcactctgacagtttagaagcttttgtttggcgtttctctcggccggataatagagaaaaagagacttacgcaggcgacgaagatttca

SEQ ID NO: 451672 - DNA, 169 bp, Triticum aestivum
cagacagatccgatggccctcgctctctccggctccgctgctgcccgcgcgctcgcccagcggctggccccagccaccgccaggggctacgcggcggcggcctcctccggggcgatgaggcgcggcgccgcggcgaccgcggacgggaaggcggccagggaggctgaga

SEQ ID NO: 451673 - DNA, 300 bp, Triticum aestivum
cctgctgctatttccagccttttttcactaagcgcccaacggtcgcccgcccggccggcctcatctcgaagcgacattagcttgcatattgtgttgcagcactcaagcagcaacccgctttccagccgctgcctgacttataatagtctgccgtcttcccgcttctcatcagcaaagcatctgcatcgactattccgccttttgtcctttccgctctcggcttcatctctggttcaactgtcatcggcatctggtttccatctcctcttccgacttatacaccaaccaagaatcatattc

SEQ ID NO: 451674 - DNA, 312 bp, Triticum aestivum
cctccccctcggcgaaaccctagaattcatccggcgcggcatggcggacggcgagggcggcgcggacggcctggcggagaggctcgcgggggcggagatcgccgcgcacggcggcggcggtggcgaggaggagccgaagctctcgaagaacgcccagaagaaagaggagaagaggaggaagcaggaggagcagcgccggctcaaggaggaggagaagaagagcaaggcggcggtggctgcggtggcggccggtggagcgccccagcaggcggcggccgacgatgaggacatggatcctactcaatattatga

SEQ ID NO: 451675 - DNA, 255 bp, Triticum aestivum
gaaccagctagcaatgggcgaatcttctcagaaacaggcacggcttcgacaatgacgacgcgacggcgccgccctcgctgccggagacggtgtactacgaggggtgccccggctgcgccatggagcgcaagaaggagaacagcacgggcacgccctacaaggagtttttctacgtcggggtcaccaccctcgcctccgctctgccaatatcagcactgttccccttcttgtacttcatgatacaagatatgcatg

SEQ ID NO: 451676 - DNA, 123 bp, Triticum aestivum
  unsure (1)..(123): unsure at all n locations
tggctcgtgcatgcatgcttgataaacttgngattgatcaatgatcagcgcatctcgctatggtatctaaatgcatgattcatgtatttttacaaggatatacaaagttgtcttgacagtaca

SEQ ID NO: 451677 - DNA, 400 bp, Triticum aestivum
agaggaaatgcgatgcgagcgagagttttctagggtttacactctcctcctatcccgaatcaaaggagagaagcactctcctccgctgcggaccgaggccgagcggcggcggagataccatcctctcccacggccggccgtgctcaagctgaatttgttcaatggaggacctaccggaggctctggtgacggagattctcaagaggatcaccaggacaagtgatctgaattctctttcccttgtctcaaagcagctctacaagatagaggggaatcaaaggggtgctatccgtgttggttccggtctttgcactgctacagaagcactaacatcactgtgcgccaggttcacaaatttgcagaaattggaaattgattactctggttggatacttgaaca

SEQ ID NO: 451678 - DNA, 312 bp, Triticum aestivum
gaagatagggggagagatagatcgatgtttgacgaccatggcgccaagctggtgaagagcctgcggggcgcggcgcagaagtacgtcggcgtcggcttcttcctcggcttcttcctcgtcctcctcacctacttcaccctctccgagcagttcgccatcgccgcgcccaacgctatccgaaggacctcagcggcgcacccgacgccgaccgccccggccgtggcagagaagacggtgcagcagcagcagcagctccccgtcaaaaaggaggaagcacctctgccggagcatgaacaagtacaagagaagcca

SEQ ID NO: 451679 - DNA, 283 bp, Triticum aestivum
tggaaggagatagtggacttttgggtgcggcttcacaacttcggcggcgatggcggaaactcgatcctaactgatggtgactctcctgagaagactcaaggcaaaagctaccaaaatgcccgggtttcagacttcaagtatacgcccagcccaccacagaggcacagtggttcagagcggtctaggaataacaatgggttcgagtcgacactggagaggcgtagagcaagccctgctcccacgtatcatacgaagcagaacaatgtcaataactatacaacta

SEQ ID NO: 451680 - DNA, 164 bp, Triticum aestivum
caaacacggttcctgcttcctcggctcccaccttgagagggtggtcaagcccaatgtgaagctcctggcagagtgcgggctaggtgcttgtgatattgccaagctgttcattcaaataccgatgatcttcaccgccagcccagagcgtgccctggagatggtcg

SEQ ID NO: 451681 - DNA, 366 bp, Triticum aestivum
  unsure (1)..(366): unsure at all n locations
agagtccttccccgagcgcgttagntttggtggatagccgccgccggttccaccgccgcggctcgcccagtcggncgaagcctccgctgcgcggtcgcaggcacaggatcccaacagcgcctccctccgtcgggcagccgttcccaccagcagcgcctccctccctggagcaggcgctcccgcccagcaacgccggcgcccggagcaacgccgccgaccagtccatagggcatcaacattgtcaattggaggggcttggagctgcttcggcatccacagtagagcaaacaagaaggtgccaggtgttgattggagatgaatgccccggaccgctatgagcgcttcgtcgtgcctgagggcacaaag

SEQ ID NO: 451682 - DNA, 267 bp, Triticum aestivum
ccgccggcctcctctatgccccttcctctccctctcggacgaggcctagctatggccacccgtgccgcatcctgcatctggcgcgggagcgtgtggtggtgactagccgagccgtctcgctggtggctcgagcacggacccttgcgacggcgtccgggcgaggccgggcacaaggcggagctgcggccggcgacccggcacccgcgcttgcccggcggcgggaccgtcttcgtcgtggccggtgggagagttgggcggcagcaagcg

SEQ ID NO: 451683 - DNA, 305 bp, Triticum aestivum
  unsure (1)..(305): unsure at all n locations
ttcccctcctcaggcagctcctgctattgttcgggnccatctccgaggatgtcctctctggggtgctgtctggctgccatgtcttggcgaacttatatctgtcggagattcgtgaggtaggtagcctccgcatttgctcgccaactctcaggatcatcgtcataacttgtttgtttgaaggcaaaggagaattggtcattatggaggcccctcgccttgaaaggttgctgttacgtccgccagtcttaggtagtgagattatccgggttgttaaggcacctaaactggagatgttgggccttttg

SEQ ID NO: 451684 - DNA, 285 bp, Triticum aestivum
tcggtcaccggtcgccgccgggagcccagccgcccaggaggctccccgctcccgcctgtccttcccgcccgcctggacatctgcgccccctgcgagctgcggcgaccctgccctgaacggctgcgcccgtacccctggccgcctggcgcccctacaaagccggtggcagctgcccagtcaccagtccggtggcagcaaatcagtaacctgagaaaataaaaacttagtcatggtaccgtgagctcaccagatctgggccgagcctagaccaggcaccggggtgag

SEQ ID NO: 451685 - DNA, 333 bp, Triticum aestivum
gttgccgcagaacttctcagagttatgcagcctaggagacttctcctattaaacggaaatttgttccatgtgcgctcttgtgcacatattctgaatctcacagttgaagaaagcttggaacagacatctgacataattaatagagtccgtgagatgattcagaatgtcaagttctcacaagaaaggcttcaaaagtttctagataccgcaaagctgctgcagattgaccaaaaactgaagctaattacgctgctttcttgaccgctaaggagtgggctgatgtgaaagccctcactgaaatacttgacgcgctcaataatacaatggagaagt

SEQ ID NO: 451686 - DNA, 371 bp, Triticum aestivum
gatacgaggtacggtgcagcaacgcatttctgagtttgctaaaaaagagaccttaccttcttttacaaggtctggttgtgcctatttgatggaggcatgccagtttgagcaccagctttttgctcacttcttcccagcatccgcaccagatgtttcaactatggctcctttaatggatccattgtgcacacacttatatgatactctgaggcctagactgatatatgaaggcaacattgattctctctgtgaactcgttgacattctgaaggtcgaagtgttgggagaacaactgagtagacgtggtaaatcagcagctggactccgtccaatattgcagaggatacttgcagatgttcttgagcgtctgg

SEQ ID NO: 451687 - DNA, 336 bp, Triticum aestivum
cgattgtttccgcccacgcgtccgcccacgcgtcgggccatttgatcgagcactggagtgtggtaaaggctgaacagaagaagaaggattatgagaagaccaaagccacctttgataacaaggagagtgcgagctccaagaaggccaagactcagaacgatgaggaggtcaaatctgaggtcgaagatgagggtagcgatgaggaaaatgaggacgatgacgagtaaatagtgtatcagatcatgaggtagcaaattgggtgttgggtccccgcttagtgtactagtttgctatcctgctatcctcagtgctagatgatgagatttggtagtagat

SEQ ID NO: 451688 - DNA, 364 bp, Triticum aestivum
aacttagcttaccatcttgacttcaatcagttctgccccttttcttcccggtcaatcatgccttgcgacggcgatgacaaggagtcgaaaggccgcctgaacgcggtcaacatcgccgcccgcgtcgccgccatggggctcgccgtggcgtcggcggctctcatggtcacggccagccagtgcaccgtcgtcctcccgaacggcgccgaggcacacaccgtcacttacagcgacttcggcccgtttgtgtacctggtggtggcgaacgccattgcggcggtcatggtgggggtggccatcttcctgagcgtgtggaagaagggcagcggcaagtgctccagggtgctcgtgccgctcctcgacg

SEQ ID NO: 451689 - DNA, 260 bp, Triticum aestivum
cagggaagatccagcagcgccggcgcctccacccgcccacccaaccaccatgacgggcgagaccgcgacgcaggcggagctgctacgcgccgtcctggaagagcagaagctcgcggcgcaaggagatgagcctgtagttgaggatgatgatgatgaggaagatgaggatgatgatgaccaggatgacaaagacgatgacgtggaaggagctgatgcaagtggaagatctaagcagagtacgagtgagaagaagagcaaga

SEQ ID NO: 451690 - DNA, 287 bp, Triticum aestivum
ctccctatgtgaagccacatatggacaatgagctcttatttatcatctgccaagctggttcacaatcatttatctataaaacaaggctcatggatctgagtccagatctgagttcaatgttaggaatagcgactcctctcaagccacattacattgtacatggagatgatcgtggtccgaggcatttttttctccttgactcaaaactacatgctgtctcattcctaaaagatggcatggatgtgcttaacctggacaccagatgtgagcatttagatttgcaagca

SEQ ID NO: 451691 - DNA, 223 bp, Triticum aestivum
gccgccccccgggtccccgggatctcggctcgcaggcgaccatgtatcgcgccgctgggagccattttcgctctctcaagaatcatggtgctagtagatttgctagcacaagtgtagtgaagcagtcttcaggtggtctgtttagctggcttcttggcggaggctcaagccaactaccccctcttgatgttccgctcccaggcattaccattcctccacccct

SEQ ID NO: 451692 - DNA, 315 bp, Triticum aestivum
aatccgttaccaccaaggcggaagatttagtactcctcctcgtctacttcttgctcagctccacccacaccgaatctagcatcgcggcggcttcgtgttgactcgtctgtcctcctccccggctcgggagcgctcgtgggcttctcggatcggcggcgcgtccgctttccgtgctcggatccaagaaaccagctgggagttaggttcttggatttggatctcccacccgcaatggcggcgctcgtggagctcttcacgagatcctactcgtcctccacgccggtggactgggaagcggaggcctacccggcgtac

SEQ ID NO: 451693 - DNA, 319 bp, Triticum aestivum
  unsure (1)..(319): unsure at all n locations
aaattcttctggggccttggcttcggcgtgccgggcgngattatgctgctcgcgctcctcgttttcctgctcggcaccaggacgtaccggttctacgactccggtggcggcgagggcgacagcgcgttctcgcgcgtcggcaaggccatgaaggcatggcgcaagaggtcgccagagggtgactgcgcagaggacgccgtgctcatggaggaggtgcggggcctggcgaggctgttcccgatatgggcgacgtgtctgctctacggcgtggtgttcgcgcagccgccgacgctgntcacgaagcaggcggcgacgctcg

SEQ ID NO: 451694 - DNA, 170 bp, Triticum aestivum
atcttcaggtgctgatgctcagctatgcgtctggagcattgatggttgggagaagaagaaatcaaaatatatccaacccccggcaaatcgctctggtgctttagttggcgatacaagggtccagtttcacaatgaccaaacacatcttcttgtagttcatgagagccaac

SEQ ID NO: 451695 - DNA, 346 bp, Triticum aestivum
cgctgcgttcggcacagcaaagccggcttcccgggggctttttatactcacattcagtgttttattatcagcgaaggtcatacaaaatgcattcttggcacaagatggtccacggactaggcacaatccaagatatacctgtgacttttgtgccctcaatacccgcagcatgcattccgtccaggggtgtagattatcattagctgatacttcagccaagtggttaaataccacatcaacagcatggattagctttgggaaacaaggaaatattagctgcaatgctactcaaggtgccagtgatgtcttgtccattgacaaagttgattttctcaagctacaaaat

SEQ ID NO: 451696 - DNA, 338 bp, Triticum aestivum
agattacttcccacaccacagccccagagccacggcgcctttctgctcgcttctctttctcttcccctctccctcccttcgcgatctctcttcccccggcgctagcttttcgccatcgccgcacgaatcctcctcgcctcgacttcagctcaagggttcgacggagggccaccggccggagctacctgcgtagagatttcgtttcacctggatttcttggctagaagatccatgcagtgattagtgtgtcagattcttcaccgaacaaggatggccgacactccaacttcccggatgatccaccccttcagcaacatgcagaggcagaacccgaagca

SEQ ID NO: 451697 - DNA, 358 bp, Triticum aestivum
ccaacaaccccgtcgttgccggggacgccggcacctactactccggcacctcatcgtccccgattcgtcccgtggccggggaccagtcgtcggcgcaggaggacggatgggtcatctgcagggtgttcaagaagaagaacatcctcgtgaaccaaggccagaacggcggcggcggagcggcgtccagcaagctggccggcgccgcccccatggagcgcagccagagcaactgctcgtccacggtgaccaccatcagcaaccacatcaaggcggcgcagcagcaggaccagcagcaccagctgctgcactactccgccagcgacgacgcgctcgaccacatcctcaaccactacatgca

SEQ ID NO: 451698 - DNA, 315 bp, Triticum aestivum
  unsure (1)..(315): unsure at all n locations
nactagtttgggctggtggcggacctgatctcaggtggaattatagcagtagcgctcttcgtatctcccggcgccgcgcgttgaaattcatggttgttcttcgagctccggctcttgaagcattctgatttggaaatcgcttcttcctggagtcataagaatcagctattccgcaaagattgcgctttttctcttctgttggattcttccattagagcggcggcctctccggagatgacgaccggggccgtcacggagagcttcccggagagcagcgagccgctgctcccgacgaagcggcgatgggagggggag

SEQ ID NO: 451699 - DNA, 269 bp, Triticum aestivum
  unsure (1)..(269): unsure at all n locations
atcaaccaatttttttcccttnccttatattatatattatgaacatgacaagaattgccaaaaactcaacaatgcctgataggccaataaaaaaaggttaatggcctcacacaccagctgctgagatcacaactcgccacactgacacaatcaattggacttattgtcactcactcctgtacttgagaaaactctcgcaacccctcatgacaaacactgaaagaaagccaagaaaaaaaatacacaatcattttaggaatctctacttc

SEQ ID NO: 451700 - DNA, 451 bp, Triticum aestivum
ccatacttcgcccaaatcgccgccgcaccggctgcggccgtttccctgcccccgcgcgcgccatgacggcgaatcagccggcgggcgaggccctcgcgacccacatctccggcatgtcccgccccgagatgtacgacctcatgtcccagatgaaggccatgctcgaccacgaccaggagagggtgcgccgaatgctcgtcgagaaccccgacgtcacccgcgcgctcttccgggcccaagtggttctcggaatggtcaaaacacctaaagctgcacaatcttccgacacgccccagccagcagctgctcagacaactcctcctgcatcagttaaagctacagtacaagatcatgttaacttgccccagcctcccttgcctaccaatcaacagaatttgcaaccttctggccaatttccattgggcgcttctaatgtgacatcatctttgga

SEQ ID NO: 451701 - DNA, 397 bp, Triticum aestivum
  unsure (1)..(397): unsure at all n locations
gaataaatccccatctcctgagcccctttgtgccggcgccattaggcgcttggatgggtcggtgttctccgtctccgtggccggcaagcgcaagcgttcgccggagtacccctgcgtgtcgcgcttccggcagcggcgactcctctccttcctccggcgccagaagctgttcgacgcctacgacgtgcttaccggcgagtcgggtgcgcgcatcgacctgtaccatctgaccgaccttgtcaaggcgggccggtgggacgaggccatcgaccatctctcctgcttcctgccgtgcgaccttgctctgggcgcccacggncgcgtcctcctccacttcctccgcgtgcacaaggccgtccacgacatcgtctccggggcgcccgagagccgtgccgtc

SEQ ID NO: 451702 - DNA, 118 bp, Triticum aestivum
gcgctgaccaggcgccaatccgcctcgggccaggacttcccggggtcggggcaccggccggacgaccgcaagacgtggatggcggagctggggccggagcgggtgcgcgtgcaccagg

SEQ ID NO: 451703 - DNA, 344 bp, Triticum aestivum
agcacctcatcaatttgccatgcccagtgttccatacatggaatccagaacttcgcaggacttggttaggggtgagcctgaaaggtcaactcctggggatatattccctggcttcaatgtctctcctggtgtcctggctgagccatcatttcctgcaccacttcaaccccaactgggcatggtgtctcatgctggaaaatcaacaaatccgtttgacatggcatttgagtctgatgttgaagccatcgacatgtttatggatttgacctcactacaagcaacattgccggatactcatcttcccgcagaatactccatcaacttagcagagccatggatgtctc

SEQ ID NO: 451704 - DNA, 359 bp, Triticum aestivum
  unsure (1)..(359): unsure at all n locations
cccagggtttccgccgccaaatcaccggcgagatgttggaggagctgctcatcttcacgcgcggcggcctcatcctgtggtcgctggccggcgccgccgctgcgctgaagggctccccgatcgacgcanctcatccggccttcctcctcgagggccgctcagcctccgccggggccggcgccggcttcacccacggnccgcacgcgctcaggtggacctacgacaacgcgctcgggctcgtcttcgtcgccgtctacaggcgggtgctccacctgctgtacgtcgacgacctcctggccgccgtcagcgcggaattcgcgcggatctacaacccgagccgcgtgtnctacgacgagttc

SEQ ID NO: 451705 - DNA, 1105 bp, Sorghum bicolor
gagcgaggccgcactcccccccgagtccactccgaccgcacgctccgcgacgcgatggccgcgctccgcctcgcctccttcaccctccgacccgccgccgccgccgcggcgtccgcctcctccggcgcgacccccgcggcgccccggtccgcctccttcgcccgcgcggcgcgggggctaccctccctccgcctggccccgccccgccgccgcggggacctcgtcaggccccgcgccgaggcagcggcggatagctacgcgtccgcgctgtcggaggtggccgtcgagaacggcaccctcgagcagacggtctccgacctggagaagctgcagaagatcttcgccgacgagaccgtcgccgagttcttcgacaatcccaccgtcccgcgcgaggagaagaccgcgctcatcgacgagatcgccaagtcgtacgagctgcagccgcacgtcgtcaacttcatcaacgtcgtcgtcgacaacttccgcgcgacgatcttgccggagatcgtcgtcgagttcgagaacatcttcaactcgctcacgggcaccgaggtcgccaccgtcacctccgtcgtgcagctcgagtcgcaggacctcgcgcagatcgcgcagcacgtccagaagatgaccggcgccaagaacgtccgcctcaagacacagctcgacccggagctcatcgccggcttcaccgtgcagtacggccgcgacggctccagcttaatcgacatgagcgtccggaagcagatcgaggaaatcacgtccgagttcgagttgcccgacgtcccgctcgaagtctgactggcttgaggcgtccatcctcgcccttgaagcttagctgctactgtctgacgcaatggcatgaatcaagcgggaatgtcggtcctgtccccttcatacctgcagatcaatggtggtggctccaaatctccaatacatatgaacggacattctttttttgcgtttctgttttccttctttttctttttggcgggaacctgtgtaattctttctccttttttctgtggttgacagacactgtaatatgtttaaaacactcactcatctatatatagctgtgcacctcttctctcaaaaaaaaaaaaaa

SEQ ID NO: 451706 - DNA, 716 bp, Sorghum bicolor
  unsure (1)..(716): unsure at all n locations
cgtccgatcgaatcgtcccactcgtggctgccctgctcgtgctgcttgccctcgccgtatcgtccacccgcaaccgcaacgcacaagagggggaggagtccatggcgttggccggcggcatcaaggacgtgccggcgaacgagaacgacctccacctgcaggagctcgcccgcttcgccgtcgacgagcacaacaagaaggccaatgctcttctggggtacgagaagcttgtgaaggccaagacacaagtggttgctggcacgatgtactatctcactgttgaggtgaaggatggcgaagtcaagaagctctacgaagctaaggtctgggagaagccatgggagaacttcaaggagctgcaggaattcaagcctgttgaagagggtgccagcgcctaaggatctctcgtctccatgtgcaatttgctgcctgaagcgcaaaacaaagttgcagaataaggagctgcttcggaacatgcctgagcatgcccccttgtgcaatttcataaaattacagtgctatgtaatatcttaaatttccgtgccctgtgtaatatcatgaataacagttggtattatggattctaaaggtgtattaactagtaccatagatggaggaatctcatattactatgctgaagtttttgtcatggcagaattgtaacattgcttcgctgaagtctttgttgaaacttcnnnnnnnnnnnnnnnnnnnnn

SEQ ID NO: 451707 - DNA, 1461 bp, Sorghum bicolor
cgtccgcgtacgcggccgtgctccagctccaccatgggcctctcaacggcttactccccggtcggatcgcacctcgcgccggcgcctctcgggcaccgtcgctccgcccagctccaccgcccgcgccgggccctgctcgccaccgtccgatgctccgtcgacgccgccaagcaggtgcaggatggcgtggcgacggcggaggcgccggcgacgcggaaggactgcttcggggtcttctgcaccacctacgacctcaaggcggaagacaagaccaagtcgtggaagaagctagtgaacattgctgtgtcaggcgcggctgggatgatatcgaaccacctgctgttcaaacttgcctctggtgaggttttcggacaagaccaaccaatagcactgaagttacttggttcagagagatcgtttcaagctctcgaaggtgttgctatggaactggaggactcgctatatccattgctgagggaagtcagcattggtatagatccttatgaggtctttgaagatgtagattgggcccttcttattggtgctaagccccgaggtcctggcatggagcgagctgcgttactggatatcaatggtcaaatctttgctgatcaggggaaagcacttaatgccgtggcctcgaagaacgtgaaagtcttagttgttggaaatccctgtaacactaatgcgttaatttgcttgaaaaatgctccagacataccagcaaaaaattttcatgcactgacgaggttggatgaaaatagagcaaagtgccagctagcactcaaagcaggtgtattttatgacaaagtatcaaacgtgactatttgggggaaccattcgacaactcaggttcctgatttcttgaatgccaaaattgatggagaccagtgaaagaagtcattaaggataccaagtggttagaagaagagttcaccattacggttcaaaagcgtggaggtgcgctcatccaaaaatggggcagatcttcagctgcatcaaccgctgtatcaatagcggatgctattaaatccctggtaactcctaccccagaaggcgactggttctccacaggggtttatacgactggaaatccttatggcatagcagaggatatcgtgttcagcatgccatgcagatcgaagggtgatggtgattacgaactagctactgatgtgtcaatggacgattttctctgggaacggattaaaaagagtgaagctgaattgcttgctgagaagaaatgcgttgcccatcttactggagaggggaatgcatattgtgatgttccggaggataccatgctaccgggagaagtgtagtttagttacagagaagcaatagcaggggaatgcatttgtctatactatagctgagactcgagagaaacagctgcttgcaagatgcagcaactacttttacttatatatatatattgtttatattcaaaaaaaaaaaaaa

SEQ ID NO: 451708 - DNA, 2054 bp, Sorghum bicolor
gaattcggcacgaggacatctcacccagcagaagcagaagcagaagcagagccgagccaaagggcacgggtccgtttcccaacctcccaactccagcgtccagccgcctcttcctctccccaacggccgtttccagagatctttttcagtgccagccatcagcgaaggaggaggtcgagatcgaacgaggcaagagatcgacgccagcggactgctgcctgcatttcccaactgctgggaggttgcggccgagagcagagagctacagctacagctacctgacactgaaatcactgggctagctgcgtgtagaatcctcctgagatcgacttcaaaaaggcagtaaggcagggaatgagtgcaaccaaggtgaagagacgtgtgggcaagtatgagctcggccgaaccataggtgaaggcacattcgcaaaggtcaggttcgccaagaacactgagaccggagaacccgtagccatcaagatcctagataaggaaaaagtcctcaggcacaagatggtcgagcagattaagcgggaaatttcgaccatgaagttgattaagcatcctaatgttgttcggatatatgaggtgatgggaagtaaaacaaagatctacattgtgttggagtatgttactggtggcgagctttttgacacaattgctaaccatggtcgaatgagggaagatgaggcaaggagatacttccaacagttaatcaatgcagttgattattgtcatagcaggggtgtgtaccaccgggatttaaaaccagagaatttactgcttgactcatatggaaatctgaaggtctctgactttggactgagtgcgctctctcagcaaatcaaggatgatggattgctgcatacaacttgtgggactccaaactacgttgcaccagaggtcctagaagaccaaggctatgatggtgcaatggctgatttgtggtcatgtggagttatcctgtttgttctgctagctgggtatttaccttttgaggactctaatcttatgacgctgtataagaaaatatcgaatgcagaatatacatttccaccatggacgtctttccctgccaagaggttgttaacaagattccttgatccaaatccaatgacgagaataacaatccctgaaatactggaggatgaatggttcaaaaagggctacaagcgcccggagtttgacgagaaatatgacacaccattggatgatgtggatgctgtcttcaatgattcagaagagcatcacgtgacagagaagaaagaagaagaaccagtagttctcaatgcatttgaactgatttcaaggtcagcaggcctaaatcttgggaacctatttgactcagagcaggaattcaaaagagaaacaaggttcacatcaaaatgtccaccaaaagaaattgtgcgcaagattgaggaagctgcaaaacctctaggatttggtgttcagaagaaaaattacaagttgaggcttgagaaagtaaaagcagggaggaagggaaacctcaatgttgctactgagatactgcaagttgcaccctcacttcatatggtagaagtcaggaaagcaaaaggtgacactctggaattccaaaagttctacaagaacctttccaagaccttaaaggacgttgtctggaaatctgaagatctgcaaatgcaacctgcttcttagcatccactagggaaggaagatggcaaactatttgtcccatcttccaagcagattccgatttcgtagtctgggtcagcagttatgttaactgcgctctgtatgtagtatgtaccgtggttggcttggcattttgagagattgcagtgctcgttgtagccgggatgaagcctatgctatccagtaggttactaggttttgtgaatatggtgagttctgtaaatctatatgcctatgagtcatgttgtaagctgtaatactatgatcagaaaactgtgaagtgtagaagccaagtatgttctttctatgctgccccagtttctggcacttcccatgcattttgaatgaggaaaaaaaataggggcgaacccattgatatt

SEQ ID NO: 451709 - DNA, 762 bp, Sorghum bicolor
caattcggcacgagaccaaattaaagccgtgcagcatggagtacggtcagcagggacagcacggccacggcaccaccggcctcgaccagtacggcaaccctgtggccgcccggaaccgtggcatgaggaccgggaccggccatggggcaatgctgggtttgagcacggcatgcagtctggcatgggtggaacatgggcagttccagccagcgagggaaggagcataagaccgccggcatcctgcatcgctccggcagctccagctccagctcctctgaggactgacggcatgggcggaaggaggaagaagggaatcggggagaagatcaaggagaagctgcccggagcccacaaggacaaccagcacgccacggcgaccggcggcggcgccgcctacgggcagcaaggacacaccggcgcccgaacctacggtaccgagggcaccgcgtcagagaagaaaggcatcatggacaagatcaaggagaagctgcccggacagcactaatcgtccgtggctgcgttggctctctctggcgtgtgaaagccgtacttaatcactgtcgtcataataggatgatgagtccatgaataagtgtcccttatgtcgtgacatgcacggggacagtttatacttttgttgtgtggtgtgacttgcgagtgagagtttgtacgtacgaaacttgggtctgtgtactgttttagcactgctgcatcgtttgtcttcctgaaagtatatacagtagcagcatgtaggtggcttta

SEQ ID NO: 451710 - DNA, 2099 bp, Sorghum bicolor
ctagctagctcatcgggtgatcgatcagtgagctctctctttggcctagctagctgctagcagtgcaggtagccaatcaaagcagaagaactcgatcgatcgatcatcacgatcgctgctagctagctagctgctcgctctcacactagctacgtgtttttgttaatttgatatatatatataatggcgacaatggaggtagaggccgcggccgccacggtgctggccgcgcccttgctgtcctcctccgcgatcctcaaactgctgctattcgtagtgacgctctcgtacctggcccgagccctgaggcggccacgcaaaagcaccaccaagtgcagcagcacaacgtgcgcctcgcccccggccggcgttggcaacccgccgctcccaccgggtcccgtgccgtggcccgtcgtcggcaacctgccggagatgctgctgaacaagccggcattccgctggatccaccagatgatgcgcgagatgggcacggacatcgcctgcgtcaagcttggcggcgtccacgtcgtgtccatcacctgcccggagatcgcgcgggaggtgctccggaagcaggacgccaacttcatatcccgcccgctcaccttcgcctccgagacgttcagcggcgggtaccggaacgccgtgctctcgccctacggcgaccagtggaagaagatgcgccgcgtcctcacctccgagatcatctgcccgtcccgccacgcctggctccacgacaagcgcaccgacgaggccgacaacctcacccgctacgtctacaacctcgccaccaaagccgccaccggcgacgtcgccgtcgacgtcaggcacgtcgctcgtcactattgcggcaacgttatccgccgcctcatgttcaacaggcgctacttcggcgagccccaggctgacggcggtccggggccgatggaggtgctgcatatggacgccgtgttcacctccctcggcctcctctacgccttctgcgtctccgactacctcccctggctgcggggcctcgacctcgacggccacgagaagatcgtcaaggaggctaacgtggcggtgaacaggctccacgacacggtcatcgacgaccggtggaggcagtggaagagcggcgagcggcaggagatggaggacttcctggatgtgctcatcactctcaaggacgcccagggcaacccgctgctgaccatcgaggaggtcaaagcgcagtcacaggacatcacgttcgcggcggtggacaacccgtcgaacgccgtggagtgggcgctggcagagatggtgaacaacccggaggtgatggcgaaggcgatggaggagctggaccgcgtcgtcggacgggagaggctagtgcaggagtcggacattccgaagctcaactacgtgaaggcctgcatccgggaggctttccgtctgcacccggtggcgcccttcaacgtgccccacgtcgcgctcgccgacaccaccatcgccggctaccgcgttcccaagggcagccacgtgatcctgagccgcacggggctgggccgcaacccgcgcgtgtgggacgagcccctgcgcttctacccggaccgacacctcgccaccgccgcgtccgacgtcgcgctcaccgagaacgacctgcggttcatctccttcagcaccggccgccgcggctgcatcgccgcgtcgctcggcaccgccatgagcgtcatgctcttcggaaggctcctgcaggggttcacctggagcaagcccgccggggtggaggccgtggacctcagcgagtccaagagcgacaccttcatggccaccccgctggtgctgcacgctgagcccaggctgccggcgcacctctacccgtccatctccatctgattaaacgtacggccggtcgtcattatattgtatgcatataattaaagacgagcgagcctgctggtcacacttgcattgcatgtatcatcagcagggggctatgcaataagttttttttttccgcgcttgatttcgtggtgctgtgcgtattctgcgcacaccgactgtacgtacgacggcgttcagctttgtattgtaccgagttaaaaagtattattattattatcatcgacaataat

SEQ ID NO: 451711 - DNA, 461 bp, Sorghum bicolor
cgtccggacgggagaggctagtgcaggagtcggacattccgaagctcaactacgtgaaggcctgcatccgggaggctttccgtctgcacccggtggcgcccttcaacgtgccccacgtcgcgctcgccgacaccaccatcgccggctaccgcgttcccaagggcagccacgtgatcctgaggcggccacgcaaaagcaccaccaagtgcagcagcacaacgtgcgcctcgcccccggccggcgttggcaacccgccgctcccaccgggtcccgtgccgtggcccgtcgtcggcaacctgccggagatgctgctgaacaagccggcattccgctggatccaccagatgatgcgcgagatgggcacggacatcgcctgcgtcaagcttggcggcgttcacgtcgtgtccatcacctgccccgagatcgtgcgtgaggtgctccggaagcatgactccaacttt

SEQ ID NO: 451712 - DNA, 2231 bp, Sorghum bicolor
cgtccgcggacgcgtgggctagtcccccctgctccctcacccaagccgccgccgccgccaatcccctcccgtcctccgcgagaccgcaaaccgctgagagcgagaagagatggccggcaagggagacgggccggcgatcggcatcgacctcggcacgacctactcgtgcgtcggcgtgtggcagcacgaccgtgtcgagatcatcgccaacgaccaggggaaccgcaccacgccctcgtacgtcgccttcaccgactccgagcgcctcatcggagatgcggccaagaaccaggtcgccatgaaccccatcaacaccgtctttgatgccaagcggctcatcggcaggaggttctctgatgcttctgtccagagtgatatcaagctctggcccttcaaggtcatttctgggcctggtgagaagccaatgattgttgtccagcacaagggtgaggagaagcagttcgcagctgaggagatctcctctatggttctcatcaagatgcgtgagatcgctgaagcttaccttggcagcacgatcaagaatgctgttgtcacagtccctgcctacttcaacgactcacagaggcaggccacaaaggatgctggggtgattgctggcctcaacgtcctccgtatcatcaatgagccaactgctgctgctatcgcctatggtcttgacaagaaggcaaccagtgttggcgagaagaatgtcctcatctttgaccttggaggtggtaccttcgatgtctccctcctcaccatcgaggaaggcatctttgaggtcaaggccacagctggtgacacccatctgggtggtgaggactttgacaacaggatggtgaaccacttcgtccaggagttcaagaggaagaacaagaaggacatcactggcaacccgagggctctcaggaggctgaggactgcttgtgagagggcgaagaggactctatcttccactgctcagaccaccattgagatcgactctctgtacgagggcatcgacttctactccaccatcacccgtgccaggtttgaggagctcaacatggacctgttcaggaagtgcatggagcccgtggagaagtgcctgagggatgccaagatggacaagagcagcgtgcacgacgttgtccttgttggtggctccacccgtatccccagggtgcagcagctgctccaggacttcttcaacggcaaggagctgtgcaagaacatcaaccccgatgaggccgtcgcctacggtgccgctgtccaggccgccatcctgagcggcgagggcaacgagaaggtgcaggacctgctcctgctcgacgtctccccgctctccctcggcctggagaccgccggaggcgtcatgaccgtgctcatccccaggaacaccaccatccccacgaagaaggagcaggtcttctccacctactccgacaaccagcctggtgtcctcatccaggtgtacgagggcgagaggacacggacccgcgacaacaacctgctgggcaagttcgagctctccggcatcccccctgcgccccgtggtgtgccccagatcacggtgtgcttcgacatcgacgccaacggcatcctgaacgtctcggccgaggacaagacgaccggccagaagaacaagatcaccatcaccaacgacaagggccggctgtccaaggaggagatcgagaagatggtgcaggacgcggagaagtacaaggccgaggacgaggagcacaagaagaaggtggaggccaagaactcgctggagaactacgcctacaacatgcgcaacaccatcaaggacgacaagatcgcctccaagctggccggcgacgacaagaagaagatcgaggacgccatcgagggggccattaattggctcgacaacaaccagctcgccgaggtcgacgagtttgaggacaagatgaaggagctggagggcatctgcaaccccatcatcgccaagatgtaccagggcgctgctggtcctgacatggccggtggcatggatcaggatgctccgccggctggtggcagtggtgctggccccaagatccgagaagtcgactaaatgaggaattttgatagttttgcttattaaataattacaaactggatcctagtactcttttcatgcattttcctttttggccattcatcgggcccctactttatgtttaaatttattatatattattaccgtggctataaatagtgattagtatactacacttttcattcct

SEQ ID NO: 451713 - DNA, 612 bp, Sorghum bicolor
cgtccgcccacgcgtccgcccacgcgtccgcggacgcgtggggcacacgaagaaggtggaggccaagaactcgctggagaactacgcctacaacatgcgcaacacgatcaaggacgagaagatcgcgtccaagctggccggcgacgacaagaagaagatcgaggacgccatcgacgcggccatctcgtggctggacgccaaccagctcgccgaggcggacgagttcgaggacaagatgaaggagctcgagtcgctgtgcaaccccatcatcgccaagatgtaccagggcgcgggcgccgacatgggcggcgccggcggcatggacgaggacgcacccgcgggcagcggcggccctggccccaagatcgaggaggtcgactaagcggttcgttgtcaggtctgcaggttgcgctagtgggtggcagcttgcgagttatcgtcgtcgtcgtggcgtgtccgcgttattttagtaatgtttatctgtggttggttggaactttttgtggtggtggttaattaatttttggacctcgtgatggtcggttggttggtgaacaatgttatcgtggcaagcgttaagtaatactacggtattattctggttcggtattt

SEQ ID NO: 451714 - DNA, 1039 bp, Sorghum bicolor
  unsure (1)..(1039): unsure at all n locations
cgtccgcccacgcgtccgcggacgcgtgggctagtcccccctgctccctcacccaagccgccgccgccgccaatcccctcccgtcctccgcgagaccgcaaaccgctgagagcgagaagagatggccggcaagggagacgggccggcgatcggcatcgacctcggcacgacctactcgtgcgtcggcgtgtggcagcacgaccgtgtcgagatcatcgccaacgaccaggggaaccgcaccacgccctcgtacgtcgcctacggtgccgctgtccaggccgccatcctgagcggcgagggcaacgagaaggtgcaggacctgcttctgcttggcgtcacccctctctcccttggcctggagaccgccgggagagtgatgaccgtgctgatcccgaggaacaccaccatcccgaccaagaaggagcaggtcttctccacgtactccgacaaccagccgggcgtnctgatccangtgtacgagggtgagcgcgcgaggaccaaggacaagaccaccggccagaagaacaagatcacgatcaccaacgacaagggcaggcttagcaaggaggagattgagaagatggtgcaggaggctgagaagtacaaggctgaggacgaggaggtcaagaagaaggtggacgccaagaacacgctcgagaactacgcctacaacatgaggaacaccatcaaggatgacaagatcgcctccaagctcccggcagaggacaagaagaagattgaggacgccgtcgatagtgccatcagctggctggacagcaaccagctggctgaggtggacgagtttgaagacaagatgaaggagcttgaggggatctgcaaccccatcatcgcgaagatgtaccagggcgctggcgcgggcatgggcgatgctgctggcatggatgaggacgccccgtctggtgggagcggtgctggtcctaagatcgaggaggtcgattaagttgttttagtgtccgaggtttgggttggggaagtacatctgaactttgaggttcttcgtgacatggttagacgtggg

SEQ ID NO: 451715 - DNA, 506 bp, Sorghum bicolor
cgtccggaaaaaaaagggtttccagtttccacgaaccaatctctctgcaaccgcaactgcaaccagggtttcgaaggaaggactagttgttttccgttcgtagaagaggaagaggagatggcgaagggagaggggccggcgatcgggatcgacctgggcacgacgtactcgtgcgtcggcgtgtggcagcacgaccgcgtcgagatcatcgccaacgaccaggggaaccgcaccacgccgtcgtacgtcgccttcaccgacaccgagcggctcatcggcgatgccgccaagaaccaggtcgccatgaaccccaccaacaccgtcttcgacgcgaagcggttgattggttaggggttctccgacccgtctgtgcaaagtgacatgaagctatggccattcaaggtcgtggctggcccagctgacaagccgatgattgtggtcaactaccagggcgaggagtagcaagttctccgccgaggagactcctccatgggctgaccaagatg

SEQ ID NO: 451716 - DNA, 643 bp, Sorghum bicolor
ggcacgaggctcaattcctccaccgcgtacgcgctgacccggcgagtccagtagatattcttttccccaacttctccccgatactctcgacgagagcgtctctccatggccggaaagggagacgggccggcgatcggcatcgacctcggcacgacctactcgtgcgtcggggttgtggcagcatgaccgagtcgagatcatcgccaacgtcctgggcaaccgcacgacgccgtcgtatgtcgccttcaccgactccgagaggctcgtcggcgacgccgccaagaaccaggtcgccatgaaccccatcaacaccgtcttcgacgcgaagcggctcatcggccggcgcttctctgacgcgtcggtgcagagtgacgtcaagctgtggcctttcaaggtgatcccgggctccggcgacaagcccatgatcggggtgcagttcaggggcgaggagaagcagttctcggcagaggagatcagctccatgatcctgaacaagatgaaggacacggccgaggcctacctcggcaccaccatcaagaacgccgtcgtcaccgtcccggcctacttcaacgactcccagcgccaggccaccaaggacgccggcgtcatctccggtctcaacgtcatgcgcatcatcaacgag

SEQ ID NO: 451717 - DNA, 793 bp, Sorghum bicolor
cgtccgcatcaacgagcccaccgcagctgccattgcctacgggctcgacaagaaggccaccagcagtggcgagaagaacgtgctcatcttcgacctcggtggcggcaccttcgatgtgtcgctcctgaccatcgaggagggcatcttcgaggtgaaggcgaccgccggtgacacccatctgggcggggaggacttcgacaaccgcatggtcaaccacttcgtgcaggagttcaagcccaagcacaagaaggaaatcagcggcaacccgcgtgcgctgcggcgcctgcggacggcctgcgagcgtgccaagcgcacgctgtcgtccacggcgcaaacaaccatcgaaatcgactccctgttcgagggcatcgacttctactccacgatcaccaaggacaacaacctcctcggcaagttcgagctctcgggcatccctcctgctccccgcggcgtgcctcagatcacggtcaccttcgacatcgacgccaacggcatcctcaacgtctctgccgaggacaagaccaccggccagaagaacaagatcacgatcaccaacgacaagggcaggcttagcaaggaggagattgagaagatggtgcaggaggctgagaagtacaaggctgaggacgaggaggtcaagaagaaggtggacgccaagaacacgctcgagaactacgcctacaacatgaggaacaccatcaaggatgacaagatcgcctccaagctcccggcagaggacaagaagaagaatgaggacgccgtcgatagtgccatcagctggctggacagcaac

SEQ ID NO: 451718 - DNA, 469 bp, Sorghum bicolor
cgtccgcggacgcgtgggcgaggtgaaggccactgcgggtgacactcaccttggaggcgaggacttcgacaaccgcatggtcaaccacttcgtccaggagttcaagcgcaagcacaagaaggacctcagcggcaacccccgtgcgctgcgccgcctgcgcacggcctgcgagcgcgccaagcgcacgctgtcgtccaccgcccagaccaccatcgagatcgactccctgttcgagggcatcgacttctactccaccatcacccgcgcccgcttcgaggagctcaacatggacctcttccgcaagtgcatggagcccgtggagaagtgcctccgcgacgccaagatggacaagagcagcgtgcacgacgtcgtgctccgcggcggctccacccgcatccccaaggtgcagcagctgctccaggacttcttcaacggcaaggagctctgcaagagcatcaaccccgacgca

SEQ ID NO: 451719 - DNA, 2160 bp, Sorghum bicolor
  unsure (1)..(2160): unsure at all n locations
ggcacgaggctctcgcggagccgccgcaacccagggagacccccccggaagtctaaccctagatccggaccggccatggcgtctcgccgggtcgcctcctcgctcctccgctccgtctccctcctccgggccgcatcgcccgcggcgccgcgcccgcgtgccccgcctcaccgcccgtccccggccgggtacctcttcaaccgcgccgccgcctacgcctcctccgccgcggcccaggcggcgcccgccgcgtcggcgccggccaccgggaagaccgggggcggcaagatcaccgacgagttcaccggcgccggggccatcggccaggtgtgccaggtcatcggcgctgtcgtggacgtgcgcttcgacgaggggctgcccccgatcctgacggcgctcgaggtgctcgacaacaacattcgcctcgtgctcgaggtggcgcaacatctcggtgagaacatggtccgtaccatcgccatggacgggacagaggggctcgtccgcggccagcgtgttctcaacaccggctctcccatcactgtccctgttggtagggcaacgcttggacgcattatcaatgttatcggtgagcctattgatgagaggggtgatataacaacaaatcacttcctccctattcatcgtgaagcccctgctttcgttgagcaggccactgagcagcaaattcttgtaactggaatcaaggtcgtggatcttcttgcaccctaccaaaggggtggaaagattggtctctttggtggtgcaggagtgggtaaaactgtgctcattatggagcttatcaacaatgttgctaaggcccatggtggtttctctgtgtttgctggtgttggagaacgtacccgcgaaggtaatgacctgtacagggaaatgattgaaagtggtgtcattaagctaggtgacaagcagagtgaaagcaaatgcgctcttgtctacgggcagatgaacgagccccctggtgctcgtgctcgtgttgggttgactggtttgactgttgctgaacatttccgtgatgctgaaggacaagatgtgcttctttttattgacaacattttccgtttcactcaggcaaactctgaggtgtctgctcttcttggacgtatcccatctgctgtgggataccagccaacccttgccactgatcttggaggactgcaagagcgtattacgacaacaaagaagggttctattacgtctgtccaggctatctatgtgcctgctgatgacttgacggatcctgctcccgcaactacctttgcccatcttgatgctacaactgtgctgtcacgacagatctctgagcttggtatttatcctgctgtcgatccactggattccacatccagaatgctgtctccccacgtgctgggtgaggatcactacaacactgctcgtggtgttcagaaggttcttcagaattacaaaaatcttcaggatattattgctatcttgggtatggatgagctcagtgaagatgacaagttgacagtcgctcgtgctaggaagattcagcggttccttagccagccattccatgttgctgaagttttcacgggtgcacctggaaagtatgttgagctgaaggagagtgtcaaaagtttccagggtgttttggatggcaagtatgatgaccttccagaacagtcattctacatggttggaggcattgaggaagtcattgctaaggctgagaaaattgccaaggagtctgcttcataaggaggcttcttgcttgtcgaattcgaatcctgtacaagttccatttttggattttaagcgtttatttgtgcttttcgcagttaggcaggacgagctggagagccatctcctgctgagagatgcttgtttttctcttttttgttcctccaccttacacccaaataagcaactgcagtgacattgattttggctgcaccaaagttacatgactgaagaaacttgtggcctgtgtaatgcgacccatcagaccattaagttatggcttctggttggtaaaatttgttggcccccaggttcgcttcctcnnnnnnnnnnnnnnnnnnnnnnnnnnnnnnnnnnnnnnnnnnnnnnnnnnnnnnnnnnnnnnnnnnnnnnnnnnnnnnnnnnnnnnnnnnnnnnnnnnnnnnnnnnnnnnnnnnnnnn

SEQ ID NO: 451720 - DNA, 897 bp, Sorghum bicolor
cgcgccgggttggcttctcctccccctccggttcggttcggttcgggtcgggttcgtcaggttcttcgggggttccggttcgtgggtgagcggaagagatggcggcgtcggacgttgagtaccgctgcttcgtcggcggcctcgcctgggccaccgacgacaacgccctccactccgccttcagcacctacggcgaggtcctcgagtccaagatcatcctggatcgggagacgcagaggtctcgtggcttcggcttcgtcaccttctcgacggaggaggcgatgcggagcgccatcgagggtatgaacggcaaggagctcgacggccgcaacatcaccgtcaacgaggcccagtcccgcggcggccgtggaggcggcggcggcggcgggtacggcgggggccgtggaggcggtggcgggtacggccgccgtgatggaggtggtggtggctacggcggtggcggcggcggctacggcggtggccgtggaggctacggcggtggcggtggcggctatggcggtggcggcggcggctacggtggtggcagccgcggcggcggtggctacggcaactccgatgggaactggaggaactgagcggtggggcccgcgcggccaagttatcttgttcgctactgctaccatgttgtgttgttaccctagtccatagggtttatctatcatcttgttgttcgtcgtcgtcgtgtccgtgtgtttgttgttgttgcccatctgtgtttttgatcgcaagttgtgttagtgctgtgttcgtcctcgtcttgagccccgtgcatcaatcaagcatgaactgggctccagggatcgatggatgttgttgtcaagttatcagtcaatcaatgaaaagaaaaaaggtgcttcttggtgctgcaaaaaaaaa

SEQ ID NO: 451721 - DNA, 885 bp, Sorghum bicolor
ggcacgagggttggcttctcctccccctcttaccaagtcctcgtcctcggtttagggttcgttagggtttttgtggaggggagatatggcggcggcggacgtggagtaccgttgcttcgtcggtgggctcgcctgggccaccaacaacgagaccctcgagcaagccttcgccaacttcggccaggtcatcgactccaaggtcatcaccgaccgggagacggggaggtcccgcgggttcggcttcgtcaccttctcctctgagcagtccatgctcgacgccatcgagaacatgaacggcaaggagctcgacggccgcaacatcaccgtcaaccaggcccagtcccgcggcggaggcggcggcggcggtggctacggaggcggtggcggcggctacggcggccgtgagggtggcggctacggaggaggcggcggcggctacggcgggcggcgcgagggaggaggcggctacggaggcggtggctacggtggcggcggcggcggctacggcggtcgtgagggcggcggcggctatggcggcggcggcggctacggtggcaaccgcggtgactccggcggcaactggaggaactgattgtgtgggcccaccctggcttcggccaagttatcctagctatctatctatctatagtatcgtgttaccgttccgttggattctgagttacccatgtgttagtgtccgttgaacctttggattaggtgttggtacccccgtgttcgatgatgttactgtccgctttggttactttccgctatgaaatgagagaagagtgagcaaggtttttgttcgcatctaaaaaaaaaaaaaaaaaaagttaccgtgtttgattgagctcgttaataactttggctgcggctttagtgcta

SEQ ID NO: 451722 - DNA, 3128 bp, Sorghum bicolor
  unsure (1)..(3128): unsure at all n locations
atgccggagcggcaccagtcgatcgacgcgcagctgcggctgctggcccccgggaaggtctccgaggacgacaagctcgtcgagtacgacgccctcctcgtcgaccgcttccttgacatcctccaggacctgcacggcccccacctgcgcgaattcgtccaggagtgctacgagctctcggcggagtacgagaacgaccgggatgaggctcggctcggcgagctcgggagcaagctcaccagcctgccgccgggggactccatcgtcgtcgccagttccttctcgcacatgctcaacctcgccaacctcgccgaggaagtgcaggtcgcgcagcgccgccggatcaagctcaagcgtggggacttcgccgacgaggcctccgcgccgacggagtcggacatcgaggagacgctcaagcgcctcgtctcgcagctcggcaagtcgcgggaggaggtcttcgacgcgctcaagaaccagaccgtcgacctcgtcttcaccgcccaccccacgcagtccgtcaggaggtctcttctccagaagcacggcaggatccgtaactgcctgaggcagctctatgccaaggacatcactgctgacgacaaacaggagcttgacgaggcacttcagagggagattcaagctgctttcagaactgatgaaatccgcagaacccctcccactcctcaagatgaaatgcgtgctggaatgagttacttccatgaaactatatggaagggtgtaccaaaattcttgcgccgtattgacactgctctgaaaaatattgggatcaatgaacgtctcccttacaatgctcctctcattcagttctcttcctggatgggtggtgatcgtgatggaaatcctagagtaacaccagaggttacacgggatgtatgcttgttggcaagaatgatggctgctaacctgtacttctctcagatcgaagatctaatgtttgagctctctatgtggcgctgcagtgatgaacttcggatccgtgcagatgaactacatcgctcttcaaaaagagctgcaaagcactatatagaattctggaagcaagttcctccaaatgaaccatatcgtgtcatacttggtgatgtcagggataaattgtactacacacgtgaacgttctcgtcacctattgtcatctggaatttctgagattccagaggaggcaacttttactaatgttgaacagtttctggaacctcttgagctctgctatagatcattatgtgcttgtggtgacaaacctatagctgacggaagtcttcttgatttcttgcgtcaagtattcaactttgggcttgcccttgtgaagcttgacatcaggcaggaatctgatcgacacaccgatgttcttgattcaataacgacacatcttggaattggctcctatgctgaatggtccgaggagaaacgccaggattggctgttgtctgaactgaggggcaaacgtccattgtttggttctgatcttcctcagactgaagagactgctgatgttctaggcacgtttcatgtccttgcagagcttccagcagattgctttggcgcgtatatcatctcaatggcaactgccccatctgatgttcttgcggtcgagcttttgcagcgggagtgccatgtaaagcagccactgagagttgttccactctttgagaaactagcagatcttgaagcagctccagcggctgtagcacgactcttttcaattgactggtacatgaataggattaatggcaagcaggaggtcatgattggatattcagactctggcaaagatgccggccgtctctctgcagcatggcaaatgtataaagcacaagaagagctcatcaaggtggcaaagcattatggagtgaagttgacaatgtttcatggaagaggtggaacagttggcagaggaggtggtccaactcatctggccatattatctcagccaccagacacgatacatgggtcgcttcgtgtaacagttcaaggcgaagttattgagcactcctttggagaggagctcttgtgctttagaactttgcaacgctacactgcagctactcttgaacatggcatgcatcctccaatttcccccaagccagaatggcgtgctctgatggatgaaatggctgttgtagcaactaaagaatatcgatcaattgtcttccaagaaccacgcttcgttgaatacttcagatcggctacgcctgagactgaatatggtaggatgaatattggcagccgtccgtcaaagaggaagcctagcgggggaatagaatcgctccgtgcaattccatggatctttgcttggacacaaacaaggttccatctgcctgtttggcttggatttggtgcagcgatcaagcacatcatgcagaaggacatcaggaacatccatgtactgaaagaaatgtacaatgagtggccattcttcagggtcacccttgatttgcttgagatggttttcgccaagggagacccgggaattgcagctgtatatgacaaattgctagtggctgaggatttgcaatccttcggtgagcaactgaggaagaactatgaggagacaaaagagctcctccttcaggttgctggtcacaaggacgtccttgaaggcgatccttacctgaagcagcgtctgcggctgcgtgagtcctacatcaccactctgaacgtgtgccaggcctacaccctgaagcggatacgtgacccgagcttccaggtgagcccgcagccgcccctgtccaaggagttcaccgacgagagccagccggtggagctggtgcagctgaaccagcagagcgagtacgcgccaggcctggaggacacactgatcctgaccatgaagggcatcgctgccggcatgcagaataccggctaggccagatcctcggtgtacaaataacccgtcttatcctatgagacgggccggcgtcagtgtgttctggaggaatttttatgtcagagcctttttctttgtgtgcttgatgtagatgccaagggaagcttattggctgttgaagcttgatgcaaaataaattatggaactctgttttttgtttatctaataataactagcaaatatgcttccattgcattgaaactnnnnnnnnnnnnnnnnnnnnn

SEQ ID NO: 451723 - DNA, 1502 bp, Sorghum bicolor
cgtccgcccacccggaggctcctctcctcttctctcgtctccccgcccgagctcaccaacgcccctcctcgccgcggatcccccgctactccggtagaaaatggctgacgccgaggatatccagcccctcgtctgcgacaatggaaccggtatggtcaaggctgggttcgctggagatgacgccccgagggccgtcttccccagcatcgtggggcgcccgcgccacaccggtgtcatggtcgggatggggcagaaggacgcctacgtcggtgacgaggcgcagtccaagaggggtatcctgaccctcaagtaccccatcgagcacggaatcgtcagcaactgggacgatatggagaagatctggcatcacaccttctacaacgagctccgtgtggctcccgaggagcaccccgtcctcctcactgaggcgcccctgaaccccaaggctaaccgtgagaagatgacccagatcatgttcgagaccttcaacacccccgccatgtacgtcgccatccaggccgtcctctctctgtatgccagcggtcgtaccacaggtatcgtgctcgactcgggagatggtgtcagccacactgtccccatctacgaagggtacgccctcccccacgccatcctgcgtctcgacctcgctggccgcgacctcaccgactacctcatgaagatcctgactgagcgcggctactccttcaccaccactgctgagcgggaaattgtcagggacatgaaggagaagctcgcctacattgccctggactacgaccaggagatggagactgccaagaccagctcttccgtggagaagagctacgagcttcctgatggacaggtcatcaccattggggcagagcggttccgctgccctgaggtcctcttccagccatccttcattgggatggaagctgctggcattcacgagactacctacaactccatcatgaagtgcgacgtggatattaggaaggatctatatggcaacatcgtcctctctggtggtaccactatgttccctgggattgctgacaggatgagcaaggaaatcactgccttggctcctagcagcatgaagatcaaggtggttgctcctccagaaaggaagtacagtgtctggattggaggatccatcttggcatccctcagcaccttccagcagatgtggattgccaaggctgagtacgatgagtccggcccatccatcgtccacaggaaatgcttctaattctttgcgcccaagaaatgcaagccgagaggagccattatcaccagcctcctgccctgtttctttctctttttgttgctgtttcttcattagcatgaacaaagttttctgccggtctatcggccaccgctttcttctattcatcaagactgtaatatctattgctacctatgcttctcacttgtgattttggacacatatgttcggtctattcaattttaatgagatgcctgatgaggctactagcatataaaaaacggccgcaatt

SEQ ID NO: 451724 - DNA, 529 bp, Sorghum bicolor
gttcaaccccccaaaaccaatcatgtgcgacagcgaggttgctgctctggtcgtcgacaacggctccggcatgtgcaaggccggctttgccggtgacgatgccccccgcgccgtcttcccctcgattgtcggccgcccccgccaccagggtgtcatggtcggcatgggccagaaggacagctacgtcggcgacgaggcccagtccaagcgtggtatcctgaccctgaagtaccccattgagcacggcattgtcaccaactgggatgacatggagaagatctggcaccacaccttctacaacgagctccgcgttgccccggaggagcaccccgtcctcctcaccgaggcccccctcaaccccaaggccaaccgcgagaagatgacgcagatcatgttcgagaccttcaacaccccggccatgtacgtcgccatccaggccgtgctctccctgtacgcctcgggccgcaccaccggcattgtcttcgactctggcgatggtgtctcgcacaccgtccccatctacgagggc

SEQ ID NO: 451725 - DNA, 501 bp, Sorghum bicolor
tggtaacattgtgctcagtggtggctcaaccatgttccctggtattgctgaccgcatgagcaaggagatcactgcccttgcaccaagcagtatgaagatcaaggtcgtggcgccgcctgagaggaaatacagtgtctggattggagggtccatccttgcctcccttagcacgttccaacagatgtggatctcaaagggtgagtatgatgagtcaggcccagcaattgttcaccggaagtgcttctaagccttggattcattgtctttctactttattggggcttttcttttgtcgggggcttggggccttgcatgtaagctactgtgtttgagattggggttccattgagcgatattgctggatttattggttgggtccaaaccatgtacttttaagactcttaatatgttaagtggctgctatagtcgaccaatggaacgccgttcgttcctaaagtgatttgtgagaagttgcaagcagatcatccgcaatgtccaacg

SEQ ID NO: 451726 - DNA, 961 bp, Sorghum bicolor
  unsure (1)..(961): unsure at all n locations
cgtccgcggacgcgtgggttttttttacatcacatatatatgcatgatttcatccttcccaaccgtgcagcgcatcaaaaagaagttaattacaacaacatacaatgtggttgcgttccaaagctagtacacaagctagcagtctcctcgatcccagtctcgatcagaattcagacaccaagaacatcgacgacatggctcggcttgctgtggcgatcgccgtggtggcggcggcggcggtggtggtgctggcggcgacgacctcggaggcggccatctcctgcgggcaggtgagctcggccatcgcgccctgcctgtcctacgcccggggccagggctccgcaccctcagcaggctgctgcagcggcgtcaggagcctcaactccgccgcccgcaccaccgccgacaggcgcgccgcctgcaactgcctcaagaacgccgcccgtggcatcagcggcctcaacgccggcaacgccgccagcatcccctccaagtgcggcgtcagcgtcccctacaccatcagcacctccaccgactgctccagggtgaactaaacctaaacgatgatcgatcgatcgatgatccattccgccgccgccgccgtcgtcgtcgatcggcgccggagcatcgaccatggatgagtatctatctacgcctgatatgatgagatgatgagttgtctactactgctacgtcgtactactgaataaaaatctctccgtatgtacgtacgtgtcgtcgtgtacgctgtgatacgcttgcatcttagcgtatgtacgtacgtgcgtgtgtacatgtgtgtgtgagagatgtacttttgcttgttgggtttatttttgagtgcatgcactatgtgcggtgtttattatttatgtccgtgtacgtttcctctcgctcctgtggtttgtactagttcgatcactgctacatgcacacacacatctctttgtttccnnnnnnn

SEQ ID NO: 451727 - DNA, 845 bp, Sorghum bicolor
ggcacgaggcttgctctcactgcattccaaagctagcatactagcacacagtcaggcactcagatcactcagcacacacgaatagctcgatcgatcgacatggcacgcagcatgcagtttgctgtggcgatgatcgccgtcgtcgtggccgcggtgctgctggcagcggcgacgacgacgtcggaggccgccgtcacctgcgggcaggtgaactccgcgattagcccctgcctcgcctacgcccgcggcaccggcaccgcaccctccgcggcctgctgcagcggcgtcaggagcctcaactccgccgccagcagcaccgccgacaagcgcaccgcctgcaactgcctcaagagcgccgccggacgtgtcagcggcctcaacgccggcaacgccgccagcatcccctccaagtggggtcaacatcccctacaccatcagcgcctccatcgactgctccagggtgaactaaacctagctagacgacgacggcggcggcggccgcctgatcgatcgatgatccatttccgccgtcgtcgatcggcgccggagcatcgatcatgactccatgagtatcgatctatatctacgcatggatgatgatgatgagttgcctactgttacgtactatactgaataaaatctctccgtccgtacgtgtcgtcgtgtactacgctgtgatacgcctgtgtagcgtgtacgtcaacatgtgtgtgtgtacgtgagagagagaggaaccgttcatgtcctttgctcctccgatccgtcttcgtacgattttggaggagatcccggtttgtactatgttcactgttgctaccttatgatacacacatctttttgtttgc

SEQ ID NO: 451728 - DNA, 1784 bp, Sorghum bicolor
  unsure (1)..(1784): unsure at all n locations
cgccgagtagcccagccatggacgcctccctcctcctctccgtcgcgctcgcggtggtgctgatcccgctctcgctcgcgctcctcaaccggctccgcctcggccgcctgccgccgggcccgcggccgtggcccgtcctgggcaacctgcgccagatcaagccgatccggtgccgctgcttccaggagtgggcggagcggtacgggcccgtcatctccgtctggttcgggtcggggctcaccgtggtcgtctccacctccgagctcgccaaggaggtgctcaaggagaatgaccagcagctcgcggaccggccgcggaaccgctccacccagcggttcagccgcaacgggcaggacctgatctgggccgactacggcccgcactacatcaaggtgcgcaagctctgcaacctcgagctcttcacgcccaagaggctcgaggcgctgcgccccatccgcgaggacgaggtcaccgccatggtcgagtccgtttaccgcgccgccactgcccccggtaatgaaggaaagccaatggtagtgaggaaccacctttctatggtggccttcaacaacataacaagactggcatttgggaagcggttcatgaatgcaaacggtgacattgacgaacaagggcgtgagtttaagactattgtgaacaacgggatcaagattggtgcatctctctctgttgctgagtttatttggtatttgagatggttgtgtccacttaatgaggagctttacaaaactcacaatgagagaagggaccgcttgacaatgaagatcattgaggagcacgcaaagtctctcaaggagagtggtgccaagcagcactttgtggatgcactcttcaccctcaaacaacagtacgaccttagtgaagacacagttattggacttctatgggacatgatcactgctggaatggacacaacagtcatctccgttgagtgggcaatggcagagctggtcaggaaccccagggtgcagaagaagctgcaagaggagctcgaccgtgtggttggccgtgaccgcgtcatgttagagaccgacttccagaacctcccgtacctacaggccgtcgtcaaggagtcgctccggctgcacccgccgacgccactcatgctcccccacaaggccagcacgaatgtcaagatcggtggctacgacatccccaagggcgccaacgtgatggtgaacgtgtgggcagtggcacgcgatcccaaggtctggagcaacccgctggagtacaggccggagcgcttcctggaggagaacatcgacatcaagggcagcgacttcagggtgttgccgtttggtgccggccggcgtgtctgccctggtgcgcagctcggcatcaacctcgtggcctccatgatcgggcaccttctgcaccacttcgagtggtccctgccggaaggcaccagaccggaggacgtcaacatgatggagtcccccgggctcgtcacgttcatgggcacaccactacaagctgtcgccaagccgcgcctggagaaggaggagctgtacaatagggtccccgttgagatgtgaggtgcctgactgtgactgcctgctgccgcgttgaattcactgctggatttgggcttttctcgctgctgctgctttcagctaagctgttggacagatttgttcgcgttgtaaaatgtggggtgctagatgcatttcgaatctcataaaattgccacatacagttcgtcatagtctgnnnnnnnnnnnnnnnnnnnnnnnnnnnnnnnnnnnnnnnnnnnnnnnnnnnnn

SEQ ID NO: 451729 - DNA, 652 bp, Sorghum bicolor
  unsure (1)..(652): unsure at all n locations
cgtccgactacctaccactccggcagtccggccggctagctccataaaagcaaagcgcagccggccggccgggagcagcagccagccatggagacggcctccttcctctcggtggcgctggccctggcggccctcgtccccgtctcgctgctcctcctgaaccggctcctctacggcaagctgcccccggggccgcggcggcggcccgtggtgggcaacctgttcgacgtgcggccggtgcggtgccggtgctaccaggagtgggcgcgccggtacgggcccatcatgacggtgtggctcggcaccacgcccacggtggtggtgtccacgtcggagctggcaaaggaggtgctcaagacccacgaccagcacctcgccgaccgctgccgggaccgctcgtcggagaggttcagccgcggcggccaggacctcatctgggccgactacggcccgcactacatcaaggtgcgcaagctctgcaacctcgagctcttcacgcagcgccgcctcgaggcgctcagacccatccgcgaggacgaggtcaccgccatggtcgagtccgtctacaaggccggcaccgcgccgggcaatgaaaggaagccctttgggnggaagaaccacctgtcgatggtggccttcaacaacattacgc

SEQ ID NO: 451730 - DNA, 1930 bp, Sorghum bicolor
gcagagctagaagcagctcacactccacactcgtctcgcccggccataccccaaggcaagcaggggcacgggcaattaacaatggccaccaccgccaccccgcagctcctcggcggcagcgtgccgcagcagtggcagacgtgcctcctggtgctcctccctgtgctgctggtgtcctactacctcctcaccagcaggagcaggaacaggagcaggagcggcaagctgggcggggcgccgcggctgccgccgggccctgcgcagctgccgatcctgggcaacctgcacctgctgggcccgctgccgcacaagaacctccgcgagctggcgcggcggtacggccccgtgatgcagctccgtctaggcaccgtgccgacggtggtggtgtccagcgcggaggcggcgcgggaggttctcaaggtgcacgacgtcgactgctgcagccggccggcgtcgcccggtcccaagcgcctctcctacgacctcaagaacgtcggcttcgcgccctacggcgagtactggcgcgagatgcgcaagctcttcgcgctcgagctcctcagcatgcgccgcgtcaaggccgcctgctacgcgcgcgagcaggagatggacaggctcgtcgccgacctcgaccgcgccgccgcgtccaaggcctccatcgtcctcaacgaccacgtcttcgccctcaccgacggcatcatcggcaccgtcgcgttcggcaacatctacgcctccaagcagttcgcgcacaaggagcgcttccagcacgtgctggacgacgccatggacatgatggccagcttctccgccgaggacttcttccccaacgccgccggccgcctcgccgaccgcctctcgggcttcctcgcccgccgcgagcgcatcttcaacgagctcgacgtcttcttcgagaaggtcatcgaccagcacatggacccggcgcgccccgtgccggacaacggcggcgacctcgtcgacgtcctcatcaacctgtgcaaggagcacgacggcacgctccgcttcaccagggaccacgtcaaggccatcgtcctcgacaccttcatcggcgccatcgacaccagctccgtcaccatcctgtgggccatgtcggagctgatgcggaagccgcaggtgctgaggaaggcgcaggccgaggtgcgggccgccgtgggcgacgacaagccgcgcgtcaactcggaagacgccgccaagatcccgtacctgaagatggtggtcaaggagacgctgcggctgcacccgccggcgacgctgctggtgccccgggagacgatgcgggacaccaccatctgcggctacgacgtgccggccaacacgcgcgtcttcgtcaacgcctgggccatcggcagggacccggcgagctggccggcgcccgacgagttcaacccggaccgcttcgtggggagcgacgtcgactactacggctcgcacttcgagctcataccgttcggggccggccgccggatctgcccgggactcaccatgggcgagaccaacgtcaccttcaccctcgccaacctgctctactgctacgactgggcgctgccgggggccatgaagccggaggacgtcagcatggaggagaccggagcgctcacgttccaccggaagacgccgcttgtggtggtgcccaccaaatacaagaaccgccgcgccgcctagtgagcagagccgagcagagcaatggtcgacgacgacgacgacgacgactgaataagcgtgccaaagtttagtactacgtacgtacgtacctactgctactacgtacagctagccaacagtcagagttggacactgttggagctatcatccggtcctcttctttttgtgatacgtatttgttatgtgttttagtgccgcaaagcacaaaagaaataaagcccatcacagtcgcgagtcaaaaaaaaaaaaaaaa

SEQ ID NO: 451731 - DNA, 1463 bp, Sorghum bicolor
ctgcaagctagctagccttcactcaagcatcacaaaaccctactactgccaccttcagcacctgcatagatacatatatacaaacacttcacaacaatctatctgctcgatcgtcttcatcaattcccaagccaataatcaacaatggtggttcccgtgatcgacttctccaagctggagctggacggcgccgagagggcggagacactggcgcagatcgccaatggctgcgaggagtggggcttcttccagctcgtgaaccacggcatcccgctggagcttctcgagcgcgtcaagaaggtgtgctccgactgctaccgcctccgtgaggccggcttcaaggcgtcggagccggtgcgcacgctggaggcgctcctcgacgcggagcggcgcggcgaggaggtggcgcccgtggacgacctggactgggaggacatcttctacatccacgacgggagccagtggccgtccgacccgccggcgttcaaggagaccatgcgcgagtaccgcgccgagctgaggaagctcgccgagcgcgtcatggaggccatggacgagaacctcggcctggaccggggcaccatcaaggccgccttctccggcgacggccggcacgagcctttcttcggcaccaaggtcagccactacccgccgtgcccgcgcccggacctcatcactggcctgcgcgcgcacaccgacgccggcggcgtcatcctgctgttccaggacgacaaggtcggcggcctcgaggtgctcaaggacggccagtggaccgacgtgcagccgctcgcgggcgccatcgtcgtcaacaccggcgaccagatcgaggtgctcagcaacggccggtaccgcagcgcctggcaccgcgtgctgcccatgcgcgacggcaaccgccgctccatcgcttccttctacaacccggccagcgaggccaccatctcgccggcggcggtggccaccagcggcggcgaggcgtaccccaagtacatgttcggcgactacatggacgtgtacgtcaagcagaagttccaggccaaggagccaaggttcgaagccgtcaaggcggcggcgccaaagtcatctccagcggcataaataaatgggggtggaaatcgaaaattttaatatattataaataattattaatttatttgttggatataacagctgaataaataataatataagtataataaatacgggttagcacttgtggtgtttcactgtgtttaactttagtggcatggcatgatatattgttgtagcaataagtttgttgagttttaatcctatagatatagaaaagaaaaaggtgtgtctagtctttggtgtatagagtttattgagcacatgcatatccaagtattgggttttttcatgtacttaatgtgatagtggttgtatgtaagagttgtaccatcatttttcgaatgcaataaagagtgtgtttggcatgcctccgt

SEQ ID NO: 451732 - DNA, 1153 bp, Sorghum bicolor
cgtccgtgatggacgaggtggagcggctgaccaaggcgcactacgccaacttccgggaggccaagttccaggagttcgcggcgcggacgctggaggctggcgacaagggtgccgacgtcaaggacgtggactgggagagcaccttcttcgtccgccacctcccggcctccaacctcgccgacctccccgacgtcgacgaccactacaggcaagtgatgaagcaattcgcatcggagatccagaagctgtcggagaagctgctggacctgctgtgcgagaacctgggcctggagcccggctacctcaagtccgccttcgctggctccaacggccccacgttcggcaccaaggtgagcgcgtacccgccgtgcccgcgcccggacctcgtcgacggcctccgcgcgcacaccgacgccggcggcatcatcctgctgttccaggacgaccaggtcagcggcctgcagctgctcaaggacggcgagtgggtggacgtgccgcccatgcgccacgccatcgtcgtcaacatcggcgaccagctggaggtgatcaccaacggccgctacaagagcgtcatgcaccgcgtgctcacccgccccgacggcaaccgcatgtccatcgcctccttctacaacccgggcgccgacgccgtcatcttcccggcaccagcgctcgtcggcgccgccggcgccgaggaggagcgcgccggccaggccacgtacccgaggttcgtgttcgaggactacatgaacctgtacgtgcgccacaagttcgaggccaaggagccacggttcgaggccatgaagtcggccatcgccaccgcgtgatgaacaaacacactgctgccttcaattctgctccttgtcccttcgtgtcctgcattatgctttgagcttgaagccttgatgaggctgcaatgaacagtgtccatgtgcttatatgtagtttggcacggtggttatgcgtgtatcgtggaacggcgtaatgtattttggttgtctcggatctatatgtatgtacgtatatattgagtactgtatgtaaagtgtgtgtagcatctgatccaatgtatgagcagtgtgtacgtgaccaggacctgatgtgctgctattactaccacctcaagtggagggaacatgaattattagtagttctc

SEQ ID NO: 451733 - DNA, 1172 bp, Sorghum bicolor
cgtccggcaggcgacgcgactccccacgcgtccgagcagcagcagcagctagcaaccggtccaacactctcacgctcgcagagtttgctcagcaatggccgcctccaccatgtcgatctcctccacggcgatggccggcacccccatcaaggtgggctccttcggcgagggccgcatcaccatgcgcaagaccgcggccaagcccaaggtggcggcgtccggcagcccctggtacgggcccgaccgcgtcaagtacctcggccccttctccggcgagcccccgagctacctcaccggcgagttccccggcgactacggctgggacaccgcggggctgtcggccgaccccgagaccttcgccaagaaccgcgagctggaggtgatccactcccgctgggccatgctgggcgcgctcggctgcgtcttccccgagctgctcgcccgcaacggcgtcaagttcggcgaggccgtctggttcaaggccggctcccagatcttcagcgagggcgggctggactacctgggcaacccgagcctgatccacgcgcagagcatcctggccatctgggcgtgccaggtcgtgctcatgggcgccgtcgagggctaccgcgtcggcggcggcccgctcggggaagggctcgacaaggtctaccccggcggcgcgttcgacccgctcgggctcgccgatgaccccgacaccgccgcggagctcaaggtgaaggagctcaagaacggccgcctcgccatgttctccatgtttgggttcttcgtccaggccatcgtcaccggcaagggacccatcgagaacctcttcgaccatgtcgctgaccccgtcgccaacaacgcctgggcttacgccaccaacttcgtccccggcaactaaagctgatcgagcgagcgagctgaagctgagcagagcatccatgcgtgcatgtcgagcgaggtctcttgtactctacttgttgttttcaatcgtaggcgtgtagtagttgcacgagatcgatgtaaactaagcacagatcgcatgtaacatcagtgtggatgaatcaatctatatcgatggcctgtaccatattcaattttcgatcaatcatcgttaattactccatcgctctatcgatcgaccattgattctttctggagtagtaacatgaatccacgatgggttgcct

SEQ ID NO: 451734 - DNA, 2279 bp, Sorghum bicolor
gaaagattatcacaggtcaggctcaagattatcacaagtaactagggataaacgacaagcatccggggcttagtcgacctcctccatcttgctttcaccggcgtcgtcctccagagggggcatctcagctgtcagcctccgcggcctcgtcctcgtcaatgctcaggcccagcttgagcatgcggtggatgcggctgccgaaggtgttggggtcgtcgaggctgaagccggaggtgagcagcgccgtctcgaacagcagcatgacaaggtccttgacagacttgtcgttcttgtcagcctccgcgcgcttgcgcagctcctccatgatggcgttctccgggttgatctccatcgtcttcttggaggacatgtacccagacatgctggagtccctgagcgcctgggccttcatgatcctctccatgttggcggtccagccgtactcaccagtcacgaggcagcagggggagtccaccacgcggtcagagaccaccaccttctccaccttgtcgcccagcacctccttgatcaccttgcagaggccctcgaacttctccttgagctcctcctttttcttcttctcgtcctcgctctcatcaagcttcaggccctccttggtggcagagacaagcttcttgccctcaaactccttgagctgtccaatagcgtactcatcaatggcatccaccatgtacaggacttcatagcccttcttcttcagcttctcaaggaagggagagttctccacagccttcttgctctcgccagtgatgtagtagatgtcattctggccctccttcatcctggtcacatagtccttcaagctggtcagctcatctccgctcttggtggagtggtacctcaggagctcagcaatcttggtcctgttggtggagtcctcgtggatgccaagcttgaggttcttggagaaggcctcatagaacttgttgtagtcctccttgttctcggcaatctcaaagaacagctcaatgcacttcttgacaaggttcttcctgatgaccttgaggatcttgttctgctggagggtctcacgggagatattgaggggaagatcctcagagtcaacaatgcccttgacaaagctcagccactctgggatcagctcctcacagttgtccatgatgaagacacggcgaacatagagcttgatgttgttcagcttcttcctggtgtcaaagaggtcgaagggggccctctttggcacaaagagaacggccttgaactcaagctgaccctcaacagaaaagtgcttcacggcaagatgctcctcccagtcgttggtcaagctcttgtagaaagcagcatactcttccttggtgatctcctcaggcttcctcatccagattggcttctgcttgttgaccaactgccactcgtgagaaacctccttgatcttcttctttttcctctccttttcttccttctcctcatcaacatcctcaaccttgccctcctcatccttcttatcttcctcatcttcatcatcagaaatttccttctcagtggtcttctcaatccagagagaaattgggtagctgatgaactctgagtgcttcttgatcagatccttcaggcggcgctcctcaaggtactccaactgatcatccttgaggtagagcgtcatctttgtacccctgccaagttgctccccagaggtgtcacgtgtgacagtgaaggagccaccagcctgagactcccacacatactgctcatcatcgttgtgcttggtggtcacaacgaccctctcagcaacaaggtaggccgagtagaaaccaacaccgaactggccaatcatagacacatcggcaccggcagccagtgcctccatgaactcctttgtcccggaccgggcaatggtaccaaggttgttcacaaggtctgacttggtcataccaatgccactgtcaatgatggtcagcgtgttgttggccttgtcagggacaatgtggatgaacaactccggctgggcatccagcttgctcttgtccgtcaagctctcaaacctgatcttgtccaaggcatcggacgagttggagatgagctccctgaggaagatctccttgttggagtagaaggtgttgatgatgagcgagagcagctggttgatctccgcctggaaggcgaacgtctccgtctccgaggccatggctggcgccacgaccttcccggacgctaggagagcgcggcgagcaggcggcggcggcggcggcggcttgagggcagaggagaagtgcacgagacgagggtttgtgcggacg

SEQ ID NO: 451735 - DNA, 645 bp, Sorghum bicolor
ggcacgaggcacacacacacaacacgcatacacaacacagagcaagctatcatctgatcgacatggccggcgccaccatggctctcacctcccgcgcgctcgtcggcaagccggcgaccaccagcaccagggacgtcttcggcgagggccgcatcaccatgcgcaagactgctgccaagcccaagccagcggcgtccggcagcccctggtacggggccgaccgcgtcctgtacctgggtccgttctccggcgagcccccaagctacctgaccggcgagttccccggcgactacggctgggacactgccgggctgtctgcggaccccgagaccttcgccaagaaccgcgagctggaggtgatccactgccgctgggccatgctcggcgcgctcgggtgcgtgttcccggagctgctcgcccgcaacggcgtcaagttcggcgaggccgtgtggttcaaggccggctcccagatcttcagcgagggcgggctggactacctcggcaacccgagcctgatccacgcgcagagcatcctggccatctgggcgtgccaggtcgtgctcatgggcttcgtcgagggctaccgcgtcggcggcggcccgctcggcgaagggctcgacaaggtctaccccggcggcgcgtttg

SEQ ID NO: 451736 - DNA, 1037 bp, Sorghum bicolor
gtccgcgcccgcgcggccggcaagtctcactcttctgcataaacccagtgcatcaagcagcgcaatggcgagcagcaccatggctctctcctccacggccttcgccggcaaggccgtgaacgtgccgtcgtccctcttcggcgaggcccgcgtgacgatgcgcaagacggcggcgaaggccaagccggcggcggcgtccggcagcccgtggtacggccccgaccgcgtgctctacctgggcccgctctccggcgagcccccgagctacctgactggcgagttccccggcgactacggctgggacacggccgggctgtcggcggaccccgagacgttcgccaagaaccgggagctggaggtgatccactcccgctgggccatgctcggcgcgctcggctgcgtgttcccggagctgctcgcccgcaacggcgtcaagttcggcgaggccgtgtggttcaaggcgggttcgcagatcttcagcgagggcgggctggactacctgggcaacccgagcctgatccacgcgcagagcatcctggccatctgggcgtgccaggtggtgctcatgggcgccgtcgaggggtaccgcgtcgccggtggcccgctcggagaggtggtcgatcctctgtaccctggcggcagcttcgacccgcttgggctcgccgacgacccggaggcgttcgcggagctgaaggtgaaggagatcaagaacggccgcctcgccatgttctccatgttcggcttcttcgtgcaggctatcgtcaccggcaagggtccccttgagaacctcgccgaccacctcgccgaccctgtcaacaacaacgcctgggcgtacgccaccaacttcgtccccggcaagtgagcgagggcatgcttgtaccgtagacatacgtatccgtatgtactgcagggtgtaccagtatttgtgaagggagcttgggtcagagattgtaccagtagtgtatttgtatgcatgttctgacctgatcaataaaatatgctgtaaattgtataaaaaaaagagggggcccggtatc

SEQ ID NO: 451737 - DNA, 1662 bp, Sorghum bicolor
  unsure (1)..(1662): unsure at all n locations
cgcgtgcgcactcttcactccactccttgagatttgagaaccacaagggccaccccccacccaccctccaaggacatggcggacgccgtcgaccgcttgaagaccgggttcaacaagttcaagaccgaggtctatgacaagaagccggagctgttcgagcctctcaaggctggccaggcccccaagtacatggtgttcgcctgctccgactcccgtgtgtgcccgtcggtgaccctgggcctgcagcccggcgaggccttcaccgtccgcaacatcgcctccatggtgccaccctacgacaagaccaagtacagcggcaccgggtccgccatcgagtacgccgtgtgcgccctcaaggtgcaggtgctcgtcgtcattggccacagctgctgcggtggcatcagggcgctcctctccctcaaggacggtgcacctcacaacttccacttcgttgaggactgggtcaggatcggctcccctgccaaggcgaaggtgcacaaagagcatgcctcagtgccgttcgatgaccagtgctccatcctggagaaggaggccgtgaacgtgtccctcgccaacctcaagacttaccccttcgtcaaggaacggctggccaaagggaccctcaagctggtcggcgcccactacgacttcgtgtccgggaagttcctcacatgggagcctgtgatggacgccgttgaccgcttgaagagcgggttcgagcagttcaagatcgaggtctatgacaagaagccagagctttttgagcctctcaaatctggccaggcccccaggtacatggtgttcgcctgcgctgactcccgtgtgtgcccgtcggtgaccctgggcctgatgcccggcgaggccttcaccgtccgcaacatcgccgccctggtcccaggctacgacaagaccaagtacaccggcatcgggtccgccatcgagtacgccgtgtgcgccctcaaggtgcaggtgctcgtcgtcattggccatagctgctgcggtggcatcagggcgctcctctccctccaggacggcgcacctgacaccttccactttgttgaggactgggtcaagattggcttccctgccaagatgaaggtgaagaaagagaacgcttcggtgccgttcgatgaccaatgctacattctagagaaggaggccgtgaatgtgtccttggagaacctcaagacctacccattcgtcaaggaagggctggccaacggtaccttaaagctggtcggcggccactatgacttcgtgaaaggagagttcctcacatggaaagtctagagctaaggcacccggacggcccaactcctacatcatcataaatttataccacatatatacctaccgatatgcacccgatcgatgcgaatgcgcggagtactacatgcatgttttcagcaactacatatatacataccggatcgccccaatgtgaatgtaataagcaatagcattttcaaccgctttcatttctaacgccgagcttttatgtactatatatataatatgatgcataattgaccggcttgtggtcaaaagacatcaactataatccttttttcataatattgttatgaagagtttacctcttttttttgtcaaaaaaaaaaaaaaaaaagggcgggccgccnnnnnnnnnnnnnnnnnnnnnnn

SEQ ID NO: 451738 - DNA, 1163 bp, Sorghum bicolor
cgtccgcaagccttaccactccacggtttcaatcaaaaaaaagaaaagaaaaagcttagcttagctttgctcgccagacaaaccggagcagaggcagagctgcagcagcagatggcgtcgacgatcatggccgccacctcccgcgtcgtcgcggccaagacgccgttcctcggccagggccgcgccgccgccaatgccagccccctccgggacgtcgccgccgccgccagcggccggatcaccatgggcaacgacctgtggtacggcccggaccgcgtcaagtacctgggccccttctccgcgcagacgccgtcgtacctcaccggcgagttccccggcgactacgggtgggacaccgccgggctgtcggcggacccggaggcgttcgcgcggaacagggcgctggaggtgatccacgggcggtgggcgatgctgggggcgctgggctgtatcacccctgaggtgcccgcaacggcgtcaagttcggcgaggccgtctggttcaaggccggctcccagatcttcagcgagggcggtctggactacctgggcaaccccagcctgatccacgcgcagagcatcctcgccatctgggccgtccaggtcgtgctcatgggcgccgtcgagggctaccgcattgccggcgggccgctcggcgaggtcgtcgacccgctctacccaggcggcagcttcgaccccctcggcctggccgacgatcccgaggccttcgccgagctcaaggtgaaggagctcaagaacggccgcctcgccatgttctccatgttcggcttcttcgtccaggccatcgtcaccggcaagggcccgctcgagaacctcgctgaccacctggctgacccagtcaacaacaacgcctgggcctacgccaccaacttcgtccccggcaactaagctcatcagctgctcagttggctatgcaactccattgtcttttcggagagggcgtacgtggattgattgatgctgcaagttagctgcatgtgtgtctcttgtttcacgttgcatttcagggggcaagtcgagatgatgatgagttggcgttgtacactaagacgaacgatgcttgtgcaatagtagttgtggttttgtttcccggtggttaattattgatttgtcagattaaggtcatccattaatttgttcgtc

SEQ ID NO: 451739 - DNA, 1083 bp, Sorghum bicolor
ggcacgaggccgccaccgaacatttctcactgaccactgtgccgcgccgtgctcacacacagaacgacgatggccgcgtcggcgcttcaccagaccaccagcttcctcgggcaggccctggtctcccgccccgccgccgccgccgccgatgccggcggccgcatcaccatgcgccgcaccgtcaagagcgctccccagagcatctggtacggccctgaccgccccaagtaccttggcccgttctcggagcagacgccgtcgtacctgaccggcgagttccccggcgactacgggtgggacacggcggggctgtcggcggacccggagacgttcgcgcggaaccgcgagctggaggtgatccactcgcggtgggcgatgctgggcgcgctggggtgcgtgttcccggagatcctggccaagaacggcgtcaagttcggcgaggcggtgtggttcaaggccggcgcgcagatcttcacgagggcgggctggactacctgggcaacccgagcctgatccacgcgcagagcatcctcgccatctgggcctgccaggtcgtgctcatgggcgccgtcgaggggtaccgcatcgccggcggcccactcggcgaggtcgtcgacccgctctaccccggcggcagcttcgacccactcggcctcgccgacgaccccgaggccttcgccgagctcaaggtgaaggagctcaagaacggccgccttgccatgttctccatgttcggattcttcgtccaggccatcgtcaccggcaagggcccgctcgagaacctcgccgaccacctcgccgaccccgtcaacaacaacgcctgggcctacgccaccaacttcgtgcccggcaagtgaggaggtgtccggatgcatgtgagcgcgcgcgcgcactggtttcggcttgtaccatgatgtaaattactgtaccagggttcaatcaagaaggaataactgtgttcattatctcgcgccgcgtctaaatttctaatacggctcattcttttcctttttcattcatcactgtcggttttatttgcgtgaaaaatcaggtgtttgattagaagagggtcgctgaatttac

SEQ ID NO: 451740 - DNA, 799 bp, Sorghum bicolor
cagtaccgtgccgaactacgcgttcgaccacaaacgaccatggctcgcgtcggcgcttcaccagaccaccagcttcctcgggcaggccctggactacctgggcaacccgaacctggtgcacgcgcagagcatcctggccatctgggcgtgccaggtcgtgctcatgggcgccgtcgagggctaccgcgtcgccggcggcccgctcggggaggtggctcgacccgggctgtaccccggcggcagcgttcgacccgctcgggctcgccgacgaccccgaggcactccgtcgcggagctcaaggtgaaggagctcaagaacggccgcctcgccatgttctccatgttcggcttcttcgtccaggccatcgtcaccggcaagggtccccatcgagaacctcgcgcgaccacctcgccgaccccgtcaacaacaacgcctgggcctatgccaccaacttcgtccccggcaagtgaccggcaggccgcaggagtccgccatggatgtcaccacgagagcattccagcgcatggtagggtctacattgccatgaggagggtccgtggcaagtgaatttaacttttgtatagaacagtgtgttaagcgttcgattatttgggattatacatacgaatgaggtatttggcggtatcctacatttgtacagatggagacaagaaggatgatcgtgtatgaacttttggcaaaggtagctttttggctgaaactaagagaaactcctaaaaatatggtatgcacaaagtttatcctagagaattaatttaagtcaattagtcactttttc

SEQ ID NO: 451741 - DNA, 746 bp, Sorghum bicolor
  unsure (1)..(746): unsure at all n locations
cacatccatatattgcacttatcttcccagtaatactactgtacattggcgagctgcaaataagatcaacgtgtttttttggctcaaataggagccggacgaagggaagagatttagtttagtacaccaacacacatgtaggacctaacaangataattgagcgctgctacgtgggacacaaggattggttggattccactggcgaggcagtggcgccttagtacttgtaccccttgacgtacaaactttcagaggcggcggcgtccccggcgccggagccggtgtacttgcctagcccggcctcggagttggccttgcaccggacgaggaaggtggcctgcgcggcggcgacgttctccttcttgccgagccacttcttgagggtgctctgctgcagcgcgcggccgaaggagaaggacagcgtccagggcttgagcacctccagcttgttcatggcgtccaggttgtgcgtcgcctcctcctcgctctgcccgcccgacaggaacacgaccccgggcaccgccggcggcacggtgcgccgcagcgccgccaccgtgtactcccctatcacctccgcgccaaccttggggctatcggaaccgggggtgaccatgttggtcttgaggagcgtgccctcgaggaggaccttgtggtcgttgagcgacttgtagacggcggcgaggacgcgctcggtgacggcggcgcaggtcttgatgtcgtggccgccgtcggtgaggatctcgcg

SEQ ID NO: 451742 - DNA, 469 bp, Sorghum bicolor
  unsure (1)..(469): unsure at all n locations
ccgcccttttttttttntttttttttttccttctcctcatcaacatcctcaaccttgccctcctcatccttcttatcttgctcatcttcatcatcagaaatttccttctcagtggtcttctcaatccagagagaaattgggtagctgatgaactctgagtgcttcttgatcagatccttcaggcggcgctcctcaaggtactccaactgatcatccttgaggtagagcgtcatctttgtacccctgccaagttgctccccagaggtgtcacgtgtgacagtgaaggagattctcactgaccactgtgccgcgccgtgctcacacacagaacgacgatggccgcgtcggcgcttcaccagaccaccagctttctcgggcaggccctggactacctgggcaacccgaacctggtgcacgccccagagcattctggccatcttggcgtgccaagtcgtgcttatgggctttg

SEQ ID NO: 451743 - DNA, 576 bp, Sorghum bicolor
cgtgcgcacgcatacacaacacagagctaagcacccgaagaagctgtgatctgatcgacatggccgccgccaccatggctctcacctcccgcgcgctcgtcggcaagccggcgaccaccagcaccagggacgtcttcggcgagggccgcatcaccatgcgcaagactgctgccaagcccaagccagcggcgtccggcagcccctggtacggggccgaccgcgtcctgtacctgggtccgttctccggcgagcccccaagctacctgaccggcgagttccccggcgactacggctgggacactgccgggctgtctgcggaccccgagaccttcgccaagaaccgggagctggaggtgatccactgccgctgggccatgctcggcgcgctcgggtgcatgtttattgcgatgtttgtcaccatccgagcttacatgcatacatcacgaagaaagcaagtggatctgctgaccagacaacagcgaaggactgcacaaagaatggaatcataacttttatcagagggatcaggagaaataagtagttgagagcttctttcttcttatgtgagcagtcacg

SEQ ID NO: 451744 - DNA, 687 bp, Sorghum bicolor
  unsure (1)..(687): unsure at all n locations
acttcttctgcatanaactccagtgcatcaagctagcgctaatggcgagctagcacctatggctctctncctccgacggccttgcggcggcaaggtccgtgaaccgtgtctcgtcgtcctcttcttcggcnngaggcctcgcgtgaccgatgctgcaaggactnggcggcgaagggccaagctcggtcggcggcgtctcggcagcctcgtggtaccggccccgaccgcgtgctctacctgggcccgctctccggcgagcccccgagctacctgactggcgagttccccggcgactacggctgtgacacggccgggctgtcggcggaccccgagacgttcgctaagaaccgtgagctggaggtgatccactcccgctgggccatgctcggcgcgctcgggtgcgtgttcccggagctgctcgcccgcaacggcgtcaagttcggcgaggccgtgtggttcaaggcgggctcccagatcttcagcgagggcggtctggactacctcggcaacccgagcttgatccacgcgcagagcatcctggccatctgggcgtgccaggtggtgctcatgggcgccgtcgaggggtaccgcgtcgccggtggccacgttcgagaggtagtttattctatgtacggtgtcgcgcacttaacctttttgggctcctcgtcgaaaaataaaaatttttgg

SEQ ID NO: 451745 - DNA, 782 bp, Sorghum bicolor
cgtccgctcgcgcacacagcacaattgatgtccgccttccccgtccgcggctccacgtccagcagcagcatcgtcgccagcctcggcagcagccgcgcccccgcccccgcgccgtcctccgtccgccggcgccccagcctcatcaggaacgcccccgtcgtcgccgtccccgccaccctcgtgggcatggacgccgtcgagcgcttgaaggtcgggttccagaagttcaagaccgaggtctatgacaaaaagccagagctgttcgagcctctcaaggctggccaggcccccaagtacatggtgttcgcctgctccgactcccgtgtgtgcccgtcggtgaccctgggcctgcagcccggcgaggccttcaccgtccgcaacatcgcctccatggtgccaccctacgacaagaccaagtacagcggcaccgggtccgccatcgagtacgccgtgtgcgccctcaaggtgcaggtgcatcgtcgtcatcggccacagccgctgcggcggcatcagggcgctcctctccctcgaggacggcgcgcctcgacaacttccacttcgtggaggactgggtcaggatcggcggtccggccaagactaaggtgaagaccgaccacgcctcggtgccgttcgaagaccaatgctccatcctcgagaaggtacggtatatacacacgctacacatgcacatacgtacggtttctctttgaccacaccacacattgtacgtacacacacgtacgcttattggcgtctctttgaccgcgacatgcatttcgata

SEQ ID NO: 451746 - DNA, 637 bp, Sorghum bicolor
  unsure (1)..(637): unsure at all n locations
ngtccggcgagacctaccgaacgagcaccttctggataccaggccatggacgccgcatagcgcttgaaggtcgtgatacacatgtacaagaccgaggtctatgacaaaaagctcagagctgttcgagcctctcaaggctggccataacctaagtgcatggtgtacggctgttcagactccatgcagtgcccggcggtgaccctgggtctgatgctctgggaggcctttaatgaacacatcatcgacggcctggtgccaggctacgacaagaccaagtacaccggcatcgggtccgccatcgagtacgccgtgtgcgccctcaaggtgcaggtgctcgtcgtcattggccatagctgctgcggtggcatcagggcgctcctctccctccaggacggtgcacctgacaacttccactttgttgaggactgcgtcaagattggctgccctgccaagatgaaggtgaagaaagagaacgcctcgctgccggtcgatgaccaatgctcattctagagaggggcggaatggtctgggacctagaccatattctaggaggctgccaacggacccaagctgcgggcacatactctgaagggagcctacaggagttaagttggacacacggcactcactatatata

SEQ ID NO: 451747 - DNA, 1085 bp, Sorghum bicolor
cgtccgcaatcaaaaaaaaaagaaaagaaaaagcttagcttagctttgctcgccagacaaaccggagcagaggcagagctgcagcagcagatggcgtcgacgatcatggccgccacctcccgcgtcgtcgcggccaagacgccgttcctcggccagggccgcgccgccgccaatgccagccccctccgggacgtcgccgccgccgccagcggccggatcaccatgggcaacgacctgtggtacggcccggaccgcgtcaagtacctgggccccttctccgcgcagacgccgtcgtacctcaccggcgagttccccggcgactacgggtgggacaccgccgggctgtcggcggacccggaggcgttcgcgcggaacagggcgctggaggtgatccacgggcggtgggcgatgctgggggcgctgggctgtatcacccctgaggtgctcgagaagtgggtgcgcgtggacttcaaggagcccgtctggttcaaggccggcgcgcagatcttctccgagggcggcctggactacctcgggaaccccaacctggtgcacgcgcagagcatcctcgccgtgctcggcttccaggtcatcctcatgggcctcgtcgagggcttccgcatcaacggcctcgacggcgtcggcgagggcaacaacctctaccccggcggccagtacttcgaccccttgggcctcgccgacgaccccgtcaccttcgccgagctcaaggtcaaggagatcaagaacggccgcctcgccatgttctccatgttcggattcttcgtccaggccatcgtcaccggcaaggggccactcgagaacctgctcgaccacctcgatgaccccgtcgccaacaacgcctgggtctacgccaccaagttcgcgccagggtcttaagctagccggacacggcggcggcgtgccgggacattgtacactactcgtttgtcttgtgacattacatttgtaccatgaacgaatgcaaatattcttgtgctctctcatcagaactcaggaacgtcgtactggccactagttttgatcttccattccatccaatccaggtatgctccgttttagttgtt

SEQ ID NO: 451748 - DNA, 600 bp, Sorghum bicolor
cgtccggagctgctcgcccgcaacggcgtcaagttcggcgaggccgtctggttcaaggccggctcccagatcttcagcgagggcggcctggactacctgggcaaccccagcctgatccacgcgcagagcatgcctcagtgccgttcgatgaccagtgctccatcctggagaaggaggccgtgaacgtgtccctcgccaacctcaagacttaccccttcgtcaaggaacggctggccaaagggaccctcaagctggtcggcgcccactacgacttcgtgtccgggaagttcctcacatgggagcctgtgatggacgccgttgacccgttgaagagcgggttcgagcagttcaagatcgaggtctatgacaagaagccagagctttttgagcctctcaaatctggccaggcccccaagtacatgggggtcgcctgcgctgacttccgtgtgtgcccgtcggggacaaaaaacctgtatcctctcatgtctttcattcttttctttcatttcattcttttaccttttttctattaatattattttttcttttttatttattccttattaatttattccctattcattatatttattttcattt

SEQ ID NO: 451749 - DNA, 659 bp, Sorghum bicolor
attgcagttgttcgtacgagtaaaattaaagctaatctgtcttattgactgactgatacaatgtttgtatcaatttgtaaacacataatctagctctatatcttattcgtacactcgtcagcagattatccaccgtaacccactttactgtgccaactcttattcttcaagccatcaactttctcagtctccttcttcttctctcgtcttcggtctcatcaagcttcagaccttctttggtggcagagacaagtttcttgccctcaaactccttgagctgaccaacagcatactcgtcaatggcatcaaccatgtacaggacctcgtagcccctcttcttcagcttctccaggaagggggagttctccactgccgtcttgctctcaccagtgatataatagatgtcgttctgtccctcgttcatcctggtcacgtagtccttgaggctggtgtgctcatcaccactcctgatgtagcggtgtctccaacgcgcttagctcaggggcccgcagaatgagtcctcatggatgccaagcttgaggttcttggagacagccgcatgtaagctgttgtagtcctccctgctatcagcgaccttgtaaggaagtggtttacattcagaccagcagattgccaaaatgtaggagtaatttcggacg

SEQ ID NO: 451750 - DNA, 461 bp, Sorghum bicolor
cgtccgatccatctgactataagggggcaaaagaagaaaagaggagaagatgagaagttgcatttgcctccctgttatatatcaaaggagggtcaatgaagccgtccatagattcccacacctcgtcactccttgagaaccagaagcccaccccatccagtccaaggtgatggacgccgttgaccgcttgaagagcgggttcgagcagttcaagatcgaggtctatgacaagaagccagagctttttgagcctctcaaatctggccaggcccccaggtacatggtgttcgcctgcgctgactcccgtgtgtgcccgtcggtgaccctgggcctgatgcccggcgaggccttcaccgtccgcaacatcgccgccctggtcccaggctacgacaagaccaagtacaccatcttatgttccgccatcaagaacgccgcccgcacactaaaagtgcatgccctcg

SEQ ID NO: 451751 - DNA, 377 bp, Sorghum bicolor
cgtccgtcgacccacgcgtccgcactacttgtgcatgaaatgccaaaagtagctcaactggcgcaataggcgacgcagcacccatggctactctcctccacggccttcgccggcaaggccgtgaacgtgccgtcgtcaccttatcgcgtcacccaggcccgcgtgacgatgcgcaagacggcggcgaagcgccaaccgcgcggtcggccgactgccgcagtccgtggtactgcctaaagcgtttgatctacatgtgactgttgtctgcggaaagcacctgatgaatgtcaactggcgccgcggggacctacgtgcctaccacggggtgtatgtcgaccgatcccgagacgctgccacagaacccgacgatgggaggg

SEQ ID NO: 451752 - DNA, 195 bp, Sorghum bicolor
tcgccccgcgtccgtctgcaagtctcactcttctgctgggccccccctgcatccgccgcgcttggcgagcagcaccatggctctctcctccacggccttcgccggcaaggccgtgaacgtgccgtcgtccctcttcggcgaggcccgcgtgacgatccccgacgcgccggccagccgcggggtcgcagccgggac

SEQ ID NO: 451753 - DNA, 2216 bp, Sorghum bicolor
attgctgaaggttccatcgatgagacagtagttgtggcaagtgagcaagattctgagatcgtggttggaaaggagcaagctcgagctaaagtaacacaaagcattgtctttgtaactggcgaagcttctccttatgcaaagtctgggggtctaggagatgtttgtggttcattgccagttgctcttgctgctcgtggtcaccgtgtgatggttgtaatgcccagatatttaaatggtacctctgataagaattacgcaaatgcattttacacagaaaagcacattcggattccatgctttggcggtgaacatgaagttacctttttccatgagtacagagattcagttgactgggtgtttgttgatcatccctcatatcacagacctggaaatttatatggagataagtttggtgcttttggtgataatcagttcagatacacgctcctttgctatgctgcatgtgaggctcctttggtccttgaattgggaggatatatttatggacagaattgcatgtttgttgtgaatgattggcatgccagtctagtgccagtccttcttgctgcaaaatatagaccatatggtgtttataaagactcccgcagcattcttgtaatacataatttagcacatcagggtgtagagcctgcaagcacatatcctgaccttgggttgccacctgaatggtatggagctctggagtgggtattccctgaatgggcaaggaggcatgcccttgacaagggtgaggcagttaattttttgaaaggtgcagttgtgacagcagatcgaattgtgactgtcagtaagggttattcatgggaggtcacaactgctgaaggtggacagggtctcaatgagctcttaagctcccgaaagagtgtattaaacggaattgtaaatggaattgacattaatgattggaaccctgcgacggacaaatgtatcccttgtcattattctgttgatgacctctctggaaaagccaaatgtaaaagtgcattgcagaaggagctgggtttacctataaggcctgaagttcctctgattggttttattggaagattggattatcagaaaggcattgatctcattcaacttatcataccacatctcatgcgggacgacgttcaatttgtcatgcttggatctggtgacccagagctcgaagactggatgagatctacagagtcggacttcaaggataaatttcgtggatgggttggatttagtgttccagtttcccaccgaataactgccggctgcgatatattgttaatgccatccagattcgaaccttgtggtctcaatcagctatatgctatgcagtatggcacagttcctgttgtccatgcaactgggggccttagagatactgtggagaacttcaaccctttcggtgagaatggagaacagggtacagggtgggcattcgcacccctaaccacggaaaacatgtttgtggacattgcgaactgcaatttcgacatacaaggagcacaaatcttcctgggaagggctcatgaagaggggcatgtcaaaagacttcacgtgggaccatgccgctgaacaatacgaacaaatcttccagtgggccttcatcgatcgaccctatgtcatgtaaaggggaccacaagtggtgtgtccttaaagatcttcagttcttcatcctacagtggaaggatgagaaaacccctgtacattacatggaaggcggaccggctgttgggtggctccaatgtccaggttagccttacggagcctgctgctttggctggtttgtcccaaaggaccgtgatgcagtgaggaccagttgaacgacagttttgaagaataagaaggggatgctggaagcagtcgtgcaggcagcctcgcagtgatacatatggattatggaacaaactggagtcagtttctgctttgccactcactgtttaccttaagattattaccctgttgttgtcctttgttcgttagggcttataacttaatgactcatagaaaaccattccttgtttttcttgaccacttctgtgcgttctcggccgtttactagagatggccattgctgatggccgtttactatatatcgaaagcgtagctatgatggtatggaggaatcctgtaaagcgcatggtgttggactgttggtgtatgccttgtgtcccagcacgggtttccatgtttcaggtgctttatacttgtcgtgacca

SEQ ID NO: 451754 - DNA, 2441 bp, Sorghum bicolor
ggaagtcttgaatctttttctaaaggctatttgaaatttgggatcaatacaagtgaggatggaactgtatatcgcgaatgggcacctgctgcacaggaggcagagcttattggtgacttcaatgagtggaatggtgcaaaccacaagatggagaaggataaatttggtgtttggtcgatcaaaattgaccatgtcaaagggaaacctgctatccctcataattccaaggttaaatttcgctttctacatggtggagtatgggttgatcgtattcctgcatggattcgttatgcgactgctgatgcctctaaatttggagctccctatgatggtgttcattgggatcctcctgcttctgaaaggtacacttttaagcatcctcggccttcaaagcctgctgctccacgtatctatgaagcccatgtgggtatgagtggtgaaaagccagcagtaagcacatatagggaatttgcagacaatgtgttgccacgcatacgagcaaataactacaacaccgttcagttgatggcagttatggaacattcttactatgcttcttttgggtaccatgtgacaaatttctttgcggttagcagcagatcaggcacaccagaggacctaaaatatcttgttgataaggcacacagtttgggtttgcgagttctgatggatgttgttcacagccatgcaagtaataatgtcacagatggtttaaatggttatgatgttggacaaagcacccaagagtcctattttcatatgggagatagaggttatcataaactttgggacagtcggctgttcaactatgctaactgggaggtattgaggtttcttctttctaacctgagatattggctagatgaattcatgtttgatggcttccggtttgatggagttacatcaatgctgtatcatcaccatggtatcaatgtggggtttactggtaattaccaggagtatttcagtttggacacagatgtggatgcagttgtttacatgatgcttgcaaaccatttaatgcacaaactcttgccagaagcaactgttgttgctgaagatgtttcaggcatgccagtcctttgccggtcagttgatgaaggtggagttgggtttgactatcgcctggcaatggctatccctgatagatggattgactacctgaagaataaagatgactctgagtggtcgatgggtgaaatagcgcatactttgactaacaggagatatactgaaaaatgcatcgcatatgctgagagccatgatcagtctatcgttggcgacaaaactatagcatttctcctgatggacaaggaaatgtacactggcatgtcagacttgcagcctgcttcacctacaattgatcgagggattgcactccaaaagatgattcacttcatcacaatggcccttggaggtgatggctacttgaattttatggggaatgagtttggtcacccagaatggattgactttccaagagaagggaacaactggagctatgataaatgcagacgtcagtggagccttgtggacactgatcacttgcggtacaagtacatgaatgcgtttgatcaagcaatgaatgcgctcgatgagagattttccttccttttgtcatccaagcagattgtaagcgacatgaatgatgagaaaaaggttattgtctttgaacgtggagatttggtttttgttttcaattttcatcccaagaaaacttatgacggttacaaagttggatgtgatttgcctgggaaatacagagtagcactggactctgatgctttcgtctttggtggacatggaagagttggccacgacgtggatcacttcacgtcgcctgaagggataccaggggtgcctgaaacaaacttcaacaaccggccaaactcattcaaagtcctttccccaccccgcacttgtgtggcttattatcgtgtagatgaagaggctgaacgtcttcaagcgaaagcagagacaactggttctagaaagacttctccagacatcatcgatgttgatgctacccccgtcaaaacttctacagctactaaagaagacaaggaggcaacatctggtggcaaggaggatgcaagcaagaagggatggaagtttgcacgccagtcatccaataaaaacaccaaatgaagccagaagtccttgatcaggactggactggctgccagcgccctcttaatagtcctgctctactggactagccgctggtgcccttgtaacggtcctttcctgtagctcttagatgactggtgtcatctccgagcaagcactgcttgtatagttttctagatagtagacaagaataattcagggatggattgtgtgtatgtacaggaggagccatggcctgggttcacctggattttgactgggtacatggctaaatgtgccctgtccagaattaaaacttgggggttcttgga

SEQ ID NO: 451755 - DNA, 2278 bp, Sorghum bicolor
gaattcggcacgaggctgggtgcaccatagacctgactgatgcttctccccccttctcttgcagtctagcatccatttcacttcacaagggcttcttctttttactgaagtaaacaaaatcagagtacattcagcagtgcatctgctcctgaaaaaaaaaatcatgatgagacattcagaaataatgaagctattagcttttgtgctacttatgttgggatgccaacagtcttcactttgtctcgctgtcgactcccaagtcgaagcactggttgaaatgaagatgcaacttgtcgataaccgtggtgtccttagtgattggaaggataatcaaatgagcccctgctactgggaatatgttaattgtcaggacaacaaagtttcaacaataactttgagctcgtctgggttaacaggaaccttatcacccagcattgctaagctaacaactttacagcagctgaaactggataacaacaacataactggagggattcctccggagtttggaaacctatcaagtttgacaattctaaaccttggaagaaataatttaaatggatcgataccagactcccttggacaactttctaaactccaaattctggatctaagtcacaatcatttaagtgggaatatcccaagctctttctcaaatcctccatcattgaatgatattaatctagcatataataatattagcggtgaaatcccacaacatctacttcaggcggctcattacaactttacaggcaaccacttgaattgtggccaaaatttatttccatgtgaaggaggtagcacaatgacaggtggatcgaaaaattccaagctaaaggtggttattggaagcattgctggagcagtcactctttgtgtaactgtagctctagttttgctatggtggcaaagaatgcgttatcggcctgaaatcttcattgacgtgtcaggtcagaatgatcatatgcttgagtttgggcaaataaagcggttctcatggcgagagcttcagattgcaaccaactatttcagtgaacaaaatgttcttggcaagggtggttttggtaaggtgtataaaggagttcttccaggtccagacagtataaagattgcagtgaaacgactattcaatgtggagaggcatgaaggggaattggctttccttagagaagttgaattgataagcattgctgtgcacaagaacatattaaggttgataggattctgtacaacaccaacagagaggctcttggtctaccctttcatggagaatcttagtgttgcttctcgtttaagagatataaaattaaatgaaccagtattagattggtctacaagaatgcgaattgctcttggtgctgcccgtggtttggaataccttcatgagcactgcaatcccaagatcatccaccgtgacgtcaaggctgcaaatgtcctgcttgatgggaacttcgaagcagtggtaggggattttgggttagccaagatgatggacatagggaggaatacagtaacaacaggggttcgtgggactatgggccacatagctcctgagtacataaagacaggaaggccatcagtgaagacagatatctatggatatggtgtcatgctgttagagattgtgacaggagagcgtgcaattgcattccatcctgaccgtatggaagaagcaggggagatcatgctcattgatcaggtcaagctatggatggaagaagggcgactactcgacctagtagatcgcaatctaggtggcgtctacaaccttgaagagctggagaaggttacccagatagcacttctctgcacccacatggaacctagtcaacgccctacaatgtcagaggtcgtgcagatgctggaaggagagattgtcccagcagagcgttgggaggaatggcagctggctgagctccaacgacgacaacagcatgagatgaggcaacagggaaaactattcaacttcagtgaagagtctctaaacatccaggaagccattgagttgtcaactggcagatgagctgtcataagaaagtgacatgattttcactcgttccttaagtagaaaggctatatggaaatttcaggagtacgcactacaaatattgactattaggatttaggaatagtctataaggtcctgatgtaatagcttgcacaagtaactccatccaaatgctgttaatacagcgataggaccacacctagcttagaccatgtgtatattaagactatagactgttctacattttaattgcgttctgtattagtggat

SEQ ID NO: 451756 - DNA, 1415 bp, Sorghum bicolor
aagctagaggcacttgattgtgggaagccttacgatgaagccgtatgggacatggatgatgttgctggtgctttgagtactttgcgggactcagcagaagccttggacaaaaggcaaaattccccagtttctcttccaatggaaacttttaaatgccactccggagagagcctattgggggtagttgggctgataactccttggaactatcctctcctgatggctacatggaaggtagctcctgctctggctgccggttgtacagcagacgtaaagccatctgaattggcttctgtgacttgcttagagcttgctgatatctgtaaggaagtcggtctttcttccggtgtcttgaacattgtgacaggattaggtcctgatgctgtgctcctttgtcagggcagcccagatgttgacaaggtcagcattttactgggacgttttgaaactggaaagaagattatggcacgtgcagctcctatggtcaagcctgttacactggaacttggtggaaaaagtcctatagtagtatttgatgatgttgacattgacaaagctgttgagtggactctgtttgggtgcttttggaccaatggtcagattgcagcgcacatctcgtcttcttatccatacaaaattgctaaagaatttaatgagaggatggttgcatgggccaaaaatattaaggtttcggatccacttgaagagggttgcagacttgggccagttgttagtgaaggacagtatgagaagattaagaagttcatatcgaatgccaaaagcgaaggtgctactattctgaccggaggtttaagaaccgcgcatcttgagaaggggttctttattgaaccaacaattattactgatatcaccacatcaatggaaattctggagggaggagtcttggtcagtctgtgtgttaagattagcactgaagatgaagccattgaactggccaaccatacacagtatggtttggctggtgctgtcctttctggtgatcgtgagcgctgccagagattatctgaggagatcgatgctggatgtatctgggtaaactgctcacaaccctgcttctgccaagctccctggggtgggaacaagcgcagtgattttggacgtgagcttggagaagggggcattgataactacctgagcgtcaagcaagtcacggagtacatctctgatgagaagtggggttggtaccaatcccccctccaagctgtaaacgagaaaatggcacgaaaacttgtctgtttcattagaataaaataaatcttggatgccatacagaacgaacccgtgtatcaaaatcgaacatgagacactgaaagaggcacatctgcggaataaagatcgaattgagtgtttgagagaaaaaaaaaaaaaaaaaggcggccgttttagaggatcca

SEQ ID NO: 451757 - DNA, 1800 bp, Sorghum bicolor
  unsure (1)..(1800): unsure at all n locations
accgagcagccgcaggccaacctgaaagcggcggcggcggcggcagcaggtcactcctctgtcctctcgtctccagtccaccgcatcgccatggccgccgcagacgtcccccggccntctttcattggcggggactggagggagccgtgcctccctgtctgtcaaccctccacggaggccaccatcggcgacataccggcgggcacggcggaggacgtggagatgccggtcgcgcggggacgcgtttccgacggcggagcactggtcgcgtgcctctggggccgtgcgagccaactttctcatacgatcgccgccaagattaaagataggaaatctgagagcttggctttgctggagacacttgattctgggaagcctctggatgaagcaagtgcagacatggatgatgtcgctgcatgctttgagtactatgctgatctggcggaagctttagatgggaagcaacgttcaccaatctctctgcctatggaaaacttcaagtcatatgtacttaaagaaccattgggggttgttggactgatcactccttggaactatcctctgttgatggcaacttggaaggtcgcacctgccttggctgctgggtgtacagctgtattaaagccttcagaattggcttctgtgagttgcttagagcttggtgcaatatgtatggaaataggcctaccaccaggtgtcttcaatgtaattactggtctgggcctgaagctggtgctccattatcctcacatcccatgtggcataagattgcttttactcggaagtacagaaactggtaagaggataatgacttcagctgcgcaaatggttaagcccgtttcattagagcttggtggcaaaagtcctcttattgtctttgatgacattcgtgacattgacaaagctgttgaatggaccatgtttgggatcttcccaaatgctggtcaagtctgcagtgctacttctcgtctactgctgcatgagaaaattgcaaagaaattcttggatagattggttgcatgggcaaaagaatataaaagtctcagatccactggaggaaggcggcagactgggttcagttgtcagtgaaggacagtacgaaaagataaagaagttcatctcaactgcaagaagtgaaggtgccacaattctgtatggaggtgcccgaccacagcatctcaaaagagggttctttcttgaacctacaattataacagatgttagtacgtcaatgcaaatttggcgagaggaagtctttggacctgtcatctgcgttaaagaattcaggagagagagtgaagctgtggaacttgcaaatgatactcagtatggtttagctggtgccgtgatctccagtgatcaagagaggtgccgagccatttcaaaggctcttcaatctgcaattgataactgctcgcaaccatgcttcgtccaagctccatggggagggaacaagcggatgtttggtcgggagctcggagaatggggccttgataactacatgaccgtgaagcaagtcaccaagtattgctcggatgaaccgtggggatggtaccagcctccatccaagctgtgaaggggcattcattccaggagaatggagcgcatcatcattaactgttcatggacaggagcttatgtatagtacagtcgtcgtcaataaaacgtctctgatgagaagttcgttctacttgcactactacatataggttcaggactgaagagtactatactagtatcatgggttgttagtctgcattcttatcattcgaagttaataaagataattggataatctta

SEQ ID NO: 451758 - DNA, 1983 bp, Sorghum bicolor
  unsure (1)..(1983): unsure at all n locations
tgaattcgtgggcaactcaccactcaagcagctcaaacctttagccactacacagcagctatagcaagaaatggctctacttcttgcttctgccataaatcacactgcccatccagcaggccttagaagccatcccaataatgagagtttctcacggcaccacctatgttcttcaccacaaaacatcagtaagcgaaggtctaaccttagctttaggccacgagctcaaacgataagcagtgagtctgctggaatccacaggctgagcccctgggaaatccctaggagggactggttccctcctagctttctcttcggtgccgccacttcagcataccaaattgaaggtgcttggaatgaagatgggaaggggccaagcacatgggatcacttctgccacaattttccggaatggatagtggacaggagcaatggggatgttgcagcggattcgtaccatatgtacgctgaggatgtcaggttgctgaaggaaatgggcatggacgcctataggttctccatctcttggcccagaatactgccgaaggggacgctcgctggaggtattaacgagaaaggtgtcgagtactacaacaagttgatcgacttgttgttagagaacggcatagagccatatataacaattttccactgggacacgcctcaagcgctggtagacgcgtatggcggcttcttagatgaggaggattataaagattacacagacttcgctaaagtgtgctttgaaaagtttggtaagacggtgaaaaactggttgacctttaatgagccggagacattctgttctgtttcctatggaactggagtccttgccccggggcggtgctcaccgggagtaagttgtgccgttccaactggaaactcactcagcgagccatacattgttgcccacaaccttctccgagctcatgctgagactgttgatatttacaacaagtatcacaagggtgcggacggccgtatagggcttgcgttaaatgtatttggccgtgtgccatacacaaatacgtttcttgatcaacaggcccaagaaaggtccatggacaaatgcctaggatggttcttggagccagtggttcgtggtgactaccccttctccatgagagtgtcagcgagggaccgggtgccctacttcaaagaaaaagagcaagagaagctagttggttcttacgatatgatcgggataaactactacacctcaacgttctccaagcacatcgacctctcaccaaacaactcgccagtgctcaacactgacgacgcctatgccagtcaagaaaccaaagggcctgacgggaatgctattggtcctcctactggaaatgcgtggatcaatatgtaccctaaaggcctacacgatatccttatgaccatgaagaacaagtatggaaacccaccaatgtacatcactgagaacgggatgggggacattgacaagggcgatctacccaaaccagttgcgttggaagaccacacaaggctagattacatccagcgccacctctcagttcttaaacaatcaatagacttgggagcagacgtgcgcggctacttcgcgtggtctctgctggacaacttcgaatggtccagcggctacaccgagcgtttcggcatcgtctacgtcgatcgcgagaatggctgcgagcgcaccatgaagcgatcagccaggtggttgcaggagttcaatggagctgccaagaaggttgaaaataacaagattcttacgccggccggccagcttaactaattaagtagaacacgtactgcttctggctgatgtatggtatggtggcactgtgtcttctgtgcatgcctgtatggtctgaaacgacatattttactttgcacggctagaggtagtggaggcatattctccagcgccgcagctaataatgcaatgctctgttccagttcagtgttatctttttattatgcaataaaacgaagtgntcgatttgcaat

SEQ ID NO: 451759 - DNA, 1055 bp, Sorghum bicolor
gctgagggtagctgcagctggggctagctggaagggttgggagccatggggagggggcgggttgagctgaagcggatcgagaacaagatcaaccgccaggtcaccttcgccaagcgccgcaacgggctgctcaagaaggcgtacgagctctccgtgctctgcgacgccgaggtcgcgctcatcatcttctccaaccgcggcaagctctacgagttctgcagcggacagagcatcacaaaaacacttgagaggtacgaaaagcatatgaggccagatactgctgtacagaacaaggagaacgagttagtccagagcagtcggaatgagtaccttaaactgaaagcaagggtggataatttacaaaggactcagaggaatttgcttggtgaagatctggggtcacttggtatcaaagagcttgagcagctcgagaagcaacttgattcatccttaaggcacataagatccacaaggacacaacatatgcttgatcagctcactgatcttcagaggagggagcaaatgctgtgtgaagcaaataagtgccttagaagaaagctggaggagaccagcaaccaggtgcatagcaagtgtggagcacggtgccaacttactcggctacgagcggccactcccccccacagcaggccccatcacatattggcaatggattgttctttcatcccctggaagctgcagcagagccaaccctgcagatcgggttcgctcctgaacatatgaataacttcatgccgacatggctaccctgaagatggatctttgaggcaaaggaataaataaagatgcgatggccagcatcatctactactgcaagagtgacagtcatatatatatatatatatgacctagtttgtgtgtcgatgtgtcgaaacgcataaatttgtgatttgttatatgtaatgtataagcacaaacgaaacatgcaggactagttgcttgcttcgatgtatttgtgtgtatccgtgtaaagggccgtgcgcacagcatatgagtgatgagattttctctaataaggccgttatgccgccaatcgt

SEQ ID NO: 451760 - DNA, 1151 bp, Sorghum bicolor
ggggcacaaccttgatttttattgctagcttcgcccctggagccaaaaaggccctaaagcatcatcaaaacgattagcgttgcacacatcatcatcatcatcaagccattgattcagtgaagagaggacatattatctaacgagtatcccatttttacattggtttacaacatagtacaagtacaccatgcatcgcaccacgaacattccatcatcattgacagtctactccgcagtccgcccccacaaaaaaatgaagtttcatatcggccatcaacctaacaatgcatgtgcggtagcactcctcaataatgctaaacctcatttaggggtgaaggcctggaagatggtggcgtggccggggtcggcgaggtgggcgaagaggttgtcgatggggccagtgccggtgtactcggcctggaaccaggcgcccatgacggcgagcatggcgaggcgtccgttcttgatctccttggtgcgcagctccttgatcttctccggcgagccggagccccagccgagtgggtcaaaccacaggccaccagggtacccgacgtcggtgccggtgagcttgttgctggggaagatggggtcagtgttgacgcttccgggcttgatgatgtcagcccagcggcggccctcggcccagccgatgaggatgagctcgatgatgaagagggtggtggtgtcggtgaagtactgctgctcgccggcggtgtaccagaagggcgtgttgaggatgccgatcttggtcaggaactccgggatgaagatgcccgccgcgccgagcatcgcccaccggcagtgcaccagctccgcctgcacgttccaccgcaggctctccgggtcagatccgaggccccagggatcaaagccgaagtcgcccggaaggctgccgtcgagccacgggggaggggtgctgccggggaaccagatcggcctgtcggggtccgccgcggcgcgcacggcgaacgacggccgggccgcctcggtggcctgcctcagcagcgtcttgccgccgaggaaggacgtcgacgacgcgcgctgctgcccattcctggggagcgccgcgacggcggtggtggaggacgaggaggcggagacgagtgccattgagctgtgtggcgcggagcggaggggtggccgaccgg

SEQ ID NO: 451761 - DNA, 4043 bp, Sorghum bicolor
cgcatccttccgcgccgggcatgggcaccgcgtcggcgcgcgcccctacccagtcgtcgacttgatgctgctcactcgcactcgtcgcagcgccccacgccccgctatttatgcgtacttgcttgccgggagagtcgctggaggtgggcgtcctcctcccgctccagagctcgctgcttcgctccacccacccttaagcaggagtgatatctggtggtttttcaaaagaagacaaaaatgtcttcctcgaggcctgcccactcttccagttcatccagtaggactcgccagagctcccaggcaaggatattagcacaaacaacccttgatgctgaactcaatgcagagtatgaagaatctggtgattcctttgattactccaagttggttgaagcacagcggagcactccatctgagcagcaagggcgatcaggaaaggtcatagcctacttgcagcatattcaaagaggaaagctaatccaaccatttggttgcttgttggcccttgacgagaagagcttcagggtcattgcattcagtgagaatgcacctgaaatgctcacaacggtcagccatgctgtgccaaacgttgatgatcccccaaagctaggaattggtaccaatgtgcgctcccttttcactgaccctggtgctacagcactgcagaaggcactaggatttgctgatgtttctttgctgaatcctatcctagttcaatgcaagacctcaggcaagccattctatgccattgttcatagggcaactggttgtctggtggttgattttgagcctgtgaagcctacagaatttcctgccactgctgctggggctttgcagtcttacaagcttgctgccaaggcaatctccaagatccagtcactgccaggtggaagcatggaggccttatgcaataccgtggttaaggaagtctttgagcttacaggttatgacagggttatggcttacaagttccatgaagatgagcatggggaggtctttgctgagatcaccaaacctggtattgaaccttatctaggcctgcactatccagccactgatatccctcaagctgccaggtttctcttcatgaagaacaaagtcagaatgatctgtgattgccgtgcaaaatctgtgaagattattgaagatgaggcactctccattgatattagcttgtgtggttcaactcttagagcaccacatagctgtcaccttcagtatatggagaacatgaactcgattgcatcccttgtcatggctgttgtggttaatgaaaatgaagaggatgatgaacctgggcccgaacaaccaccacaacagcagaagaagaagagactgtggggtctcattgtttgccaccatgaaagccccagatatgtcccgtttccactgcggtatgcctgtgaattcttggcccaagtgtttgctgtccatgtaaacaaggagtttgaattggagaagcagatacgagagaaaagcattctgcgaatgcaaacaatgctctctgacatgctgttcaaggaagcatctcccttgagtatcgtatctgggagtccaaatatcatggacctagttaagtgtgatggtgctgctcttttgtatggggacaaagtctggcggcttcaaacggctccaaccgagtctcagatacgtgatattgccttctggctttcagaagttcatggggattccactggcttgagtactgatagcctccaggatgctggatatccaggagctgcttcccttggtgacatgatttgtggaatggcagtggctaagatcacgtccaaggacattcttttctggttcaggtcacatacagctgctgaaatcaaatggggaggtgcaaagcatgatccatctgataaggatgacaacagaaggatgcaccctaggttgtcctttaaggctttccttgaggttgtcaagatgaagagtttgccatggagcgactacgagatggatgctattcactcattgcaacttattcttagaggtacactgaatgatgccttgaagccggtccaggcatctggtttagataaccagattggtgatctcaaacttgatgggcttgctgaattgcaagcagtgacaagtgaaatggttcgcctcatggaaacagcaactgttccgatcttggcagtagatggcaatggattggtcaatggatggaatcaaaaggtagcagaattgtcagggttgagagttgatgaagctataggtagacacatacttacacttgtggaggattcttctgtatcaattgttcagaggatgctatatttagctctgcagggcaaagaagagaaggaagttcgatttgagttgaaaacacatggctccaagagggatgatggccctgttatcttggttgtaaatgcttgtgccagtcgtgaccttcatgaccatgttgttggggtgtgctttgtagcccaggatatgactgttcataagttggtcatggacaaatttactcgggttgagggggactacaaggcaatcattcacaacccaaacccgctcattcctcctatatttggtgctgaccaatttggatggtgctctgagtggaatgtagccatgaccaagcttactgggtggcacagagatgaagtgatagataagatgctccttggtgaggtttttgacagtagcaatgcttcctgccttttgaagagcaaagatgattttgtacgtctttgcattatcatcaacagtgcattagccggtgaagaggcagaaaatgctccattcggtttgtttgaccgcaatgggaaatatattgaatgccttctgtcagtgaacagaaaagtaaatgcagatggtgttgtcactggagtgttctgtttcattcatgttcctagtgatgacctgcagcatgcgctacatgtgcagcaagcctctgagcagacagcacaaagaaggttgaaggctttctcgtacatgcgacatgccatcaacaaacctctctcaggtatgctttattctagggaaacactcaagagcacaggtctgaatgaagagcagatgaggcaggtccatgttgcagatagttgtcatcgccagctaaacaagatacttgccgacttagatcaagataacattactgacaagtcaagttgcttggatttggatatggctgaatttgtgttggaagatgtggtggtgtctgctgtaagtcaagtactgataggttgccagggtaaaggtatcagagttgcttgcaacctgccagagagattcatgaagcaaaaagtttacggggatggtatccgactccaacagatcctctccgacttcttatttgtttcggtgaagttctctcctgttggtggctctgttgatatctcttccaaactgactaagaacagcattggggaaaaccttcatctcatagacttcgaacttaggatcaagcaccaaggagcaggagtcccagcagaaatattgtcacaaatgtatgaggaggacaataaagagccgtcagaggagggtttgagccttcttgtttctagaaaccttctgaggctcatgaatggtaacattcgtcacatcagggaagctggcatgtcaaccttcatcctcactgctgaacttgctgctgctccttcagcagttggacaatgaagccatcacatgctctctcagagttcattctgaaagccacggtggtttgcggagaatgggaaatgctgcagcgcgttgcatcaccgaatgcataagaaataagattgacttgtatggttatttgttagggggggaaagttgtactggcatagacgcatagtaaggttccatacttctgctctgtttgtgcctgtaaaccaactgtgcaagttttaaacttccagaaacaaagaaaaaaccaagttcaagttaatatgaataataaagtgtttttataaaaaagtgataaattattaaatttagcggcagctttggtgtcttatttctgcctacgctcccacgctctgtgtatgtggtggtacagtatactggtgtagctatgcctggtgggctaaccacggctcttgttc

SEQ ID NO: 451762 - DNA, 3966 bp, Sorghum bicolor
ctgccccgcgcaagccggctcgctgtcccactcgcgcgccacgcctgacgcctcggacccggaggtgtattccctcttcttcccccgtgcttatccgcggcggaatccaatcccctccctcatcacgtccttctcccaggcaaagcccctctttttgggcgtatgcccccgctggcgcgcctatgattcccgccgattcatccgcccgctcggtccagcaacccttgctgctgcagtgctgcggctagttcggtggcggggaaggaggaggaggagggatcttgcagtggggcgaagcggagatgtcgtcgccgttgaacaaccgggggacgtgctcccggagcagctctgcgcggtccaggcacagcgcgcgggtggtggcgcagacgcccgtggacgcgcagctgcacgccgagttcgagagctcccagcgcaacttcgactactcctcgtcggtgagcgccgccatccgaccgtcggtcagcaccagcaccgtctccacctaccaccagaccatgcagcggggcctctacatccagcccttcggctgcctgctcgccgtccacccggacaccttcacgttgctcgcctacagcgagaacgcgccggagatgctcgacctcacgccacacgcggtccccaccatcgaccagcgggacgcgctcgccgtcggcgccgacgtgcgcacgctcttccgctcgcagagctccgtcgcgctgcacaaggccgccaccttcggggaggtcaacctgctcaaccccatcctcgtgcatgccaggacgtcggggaagcccttctacgccatattgcaccggatcgacgtcggccttgtcatcgaccttgagccggtcaacccagttgacgtgccagtcactgctgcgggtgcgcttaagtcgtacaagctcgccgccaaggccatctccaggctgcagtcgctgcccagcgggaacctgtcgctgctgtgcgatgtgcttgtccgtgaggtgagcgagctcacgggctatgaccgggtcatggcgtacaagttccatgaggatgagcatggtgaggtcatttccgagtgcaggaggtctgatctggagccgtatcttggcctgcactacccagccaccgacatcccgcaggcgtccaggttcttgtttatgaagaacaaagtgaggatgatatgtgattgctctgccactctggtgaagatcattcaggatgatagcctagcacagcctctcagcctctgtggttccaccctcagggcttcccatggttgccatgcacagtacatggcaaacatgggttctgttgcatcgcttgtgatgtcagtgactataagcaatgatgaggaggaagatgttgataccgggagtgaccaacaaccgaaaggcaggaaactgtgggggctggtcgtctgccatcatacaagcccgaggttcgtccctttcccactaaggtacgcttgcgagtttctcttgcaagtatttggcatacagctaaacaaggaggtggaattggctgctcaggcaaaggagaggcacatcctcagaacgcaaacccttctttgggatatgctcctgcgggatgctcctgttgggatatttacccagtcacctaatgtgatggatctagtaaagtgcgatggagttgcattgtattaccagaaccagcttttgttgctcggatcaacaccctccgagtcagagataaagagcattgccacatggctgcaggagaaccatgatggttcaactgggctgagtactgacagcttagtggaagcaggttatcctggtgctgctgcacttcgtgaagttgtgtgtggcatggcggctataaagatctcttccaaagattttatcttctggttccgatcgcacacaacaaaggagatcaagtggggtggggctaagcatgaaccggttgacgcagatgacaatggcaggaagatgcatccacgatcttcattcaaggccttcttggaggtggttaaatggagaagtgttccctgggaggatgttgaaatggatgctattcattctttgcagttaatattacgtggctccctgcaagatgaagatgccaacagaaacaatgtaaggtccattgtaaaagctccacctgatgatacgaagaagatacaggggctacttgaactaagaacagttacaaacgagatggtccgcttaattgagacagcaaccgcccctgtcttggctgtcgacattgccggtaacataaatggatggaacaataaagctgcagaactaacagggttacctgtaatggaagccatagggaggcctctgatagatcttgttgttgttgattctattgaagtggttaagcggattttggactcagctttacaaggaattgaagagcaaaatctggaaatcaagcttaaagcattccatgaacaggaatgcaatggtccaataatcttgatggttaactcctgctgtagtcgggacctttcagagaaagtcattggagtttgctttgtaggacaagatttgaccacgcagaagatgattatggataagtatactaggatacaaggagactatgttgccatagtaaagaaccccagtgagctcatccctcccatatttatgatcaatgatcttggttcctgcttagagtggaataaagctatgcagaagattaccggtatacagagggaagatgtgatagataagttgttaattggggaggtcttcacccttcatgattatggctgtagggtgaaagatcatgctactctaacgaaacttagcatactgatgaatgcagtgatttctggtcaggatcctgagaagctcctttttggtttcttcgacacagatgggaagtatattgaatccttgctgacagtgaacaagagaataaatgctgagggtaagatcactggcgctatttgctttctgcatgtggccagtccagagcttcagcatgctctccaggtgcagaaaatgtctgaacaagctgccacaaacagttttaaggaattaacttacattcatcaagaattaaggaacccactcaatggcatgcaatttacttgcaacttattggagccttccgaattgacagaggagcagaggaaacttctttcatctaatattctctgtcaggaccagctgaaaaagattttacatgacactgatcttgaaagcattgaacagtgctatatggagatgaacacagtagagttcaaccttgaggaagctcttaatacggtcctaatgcaaggcattcctttgggcaaggaaaagcgaatttctattgaacgtgattggccggtggaaatatcacgcatgtacctttacggggacaatttaaggcttcagcaggtcctagcagactatctggcatgcgcccttcaattcacacaaccagctgaaggacctatcgtgctccaggtcattcccaagaaggaaaacattgggtctggcatgcagattgctcatttggagttcaggattgtccatccagctccaggcgtccccgaggccctgatacaggagatgttccggcacaacccagaggtgtccagggagggcctcggcctgtacatatgccagaagctggtgaaaacgatgagtggcacggtacagtacctacgagaagccgatacctcatcgttcatcatcctgatagagttcccagtcgcccagctcagcagcaagcggtccaagccttcgacgagtaaattctgacactcatgctcctggaactgcagtgagagttcggccgtgtcaaattctcgggtgtagttggtcaactgactgtgcagtctgaaacatcggttggtcagttctggtatcttagcacgtctgtgtaacgcgggtagatttggttgtttgtatttggagagatataaagctagctggctaggtgtaacgtaacttcgaccgataactgtatgtgaatgatgagctgtgaggatgaataaaagcttcacttgtgttctct

SEQ ID NO: 451763 - DNA, 898 bp, Sorghum bicolor
cgtccgagcggcaactccaaaaccaccagcggcagcaccttcaaccagcgcaagtttagtcggctcagctgatcactgaagcaatggcctccgccaacagctggaccctcgagatcccttcgccggtggctgcgcggcgcctgttctgcgccgccgtgacaccctggcacccaaggtcaactcccaaggtcaactcccacgtcgtcgccagcgcccaccccgtggaggacgacggcggcgtcggcagcgtcaggcagttcaacttcacctcattcatgccgttcagcttcatgaaggagaggctcgatttcctggacgtggacaagtgcgagtgcaagaacacgctcgtcgagggcggcaacatgcgacgtcgcatcgagaccgcggcgtcgcacatcaaggtggagcccgcggcaggcggcggcagcgtggtgaaggtggagtcgacctacaagctgctgcggggtgtggacgcgaaggacgaggaagccaaggccaaggaggcactcaccgccattttcaaggctgccgaggcctacctcgtcgccaaccccgacgcctacaactaaatctgtggattgggatgtgattccccttcctgaagttcgggtttaattttcttttactttcctggagttttcctctttttttcatactaaataaaataagctgctctatgcggtgtgtggtgtatggacgcaaatgttataagtggtttgtgatgctttgtttgtgtgattatgtatagttgtataccctcatggttcttttctatgtgggaagaaaaagggcatacatagattattcgaggtactttgttttggaatcctatgcaagttttgactgtaagaaatgtttgctcatttcgaatagatatttggagacttttcattctgct

SEQ ID NO: 451764 - DNA, 888 bp, Sorghum bicolor
ggcacgagggaaccaccaccagcagcactgccacgctcagagccacagagcctagcaccgacgtctagcgcaagtttagtcgatcggccgatcactgaagtaatggcctccgccaacagctggaccctcgagatcccttcgccggtggccgcgccacgcctgttccgcgccgccgttattgactggcacaccctggcgcccaaggtcgcttcccacgtcgtcaccagcgcccaccccgtggagggcgacggcggcgttggcagcgtcaggcagttcaacttcacctcattcatgccgttcagcttcatgaaggagaggctcgatttcctggacgtggacaagtgcgagtgcaagaacacgctcgtcgagggcggcggcataggcgttgccgtcgagaccgcggcgtcgcacatcaaggtggagcccgcggccgacggcggcagcgtggtgaaggtggagtcgacctacaagctgctgccgggcgtggacgagaaggacgaggaagccaaggccaaggaggcactcactgctattttcaagggtgccgaggcctacctcgtcgccaaccccgacgcctacaactaaattttctggattggggtgcgactccccttcccgggtggccttatacatattttctatgtacggagattgtgttttctttccagttcctttttttttcatgcaaaataaataaggctttgtccggcggactggcaacctggcatgattcgagtgaatccatgcgtatcatgcatgtaaaacgtggtcttgttgccattccatgaggtttaattcccatatatcaaaattactgttcggagcttcagaccagaaataagcagacacacaaactgaagtgtctagtatttatggcatgcaaaattt

SEQ ID NO: 451765 - DNA, 1877 bp, Sorghum bicolor
  unsure (1)..(1877): unsure at all n locations
cgacgaatcggaatacggaaaagctaaagacgatggatctcgccgacatcccgcagcagcagcggctcatggcgggcctggcgctggtggtagccaccgtcatcttcctcaagctcctcctgagcttccgctcgggcggcggcaagaagcggctgccgccgacgatcccgggggcgccggtggtgggcgggctggtgaagttcatgcgggggccgatcccgatgatccgggagcagtacgcggcgctggggagcgtgttcacggtgcccatcatcacccgcaggatcacgttcctcatcgggcccgaggtgtcggcgcacttcttcaagggcaacgaggccgagatgagccagcaggaggtgtacaggttcaacgtccccacttttggccctggcgtcgtctttgatgtggattactctgttaggcaggagcagttcaggttctttaccgaggcgttacgggctaataagcttcgtagctatgttgaccagatggttgctgaggctgaggagtacttctcaaagtggggagaaagtggcactgttgatttgaagtacgagttggagcacctcatcatactgacagctagccggtgcttgctgggaagggaggtgcgagaaaagctgttcgacgatgtttctgctctcttccatgaccttgacaatgggatacagccaatcagtgtcctcttcccatacctcccaatccctgcacataagcgccgtgacaaggcacgggcacgtttggcagaaatctttgccaccatcatcaagtcccgcaaggcctctggacaatctgaggaagacatgctgcagtgcttcattgattccaagtacaagaatgggcgccccaccactgagggtgaggtaaccgggctacttatcgcagcactctttgctggacagcacaccagctcaatcacctcaacctggaccggcgcgtacatgcttcggttcaagcagtactttgcagaagctgtagaggagcagaaggatgtcatgaaacgtcatggtgacaagattgatcatgacatcctggcagagatggatgtcctctaccgctgcatcaaggaggcccttcgtctccacccgccgctaatcatgttgcttcgccaatcacacagtgacttcaccgtgacaacaaaggaaggcaaagagtatgacatccccaagggccacattgtcgcgacatcgccatcctttgccaacaggctgccccacatctacaagaaccctgactcatatgaccctgaccgctttggtcctggtagggaggaggacaaggctgcaggcgccttctcatacatctcctttggtggcggcaggcatgggtgcctcggtgagcccttcgcctacctgcagatcaaggcgatctggacgcatctactgaggaactttgagtttgagctggtgtcgccgttcccagagaacgactggaatgccatggtggttggcatcaagggtgaggtgatggttaattacaagaggcggaagcttgttgtggacaactaagattgtggctgcaatctcttagatgcttcttcttgttgattcgattgttttcgcatgtttgtcagcatttgttcggtgcaatttctgcagtacgcacggcagctttgtaggggtgtttctattgtttaggattctgtaatttgcttcactatgggtctgccatgatctgcaacttctgcctgttagctgcctagctaagcattcctcttcgtcaaatctgtaacttgtagcatctttaagtgtgtggctatattgttgaaatcctgaatgtttatcattctcttagatnggtgtaaacacaaaaactgaacaaataacctctctgtaatgaataaactcaggtgctcagtgtgaaaaaaaaaaaaa

SEQ ID NO: 451766 - DNA, 805 bp, Sorghum bicolor
gtgccatctgtggagctggagtggtgaagggcttccagcaggggctttacatgggcaacggtggtggtgccaatgttgtcgcccccggctacaccaagggtgatggccttggcgctgagatcgttggcaccttcatcctggtctacaccgtcttctcggccactgatgccaagaggaatgccagggactcccatgttcctatccttgccccactgccaattgggttcgcggtgttcctggtccaccttgccaccatccccattactggcactggcatcaacccagctaggagccttggcgctgccatcatctacaacagggatcatgcctggagcgaccattggatcttctgggtcggccccttcattggtgctgccctggctgccatctaccaccaggtgatcatcagggccatcccgttcaagagcaggtcttaagctggtcttaagctgccgcggccgtgccgagacatgccagtccgaagaacgagcgtcttcctgtgatgtctttgtctgccctgcccacgcctaggtccaaagtcgattcctcgtctctcttcaagattgctcactgctgcactgttctgtaatctgaacccaggactttgtgtattcctgtaccgagctcagctgtgtatgtttttcttccatcgtggagaatttaagttattaccgtttgttgcaagggttcccgtctccttttatgcgttgggatcttggcaagaaagggcacatgtcatgtgaaaatgtgaatctatctgtctagtgaaatttgcatcgaaagtcaaattgattcagatttttct

SEQ ID NO: 451767 - DNA, 3330 bp, Sorghum bicolor
ggcacgaggcagaggagcagcacgagcaacacgccgcgccgcgctccaaccatctccagcttcgttcgcgcccccgggctgcaggaattccgaggacctccatggcgtccgagcggcaccactccatcgacgcgcagctccgtgccctcgcacccggcaaggtctccgaggagctcatccagtatgacgccctgctcgtcgaccgcttcctcgacatcctccaggacctccatggccccagccttcgcgaatttgtccaggagtgctacgaggtgtcggccgactacgagggcaagaaagacacgtccaagctgggggagctgggagccaagctgacggggctggcccccgccgacgccatcctggtggcgagctccatcctgcacatgctcaacctcgccaacctggcggaggaagtggagctggcgcaccgccgccggaacagcaagctcaagcacggggacttctccgacgagggctccgccaccaccgagtccgacatcgaggagacgctcaagcgcctcgtgtcgctcggcaagacccccgcggaggtgttcgaggcgctcaagaaccagagcgtcgacctcgtcttcaccgcgcatcccacgcagtccgccaggaggtcgctcctgcagaaaaacgccaggatccggaattgtctgacgcagctgagtgccaaggacgtcacggtcgaagacaagaaggagctcgacgaggctctgcacagagagatccaagcagctttcagaactgatgaaatcaggagagcacaacccaccccacaggatgaaatgcgctatgggatgagctacatccatgaaactgtatggaacggtgtgcctaagtttttgcgccgtgtggatacagccctgaagaatatcggcatcaatgagcgccttccctacgatgttcctctcattaagttctgttcttggatgggtggtgaccgtgatggaaatccaagagttactccggaggtgacaagagatgtgtgcttgctgtctagaatgatggctgcaaacttgtacatcaatcaggtcgaagacctgatgtttgagctctctatgtggcgctgcaatgatgagcttcgtgctcgagccgaagaagtccagagtactccagcttcaaagaaagttaccaagtattacatagaattctggaagcaaattcccccaaacgagccctaccgggtgatccttggtgctgtaagggacaagttatacaacacacgcgagcgtgcacgccatctgctggcaactggattttctgaaatttctgaggacgcggtatttaccaagatcgaagagttccttgagccccttgagctgtgctacaaatccctgtgtgagtgcggcgacaaggccatcgccgacgggagcctcctggacctccttcgccaggtgttcgcgttcggtctctccctggtgaagctggacatccggcaggagtcggagcggcacaccgacgtgatcgacgccatcaccacgcacctcggcatcgggtcgtaccgctcgtggcccgaggacaagcggatggagtggctggtgtcggagctgaaaggcaagcgcccactgctgcccccggaccttcccatgaccgaggagatcgccgacgtcatcggcgccatgcgcgtcctggccgagctcccgatcgacagcttcggcccctacatcatctccatgtgcacggcgccctcggacgtgctcgccgtcgagctcctgcagcgcgagtgtggcattcgccagacgctccccgtggtgccgctgttcgagaggctggccgacctgcaggcggcgccggcgtccgtggagaagctcttctccactgactggtacatcaaccacatcaacggcaagcagcaggtgatggtcggctactccgactccggcaaggacgccggccgcctgtccgcggcgtggcagctgtacgtggcgcaggaggagatggccaaggtggccaagaagtacggcgtgaagctgaccttgttccacggccgcggtggcaccgtcggcaggggcggtggcccgacgcacctcgccatcctgtcccagccgccggacaccatcaacgggtccatccgtgtgacggtgcagggcgaggtcatcgagttcatgttcggggaggagaacctgtgcttccagtctctgcagcggttcacggccgccacgctggagcacggcatgcacccgccggtgtctcccaagcccgagtggcgcaagctcatggaggagatggccgtcgtcgccacggaggagtaccgctccgtcgtcgtcaaggagccgcgattcgtcgagtacttcagatcggctacccctgagactgagtacgggaagatgaacatcggcagcaggccagccaagaggaagccgggcggcggcatcaccaccctgcgtgccatcccctggatcttctcgtggacacagacgaggttccacctccccgtgtggctgggagtcggcgccgccttcaagtgggccatcgacaaggacatcaagaacttccagaagctcaaggagatgtacaacgagtggccattcttcagggtcaccctggacctgctggagatggttttcgccaagggagaccctggcattgccggcttgtacgacgagctgcttgtcgccgaggaactcaagccctttgggaagcagctcagggacaaatacgtggagacacagcagcttctcctacagatcgctgggcacaaggacattcttgaaggcgatccttacctgaagcaggggctgcgtctgcgcaatccctacatcaccaccctgaacgtgttccaggcctacacgctgaagcggataagggaccccagcttcaaggtgacgccgcagccgccgctgtccaaggagttcgccgacgagaacaagcccgccggactggtgaagctgaacccggcgagcgagtacccgccggggctggaagacacgctcatcctcaccatgaagggtatcgccgccggcatgcagaacaccggctaggccgcttccccttcactcacctgcagagtactgcacggcaataataatcacagcttccggatggtggcgttttgtcagttttggatggagatgctgaaaactgacaccacctgttttcactatatgcatgtttatgtaatttcctcggctttggcctctttatatttttcactcttgttgtgaagtccaagtggaaaatcttggcatcttaaatatattgtaataatgaacatcatataatctacaaatttactattatgtattaatgaatcttggcagggaaaatgccactatatatgtatcccagcccattggatggactttttttaccatatgctacttt

SEQ ID NO: 451768 - DNA, 2835 bp, Sorghum bicolor
ggcacgagggttcagtatatatacgaatagcagacaaagaagaaaatgttcggtttgtgcaatgaaagtgaatagaataatcaagattgaccaatttttgtagactaacggttgaagaatgcgagtaagagtatatctgctgagacccgaaagatggtgaactatgactgagtagggtgaagtcacgagaaatcgtgatggaggctcgaagggattctgacgtgcaaatcgatcttcaaacttggtcataggggcgaaagactcatcgaaccatcgagtagctggttccctccgaagtttctctcaggatagctggagcaagaagaaattagttagatcaggtaaagcgaatgattagaggtatggggaaagtaagtttcttcgcctattctcaaactttaaataggtcttttttttttttaaaagaaaattaatttttccgaagaaaaataaaaataaaaatgctctttgtgggccaatcgtggtaagcatgactggcgatgtgggatgaaccaaacgtgaaagttaaaggtgccaaagtggatgctcatgtttagagaccagaaaaggtgtagcttgatctagacagaaggacggtggtcatggaagtcgaaaaccgctaagaagtgtgtaacaacttacctttcgaattaagttgccctgaaaatggatggcgctcaagcatcttgaaggaaaataacgacttagactttactatttattatggaaaagaataataaatatgtaggaggtatgcgtaaaaagatggtagtgaagctgattatctttgtgaaaagaagtggaactctttttcttttagtgcagatcttggctatagtagcaaatatttcaagtgaaaaccttgaagactgaagttttagagcaaggttccatgtcaatggcaatcaaacatgggtaagtcgatcctaaataatagtcaaatgatgttcaattggattgattatgaaagggaaaaaggttaaaattcctttaccatttaaatagataactttatttctttttgtaaaaaaagaaatgcaaacaattggtaacaataattaaaaaactttgataactattcattaatgaatattttagaaagagttttcttttctttttaactaaatatttaattaaagaagaagatcttcttctttaaagaaaaattgaatggaataaatattgtattaagaaattcaaaaaaattagtaagaattttatcaaagaaaattattcgtcacagaataagaaaaaattgatagaatctaaattatattcaataatccttgaaaatcaaagtaaatcatgttcattatcagcgagttatcaatggtcgtactgatcaccgcatcaggtctctaaggtgaatagcctctagttgattagaataatgcaggtaaggaaagtcggcaaattcgatccgtaacttcgggaaatggattggctcataagttcttcaacaacgacgataaaacgcccgacgaagaacatttatgaactgatacgatcaaggggaatccgactgtttaattaaaacaaagcattgcgacactttgcaacagatgtatacgtaatgtgatttctgctcagtgctctgaatgttaacgtgaagaaattcaagcaagcgcgggtaaacagcgggagtaactatgactctcttaaggtagccaaatgcctcgtcatctaattagtgacgcgcatgaatggattaacgagattcccactgtccctacttgccatctagcgaactaacagccaagggaacgggcttggccaggtcagcggggaaagaagaccctattgagcttgactctagtctgaaattgtgaagtatttttatgggtgtagaataggtgggagttgtaaaaaaacaatcttgaaataccactaccgtaaataatattttacttatctatttaaatttatgaataatgttaaaaagttattgaattttttcaacttcttgattttttctaaagagaaaaactacttttctcttataaaaaaacttatagaaaacatttcagaaggggagtttggctggggcggcacatctgttaaatgataacacaggtgtccaaagatgagctcaacaagaacagaaatcttgtgttgaacaaaagggtaaaagctacatttgattttgttgattttcaagtaggaatacaaactgtgaaagcatggcctatcgatcctttatttattttcttttaaaaaaaaatgtgtagaaaagccactacttggcgatagaggtgtcagaatagttaccatagggataactggcttgtggtggccaagcgttcagagcgacgtcactttttgattcttcgatgtcggctcttcctacactgctcgaagcagaattcggcaaggttcggattgttcacccgccaatagggaacgtgagctgggtttagaccgtcgtgagacaggttagttttaccctactgactaaaaaaaaaagtcttcttctaatagtaattcgactcagtacgagaggaacggttgattcagataattggtgccaccgttggtcgataggccaccatgcggtcaagctaccatctgttggataaaggctgaacgcctcttaagtccgaatccatgctaaattattttctaagaagaagaagaaaaacctgtgttttttttaaaaagaaaaagaataagaaatcattcaaaaagaaaaaagaagaaaaaagaagaaaaatacaaaaaagaaataaattcaatttattttttaaatcaacttgtagacgacttgacttttttaccaagagtattgtaagcagttgagtatgctcaaaaagtattttttgaattgttcatacgatc

SEQ ID NO: 451769 - DNA, 824 bp, Sorghum bicolor
ccgggccccccctctagctgctcacgcggcgagagcgggccgccgcgtgccggccgggggtcggaccgggaacggttccttcgggggccttccccgggcgtcgaacaaccgactcagaactggtacggacaaggggaatccgactgtttaattaaaacaaagcattgcgatggtccccacggatgctgacgcaatgtgatttctgcccagtgctctgattgtcaaagtgaagaaattcaaccaagcgcgggtaaacggcgggagtaactatgactctcttaaggtagccaaatgcctcgtcatctaattagtgacgcgcatgaatggattaacgagattcccactgtccctgtctactatccagcgaaaccacagccaagggaacgggcttggcggaatcagcggggaaagaagaccctgttgagcttgactctagtccgactttgtgaaatgacttgagaggtgtaggataagtgggagccctcgggcgcaagtgaaataccactacttttaacgttattttacttattccgtgggtcggaagcggggcatcgcccctccttttggctctaaggcccggccttgccgggccgatccgggcggaagacattgtcaggtggggagtttggctggggcggcacatctgttaaaagataacgcaggtgtcctaagatgagctcaacgagaacagaaatctcgtgtggctgggagtcggcgccgccttcaagtgggccatcgacaaggacatcaagaacttccagaagctcaaggagatgtacaacgagtggccattcttcagggtcaccctggacctgctggagatg

SEQ ID NO: 451770 - DNA, 550 bp, Sorghum bicolor
catagcgacgttgctttttgatccttcgatgtcggctcttcctatcattgtgaagcagaattcaccaagtgttggattgttcacccaccaatagggaacgtgagctgggtttagaccgtcgtgagacaggttagttttaccctactgatgaccgtgccgcgatagtaattcaacctagtacgagaggaaccgttgattcacacaattggtcatcgcgcttggttgaaaagccagtggcgcgaagctaccgtgtgccggattatgactgaacgcctctaagtcagaatccaagctagcaaccggcgcctgtgcccgccgctcgccccgacccacattagggcgttcgcgccccaagggcccgtgccattggctcagcctgctcggccgacgctgccgtagccggccgcctcgaagctcccttcctaacgggcggcgggctgaatcctttgcagacgacttaaaacgcgacggggcattgtaagtggcagagtggccttgctgccacgatccactgagatccagccccacgtcgcacggattcgtccctccc

SEQ ID NO: 451771 - DNA, 809 bp, Sorghum bicolor
cgtccgaccacggcaaacagctgtctacgtcattgtgtggcagtccacgcgacacaaatcagcaagacgctgacgcatgggcagaagcagtatgatacatatacaagtgcaacttgttgagattccgaggtccaaaccgagcagcctctgtagcggctacaaaactcgcatgagcagagtcacatacgtgtaggatgatccttcaacacatgtaataacgtgcgctcaattcaatataaaaccatgcgggcagcatttacaaacaaaaaaaaaaaaaaaagggcgttttgtcagttttggatggagatgctgaaaactgacaccacctgttttcactatatgcatgtttatgtaatttcctcggctttggcctctttatatttttcactcttgttgtgaagtccaagtggaaaatcttggcatcttaaatatattgtaataatgaacatcatataatctacaaatttactattatgtattaatgaatcttggcagggaaaatgccactataaaaaaaaaaaaaaaaaaaaaaaaaaaaaaaaaaaaaaaaaaaaaaaaaaaaaaaaaaaaaaaaaaaaaaaaaaaaaaaaaaaaaaaaaaaaaataaaaaaatattaaaaaaaaaaaaaaaaaataaaaaatatggggggggcccctgctttttagccccccccggagggttttttttggacccccccacaaggctctttttttgtttgggggacttaggtggttccttgacctaaaccgcccccccaaaaaaaaaggctctgctgggggggcccccctgggccaaaagggggggggcc

SEQ ID NO: 451772 - DNA, 735 bp, Sorghum bicolor
acaagcgtccggacgcgcccaacattgcacgccgccgcccgcgcgcagccgccgctgcaccccgcgccccaaccgccgccttcaagtgggccatcgacaaggacctcaagaacttccagaagctcaaggagatgtacaacgagtggccattcttcagggtcaccctggacctgctggagatggttttcgccaagggagaccctggcattgccggcttgtacgacgagctgcttgtcgccgaggaactcaagccctttgggaagcagctcagggacaaatacgtggagacacagcagcttctcctacagatcgctgggcacaaggacattcttgaaggcgatccttacctgaagcaggggctgcgtctgcgcaatccctacatcaccaccctgaacgtgttccaggcctacacgctgaagcggataagggaccccagcttcaagtgacgcgctcacacccgctgtccaaagagttccccgacgagaacaaacccccccgacttgtgaaacttaaccccgccaaccaatacccccccgggcttgaaaacacccttattcttaccattaaaggtattcccccccgcattccaaacaaccgcttagcccgtttccctttaattaacttccaaattcctgacacgaattattattaccactttccgattggtgccttttgttcatttttgattgagattcttaaaacctacaccacctcttttcactatattcattttta

SEQ ID NO: 451773 - DNA, 502 bp, Sorghum bicolor
cgtgcgctgcgagactcgtacatcattcaggtacgcgaccgggcgatcagagtatgtatgacgcgactaatacgattagctgtacgctctggccgaagaagtgcagagtactccagctgcaaagaaagttaccaagtattacatagaattctgggagcaaattcccccaaacgagccctacccggtgatccttggtgctgtaagggacaagtgatacaacacacgcgagcgtgcacgccattgtgcactggatttttgaaattctgaggacgcggattaccaagatcgaagagttcttgagccctggctggctcaaatccttgtgagtggggacaggcatgcgacgagcctcgactcttgcgggttcggtcggcttctgggactgacatcgagagcgacggcacgcggacacgctacaccactggtgggcgaccgtcgggccgagacagcgtggagggtgggtcgactgaaggaagcgcccactgtggccccgaccttccat

SEQ ID NO: 451774 - DNA, 1579 bp, Sorghum bicolor
atgggcagcaacgcgccgcctccgccgacgcctcacgtggtgctggtcccgttcccggggcagggccacgtcgcgccgctgatgcagctggcgcgcctcctccacgcccggggcgcgcgcgtcaccttcgtctacacccagtacaactaccgccgcctcctgcgcgccaagggcgaggccgccgtcaggccccccgccacctcctccgcgaggttccgcatcgaggtcatcgacgacggcctctccctctccgtgccgcagaacgacgtcggggggctcgtcgactccctgcgcaaaaactgcctccacccgttccgcgccctgctgcgccgcctggggcaggaggtggaggggcaagacgcgccgcccgtcacctgcgtcgtcggcgacgtcgtcatgaccttcgccgccgcagctgccagggaggccggcatccccgaggtgcagttcttcacggcctcagcatgcggactcttgggctacttgcactacggcgagctcgtcgaacgaggcctcgtccctttcagagacgccagcctcctcgccgacgacgattacctggacacgccgctggagtgggtgcccgggatgagccacatgcggctcagggacatgccgacgttctgccgcaccacggaccccgacgacgtcatggtgtccgccacgctccagcagatggagagcgccgccggctccaaggccctcatcctcaacaccctgtacgagctcgagaaggacgtggtggacgcgctcgccgccttcttcccgccgatctacaccgtggggccgctcgccgaggtcatcgcgtcctccgactccgcctccgccggcctcgccgccatggacatcagcatctggcaggaggacacgcggtgcctgtcgtggctcgacgggaagccggccggctccgtggtgtacgtcaacttcggcagcatggccgtcatgacggccgcgcaggcgcgggagttcgcgctgggcctggcaagctgcggctccccgttcctgtgggtgaagcgccccgacgtggtggaaggcgaggaggtgctgctgccggaggccctgctggacgaggtggctcgcggcaggggcctcgtggtgccatggtgcccgcaggcagcagtgctcaagcacgccgccgtgggactgttcgtctcgcactgcggatggaactccctgctggaggcgacggcggcggggcagccggtgctcgcctggccctgccacggggaacagaccaccaactgcaggcagctgtgcgaggtctggggcaacggcgcgcagctgcccagagaagtggagagcggcgcggtggcccgtctggtgagggagatgatggtcggggacctgggcaaggagaagcgggcgaaggcggcggagtggaaggcggcggcggaggccgcggccaggaaaggcggcgcgtcgtggcgtaatgttgaacgcgtggtgaacgacctgctgctggtcgggggcaagcagtgacatgcatgcatgcatggatgccaacccggttggcagatcgagtttgcaataagtggttctgattacacaaatgaaataatttccgtacacttaatttccc

SEQ ID NO: 451775 - DNA, 1039 bp, Sorghum bicolor
tgcgtccgagaattcagtcggcggcgatgggtatcctctcgctcatcaccggcaaggcgggcgccagcgggttcgggtccgcgtccacggcggagcaggtcaccgacggcgccgacgccagccgcctcaccgtcgtcatcacaggaggagctagtggcattggtctggagacctcaagagtcggcgcccggagaggagcccatgtggtcattgctgctagaaacacagaggctgcatcagatgcatggatgaccatcttggtgaagaacccaacagcacgtattgatgttctgaagcttgacctcagctccctcaagtctgtcagggctttcgcggaccagttcaactcgatgaaacttcctctgaacatcctgataaataatgcaggtgtgatgttctgcccttttcaactgtctaaagatggggttgaaatgcaattcgcgaccaatcatctcggacactttctgctcaccaatctcctccttgatactataaaagccactgccaagtctactggtattgagggtcgcattgtgaacttgtcatcagttgcccaccaccatacatatccaaagggaattgactttgataaactcaacgatgagaaaatatacaatgacaaaatggcttatggacagtctaagctggcaaacttactgcatgcgaatgagctctctagaaggctgaaggcagaaggagcaaacatcacagttaacagtgtccatcctggattgatcatgaccaatttgatgaggcactcctttgttctcatgaaggtgcttcaggttgccacttatatactgtggaagaatgtaccccagggagccgcaactacttgttatgcaggactgaaccctcaactcaagggagtgactggaaaatactttgctgactgcaacgtggagaagacgagcaagctggcgaggagcgaggagttggcgaagcaactctgggacttcagcgaggagctgatcaagtctgcgaaatgagagccgaaagagctggatcagagaaatgttctgttcctgcttggcatctg

SEQ ID NO: 451776 - DNA, 1022 bp, Sorghum bicolor
cgtccgaaaaaatctgggaggcgtctcctattccaaatcaaggcctcagcaggcccttctaccgacaagaattttatgcctggccatatattcattcagattatcaaatggtgcgtcagccactaccttatggttttgacaaccaattttatcagataaatagggaccatggtttccctattgaaaacagagttcagtatcttccattcaagatgctccctcaaggtcacccccatgatgcacagcttcaggaatttcagtatttcgtggttattgactttgaagcaacctgtgacaaggtgaacaatccatttccacaagaaatcattgagtttccatctgtcttggttaacagtgcaactggaaaactcgaagagtgcttgcaaacatatgttcggccgacgtatcatcaatttttgaccgatttttgcaaggagcttactggcatacaacagattcaggtggacagaggtgtgcctctaggtgaagccttactcatgcatgacaagtggctagaggacaagggcatcaggaacacaaactttgctattgtgacctggtctaactgggactgccgtacaatgctggagtcagaatgccgatttaagagaatcaggaagcccccttattttaacaggtggatcaacttgaaggtacctttccaggaagtgtatggggatgtccgctgcaacctgaaggaggcagtacagttggctggccttacatgggaggggcgtgctcactgtgggctcgatgatgcccgaaatactgctcgcctcctggcacttatgatgcaccggggtttcaaggtttctatcaccaactcacttgtgtggcaacctgctccacagtcaaccacttgccaattatcccctgaccgctctccagatccagttcaacagcagcagaaaccaaaggagatgctgggatctcctgtgcaggttaacccatatgccacctccgcaaggaaagacagagcgatgtactgttactgtggtgtgcttagcaagtggagcgttttg

SEQ ID NO: 451777 - DNA, 459 bp, Sorghum bicolor
acgtccgcggttggtcaccggtccagcggcaccatacaagaaggccagcccaaggaatcgtttgccaaaaagctctcaactgaggagctcatcgagtctgttgttgcagagcttgaggcactggacattgacaagaaggatccaccagatgcgaatcctgacccaaagaaccagatggcgcgagacctcattaagcagacaagagagatggaggcgcaactcaaggagcgaagggaatgggcgcagggaaaggcaatacaggctgctcgcaagcttggtgctgatcttactgagctgcgtgtgctgcggatggaacatgatgagaaccagcggcgtaagaaggaaaagcaggtgatggaggatgacacaatgaagcgccttgctcatctagagaatgagctgaagaaacagagtgggcagcttgaccggagtaacgcaactgtgcagaggctggaaatg

SEQ ID NO: 451778 - DNA, 682 bp, Sorghum bicolor
  unsure (1)..(682): unsure at all n locations
cgtccggagcgcaagacggagctggcgcgcaagctgggcctgcagcctcgccaggtggccgtctggttccagaaccgccgcgcccggtggaagaccaagcagctcgagcgcgacttcgaccgcctcaaggcctccttcgacgccctccgcgcggaccacgacgtcatcctccaggacaaccaccgcctccgtggcacaggtggtgtcgttgaccgagaagctgcaagagaaggaggcgacggagggcggcgccagcgctgccaccgacgccgcggcagcgttgccggcggtggacgacgtcaaggcttccttggccgatgacgtcgaggagccaacagaggcggcggcggaggaggaggaggcggcgttcgaggtgcaacaggtgaagtccgaggacaggctgagcacgggcagcggcgggagcgcggtggtggacacggacgctctgttgtacggcgccggttgccggttcgccgcggccgttgatagcagcgtggagtcctacttccccggcggcgaggaccaccactaccacgactgcgggatgggtccagtaaaccacggcgcgggaggagggatccagtcggatgacgaccgcgccggcagcgaccagggatgcagctactacgcccaagaagaagccgncgctgccgccgcgttcttcgccggacacacccaccac

SEQ ID NO: 451779 - DNA, 960 bp, Sorghum bicolor
tcacgcgtccgcggacgcgtgggtgcggaagcagttcccgctcgagctcgtcaaggacgtcctccccgtcggcggcgactaccttctcaagctcgccatgccgcaaatcatcaaagaggacaggacaggttggatgaccgatgaggagtttggacgggagattctcgccggcgtcaaccccatgatcgtcaggcgtctcacggagttccctcccagaagcacccttgaccccagcaagtacggggaccacacgagcaccatcacggaggcgcacctcgagaacaagctggagggcctcaccgtgcagcaggcgctggaaggcaaccggctctacatcctggaccaccacgacaacttcatgccgttcctgatcaggatcaacaacctggagggcaacttcatctacgccaccaggaccgtgctgttcctgcgcggcgacggcacgctggtgccggtggccatcgagctgagcctgccggagctccgggacggcctgaccaccgccaagagcaccgtgtacacgcccacgtcgaccaccggcgcggaggcctgggtgtggcacctcgccaaggccttcgctaacgtcaccgactactgctggcaccagctggtcagccactggctcaacacgcacgccgtcatggagccgttcatcatcgcgaccaaccggcagctcagcgtgacgcaccccgtccacaagctcctgctgccgcactaccgcgacaccatgaacatcaactccaacgcacgccagatgctcgtcaacgccggcggcctcttcgagaccaaccgtcttcccgcgccagttcgcgttcgagatgtccgccgtcatctacaagaactggaacttcaccgagcaggctctccctgacgacctaatcaagaggttaatctggcgtgtgtagttaactagcattgcgcacagtgacgctaacaacactaacgcacaaatgtgcaata

SEQ ID NO: 451780 - DNA, 440 bp, Sorghum bicolor
atcaactccaacgcacgccagatgctcgtcaacgccggcggcctcttcgagacaaccgtcttcccgcgccagtacgcgttcgagatgtccgccgtcatctacaagaactggaacttcaccgagcaggctctccctgacgacctaatcaagaggggcatggcggttgccgatgcatcgagcccgtacaaggtgaagctgctggtggaggactacccatacgcgtcggacgggctggcaatctggcacgcgatcgagcagtgggtgacggagtacctgggcatctactaccccaacgacggcgtgctgcaggcggacgtggagctgcaggcatggtggaaggaggtgcccgaggtcgggcacgccgacctcaaggacgagccatggtggcccaagatggagaccgtgccggagctcgtcaaggcctgcaccaccatcatctg

SEQ ID NO: 451781 - DNA, 434 bp, Sorghum bicolor
cgtccggcacggaaccgagagcaaggatgcgtggaggaccgacgaggagttcgcgcgggaggtgctcgccggcgtcaacccggtggtgatcacgcgcctcacggagttcccgccgaagagcacgctcgaccccagcaagtacggcgaccacaccagcacgatcacggcggagcacatcgagaagaacctggagggcctcacggtgcagcaggcgctggacggcaacaggctctacatcctggaccaccacgaccggttcatgccgttcctgatcgacgtcaacaacctggagggcaacttcatctacgccaccagggcgctcttcttcctgcgcgccgacggcaggctcgcgccgctcgccatcgagctcagcgagccgtacatcgacggtggcctcaccaaggccaagagcaaggtctacacgccggcgttcg

SEQ ID NO: 451782 - DNA, 505 bp, Sorghum bicolor
cggtcgaccacgcgtccgggagactggtgccaagattgtcattagggggaagggtagtgtcaaggaagggaagctgctgcagaagagggacctcaagccggatcccagcgagaacgaagacctccacgtgcttgttgaggcagacacacaggaggcactggacgcggctgctggtatggtggagaagctgctcaccccggtggatgaggtgctcaatgagcacaagcggcagcagctccgggagcttgccgcacttaatggaacaattagggatgatgagttttgtaggacatgtggtgaggctggccacaggcagtatgcttgccccaacaagatgaacacgtttaagagtgatgttcagtgcaagatctgtggggatggtgggcacccgactattgattgtccggtcaagggcacttctgggaagaagatggacgatgaataccagaacttcctggctgagcttggtggtgggagtgcacctgagtccatgaacaaatctggt

SEQ ID NO: 451783 - DNA, 1037 bp, Sorghum bicolor
  unsure (1)..(1037): unsure at all n locations
cgtccgcaaccctctcgagagccaaattcggggaggtgggggcagaccttatcgacaggcttaaaactcctgttaataatgccttgagagatgccaagttgtctgtcagtgatctagatgaagttattcttgtgggtggatccacccgaatccctgcggttcaagaacttgtgaggaagcttgcgggcagggatcccaatgttacggtcaaccctgatgaggttgtttctcttggggcagctgtgcagggtggtgttttggcgggagatgtgaaagatgtcgttcttctggatgttactccattgtctcttggtttggagacattgggtggagtgatgacaaagattatccccaggaataccacattgcccacatcaaaatcggaggtattctcaacagctgcagatggacagacgagcgttgagattaatgttctccagggagaaagagagtttgttagggacaacaagtcccttggaagcttccggttggatgggatccctcctgcacctcgtggtgtcccacaaattgaagtgaagtttgatattgatgcaaatggtatcctctcagttgctgccattgataagggcactggaaagaaacaggacatcaccatcactggtgctagtacgctacctaaggatgaggttgagagaatggtagaagaagccgataagtttgccaaggaggacaaagagaagagagatgcaattgacaccaaaaaccaggcggactctgtggtctaccagactgagaagcaactcaaggagcttggcgacaaagtccccgctcccgtgaaagagaaggtggacgtgaaactccaggagctcaaagacgccatttctggtggatcaacacagagtatgaaggatgccatggctgctttgaaccaggaggtgatgcagattggccaggcaatgtataaccagcctggtgccagtgctgctgggcctactcctggcgctgaggctggacctacgcctggtactggaccagngcagaatgatggggatgttattgacgcggacttcacagat

SEQ ID NO: 451784 - DNA, 635 bp, Sorghum bicolor
gccaccgcttcccccgttccccaccccgaccgactgctcctcctcccccgcgccatcctcaaggcatcgccggcgccgcaacttcgccgaggaggaagcccgcaccccggccccgatccgatggccaacagcaacctcccgcggcggatcatcaaggagacgcagcggctgctcagcgagccagcaccggggatcagcgcgtcgccctcggaggagaacatgcgctacttcaacgttatgatccttgggccggcgcagtcgccctatgaagggggagtttttaagcttgaactctttttacccgaggaatatccaatggctgccccaaaggttaggtttctgaccaagatttatcatcccaacattgacaagcttggtaggatatgcctcgacattctcaaggacaaatggagcccggcacttcagattcgcacggttcttttgagtatacaggctctcctgagtgcgccaaatccagatgaccctctttccgataacattgcaaagcactggaaagccaatgaggtagaagctgttgaaacagccaaggagtggactcgcctgtatgcgagcggtgcatgagaacctggttctgttcttgatgtaataacccggcatacttcagtcctaatcta

SEQ ID NO: 451785 - DNA, 724 bp, Sorghum bicolor
attcccggccgacccatccggatcgatcgtttgattattggcgagcttcattccattccatcagttcctttggcggaggatgtcgtgctgcggaggcaactgcgggtgcggctccggctgcaagtgcggcagcggctgcggagggtgcaagatgtacccggacatggctgagcagcaggtgaccaccaccgccaagactctcgtcatgggtgtcgcaccatcgtccaaggggcacgccgagggcgggttcgaggcggcggccggcgccggagctgagaacgaagggtgcaagtgcggccccaactgcagctgcaacccctgcacctgcaagtgagctgtataataaccccctgcactgcactgcagcccggaggaaggacggactcccctagctagtatagcagtgtcgtcactgcagtgtgtgtgtgtttgagtcagccagtcagtcgagtgccatggcaccatatgctagtggttctggtactgatgggaaccaataataattgtactgggatgttggcgtcgtgtcgtccttcccgtgctcctccgggggctcatctactagcagtcggtgttgtgttgtgtgtttgtgggtgcagtgcagcacagcagcaggccatgccccctgctctgtgggcacgtcgatcgtgtgcgactttgtttgtgctctgtcaccatccatctattacctataatatcccccgtctttgtgtaccgtgaaaaa

SEQ ID NO: 451786 - DNA, 684 bp, Sorghum bicolor
cgtccggatcgatcgtttgattattggcgagcttcattccattccatcagttcctttggcggaggatgtcgtgctgcggaggcaactgcgggtgcggctccggctgcaagtgcggcagcggctgcggagggtgcaagatgtacccggacatggctgagcagcaggtgaccaccaccgccaagactctcgtcatgggtgtcgcactcgcacccgcccaagaccaagccctcccacccatcgccgtcgccgtcgccgaagcccaagaaccccaagcgacccagaggccccgcgtacccggcgccggggcaccagcaaccgcccaagagcccctcctacccgccggtcacgcgtccgccagtcgtcggcccgcccaagggccccgtcacgcgcccgccggtcacgcgtccgccggtcgtcggaccaccggtgacctacccgccgatcatcggcccaccggtcacgcgtccgccggtcgtcgggccaccggtgacctacccgccgattaccggccctccgacgacgccgccggtcgtcggcccaccggtcacctacccgccgatcaccggtcctccgtcaaccacgcctccgatcaccggcccgccgtcgacgacgcccccagtcaccggtccgcccgtgacctaccacgcccggcggaggcggtagtagctcgacgccgagcccgtc

SEQ ID NO: 451787 - DNA, 399 bp, Sorghum bicolor
cgtccgcccacgcgtccgcctgcagccctctagtaacactagctagctagcagccgccgccatggaggccagcggcaagaagctccggccgttcctcctcaccctgctgctggtgctctccaccgccgtgacgcccatcctctcgctgccagagccagacaacgaggtagactgcgactgcgacaagcccaaggcgcccaagccgtcgcactcgcacccgcccaagaccaagccctcccacccatcgccgtcgccgtcgccgaagcccaagaaccccaagccacccaaaggccccgcgtacccggcgccggggcaccagcaaccgcccaagagcccctcctacccgcggtcacgcgtcgcagtcgtcgccgccagggccgtacggccgcgtacgctcgc

SEQ ID NO: 451788 - DNA, 484 bp, Sorghum bicolor
cgtccgctcacgccccgccacctcctcctcggattcgccgatggagaagatgctccacgcagcccccgtccacgcgacgctcccggagtgcttcatcttcccgtccgacaagctcccgcaggccaagtccacctccggcgcggtctccctgcccatcatcgacctgtccctcggccgcgacgaggtccggcgcgccatcctccatgccggcaaggagatcggcttcttccaggtggtgaaccacggcgtgtccctggaggcgatgcgggacatggaggcggtgtgccaggagttcttcgcgctgccggcggaggacaaggccgggctctactccgaggacacggggaaggcgacgcggatctactccagcaccatgttcgacacgggcgccgagaagtactggcgcgactgcctccgcctcgcctgctccttcccggacgtcggcgacagcccccgcggttggcccgacaagccggccaggctc

SEQ ID NO: 451789 - DNA, 668 bp, Sorghum bicolor
cgtccgctcgtatccacctaaatgcaattgcaatagatccaaggaacccaaatctttttgctgttggaggaagtaatgcatatgctcgtgtgtatgacatccgcaagtgcaagtgggatggatcatctgattttggtcacacatctaactgctattgtccaccacatctagttgacgataagagtgttgggataacagggttagcgttcggtcacctgagtgagctgcttgtatcttacaatgaagagaatatttacctattccctaaaaatggagggctgggatctgaccccaaaaaatctgttaagataggagcaaatgaagggtgcaaatcaacaacgttagcatctggacatgatgttggtgagcctgcacctcaggtatatgtcggtcatcgcaactgtgaaaccgtgaagcgtgtgagtttcattgggccaaatgatgaatatgttgccagtgggtcagattgtggtcggatgtttatttggagaaagagagatgggaagtttctacgagccatggagggtgatgagtgcattgtgaattgcattgagcctcatcctcatgctatgacaattgcgagctgtggaattgataatgatgtcaaagtttggactccctctgcaattgagcgggcacctgtggtaaatgttgatgagctccagtcg

SEQ ID NO: 451790 - DNA, 555 bp, Sorghum bicolor
cgtccgtttcatgctcgccttttgtccacctattgcaggatttgaggaaccgtagtatacctaaggttggctacccaactctgaatgcatttgttgagttgatctctcagtttgatgtggcggatgagtcagttatcaagaaaaatgagaaggctattactgttgctgcaaaaccacttaatcctgccatgtttgatgctgttctcagaaactttacaccagatgtgccggctggagtaactgctcgaccaaggcaggaagatgctcaagagtttttaagttttgccatggatagaatgcatgatgaactgctgaagcttaatggcaatggatcagattcaaaggagggtatggttgtttcttctgtggatgatgatgcttgggagacagttggacgaaagaacaaatctgcaatagttagaactcagagtttcgttccctctgagctaagcgctatttttggagggcagctacagagtgttgtgaaagctacaggcaacaaagcatcagctactggtcagccctttctactgctccatcttgatatattcccag

SEQ ID NO: 451791 - DNA, 1035 bp, Sorghum bicolor
  unsure (1)..(1035): unsure at all n locations
cgtgcggcagaaccctcagctgcaggagtttgaattccagaactatccaacttcttacctccgctgtgctgctcatggtgttgcacaacattatggcttagagactatagtagcagatagtttagtagaaggctcagttagcaggattgttgcaagaaaaacaccagaaagcaggtatcctgcaattgctttatcagaagttcctagcagacaagcaagaaatgatcatgaagcggcagagaagcttaagtttgtcatctatcaaaggcccaaagcattccaaaatggaagcgctgattctagaaacatgaatggtgcaccaaaaactgttgaagagagaatagaggaatataataaagcacgagcacgcatcttcaatggttctatttctgcagattctgatgctgcaagtgttttgggaactctntccactggcagagatgaggcagtgaatgttgagccttctgttgatgaaatcaaaatcagcacaatgaacagccgctccagagttgctgttttcaaggatactgaaaaggatcgtagtgacccagactacgatcgaaactacacaaggtatgttaggaacccagtgcctgacttcaacttgagcccaggtgccttcaactttgttgtgccccagtttatgcagtacggtgttggttatatgcaatctcctggcatgtccacaaaccagcctactgtgtactttggccagcctgatctagcaatggggtcttcttctggagctactgtctacccacattggccaacgccagcaatgatgtatccccattgctatgataatgttggtccaatgatatctcaggttcctctgtaccaatctttcaaccatggttaggagattctttctgcttgctggaaagttgggaacactctctgttgaacttgctatgttgtgctgtcctatgttaagtggagttactttagattcgagccatttctattacaaaaaattcatgtagcgtcgaacgtagtctgtataaggagtcctaattcgttgaaactattatcgtg

SEQ ID NO: 451792 - DNA, 510 bp, Sorghum bicolor
  unsure (1)..(510): unsure at all n locations
ggcgtccgagctcccccacccagagaaccctagccgccgccgctgcggcctcccaggtaagcaggagcgtccaaccccgccaccgccgccatgaagcgcaacccccgcgtcacgagctcccgccggaagtgccgcaaggcgcacttcacggccccgtcctccgtccgccgcgtgctcatgtccgcggcgctgtcgacggagctccgccacaagtacaacgtgcgctccatcccgatccgcaaggacgacgaggtgcaggtcgtgcgcggcacctacaagggccgtgagggcaaggttgtgcaggtgtaccgccgccgctgggtcatccacgtcgagaggatcacccgcgagaaggtgaacggctccaccgtcaacgtgggcatccacccctcgaaggtgatcgtcaccaagctgaagctcgacaaggaccgcaaggcgctcctcgaccgcaaggcccggngccgcaacgccgacaaggctaagggcaagttcaccgccgacgacgtcgcc

SEQ ID NO: 451793 - DNA, 377 bp, Sorghum bicolor
cgtccgtgctcgtggcgggaagcttagtaggaggagggcgacgactacgagcaggcgggcgcgtgcgggttgctgcgtgcatggaggccaagccggtggaagcgagtgccgcgcctgctcctgcgcctccgcctacggcggcgccaccagaggcgacggtgagcttccagcaggcggcgccggcggcggagatgggtagctcgagcgccgtcctggtgccgcctctggctacggcggcggcggtggcgggaggaggaggcggcgccatggcgctggggccggtgctgatgaaggtgccgaagaagcgcgggaggccgcgcaagtacgggccggacgggagcctgattccgccgctcaacgccacgccgatctcggcg

SEQ ID NO: 451794 - DNA, 1012 bp, Sorghum bicolor
cgtccgctgggcgcagagaatccccaggcgaacaaacagggtagtggagaggagaggagaggagaggaaggttgggttcggacggagagagccagaggccatggctccgatgaagctgtacggggcggtgatgtcgtggaacgtgacgcggtgcgcgacggcgctggaggaggccggctccgactacgagatcgtgcccatcaacttcgccaccgccgagcacaagagccccgagcacctcgcccgcaacccgtttggtcaggttccagctttgcaagatggtgacttgtacctcttcgaatcacgtgcaatctgcaagtatgctgctcgcaaaaacaaaccagagctgttgagggtaggaaaccttgaggagtcagcaatggtggatgtttggatggaggtggaggcaaaccagtacacctctgtattgaatcccatcctcttccaggttctcatcagtccgatgcttggaggaaccaccgaccagaaagttgtggatgagaaccttgagaagctgaagaaggtgctagaggtgtacgaggcacgtctgaccaagtgcaagtatcttgctggagacttcctgagccttgctgaccttaaccatgtatctgccactctctgcctgtttgctacgccctacgcatctgtgttcgacgcttacccgcatgtgaaggcctggtggtctagcctgatggagaggccatctgtccagaaggtcgctgccatgatgaagccatcagcttgaagcgggctgccctatcaatcggtgaatggaataagccaagtttgttctgggcatttgcttgttcagtgatgtgtcttcgatgttgaaagttcagtgcttatgtgtgagcatgcttgtaatcaggtcttgaattgttctgaaacgagcattcccgtgctcgttttgagaataaactttgcgttaggttcctctggatcttgatgagttctcatttgatggttgctgctgcagtgtacacgctggatgttatcattgcaaatgcatgtg

SEQ ID NO: 451795 - DNA, 682 bp, Sorghum bicolor
  unsure (1)..(682): unsure at all n locations
cgtccgatcaagagctaccttgatatctccgctgatcctgcaacatttgtccagggagcaattccaaaccttctggagaacacaaaggaggaattcttccaaaaaaccatcaaaattctaaaagaaagtgcagatatatgctgggaaaagttgaaggacatcaacgcaatcacatgcccaagcaaaccagagggatccatgtttgtaatggtctgtgagtcactacatatactcttccatgttgcaggacaccacgagggatttgctaacaatgtgtgaagttcccttgacttgctgcaggtgaaactggatgtatcttgcctgtcggacatcaaagatgacatggacttctgctgccggctggcaaaggaagaattagtggttgttctgccaggatgtgctgtgggatacaaggattggcttcggatcacctttgcaattgatccatcttctctcgaagatgggcttgacaggctcaagtccttctgtttgcggtacaagaagctgacaaagtgaccagataaactcaccgcttctgtgggacgacaccagaaaaactgttataaacttgtacacagatatatgatgttgtatcatcttcactcgaagatgatatgtttgatcctncaggtctgtagtaataagcaatgggctctgcttgtctgtcatctacccatctact

SEQ ID NO: 451796 - DNA, 490 bp, Sorghum bicolor
cgtccgcaaaaatgtacgaggaaaggttaaaggtaccttcccagagagactctttggaagaggcatcattaaagcaaagatatggagagaacgctgggcaactacttgattcaaatgaagcatcgttgttgaaagcagcttcaagtgcacaatcctcagggcaaattttgcatggaactgttggtggcttgtcaggcactctgcaacaagttcaggccaggagtccccaacttcctgggcctgctcagggtatcaagacagagattaatcccattctgactcccagagctgcaggcccagaagggtcatttataggtgtacaaggatctaatcaagctgggaacaatttgactctgaaaggatggccactcacgggactcgagcaacttaggtcaggaattcttcagcagaagtcatttatacagaatcaacagcaattgcaccagcaaatccagatgttgaccccacagcagcagcagcagcttatgct

SEQ ID NO: 451797 - DNA, 546 bp, Sorghum bicolor
gcgtccggcaatccagccctcgtaagaaacctgaatccaggacagaagctttcgattcgatcccaccgagggcgaggaggaggaagaagaagacggcaatggcgtccgaggagggagtcgtcatcgcgtgccacaccaaggccgagttcgacgcccagatggccaaggccaaggaggccggcgaggctggtggtcattgacttcaccgcctcctggtgtggtccttgccgcgccatcgctccactgtttgtcgagcacgccaagaagtacactcaagctgtcttcctgaaggtggacgtggacgaactgaaggaagttactgcagagtacaagatcgaggcgatgccgaccttccacttcatcaagaacggcgagacggtggagactatcgtcggtgccaggaaggacgagctcctggccctgatccagaagcataccgcgtctgcgtccgcgtaagaagatagtcagtcgtcgtcaataagggccagcgcatcgcatggctgtaaatgatgtcgttatcagtttgggttgtcatttgtgggcgat

SEQ ID NO: 451798 - DNA, 519 bp, Sorghum bicolor
  unsure (1)..(519): unsure at all n locations
tgcgtccgatgaatattaaatggatgttttttagtattttctctatctaatttcaaatccacatttcataatatttgacagtattcatacccacaaacaaaacaaggtatcgccaacctattcaaattttttctctctgtaatgaattaattttagtattttggtaaatatgataaaagttttaactctatttgtgtactaatttagttgttccaaaaatattgatacaacaaaataactatttgttttctactacttttatttgaatttcttcacttgacctattattttagtaaatacattaaaatttataatttagtttagatattggagattattagaagtgtaccttcatttagttcactttggttaacgatgaacttagtagtaaaattttattcatgtatgttgaatttaacaatatacactntgagagcagctaagtaaatatccgaatagaaataaatatctagcattagtgtggacattattcatttatatttatataanttgtatgca

SEQ ID NO: 451799 - DNA, 467 bp, Sorghum bicolor
gcgtccggctagctgtacttacagcctgaggggtgactgcgggcggatgcatgattaggctagtgaggtagcatgggatgatagctgaacatacgatgcggtgaccattgagctcaagaatggcgaccatcctacacggtgccattaccggcttggacgttagcatgaatactcatgctgaagactgtaaagctgactgctaataggtaaaaatgctgttaccgttgatcaccttagtgtgaggggaaacaacattcgctgttatattcttactgtccgtctagatctggagactctgctggtggaggaaacaccaagggtcaagcctacgaagcctacttttgcgaagcccttgggacgtgggcgtggccggggtcaggggcgcggtcgatgacgctgagcatgctcgcagcttatgagaattgcactgcgtgcatatgcagcgtaatctacattactatcatttg

SEQ ID NO: 451800 - DNA, 411 bp, Sorghum bicolor
cgtccgcccacgcgtccggcatattgaggtttctggatatgtcacctgcgtatcatttttttctcagcaggaaaatgctactgaacctaacaaggagacttcacacagattatctaacaagggtttacaaactgatcgttctatacagccagcaagttcaattggtagttggtactcagagtacacaacctgaaccacagcctgtatcatcgactcccgaactaaatcggtcgccaaccggaacaacacacacccacaggaaactgtttggagaagacactctcactgaaaaggaaaccatagtggatcaaaatttgaacgcaaaaggaatcataacgacgaccgcaacagtccaatggatccactactgcagccaaaagaaaaaaggctatagcgaggcacgaccacagc

SEQ ID NO: 451801 - DNA, 539 bp, Sorghum bicolor
cgtccggagacggcggcgacgccaccggcaggggaggagagggaagacgacgatccgcgagcgtggtgcccgggcccggccggcgacgagatgtggcggaggcgagtgggcgccctccttctccaatccccacttgcttcctcctcctcctcctccacggccgcctcgtcctgccagcgcctccgacaccaccttctccccagcgaggaacctcttgctctcaatcgtcgtcttgccaggctcttcacgtcccaggatggaagtgatggtggcgatacccagaagccctttattgcttttgtcttagggggtcctgggagtgggaaaggaactcagtgcaccaagattgcttcggattttggattcgcccatttgagcgctggcgatcttctccggcacgaaatagcatctggcagcgagaaaggggagttgatcctagacatcataaaggaaggcaggattgtcccgtctgagataactgtggaactcataagggaagcgatggaaacgaaaaatgctaaagggttcttatcgacggc

SEQ ID NO: 451802 - DNA, 390 bp, Sorghum bicolor
cgtccgggggaaatggaacctgtgttataggatactatatattaatgaaataaattaattatagtaatatattttattgccatattgtcatacattttctttaatgaattatcgatgaaggtaaagagttattgcatgccattgttcatgcactttgttatttctgtcaaatgatttgatcttccacaacctggattgaagcagaaacaagcattgcaggtctgctgcagcagagacaaggaacctactcatgcggcagaacattgatgggctacttgcacagctcccgcctgtgtctgcttatgttctaatgttttcttcttaaaaattccttctccaaacacacaccacaatttgttacctcaaacccatgcccattatatacctatg

SEQ ID NO: 451803 - DNA, 919 bp, Sorghum bicolor
cgtccgcggacgcgtgggttcggatgaggaggtcacaggaattatttttcattctggaattattccagaagatggtccagcagggtgtacggccaaatgttgtaacattttctgcgatcctgaatgcttgcagtcgctgtaataattttgaagatgcagcccttttactggaacagcttcgcttatttgataactctgtgtacggggttgcatatgggcttttgatgggccatctggaagcttggtctcaagcacggtccctctttaatcagctgggccgcatggattctccaacatcctctgccttttataatgctcttacagatgtgctatggcattttggccagaggcaaggagctcagcaagttgtgcttgaaggggtaaaccgtcgtgtttgggagaacacatggggtgatttctgcttggacctgcaccttatgtcatgtggggcagcccaagcaatggtacatgcatggctcctgaatgtgcgctctattgtctttgaaggtcgagctatgcctgaatttttaagcattctgacaggttggggaaagcatagcaagatagctggttcaagcactctccgtcgtgtcattgaagcgatgtactcctttcaattggagcgccatttcaggtcgagcgcttcaacatcggaaggttcgtgtcacccagtgctttggtggctgcctggttgagagaatctggcaccgttaacatcctcctcctccgcaatgagcgagtgcaacatgcaaacccgtccaatctggtgccgatgttacaggcgttgcagttgtagccccctagatctcatctcgttgtccgtggtagggttggttctgtcacaagagtttttatattcacctttgttcagaagattgtagtgtatcataggctcagggaataggtcactctattaaat

SEQ ID NO: 451804 - DNA, 387 bp, Sorghum bicolor
  unsure (1)..(387): unsure at all n locations
gcgtccgggagactgggtcgtagctgagtgattttcttccaatttgctaattggtcgccattgcaggcaacgtcttcgccctcgccctcttcctgtcgccggtgccgacgttcaagagggtcctcaaggccaagtcgacggagcagttcgacgggctcccctacctgctgtccctgctcaactgctgcatctgcctctggtacggcctcccatgggtctccggcggcggcggcagggccctcgtcgccaccgtcaactgcaccggcgcgctcttccagctcgcctacatctccctcttcatcttctacgccgacaggaggaccactcggntgaggatcacggngcttntggggctagggggcttcgngtncgcgctcattggncacg

SEQ ID NO: 451805 - DNA, 517 bp, Sorghum bicolor
cgctcgaggtattccattcgcagtcgaccgggtcctcggagcgccggagatcacgatgaagttcattgctgcctacctgcttgctgttcttgctggtaactccagcccctcagctgaggacttgacagccattctggagtcagttggctgtgaagttgacaatgaaaggatggaactcctgctgtcccaactgagcggtaaggacattaccgagctcattgctgcgggcagggagaagtttgcttcagtcccatgtggcggtggcggtgtagctgttgcggcagctgcccctgctgctggtggagctgctcctgcagctgaggcgaagaaagaagagaaggtggaagagaaggaagaaagtgatgatgacatgggcttcagcctcttcgactaagctgcgcagtcatagagtattattttgggcagtggtaccagacgaaaaccagagtcatgtttagattttaaccttggttttgggtggaaattactggaaagacagctactggcttcatatttt

SEQ ID NO: 451806 - DNA, 539 bp, Sorghum bicolor
  unsure (1)..(539): unsure at all n locations
cgtccgcccgccgccgtgcgcttgctctccctctccctcaaggacttcgccggcgaagagagcctagtcgcctagcaggatgaagtttattgctgcctacctgcttgctgtcctcggtgggaacctcagcccctctgctgaggacttggcagccattctggagtcagttggctgtgaagttgacaatgaaaagatggaactcctgttgtcccaactgagcggtaaggacattaccgagctcattgctgcaggcagggagaagtttgcttcagtcccatgtggcggtggcggcggggctgtcgcggcagctgcgcctgctgctggcggagctgctcctgcagctgaggcgaagaaagaagagaaggtggaagagaaggagaaagtgatgatgacatgggcttcagcctcttcgattaagctgtgttgtcatcagagtattcttttgagtcgtggaaccagaggaaaatcatagtcatgnttggagactttaacccttgtttatgttggaaagtacttgaaagactcctgtctttttatgt

SEQ ID NO: 451807 - DNA, 553 bp, Sorghum bicolor
cgtccgctagggtttgagattttagccgcggccgcagcgcatctcacttccccgagaagtcgcagccgacgacgtactcctcgccgatacgatggccgtcttctccgacctccacaccgccgacggcctcaagaccctggaggcgcacctagcgggcaagacctatgtttcaggtgatgcgagcactaaggatgacattaaggtctttgctgcggtgccatcaaagcctggcgctgagtttcctaatgctgcccgctggtacgagaccatctctgcggctgtagcctcaagattccctggtaagcctgttggtgtaaatctgcctgcgggatcagctcctgcagcagctgctcctgctgctgaggctgaggatgatgatgaccttgatcttttcggggatgaaaccgaggaggacaagaaggctgctgatgagcgtgccgctgccaaggcctcttccaaaaagaaagaaagtggtaaatcctctgtccttatggatgtcaaaccatgggacgatgaaactgatatgaagaagctggaggagggctgtcgtagt

SEQ ID NO: 451808 - DNA, 571 bp, Sorghum bicolor
  unsure (1)..(571): unsure at all n locations
cgtccgctgctttggattcttcttcctgatgtggccaagagaggcccagaagaggaagcacgcaggaaccaaccaaccagtcatcgaatcggcgtgcggcggtctggtgattttaagggtcgagatcgtgttcttgggaggctgagggacaagagctcccttcctgtcctctttcctgcggcttgtcttggtccaagagggcaaaactcgccgggaggaaatggcggaggtgaagccggaggagataagccatccgcccatggagcagctccaggggttcgagtactgcatagactcgaaccctccctggggcgaggcgatcatactgggcttccaacactacatactggcgctgggcacagcggtgatgatcccggcggtgttggttcccatgatgggtggcgacgatggagacagggtcagggtggtgcagacgctgctgttcgtgacggngataaacacgctgctgcagtccctcttcgggacccggctgccgacggtcatcggcggctcctacgcgttcgtgatcccgataatggccattatccaggaaccgtcgctttcggggata

SEQ ID NO: 451809 - DNA, 494 bp, Sorghum bicolor
cgtccgatgggagataaggtcaatggtgctgtcagatggggtggtttgaaacttggccaactgaagaaccttctgggtaggacaatgtacgatcaacagtcatgtgcatggatgtctggggttaatgtgattgatttggacaaatggagagatcataatgttacagagaattacctgcaactccgggagagagtttgggaacaatgatgacgaggcctctttgcgagcttccgctttgcctataagtttgttgtcgtttcagcatcttctatatccacttgatgagagattgactttatctggacttggatatgactatggaattaaagaagaagttgctcagagttctgcttcattgcattgcaatggaaatatgaaaccttggcttgaattgggtataccagattataggaagtactggaagaggtttcttacacgagatgagagattcatggatgagtgcaatgtaagtccatagtgcactagagcttggg

SEQ ID NO: 451810 - DNA, 572 bp, Sorghum bicolor
gcgtccggcttatgtctatgacatgcgtaacaagctctacgacaagtacagtgattttgtcacacccgaggagaaggaagggttgattgcaaagcttcaggaggttgaagattggctgtatgaagatggtgaggacgagacaaagggagtctatatttctaaactggaagagcttaaaaagattggtgatccaattgaggcacggtacaaggagtggacggaaaggggttccgctgtagatcaactggtgtactgtatcaacagtttcagagaggctgccttgtcgaatgaccaaaagtttgaccatatcgacgtgtctgagaaacagaaggtcatcaatgagtgctctgaagcagagaactggttaagagagaagaagcagcagcaggatgccctaccgaagcatgctaacccggtgctgctcgtatcggatctgaagaagaaagctgaaacacttgaccggttctgcaaaccgatcatgacaaaaccaaagccagctccaaagccacagacttcggcaccacagacttcaccggcacagcctgaaacccaagcgcctgagcctcaaacac

SEQ ID NO: 451811 - DNA, 875 bp, Sorghum bicolor
ggcgtccgcccaatctttcgccctcttcgcgcagcagctacagagctagggttccgtcctcgatccgatccggcgagtgctcaccacctttccccacttccctccgatcgaatcgatggcggccgagggcgaaaagaaaatgataaccctcaaaagctcagatggtgaggagttcgaggtggaggaggcggtggcgatggagtcgcagaccatccgccacatgatcgaagatgactgcgccgacaacggcatcccgctccctaacgtcaactccaagatcctatccaaggtaatcgagtactgcaacaagcacgtacatgccgccgctgccgctgccgcagcctccaaggccggttccgacgacgtgggtgccgccgccgccaacagcaccgccgcctccggtgaggacctcaagaattgggatgctgacttcgtcaaggtcgaccaggccacgctcttcgacctcatcttggctgcaaactatctcaacatcaagggtctgctggacctgacctgccagactgttgctgacatgatcaagggcaaaaccccagaggagatccgcaagaccttcaacatcaagaatgacttcacccctgaggaggaagaggagatccgcagggagaaccagtgggcctttgagtaaggaggtgctgagccctctgatctcttatgcctaggtttcgtcatatctactaccttgcaatgctctgcttttaaatgtcatcgtaatggttgtaagtattttgggagtcactttgcttgagaatgtgttgggtaaaactgatgtggtcaatggtcggttattactatgaaaggacatcggctgctgccctaagaggtcaatcctcgtagatgttttgtgcgattcctcc

SEQ ID NO: 451812 - DNA, 362 bp, Sorghum bicolor
gcgtccgggcgatgacgacgagtgcactgtggaagtgtgatatggcaacgacactggtaaaggtatcttgaagcgcgtgaattccaaggaggacggtgatggatgggagctttgctgaagatgttcaggaatagcggccttgccagatgatgctgaactgctgaagcatagaaaatatgaactagcggtaatggtgtataaacgttttactagtccggtgctaatctagtcgttttcatatgaaatcggcgaactgtcgtggaactgagtcactggctcaccgcagcagtatgtgagatgagtccaactgcagcttgatgtggtatatataaaagtgaacatttcagctgcctctgctgccg

SEQ ID NO: 451813 - DNA, 1119 bp, Sorghum bicolor
cgtccgcccacgcgtccggcctttatagaaccacctctccgcttccaggcgccagtcgccgccgcctccccctccctcgcgtcgccgtcgtctcccgttcggaacgccaagctcccatccggcgaaatggccccgaagcgaggtggcagggcgcctgtgccggccaagaagaagacggataaagtggtgaaccctctgttcgagaagaggccgaagcagttcggcatcggcggcgcgttgccgcccaagaaggacctgcaccggttcgtcaagtggcccaaggtcgtgcgcatccagcgccagcgccgcatcctcaagcagcgcctcaaggtgccaccggcgctcaaccagttcacccgcaccctcgacaagaacctcgctaccaaccttttcaagatgcttctcaaataccggcctgaagacaaggctgccaagaaggagaggcttctgaagagggctcaggctgagactgaaggaaaaactgttgaagccaagaaaccaattgttgttaagtatggccttaaccatgtgacttacctcattgagcagaacaaggctcagcttgttgtcatcgctcatgatgtggatccgattgaactggttgtgtggcttccagccctgtgcaggaagatggaggtcccttactgcattgttaaaggaaaggctcgccttggatcgattgttcacaagaagactgcatcagtcttgtgtctgaccactgtcaagaacgaggacaagcttgagttcagcaagatcttggaggctattaaggcaaacttcaacgacaagttcgatgaggtgaggaagaagtgcggaggtggtatcatgggctccaagtcgcaggccaagaccaaggctagggaaaagctgatcgccaaggaggctgctcagcggatgacctacattatccacttctgagtgtgcgctgtagttatgacgtggaagaactgataatcggtgtgcactcgtattgaggttttctgaatcaagttgcatatgtttctgtccaccagaccatgtttagaaactttgcaagacagagtctacagtgtttatgcgatgtctgagctagtatattattttgtgccccaagcaaaaaataaaaaaaaaaaacaaaaa

SEQ ID NO: 451814 - DNA, 562 bp, Sorghum bicolor
cgtccgcgtgaaggctctgaaggagaagctcaggctgcctgttggttcatgtgagcttgctgttcctctcaacgcaaaagcacgactctacacagtagacagacgcagagaagcatatgctacaatactgcattcagcaagtgaatatgtttgcggtgcaatcacagcagctcaaagcattcgtcaagcaggatcaacaagagaccttgttattcttgttgatgacaccataagtgaccaccaccgcaaggggctggaatctgcggggtggaaggtcaggataatagagaggatccggaatcccaaagctgaacgtgatgcctacaatgaatggaactacagcaaattcaggctatggcagcttacagattatgacaaggttatttttattgatgctgatctcctcatactgaggaacattgacttcttgtttgcaatgcctgaaatcactgcaactgggaacaatgcgacactcttcaactccggagtgatggtcattgagccttcaaactgcacattccaggtactgatggagcacatcaatgagataacatcttacaat

SEQ ID NO: 451815 - DNA, 731 bp, Sorghum bicolor
ggcacgaggctgtcaaacaaattactgtacttttctttctcaaacaggcagaagagctgcctatgattatataatgtactccctagtaaagatcagcccaccaattactattcttattgcatgctcgaacattgtttatgttgattttactgatctttgggaatccatcgtgaaattctgctgctaaactttgggaggtaacatagccgagaaagtctacatagtaacacacttatgttcatattgtatattgatagccttctcattttgtacgctgcagtcttttcacctcatacaatccttccatgctgatgtctactgcgtattatcgaatggatctttatgagcgtcccttaaatgaggtgcctgtgacaaatttctttggatcagtcatgaagactctccacacagattcagcctacacaggtttcttggctgcacatgacaatgaaactcccatggacatcggagataatctagatgatcagttcatgttaaaggatagagctaccgcaagaagatcaaacatagaaaaggaggcacaattaacgccacatggatggactgaagtgctgcttgaacagctggagggaaggaatactgatactgttgtgatatatggtctgggtgctatgggtatattgttggcactttcaacttggttatcaatgtaggcactaaaaagagttctgttcacacactatccaagaataaccccctcgcgacagcca

SEQ ID NO: 451816 - DNA, 448 bp, Sorghum bicolor
cgtccgctcttattctcaccatcttgattcagatataggtgtttctgttgtggataggtttacctattatacacttgctttctttgagaaactgaacatgtatagcaatgcctcactgaacagtcttttcacctcatacaatccttccatgctgatgtctactgcgtattatcgaatggatctttatgagcgtcccttaaatgaggtgcctgtgacaaatttctttggatcagtcatgaagactctccacacagattcagcctacacaggtttcttggctgcacatgacaatgaaactcccatggacatcggagataatctagatgatcagttcatgttaaaggatagagctaccgcaagaagatcaaacatagaaaaggaggcacaattaacgccacatggatggactgaagtgctgcttgaacagctggagggaaggaatactgat

SEQ ID NO: 451817 - DNA, 568 bp, Sorghum bicolor
gcgtccgggagaggatcagggagcaaggcagggggtggtgggcgctggaggcaagcaagggtgcaaattggtacctccaaccaaagatttcttcaaatgagggggtgatcagcgtcacatcactcaagttgtcagtgctcactaatacaattacattgaggaggttgatcaggaaaggtgtgccaccggtgctgaggccaaaggtttggttatctgtgtcaggagcagccaagaaacggtcaacagtaccagaaacatactatgatgagctaattcgtgctactgaggggaagaccacgccagccacaaggcaaattgatcatgatcttcctcgcactttcccttgtcatccttggttgaacagtgacaagggtcaggcatctctgcgacgggtacttgtggggtactcattccgtgattcagaagttggatactgccagggtctaaactacgtagctgcactcttgttgcttgtgatgaagacagaggaggatgcatttttggatgcttgctggactccttgagaatgtacttgtcagtgattgctatactgacactctttctggat

SEQ ID NO: 451818 - DNA, 664 bp, Sorghum bicolor
  unsure (1)..(664): unsure at all n locations
cgtccggcttcgccaacgccggcgagagctagggtttcgtgcgccaccgccaccgccacttccgcccgccatggccgagacccccacgtatcagatcctggtgcgtctcctcgacgggcgcaccagatgtctccgcttctccacgcccaccgtttccggcacggtgctcctcgacgccgtcgcgtggatctctcgcgtccccgctgacgccctccgcctcgtcaccggccgcatcgacgtctcgccctcctccgtgctcacctcggcagctgatggccagttcccctacgcgtccgcgctcctccgccttcgaggaggcaagggcgggttcggctccctcctcagaggggccgcctccaaggcggggcagaagaagaccagcaactttgatgcctgccgcgacatcaatggccgccgcctccgccacgtcaacgctgagcgccgcctcgaggaatggaaagccgaggccgccgaccgccagctagaaaagctcgctgagaactttatcaagaagaaggccaaggaggcaggccgcagcggcggaccctcagctgccgaggtggacaagtacctggagaagtaccgcanagatgctgagatctgcgtgaatgcgggtgaggaatccgtgcgtgcatctcttgggaagaggaagaccgctcctaag

SEQ ID NO: 451819 - DNA, 461 bp, Sorghum bicolor
cgtccgagtctatgaggaaacatacaagagcttgaaatcaagaggagtgcggtttcctggacgtgacaatgagagcttggctcccatatttactccaccacggtcagttgctgaagctgatgttgactcaagcttgccccagcaagcattcgaagacatccatgttcatacatatactgctgaagaaacaaaagaagcatttgatgtagctcgtaacagcatagaacttctttcaactgttctttcgtcttcccctgaacaggatgctttgcaggatgacttgacagccactcttgtgcaacaatgctaccaatctcagcacactatccagaggattattgagaccgttggagacaacgaagctgtgctctttgaggccttgagcgtgaacgatgagatccagaaagtgttatcgaagtacgaggagatgaagcagcccagggcctcagagcatgcagaac

SEQ ID NO: 451820 - DNA, 861 bp, Sorghum bicolor
cgtccggctagcacaagcatagtcgtctcttgtttctgcctccagttattatccacgagctagtgcgctgcaatcaacttagccatggcatccaaggccgtcctcttcttggctcttaacctcctgttcttcacagtggccaacgcctgcggcagctgcccgaccccgacgccgccaccggcaccggctgctgctactaccccaccccctccatccagcggcaagtgcccgctgaatgcgctcaagttcggcgtgtgcgccaatgtgctcggcctcgtcaaaggcgaggttggcaaggtgcctgctgagccatgctgcaccctcctcgatggccttgtagacttcgaggccgccgtctgcctctgcaccgccatcaaggccaacgtgctcggcatcgtcatcgatgtccctgtcaagctcagcgccctcgtcaactactgtggcaagtgcgtgcccaagggctacatctgtgcgtaagctccgcgcggttccacgctcgtacgtaatttagcacgcaccctgcatggcacacacatgcattgtgtctgctgatctcttctgtcgtccagctcatttgtgcaccttcgagggttctacaaacctgtagaaccattccggccaaatacttttatcagttcgcatgtaccgtcgatctctttgctggatttccatttttcttttgtatttgatcatttcttcataagagtccgcgacatcttctcgaagaacaaggagtgttgcttctagtttttatatttatgaatcatgtaatctgttgagagtcatttgttgtgtatgtaaaatcaagcacttgaacgtgtaatacttattcgatttgttaattgtgttagccatttggtt

SEQ ID NO: 451821 - DNA, 1018 bp, Sorghum bicolor
cgtccgatgaggacaagagatgggtaccgaggaatggaacatcacgacctacctccggtgttcgagatgagaagagccaagagtctctggctagtgctaataggagtggacatggtcatagatcttcatttgagcaaaaccgtgttacagctcttccgagcaaagttgcacctgtagcttcaaggataccctctcaggcatcacctcagcccccaaaggtagaaccaccagtttcctaaggtggtttcacctcctcagccacagaaatctcctgccaaagttgaggcaacaccccctaaagttgagaagccatcagttgcgccgcctcctaaagtcgattatgctaccgatctctttaacatgttatcaatggatggaacaacagagaaagagtcagagtcatcttcaaatgatgataatgcctgggatggattccagtctgcacaaccagtacctagctcagagaaaaaagattctgccaaaccggcagaaagcaagacccagtcaacatccggaatagaagacctatttaaagactcaccagctctgtcaatatcctcagctccagctgtttcccaagtaaatgcgaagaatgatatcatgagtttgtttgagaagtccaatatggtatcgcctttcgctgcccatcaacagcagctggcgtttatgtctcagcagcaagctcttctaatggctgctcttaaagctggaaatgcaccacaaatgattccagggaatgccaatcagctaaatgctaatggttctaatccccctcttggaaccttgcctttccaaaactggacaaatcttggttatcaaaatcctgggttgactccagcagcagcacagaatggtgccaccaaggttgcgaacaacaatcaggacttttcttctggtacctttggttttggcacacccggggtgtacaacactagttcagctgtcccagcaaatggggccacggcagcaggtgctagcaacaacggcactgcatcaactgcatcttctaatctcccct

SEQ ID NO: 451822 - DNA, 811 bp, Sorghum bicolor
ccggcaacgtccaaatccagaccgctgtagtctcgtagacatgaacggatccatggcaagcgcctgcgccacctccaggcccctcgcctcggcgccctctgcatgcccgtccaacaagaccaccgccggctcttttcaagggctcctttatcaacccgctgtgcgaccccaaccggaacatggccaatgtcgacgccctagtcgacctagactacctcagccacaaagatgacaagcccatcgatttcaagggcccaaaggacgaaaaatacaaggatcttgttaacaggaacctgtgcaccatatacacccagcaagtacgtaagggcccggagtcgttcctgggggagaagtactgcacggccatcgagggccgcggcagcgcgggtacgctggagagtatggcgcacacggcgatgcacgtctgggtgggcaagccgacgacgaagccctgcgacgccagcaccggcggcgtgctgagccacaaggacggcgccttcaactgcaacaacgacatggggttcctggggacggccggcaacgacccgctcttctactcgcaccacgccaacgtcgaccgcatgtggcacctctggtccacaaggctcggcggcgggcagggcatcacggacacggactggctcgacgccaccttcgtcttctacgacgacgtcaagagcccccggaaggtccggatcaagttccgcgacgtcctggacacgcgcgacctcggctacacctacgacgccgagtacgacagggacctgccgtggctgcggcccaagatcacgaagctggtgccgcacggcaa

SEQ ID NO: 451823 - DNA, 370 bp, Sorghum bicolor
cgtccgcaaatccagaccgctgtagtctcgtagacatgaacggatccatggcaagcgcctgcgccacctccaggcccctcgcctcggcgccctctgcatgcccgtccaacaagaccaccgccgccagattccggcggcgccgcacggtgtcgtgcagggccaccgccggcggcgacaatgacggcctcctgtggccgctgccccgtcgggacgtgatgctcaacggcctgaccggtgtggccgccgggctcgcctggtaccctggcgtggcgtccggtgcagattcgtcgacgacttcgccgtgcacggcggcggacaaggtgaaacgagatggtcctgcagtgcacggacacggcgaatcagaagccct

SEQ ID NO: 451824 - DNA, 517 bp, Sorghum bicolor
gtagacatgaacggatccatggcaagcgcctgcgccacctccaggcccctcgcctcggcgccctctgcatgcccgtccaacaagaccacccctgccggagtcgaacccgctgagcttcaaggcgcaggccgccatccaccaggcctactgcgacagctactacagctaccaccggtcgtcgtccgcggcgaagaaggacggcgtcgaccccgccttcgacgtccacttctcgtggatcttcgcgccgtggcaccgcatgtacatctacttctacgagcgcgccctcgggcagctcatcggcgacgacaccttcgcgctgccggtcttggagctgggacccccccgccggcaatggtggtcccggctcttttcaagggctcctttatcaacccgctgtgcgaccccaaccgggacatggccaatgtcgacgccctagtcgacctagactacctcagccacaaagatgacaagcccatcgatttcaagggcccaaaggacgaaaaataccaggatcttg

SEQ ID NO: 451825 - DNA, 551 bp, Sorghum bicolor
cgtccgcttcaatgctgtactcctgaactgttatgatgcaattggcataatgcttatgatcagaataattcatcagcaccagctcatcatgtttaagcggcgaatcccatgtttggactcttacctagacaaggttaatatgtcactctggcctcgcttcaagatggtgttcgacttgcatttgaacagcttgcgaaatgcaaatattaagactctttgggaggatgatgtccatccacactatgttacaaggagatatgctgaatttacagcttctctagctcatctcaatgttgaacatggggatggtcagcttgatttaaatttggagcgattgcggatggctattgaggacttgcttgttaagttggccaagatgtttgctaaaccgaagttgcaaactatttttctgataaacaactatgatttaacaatttccattttgaaggaagctggaactgagggtggcaaggcacaacaacactttgaggaggtccttaagagcaacatcgcaatatatgtggaagagttgctcctggagcagttcagta

SEQ ID NO: 451826 - DNA, 575 bp, Sorghum bicolor
  unsure (1)..(575): unsure at all n locations
cgtccggccggagggggtgagaagttctctcgccttctcggagacgtcgccatccaccccccccgcttccaccactctcggcgggtcgggcagaggctttgcagctttgggtcagatacagtgctctccaaggcccactaaatggagtctcacaatggcgaggctgatgacttgcctccaccacctcctttgaatgctggtgttgaaccacttaaagctgatgaaacaaaggtgccattgaaacataggactctggtccagaggaatggctttggcagaaaggggcagcagataaaactgctaacaaatcacttcaaagtttctctcacgaatgctgcagattatttctatcattactacgtcaacttgaagtatgaagatgatacaccggttgatcgcaaagggttgggaagaaaagttatagaaaaactgcagcagacttatgctgctgaacttgcaataaagattttgcatatgatggtgagaagagcctgttcacaatcggtgctcttcctcaagttaaaaatgagttcactgnnntgttgtgatgatgtttcaactgggaagactcctgc

SEQ ID NO: 451827 - DNA, 1619 bp, Sorghum bicolor
cgtccggctattgtgtcttatcctaccagtactaggctgattcactgaagaagtagaatccaaggaatgaaggaatcccattccttcactccattcattcagttttgaccttttcttttctttcagtgcttgcttcaaatcttttcctaccacttttcgtactatgtccagattcgtaccatggaatccatgtgttgtgttttctcttttgttaacaacaagcttaagtactctaattctcggggttaggtgcaaaatgtcccacctaattactctgaatgacatgatgaccatttttcttcagtgagtcattcagtaaacagaccaacgatgtttctgagtcacaagtcacacagctcacaaacagaaactgatgccgacaaaacacaaaatttgtgttgtttggtgaatgctgaccaggtcgttcgcggcgaaagacgaggtgttctgcctgttcgagggtgtgctggacaacctggggcggctgagccagcagcacgggctgtccaccaagggcgccaacgaggtgctcctcgtcatcgaggcctacaagacgctccgtgaccgggcgccctacccggccagcttcatgctcgcacagctcaccggcagctacgccttcgtgctcttcgacaagtccaccaactccctcctcgtcgcatctgatcctgagggcaaggtgccgctcttctgggggatcactgctgatggctgcgtcgccttctctgatgacattgacatgctcaaaggatcatgtggcaaatcgctcgcgcctttcccacaaggttgcttctactctaacgcccttggaggcctgaagtgctatgagaaccccaagcacaaggtcactgctgttcctgcagacgaggaagaaatctgtggtgcaactttcaaggtggaagggtctacagtcctgacagcgctgcatttttaggagatttccgtgtggaagcgtgggtggagcgcaatgcaatgcagaactgttgtacatgcatggtggattggtggtgtaacatagtggcaagtcatgttcatgcaactgagtctatctgtgtaatgcatctttcataaaaagagaagtactggaggcacttaagggttgatggttgtgtgtgtaccctgtatccctaggtgttcaacttacatggaacttgggtggttgagacatggtgctaatataatcgatcggttgcgtggaatatgtgaagtttgtaatctgttcctaataacaaagctttgtttctccaaaaaaaaaaaaaaaaaaaaaaaaactcgagactagttctctccctcgtgccgaattcggcacgaggaatcttttgagtctgtaattctagttctctaaacttgttaagcaatgcatcatgtattacttttgcttttatttggtaattattgtctaattatagactaactaggctcaaaagatttatctcggatttacaggtaaactgtgcaattaatttttattttcctctatatttgatatttcatgtcgtaaaattcgatgtgacggagaattttaaaaagactaaacaaggcaggcctaaacttgtaaaatgatgcaccgttggcccattatatttctctgcagtgcaccacttatcgagcatcacaca

SEQ ID NO: 451828 - DNA, 654 bp, Sorghum bicolor
cgtccgcccacgcgttcgcggacgcgtgggctccacctcaagagtgtacaaggaagaagaagcaccagcagcttctcttgatgctaccttgatccatcagcagcagcttcttcgtctgctttttggggagattattaggagtaggagtaggattactagttattattactagtgagtgagtgagtgagtgatcgagcgaggatgttggcggtgttcagcggcggtgtggtggaggtgccggcggagctggtggcggcgggaagccggacgccgtcgcccaagaccagggcgtccgagctcgtcggccggttcctgggtgcctccgagccggccgtctccgtgcagctcggcgacctcggccacctcgcttactcccacaccaaccaggcactcctccgcccaaggtcgttcgcggcgaaagacgaggtgttctgcctgttcgagggtgtgctggacaacctggggcggctgagccagcagcacgggctgtccaccaagggcgccaacgaggtgctcctcgtcatcgaggcctacaagacgctccgtgaccgggcgccctacccggccagcttcatgctcgcacagctcaccggcagctacgccttcgtgctcttcgacaagtccaccaactccctcctcgtcgaatctgatcct

SEQ ID NO: 451829 - DNA, 784 bp, Sorghum bicolor
cgtccgaggaggcggcggcggcggcggcggcggcggaggaggaggaggcggcggcggcggcgggacgcgcggtcgttgccctgtggacacgctgaagttgggcgtgtgcgccaacgtgctgaacgggctgatcaacgtgaacctggggacaccgccgaggacgccgtgctgcacgctgatccaggggctggcggaccttgaggcggcggtgtgtctctgcaccgcgctgcgagccaacatcctgggcatcaacctcaacctccccatcaacctcagcctcctcgtcaactactgcggcaggcgcgtcccctcgggattccagtgctcctcctgatctatctcatctcatcgtcgccatgcatgcatgcatgcatgcctgcctctcgtcgtctctccatcgtcgtcgtttcccgatccatggatatatatatatgcacacgcccgcctgcaccaggccggccgggctaaataataattatatgatttctcaggtctcagcaacaagtacaagctaagctactagtacacatcgctcttcgttcatcgctttcattttgttttgctttgctttgttttgggtgtgtttcttcacgaatctgctatcatcgtcatgcgcatgcatgcatgcatgcatgcagcatatatatggtcatcgcgcgcgtcttcctgtgtttgtggtggatcgatcatcgatggatgtatgatccatcgtgtcaaagaggcctagctggcaggacccgcacgacgatggctcccttatgaatataatacctttgtaagggct

SEQ ID NO: 451830 - DNA, 561 bp, Sorghum bicolor
cgtccgatcagttacaagaatatgctcagaggcgaggggggctcctgccttcgtatcgtcccattcatggaggttctcttcgtgcacctctattcaagtcagaagtaaccatagatggtcaaacatttgagagcccagagtactgtcgcacaatgaaggaagctgaaacagcggctgcaaaagggggtgtgatgttcttacctcaagaagcaggcccaacacagcaactaccgcttccatcagtatcctataagaatcttctacaagaatttgttcagaaagaaggctttcccttgcctacctatgatacaactttggatgtctcgaactattctgctgccttcatatcaactgtggaaattcagggtgcaacttttcgtggagagccagggaacactaaaaagcaagcagagatgaatgctgcgaagattgcttttcaacatttcaaagacagggtaaaagactctgcttgttctactggccatggaggaccacctgtgcaacaaggaaccaagaacttgcctgctggacaaaatatcaagggtctagaccctggttttt

SEQ ID NO: 451831 - DNA, 802 bp, Sorghum bicolor
  unsure (1)..(802): unsure at all n locations
cgtccgnattcccggtcgccccgcgtccgctccctacctgtcccgggctccagcacttgcatccacccccgcgcggcggtcgccggagcggagcagagcagccggagggcccgtcggatccgccgccgcaaagatgaatgacaccgatgtagccaagcagatccagcagatggtgcggttcatccgccaggaggccgacgagaaggccaacgagatctccgtctccgccgaggaggaattcaacattgagaagttgcagcttgttgaagctgagaaaaagaagatcaggcaagagtatgaacgcaaagagaagcaggttgaagtacggaagaaaattgaatactctatgcagttgaatgcttctcgcatcaaagttcttcaagctcaggatgatctagttaacaaaatgaaagacgatgctatgaaggaactccttcttgttagccacaaccaccatgaatacaagaaccttttgaaagatctaattgttcagggcttgctccgtttgaaagagccagctgtattgctccgttgccgcaaggaagatcaccatcatgtggaatcagtactgcattcagcaaagcacgagtatgcatcaaaagcagatgtacatgaaccagagataattgttgaccatgttgtgtacctgccacctgccccaagccatcatgatgctcatggccagttttgcttctggaggtgttgtcttggcttctcgagatgggaagaatgtgtttgagagtacactcgatgcaagactagaagttgttttccgcaagaaattgccagagatccggaagct

SEQ ID NO: 451832 - DNA, 459 bp, Sorghum bicolor
cgtccgcggacgcgtgggggacaaagaacgggtggtcaagcttagaacacttggaaatattcgcctaattggtgagctactcaagcaaaaaatggttcctgagaagatagttcatcacattgttatggagctattggggtctgggcctgataagaagccatgccctgaagaggaagatgttgaggctatctgtcatttcttcaatacgattggtaaacagcttgatgagaacccaaagtctcggcggattaatgatacctacttcatccagatgaaggagctaacaatgaatcctcagctcgcaccacgattgaggtttatggttcgtgatgtgattgaactccgatcaaataactgggtgcctcgacgtgaggagattaaggccaagacaatcagtgaaattcactctgaggcagaaaagaaccttggattacgacctggagcagcatctgtcattag

SEQ ID NO: 451833 - DNA, 560 bp, Sorghum bicolor
ggcacgaggctcccctcctcccattccgtcccccctgcccagatccaattctcgacttctccgtccgccgctgccatggcgctctctgtggagaagacctcgtctgggcgggagcacaaggtcaaggacctctcgcaggcggacttcggccgcctggagatcgagctggccgaggtcgagatgcccggtctcatggcgtgccgcgccgagtttggcccgtccaagcccttcgccggcgctaggatctctgggtcgctccacatgaccatccagactgccgtcctcatcgagaccctcaccgcgctcggcgcggaggtccgctggtgctcctgcaacatcttctccacgcaggaccacgccgccgccgccatcgcgcgtgactcggccgccgtgttcgcctggaagggggagaccctcgaggagtactgggtggtgcaccgagcgctgcctcgactggggcgagggccggcggtcccgacctcatcgtcgacgacggaggtgacgcaacgctgctcatccacgagggtgtcaaggccgaggaggagtacgagaagaccggc

SEQ ID NO: 451834 - DNA, 633 bp, Sorghum bicolor
cgtccggtccaataaaaaggggggaaaaactttttttttcttttttttttgctcccttccccccctcgcttcccccgaatttgatgcttaaaccctcgccgggaggagcaggaggactccaatcccgacgccccgcgccaccacctaccgctgcgcccggatctccgacgccatggccgccgcgccgcaccagaccggccccgccgcagatagcatgattccgctgcagtcggaacctgtacttgagaataacccctccaagagtgcaaacgccaaggaccagattctttctggtgcagagaatgtgtctgcaggcaatgcacgtggcgctagctccttgaaatcgccaaaaggcccgccagagaagcctagctctgtcggaaaagctggagaacagccttttgtctaccagcaaaatgtgtatgcaccgcagccacaaccactctatcctggaggatacatgaatccttcaggacagtgggaggaatatccccattatgtgaatatggaggggctccattccgtatctcccggaatctacaatgacaaccagtccctcatgctatctcctggatatgcaagcaacccccaaatgatgtatggagcatattctcctgtttccaccggtggaga

SEQ ID NO: 451835 - DNA, 501 bp, Sorghum bicolor
cgtccgcgcacaccactccacctggctgcgtgggctgggcatgttgatgttgtgagatgcctttgcaagcacaaagctgatgtgggagctgcagcaatggacgacacagcggcgattcattttgcttcccagaaaggccatgtagaagtggcccgtgagcttctggcatctggggcctctgtgagagcaaagaatcggaaaggcttcacagcactgcactttgctgcgcagaattcccacctagatcttgtgaagtaccttgtgaagagaggcattgacgtcacaacaaagactaaaggtggccagacagctctacatgtcgctgaggatgatgaagtgcgtgcgttcctgaaggagtgcgagcagtccatgaagaagggagccgaactaccatcagagaagaaggatgattctgccgagaaagagggtgacagcaagtcttcaggtgaggttatgaaagagggggagggtggcgggcagggccacaagccggaaaatgaa

SEQ ID NO: 451836 - DNA, 464 bp, Sorghum bicolor
cccggggcgacccacgcgtccgagtgcatcagcagaacgtctttcaagatgagcgcccatttataagctcaagaaaggttatgttcgacatgggcccgccactaagcagggagcttcagcttgtttctttccacactgtgtccaaagggaactggggagagtgtggacaacgtggtggatactttgaaatgacaaatcttcctcccaagacagtagatgagatctacaaggttgcatcaatagcactgagtccaaatgttcctgggcaaatttttatgggagtaatggttaaccctccgaaacctggagatatctcataccccaagttcgccgctgaaagcaagtccgtccatgaatctttgaggaggagagcacgcatgatgacagatggtttcaacagttgccgaaatgtcgtgtgcaatttcacagaaggagctatgtactctttcccccaataaggttgc

SEQ ID NO: 451837 - DNA, 436 bp, Sorghum bicolor
cgtccgcccacgcgtccgcccacgcgtccgggcagcgcgggctgacctacctctacctgctgatctacatctgcctctcgtcgggcgtcatcctgttcaacaaatgggtcctttctccaaagtacttcaaattcccctttcctatcacactcacaatgattcacatggcattttctggaatcggggctgtcttccttgtccgagtttttaaggttgttgcacctgtgaagatgactttccatatatatgccacgtgtgtaattccaattagtgccttctttgcttcaagtctgtggtttggcaacacggcgtacttgtatatttccgtggctttcattcagatgctcaaggccttgatgcctgtagcaacatttataatgggctgttttgtgtgggactgacaaattaagatgggatctcttcttgaacatgggat

SEQ ID NO: 451838 - DNA, 1688 bp, Sorghum bicolor
cgtccgcccactccgctcggccaccagctttgaccgcctcctcccctcccctccgctcctgctcctccccaccccactcccccgcaggagcggcggcggcggcggcggcgaggttgtatcccgcatcggcgagcggcaccggcggcaaaggcaagatgttcgggcgcgcgccgaagaagagcgacaacaccaagtactacgagatcctcggggtgcccaagtcggcgtcccaggacgacctcaagaaggcctaccgcaaggccgctatcaagaaccaccccgacaagggcggtgaccccgagaagttcaaggagctcgcacaagcctatgaggttctgagcgacccagagaaacgtgagatttatgatcagtatggtgaagatgcccttaaggaaggaatgggtggtgaggagcccatgttgatccatttgacatcttctcatcattttttggaccctcttttggaggaggtggtggaagcagcaggggaagaaggcaaaggaggggagaagatgtagtccacccacttaaagtttctctggaagatctttacaatggcacctcagagaagctctctctttcgcgcaatgtcatctgctctaagtgcaagggcaagggctcgaagtctggtgcatcaatgaggtgccctggttgccagggctcaggcatgaaagtcacaatccgccagctggggccttccatgatacaggagaggcagcagccttgcaacgagtgcaaggggactggagagagcatcaacgagaaggaccgctgcccagggtgcaagggtgagaaggttgttcaagagaagaaggttcttgaggttcatgttgagaaggggatgcaacacaaccagaagatcaccttccctggtgaagctgatgaagcgcctgatactgtcactggagacattgtattcgtcctccagcagaaggatcactccaagttcaaaagaaagggtgaagatctcttttatgagcacaccttgtctctgactgaagctctctgggggttccaatttgttcttacacatctggacaacaggcagcttctcatcaaatcaaacccttggtgaagttgttaaacctgaccaattcaaggcgataaacgacgaggggatgccaatttaccagaggcctttcatgaaggggaagctctacattcatttcacagtggagttccctgactcactggcaccagagcagtgcaaggctctcgaggcagtacttccaccaaggtcttcatccaagctgacggacatggagatagatgaatgcgaggagacaactatgcatgacgtgaacaacagcgaggaagagatgcgcaggaagcaagctcatgctgcccaggaggcatacgaggaggacgacgagatgcccggcggagcccaaagagtgcagtgcgcgcaacagtaagcaggcgtatcatcatggcaattggcagggttgcgcttcaagtgctagagtggtctctggttttgctgtcgctgagatgcgaaataggaagctgattctacccctgcaagcagggaatgtatcctttttgctgcaactgaaaaaaaaaaaaattgctacctacgcatggctggctacctttcttttaacttttgtttgggagatttgctagagtgatggtttcatcaatatataggtggacttaaatgtttgtggaatgctactgtataacgc

SEQ ID NO: 451839 - DNA, 693 bp, Sorghum bicolor
  unsure (1)..(693): unsure at all n locations
cgtccgctcccggcacgacaccacgcttcccatcggatcgaacagctagggtttcggagatgtttgggcgcgcgccgaagaagagcgacggcacccggtactacgagatcctcggcgtctccaaggacgcctcccaggatgacctcaagaaggcctaccgcaaggccgccatcaagaaccaccccgataagggcggggatcccgagaagttcaaggagctagctcaggcttatgaggtcctcagtgatcctgaaaagcgagagatttatgatcagtatggtgaggatgccctcaaggagggaatggngagcggtggagggatgcacgatccctttgacatattccagtcattctttggcggtgggagcccttttggaggtggtggcagcagtaggggcagaaggcagcgaaggggagaggatgtggttcatcctctgaaggtttctctggaggatttgtacaatggcacatcaaagaagctctctctgtcccgcaatgttctctgctccaagtgcaatggtaagggctcaaagtctggagcttcgtcgaggtgtgctggttgccaaggttctggctttaaggtccaaatcaggcagttgggacctggaatgattcagcaaatgcagcatccttgcaacgagtgcaagggttctggagagaccatcaacgacaaggacagatgcccacaatgca

SEQ ID NO: 451840 - DNA, 547 bp, Sorghum bicolor
cgtccgcaccaccagacgagccgtctagcccggaggaggacggcggcaccgctcggtagcagccagggttgtcgcgctgagcacttgagcgcagtggccgcttgtctgttgtctccccgctgccactctcccacttccccgtctcgcgcccccccctcgcccgtccggctgtcccggcgtcccctgcggcttgtgctctgggtcggagggagctgagctgcgagggagcgcggaggggagggtttaggagatggagccagattcggcgaggaagaggctcgcattgctggctctgcttctcctcctggcggcgcccgcccggccggcctcggcggctccggtggaggatggcctgctcagcaatggcgactttgagacagcaccagccggtggttttgtaaaatctgcgtctgttgctgagggtgcatcgtcaatccctggttggacgatcaatggcacgggtgagctcatttcagcaggccagcaccagggtggcatgatcctgattgttccacagggggaccatgctgtaaggctagggaatgat

SEQ ID NO: 451841 - DNA, 527 bp, Sorghum bicolor
cgtccggtgaagtagaaagacaacgtcaactggatattgagcgtgcaaagtctagggaactgcaattcaatattgatttggaaaaagagaaacaaactcagagagagcttcaacgtgaactggagcaagtcgagttggggcggtcatcaaggcgtgagttctctgccaatcccaacagccgctccagggagaggtaccgcgagagggatggcggcagagcacagcaggaggcggggagcttgaggtcgagcagccgaggccaagagggggtctctgctcaggcgcccgcaccggccggggcccccaccgtcatgctcgccggatcaagaacgttctcagggggcaaccttccgacgattctgcagcctcgcgagcgctctgccgacgaggacaacgcctgggccgaggatgccagcagcaatggagatcctgaactggatggcgtgaggccgcatgggccacgaggcggcggcagcagcaagccatcctcgaggcaggttggggaagcgagggagcgggatggcggc

SEQ ID NO: 451842 - DNA, 478 bp, Sorghum bicolor
cgtccgcattggtgttgtttcactgatagctgcaagagatgttgttgagattattgatcggtatgatgaggcatgtgtgccaggcaacatgactgatgacaagcttgcctacatccagaatgaaaccatatccaaagagtgcataaggaatcttacggttacaaaggatatgaagcagcctatttttgtgtattatgaactcgataacttctaccagaaccataggaggtatgtaaagagccgaaatgatgcacagctaagagatgctagtaaagctaaccagacatccgcttgtgaacctgagaagaccacggctaatgggcaaccaattgttccttgtggcctcattgcttggagcttgtttaatgatacatataattttactcgtggtactgagaacttgacagtggacaagaaagacatctcctggaagagtgatagggagcataaatttggtaaagatgtctatccgagcaac

SEQ ID NO: 451843 - DNA, 407 bp, Sorghum bicolor
  unsure (1)..(407): unsure at all n locations
cgtccgcaacaaccataagagaaaacataatatatgcaaggcacaatgcaactgaatctgagatgaaagaagctgccaggatcgcgaatgcccatcacttcatcagtagcctgcctcatggttatgatacacatgtgggaatgcgtggggtggatttgactcctgggcagaagcagcgcattgccattgctcgtgtggtgttaaagaatgcgcccattttgctgcttgacgaagccagctcagctatcgaatctgagtcgagtagggtggtccaggaagcccttgacactttgatcatggggaacaaaacaacgattttgatcgcgcacagggcagcgatgatgaagcatgtggatagcatcgttgngttaaatggtggtaggattgtngagcagggaagtnatgat

SEQ ID NO: 451844 - DNA, 508 bp, Sorghum bicolor
gcgtccgctcgagcccaaaccctaaacctaaacgtatgacgcggcgccggcgccacgcgtcaccgacgatgcaccaccaccaccacgtaccgtgcgacgtgccggggctacatcccaccgccggcgactgccacctcggattgaagcattgtcgctggacgatgagggcagggaggagaaggagctcgagctctcctccaacgacgtcgtcactaagtacaaggctgccgccgaaatcctcaacaatgctctgaagctgggtgtgtctgagtgcaaaccaaaagccaagattgttgacctttgtgagaagggtgactctttcataagagagcaaactgggaatgtctacaagaatgcaaagaggaagattgaaaggggcattgctttcccaacctgtgtatctgtgaacaacacagtctgccacttctcaccgcttgccacagatgatgcagttctggaagaaaattgatatggtaaaattgatatgggctgcatattgatggcttta

SEQ ID NO: 451845 - DNA, 459 bp, Sorghum bicolor
  unsure (1)..(459): unsure at all n locations
cgtccgcccacgcgtccgaacaacggcacgcaggaagctcaaagagaagcaagaacactgtgccggcggccgatcgaatccaccgagcaatcgtcgtgcgctgccgcggagcctccaaggcggcggagatcgatctgcgacatacgatggcggcgccctactacggcggaggccctgcgccgccgccggcggcggcgccggcccctgtggcggtggtgtccccgcagttctgcgcgccgtacgtggtgcccctgacggtgaccaagaaggccatcagcctctccgacggcgacttcaccgtcaccgacgccaacggcgccgtcgtgctgcgggtcaagggcgccatcttcagcgtccgccaccgccgcgtnctcctcgacgccgccggccagcccatcctgtccatgcaggagaaggtatttagcatgcacaacaggggggaggtcttcanaggggata

SEQ ID NO: 451846 - DNA, 531 bp, Sorghum bicolor
cgtccgtgggttgaaaggcgtccatttgttgatggagatggtaattgataccaaaatgatgagaggggacgatgagtacatcatcattggggctgacaacatcaaccagaggtccatggacggggccagggactctgaaatcgccatgggcgcataccagccgtaccacctgtcgaccaggcagcctgcccgtggccagatccacggcttccggaggtgtatgaggtacgagcacctgggaatgctggatgatgtcttccagcgccctgagagtgtggagtgtgcgcagaaggtgaacaggatctccgagaagtattgggatctatactcgagcgacgacctggagcatgatctaccaggccacctcctcatgtacccaatcggtgtcactgccgacggcaccgttactgagcttacggggatggagaacttcgctgacacccgtgcccgtgtactcggcaacaagtcggattacctttcacccatcctcaccacatatagtgcagactgcaagtagcgccgtggctcctt

SEQ ID NO: 451847 - DNA, 456 bp, Sorghum bicolor
  unsure (1)..(456): unsure at all n locations
gcctgctttctccggtccaccattcccgggcgggctcaccagctggtccaggaaggcttaaagtacatgttccaggagaagggccttgtaactgtgtggtctgcacctaattattgctacagatgtggcaatgtagcttctatattaagcttcgatgagaagatggaaagagatgtcaagttcttcacagagacagaggagaacaaccagatgcgaggcccaaggactgcagtcccatatttcctctgacttcagttgtacaattttagaagtcaatatttaaatctgtaagggttaaagatcaatcagatgtgtttattgttgtaggttcagatcatagtgcaatctgatgcattcgatttctgttttcttttgaccacatgtacaatagaccatcgggagtgtcatatcttcctgtattcctaannnnnnnnnnnnnnnnnnnnnnnnnnnnnn

SEQ ID NO: 451848 - DNA, 559 bp, Sorghum bicolor
  unsure (1)..(559): unsure at all n locations
cgtccgcggacgcgtgggcggacgcgtgggcttgggagcccaccccctgtgatagatgcagatgatctgcaacaggatcctgaggctgtcctgagtggactctgtgaggatctgggcattcctttccagccacaaatgttgaaatgggaagctggccccaaggaatttgatggtatatgggccccctggtggtatgggagtgtgcacaagtcttcgggcttctctaagcctcgccaatatcctctgactttcccattcgcgttttatgacctgcttgagcaaagcttgcctttctacaacatgttgaagcgccaaataaggaagacaagaggactccagcaaccaccattacctgaccctcctctgcctgtccctgcaaataaaaacattcttgtttgggttggagatgaacttttgccccgtgacagtgcaaaggtttcagtgtttgattcagttgtacaaggaggagatgctgtttgggaaggtttacgtatatatgatgganaagtattcaaactagatgaacatntngacagatngtttgattctgcaaaagcta

SEQ ID NO: 451849 - DNA, 789 bp, Sorghum bicolor
cccaaccaagagacgctacagatatactggctatgcaaatgctgcttttgatcaggaccgcagttgctcacacttggcaaagatgatcattcagcatgactacccacttcacattgtccaacagccggcattttccatttttattgaaagtctgcagccacgtttcaagattgtggatgttgatacgatggaaggagaggtgtatgctgtttatcagaaagaaaaggagaacctgctacaatcattcagcactatgcctggaaggatcagtctcactataggattgtggacaactagtcagactcttgggtatgtttcacttgcagggcagtttatcgactccgagtggaaagtgcatcgaaggatgcttaacttcatgatggtgtcatctcctcattcagagaacgcacttagtgaggcaattagcctgagcctttctgactggaatatgaaggacaagctattcaccatcacattggataatgattgctcctcacatgatatctacagtgcaaatttgagagatcatctctccaacaagaacaatctcatgcttaagggacagctctttgttgtgaggtgctacgcccatatccttaatgctgttgcacaagatgtcattgcttcgattcatggtgttgtatacagcatccgtgaaagcataaagttcataaaagcttcttctgcccgtgaagagaagtttgccgagattgctctgcagctggagattcccagtactaagaccctctgtctggatgttaccacccagtgggacaccacttatctgat

SEQ ID NO: 451850 - DNA, 894 bp, Sorghum bicolor
  unsure (1)..(894): unsure at all n locations
cgtccgcccacgcgtcctccaccttccctgcctcgccgccgccgtcgcacgcagccgcatccgccatgggtgcgtacaagtacgtatcggagctatggaggaggaagcagtccgacgtgatgcggttcgtgcagcgcgtgcgctgctgggagtacaggcagcagccggccatcgtccgcctcacaaggcccacccgccccgacaaggcccgccgcctcggctacaaggccaagcaggggtatgttgtttaccgtgtccgtgtcaggcgtggtggcaggaagaggcctgtgcctaagggtattgtctatggcaagcccaagcaccagggtatcacccagctcaagttccagaggaacaagagatctgttgctgaggagagagctggacgtaagcttggtggactcagggttctcaactcctactgggtgaatgaggatagtacctacaagtactttgagatcatccttgttgatgttgcccacacagccatcaaaaccgatccaaggatcaactggctatgcaaccctgtccacaagcaccgtgagcttcgtggcctcacctctgcaggcaagaagttccgtggcctgcgtggcaagggccacacccaccacaagaacaggccctccaggagagccacctggaagcgcaaccagaccctctcccttcgccgctaccgctgagcagcttgtcgggtgcttggatactgtcaccgtcaaacttgtcccaagcaaaacaaaaactttggctgtgtttggttgcattttcaaattttgctacttgtgttatcggcacttgaactaatgttagaagtcaattatggagcatatgtcatgaactatttgcaattcggctgtgttatcagacaaaaaatggttagtgatcgaaaaanaaaaa

SEQ ID NO: 451851 - DNA, 524 bp, Sorghum bicolor
cgtaagcttggtggactcagggttctcaactcctactgggtgaatgaggatagcacctacaagtacttcgagatcatcctggttgatgttgcccacaccaccatccgtaatgacccaaggatcaactggttatgcaatcctgtgcacaagcaccgtgagctccgtggtctcacctctgcaggcaagaagttccgtggtctgcgtggcaagggccacactcaccacaagaacaggccgtcgaggagggccacctggaagcgcaaccagaccctctccctccgccgctaccgttgagcacatacatcttgatgctctgctactgtggaacccgccccatgcaggctctgatagtatttggtatttttgttgcattgttaaattttgctacatgtgttccgagctccttgaactctgttatcagtgtaccatggagcaagtgccgtgaactatatttgtggttatcttgtgttctcagtcgatgaaaatgatggtttagtaatgtattgctgtgtattcggtctcgc

SEQ ID NO: 451852 - DNA, 741 bp, Sorghum bicolor
  unsure (1)..(741): unsure at all n locations
cgtccggggcctcaagcggttcaagggggacgaggagaagctggcggatttcgtgcggcggtatgtggccagactgctcaaggcggataagctcgccgtgctcggtgagctggaacgccaggaggaggtcgacctggccgtcaagatgttcaggatcatacaaaaggaggactggtataagccagatatttatatgtacaaagacgtgattattgcactagccaaatgcaagaagatggaggaagcaatggtaatctgggggaacatgagagatgagaacttgtttcctgactcacagacttatgcggaagtaataagaggattcttgagatatggctccccatcagatgcaatgaatatttatgaggacatgaaaaagtcacctgatccaccagaagagttaccttttagggtattgttgaagggtcttttacctcacccattgctaagaaatagagtaaagcaagattttgaagagctgttcccagaaaggcatatctatgatcctccagaagaaatttttggcatgcactgaggtatattcagagacatgaatgcgtttatattgattggatggccatgttgccaaaaagcaataaatgggcgagactgagatgctgattattctgatttctgatagccagattattgtccatatcattgtgcaagtttttgttgttcagccaaccccattaatattgngccatctattcacctcaacaagtacaactttgcatggct

SEQ ID NO: 451853 - DNA, 510 bp, Sorghum bicolor
gtactcccccagtccccctttcgccttcgtcctccgatcccagatctcaagccccgccgcagaacccaagccccaactccacgatgaggccgtcgctgctgagatccacgtcccagctcctccgccgccggagctactcctccgcatccgggcagcctgagcggaaggtggccatcctcggcgcggcgggcggcatcgggcagccgctgtcgctgctcatgaagctcaacccactcgtctcgtcgctctcgctctacgatattgccggcaccccaggtgtcgcggccgacgtctcccacatcaactcccccgccctggtgaagggcttcatgggagaggaacagcttggggaagcgctagagggctccgacgtggtaatcatcccggctggcgtgccgaggaagcccggcatgaccagggacgacctcttcaatatcaacgctggcatcgttaagaacctcagcgccgccatcgccaagtactggcccaatgcccttggcaacatgatca

SEQ ID NO: 451854 - DNA, 680 bp, Sorghum bicolor
cgtccgcccacgcgtccgcagcttcacttaacaccactacaccatcaacagctcaccaccccccactgctcttctgtcctgcaatggctgctccacgcctcgccctggtggtcgcgacgacggtggcggtcctggcggcgctgctgctggcgtcctcggagccggcatcggcggcggtgagctgcagcgacgtgacatcctcggtggcgccgtgcctcgggtacgcgatgggcaccacggcgtccccctccccggcgtgctgcaccggggtgcgctcgctcaacagccgcgcgtcgtcgacggccgaccgccaggccacctgcgcctgcctcaagagcatgacgagcaggctcggcggcggcggcggcgtcagcatgggtaacgccgccagcatcccctccaagtgcggcgtctccgtcggcgtgcccattagtcccaacgtcgactgctccaagatcaactgatgatcgatcataaggacatgcatgaggcatgctcgttggatggcgatcagcatgcagtcgtcgttgttttaccagatgtcgtccatgactccctccatggatgatgcatgcaatgagatagatacataaattaaggagtagatcatgcatgcaccgtacctgttagtgatcactccgtttaattagtatttactgtttactaccttgagtttacac

SEQ ID NO: 451855 - DNA, 1006 bp, Sorghum bicolor
ggcacgaggccgagtcgcccgaaaagacgagactaccccgctccccggaaagtcagagtggggagaagaggcggcttacgggcttagcgcatcgtcatcgcacctctacccaccggcggagccagaccaccacaaccagcgatggcggtggcggagctgtgggagacgctgaagcaggcgatcgttgcgtacacgggcctgtcgccggcggccttcttcacggccgtcgcggtggcggccgctctgtaccacgtcgtgtcggggctcttcgcggccccgccgccgccgccgccgcgcccgcgggaggagcccgaggcggagccgctcccgccccccgtgcagttgggggaggtctccgaggaggagctccgccagtacgacggctccgacactaagaagccgctcctcatggccatcatgggccagatctacgacgtcacccagagcagaatgttctatggacctggcggaccttatgccctatttgctggtaaagatgccagcagagccctagcaaagatgtcctttgagccacaggatcttactggcgacatctctggcctaggcccatttgagcttgacgccctgcaggattgggaatacaagttcatgagcaagtatgtgaaggttggtactgtcaagaagactgtccctgttgaagacggcagcaccgcaagcacggcccctgaagccagtgaggccaccactgaggctgagaaggcacagacaaccgaagagaagccaagggaggtatctgcggaggcggtaaaggagaaggaagccccatctgatgaaggtgcccaggaaaactagagcttttcagagcctcctgtgtatgcagcaataattcgacatggtcccattcggttcgtgtctgggccctgctatcctctcgtatcagcagcatggcctgtgtaattggatatgtcatctgtaccagccgccatggctcttgaggtcctggtgctttatattgttattatagctgtcgttgcagattttaaga

SEQ ID NO: 451856 - DNA, 529 bp, Sorghum bicolor
cgtccgcttgaggtctcaggtacagaggctgcaaagctaccagaaactatcaagaacctggaagcccagctagaaagagccttagaagagaaatcagtacttgaagaccagatgaagcagctggagcaggttatgtctgaatctttggagaaacattcacatgagcagtcctctcttactgcagatcttttgaagttatctgaggcaaacgcttctcttgaaaacaaattgtccgctgtggcagcagagcttatgcaagtttatgctgacaaggaagaagaatctcttgaaaatgagaagcggatttctgtcctcaatcaagatattgctgatctcaggagaaagcttgaattattgtcatctgagaaagccacagttgatgatgagttggccaaactgctagctgatattacgactcgtgacgaaaagatgaagcagatggatgaccacttaactcagcttcagtttgagcatgcccagctgatggcagagtttgacactgcacacaggtccttgtcagagctgcgga

SEQ ID NO: 451857 - DNA, 315 bp, Sorghum bicolor
  unsure (1)..(315): unsure at all n locations
cgtccgggttacagtaaaatcttctacacgtcagcagacttatgacctcatgtatatgtatatgtatatgtatatgtatatgtatatgtatatgtatatgtatatgtatatgtatatgtatatgtatatgtatatgtatatgtatatgtatatgtatatgtatatgtatatgtatatgtatgtgggggtgtatatgtatatgtatatgtatatgtatatgtatatgtatatgtatatgtatacgtatatgtatatgtatatgtatatgtatatgtatatgtatatgtatatgtcatatgatatgtatatgnatat

SEQ ID NO: 451858 - DNA, 890 bp, Sorghum bicolor
cgtccgcaccacctcgcctcgtcagatcgaccgaccgtgaggaagcgaatcggctcgtcagcccgtcgccatggccgccgtggaggtgtgcgtgaaggcagccgccgggaagcccgacacgctcggcgactgcccgttctcgcagagggtgctgctcacgctggaggagaagaaagtcccctacgaggtcaagctcgtcgacctcggcaacaagcccgaatggtttctggagattaacccagagggtaaggtgcctgtgctcaaaggtgatgatggtaaatgcattgctgattctgatgtaatcacccaagtcatcgaggagaagttcccaactccatctctggtcacccctccagaatatgcatcagtgggatcaaagattttcccagcctttgtcaagttcttgaagagcaaggatgctagtgatggttcagagaaggcgcttctggatgagctgcaggcactggatgagcatctcaaagctcatggcccttacatcaatggggacaatgtgtcagcggctgatctaagccttgcgccaaagctcttccacctccaggtcgcactagagcatttcaaaggctggaagatcccagaaaacctaaccaacgtccacgcctacaccaaggctcttttcagccgtgaatcttttgtcaagactaagccatccgaggagcacgtgattgcgggatgggcgcccaaggtgaacgcataagtgccttctgctttggtgctacctggtggactccatccatttatctgatcagtcgttgtcagtggtgtggataggtgtcgcgtctgtagcctggatgcatgattgagttggaataatgcagtgccgcgtcttgagtactcaggtctggctggtgccattgtgcatcttaccttct

SEQ ID NO: 451859 - DNA, 944 bp, Sorghum bicolor
  unsure (1)..(944): unsure at all n locations
cacgcgtccggggaaagctgtacacaatcatggaaatatgtcgtatgtttgacagtatctacaaagagcatctggatggagtgcgtcctggtggagagaaagtttaccatgtcttcgacaatcaatttcctgttgctattaaacgattgcaatttgataaacaactctctatggaaaatgtgaggaagcttataacagaagctgatggataccagcctcacttgatagctccagaacaaggatatcgacgccttatacaatcttgtcttattagtatcagaggtcctgctgacgcagctgttgatgccgcccatgccattctgaaggaccttctccgcaaggctatcaccgaaccccacgagcttgaagcagtttcccacccttcgtgtggaagtaggcaatgcggcttttgagtcattggatagaatgagggatgaaagccagaaaaatacattaaagctagttgacatggaatgcagctacttgacagtagatttcttcaggaagcttcctcaggatgttgagaagggtggaaatccaagccactctatttttgatagatataatgactcttatcttagacgaattggacaaactgttctgtcatatgttaatatggtgtgttcgaccttgaggaactccatcccaaaatctatcgtttattgccaagtgcgagaggccaagcgctcgctgctcgatcacttcttcactgaactgggagcaagagagatgaagcaactttccaaacttctcgatgaagacccagcagtcatggaacggagaacaaaccttgcaaagaggctggagctgtacccgagtgcccaatcagaaatcgatgcagttngcgggtccaaatagtcctgatggccaagatatcttttcttacatgttctttaccccttgtctggcgattctctctcctattctggggcatatatagctga

SEQ ID NO: 451860 - DNA, 866 bp, Sorghum bicolor
cgtccggtcgacaagtactgttgactatgtcaagagttttcttgaatggatgcgtgatcagatagcaaaatcttttgaaagcaatagagccaatgccttcttgttgaaaaaggtaatgctgataattaacaaagaagagcttgagaaattgggagatgctccaaaggtggttctagcatccatggcaagtttggaggttggcttttctcatgacatatttgttgagatggcaaatgaagcaagaaatctagtgctctttactgagaagggacagtttgggacactggctcgaatgctccaagtggacccaccccctaaagctgtaaaggtcactatgagcaagcgcattcctttggtgggtgatgaactaaaggcttatgaagaagaacaggaacggataaaaaaagaaaaagcgctaaaggctagccttgtcaaagaagaggagctgaaggcttctcttggatcaaatgccaaggcttctgacccaatggtcattgatgcaagctcatctcgaaaatctgcgaatgctggttcacattttggtgggaacactgatattctcattgatggatttgtacctccttcaaccagtgttgctccaatgtttcccttttttgaaaacactgctgaatgggatgactttggtgaggtcatcaaccctgatgattatatgatgaaacaagaagaaatggataatactctgatgcttggtcctggagatggtttagatggtaagattgatgatggctcagcacgcctgcttctcgattcaacaccctcaaaagtcatttccaatgagatgactgttcaagtgaaatgctcattggtttatatggactttgaaggtcgctctgatgggcgttctg

SEQ ID NO: 451861 - DNA, 560 bp, Sorghum bicolor
cgtccggcacacgggaataacctgcggggctaccgccgccgccgccgccgtccttagctgatatcatcgccggcgaagagcgccccagatccgccctcccgtactatggagtccgtggtgaacccgaaggcgtacccgctggctgatgcgcagctgacgatgggtatcctcgacatcatccagcaggcggccaactacaagcagctcaagaagggagctaatgaagcgaccaagaccctcaacagggggatatcggagttcgtagtgatggcggcggacacggagccgctcgagatcctgctccacctcccattgctagctgaggataagaacgtgccatatgtatttgttccatcaaaacaagctcttggccgagcttgtggggtgacaaggccggtcattgcttgctcagtgaccagcaatgagggtagccagctgaaacaacagatacagggtctcaaggactctattgagaagcttctcatctgatttaccgaagacctttcagtgtgatgggcctcagggacacaattttcagaggcttggactggtgatggtgt

SEQ ID NO: 451862 - DNA, 497 bp, Sorghum bicolor
cgtccgcccacgcgtccggctgcacctactgagtgcgcgactgatcccgctattggtaccaaatggagatcagttggatggcacaacagaagataaaacaagaatccatgatcacataagcaacttaaagttctctatatcaccaacagcttttttccaggttaatactcttgctgcagaaagagggtgtacccttgctggtgattgggctaatctcaattcagacacattactttttgatgtgtgctgtgggactggaactattggcctgaccttagcacatcgtgttggaatggttgttgggattgaaatgaatgaatcagcagtttcagatgctcacaaaaatgctcttatcaatggcataaaaaattgtcgctttgtttgtagtaaggctgaagatgtgatggggccccttctgacagaatatcttggttcaccacagcagcaggctgcagcttctgaaagtaattctgaaattgatgatacaaacaaaaatg

SEQ ID NO: 451863 - DNA, 353 bp, Sorghum bicolor
  unsure (1)..(353): unsure at all n locations
cgtccggtgcaaatcatcactcggctcgttggccgaagcttcctcctcgacctcgacttatccccatgggcaagtccggcgcaaaaaagaagaagccggccgccgccgccgccgcggcggcgaaaccgccgcccgcctcggctgagcagaaggcgacgccgccgccttcgtcctctttacccggggggggcggcggcgcgtcgcctcaccaggcggtggacgccggcgtcctcttgcgccgcgcgcacgagctcaaggaggaaggcaaccgcctgttccagtcgcgcgactacgccggggcgctgcgccagtacgagctggcgctccgnctcgccccgcgcgggcacccggac

SEQ ID NO: 451864 - DNA, 1124 bp, Sorghum bicolor
cgagctgaaatatatgcaatgaaagttatgaggaaggacaaggttgtggagaggaatcatgctgagtacatgaaagctgagagagatatactgacaaaagttgaccatccttttgttgtgcagctgaggtactcctttcagacaaagtaccgactttaccttgtcctggacttcataaatgggggccatctcttcttccggcgtttaccaccagggtttatttagggaggagcttgcacgcatctacactgctgaaattgtatctgccgtagcccacctccatgccaatggtattatgcatagagatttgaagcctgagaacatcttactggatgctgatggtcatgctatgctgactgactttggtgtggcaaaagaatttgatgaaaacactagatcaaactcaatgtgtgggactgttgagtacatggccccagaaattgttcagggccgaggtcatgataaggctgcagactggtggagtgtgggaatccttctttttgaaatgcttacgggaaagccaccgtttattggtggaaacagagacaagattcaacagaagatagtaaaggagaagataaagctgccgacatatttatctagtgaagttcactctctgttgaaaggattactgcacaaagaagctggcagacggctggggagtggaccaggtggcagtgatgaaattaagaaccacaagtggttcaagtctgtaaactggaagaggctggaggcccggcagatccagccaagcttccggccgaatgttgctggcaagacctgcattgcaaatttcgacgagtgctggacgaatatgcccgtgcttgactctccagtggccagccctgttgcagccaacagcaactttgtggggttcagttatgtgaggcccgcaccgttcctccaaaagccgagtccccttgctgaagaacgactcccgtaatctgagacctaccccggagttcaaatatttatctgagtccgaaccctatgtatttcttcaagacattagtgatggaaatctaaccttatattgttgttgcttgagaactacagtttggctagtgcaatgtgtaatattgccaaaacttcttattgaagcgccataattatcctcttaatga

SEQ ID NO: 451865 - DNA, 413 bp, Sorghum bicolor
cgtccggcgttttttaatttggaatggacggagtagctctaagatcattcaatgcgatacttgagtagctttttcagaccagccattattcatgtgttaggctgcacttttctgtcattcattcaagtgaacaaacactagaaggaattgcgccatatggtgaagagcagtttgtagttattcagggttgagactcttgatcagaaactgctcctactccctgcattttgcctgctttatactccatctgtttcaaactataagacgttttggtttttctatatacaatggtagacatagcaaaagctacgtatctagaaaagccaaaatatcttataatttgaaatggaaggagtaacatgacacacgagtccatgaccagagagagagagttgaggccaggttttaggtca

SEQ ID NO: 451866 - DNA, 528 bp, Sorghum bicolor
  unsure (1)..(528): unsure at all n locations
cgtccgaaggagctgaggagccaaatcatgcggtgatgctgaagagtttaagaaagcttttgttgagaagagaaagctcaatgttgagacaagcaagggccaaaaccgtgacagggagaagcttttcctagcaaaccaggaaaagttccatgctggtgcggataagcagtactggaaggcgatatcagagcttatcccacatgagattgctaacatcgagaagagaggggcaaggaaagataaggagaaggaaaagaagcctgggatcgtggtgatccagggcccaaagcctgngaagccaacagacatggcacggatgcggcagatattgctgaagctgaagcacactcccccaccacacatgaagccacccccgccacctgctgcagccactggaaaggatggagcaccagctgctgctggaaaggatggagctaagccagcagcccctgccatggcagtgtccctgagatggaaaaggccgncgcggtggcaccagtgcctgcagcagcaccaccagcagcaact

SEQ ID NO: 451867 - DNA, 405 bp, Sorghum bicolor
cgtccgagcacttgctaggacccagcacacagcagccgggctttgtttaggcaagatgatacaggaatgccaggagactgggactgcaggtcgtgccagcactctcatcttcagccgtcgggacatatgccagcgctgcagtgaaccacgcggagttgctgatcgtggcagtggtggtggaggtgactgtgccaacttcggtggccgtggcggttcctccttcggaggtggctttggtgctggctctgatgtccgccctggtgactggtactgctcctgcggtgcacacaacttcgccagccggttcaactgctgtaagtgctctgtctacaaggaggaggctgcatgtaaacagtggtgctggtggctatgatagtgacatgtcacgctcacggggctatggct

SEQ ID NO: 451868 - DNA, 575 bp, Sorghum bicolor
gcgtccgaacaccttgtgcatgtcttgtctgctgaacatagaccggacaacttcagaagctctagaatcttttgactacattgcaaaacatggtaatttcagttttactgagaggtttgccgtgaagtatgctggtgctgtagccatgtacatggtatctaagaagctaaagaagaaatacaacatagctgatgagcgtgcttcgttgtatgatgctgccaatacatggatcgaagccctgaatggaagagatttcctgggtggctccaagcctaacttggcagatcttgccgtcttcggtgttctaagacctatacggtacttgagagcaggaaaagacatggttgagaatactgaaatcggtgattggtaccaacgcatggaagttgcagttggagaaccatcaagaatacaggatgcagaaggaaactagaattttgacaagacattcttttaaagaatttagtggaacctgtgcctatacatggaggctattcaaaattttgcccaaattaagcgtatgcaataatgctctgccagatttcaagttctagcaccgaggaacagtgttttga

SEQ ID NO: 451869 - DNA, 804 bp, Sorghum bicolor
gcgtccgctagctgagttgcttcttggtcagcccctgtggccgggagagagcgccgttgatcagctggtagagattatcaaggttcttggtactccaacccgggaggagataagatgcatgaatcccaactatactgagttcaggtttcctcagataaaggctcacccgtggcacaagattttccaggggagaatgcctcctgaagccatagaccttgcttcccgtctccttcagtattcaccaagtcttcgctgctctgctcttgatgcatgtgctcatcccttctttgatgagctgcgggcgccgaatgcgcgcctaccaaatggtcgtccattccctctgctctttaacttcaaacatgaactagcaaatgcatctccggacctcatcaacaggcttgtaccggagcacattagacggcagaacggtgtcaacttcgggcatgttgggagctaggagggcaggcgttgcgatggtcgagtttttggtcttggttccccatgtgcagggccgatgcaagcgaaggtgatattgcaccatctggagaggagagaggggctcagcagtaccagagagaagtgagtatgtaaattatctgaccgttaaggagtaccgccagtgttaagccagtaactggcacatgttggtccagtagttaagggtaagaatgtaggtggagactggttaatgcttagggttgtttttggttattaccattttgtaatgttcgttggtacttccccagcagtagtgtagctgctcctgttttgttcgtccgcccatgatgtaaatgatcatcaccc

SEQ ID NO: 451870 - DNA, 706 bp, Sorghum bicolor
cgtccgagtattcattatctggttagtttatggaactgtgatgtctgaaaatttgggcaattccagtttcacacaatattataaaatcgtgatccaaacagataactatttgctaattgattagtctattgtcctacggctgaactattcgctagttgaattgtctattgtcctacggcaaaattatgtcgctagttaaattgtctaatgtaatgtggctgtccatgtggacttgtctgctactattattctttcattgtcatttaagaacgggtctcaaggcatcatgaaagattgttctttgtttcttggtaatgtcgagttatatattgtacctatagatagaaaagattagctgtgtacctgtttaatgtactcgagatgcctggttgcagtcattttatttgtaattagcttgtactatgatttattgtcgtccgataaaagcttcatgaagatgtgctgtaccatatgaagatccgcagcccatcttgagggtgatggtgtttgtatatgacgtctatgaagatcaactgctgtgcctacatggtaacgatggagagtttgtatatgatgtctatgaagatcaactgcagtgtctccatggaggtggtggagtatttatatgatgtgggaagatctactgctcggtatacattgtcggtatgaaattgctatggtcttcaagctttctttcttggtcact

SEQ ID NO: 451871 - DNA, 418 bp, Sorghum bicolor
cgtccggctattggcatttggcacgccatcagcgggagctgtcctcctcctcctccgaattcctccgatcctctctttggatagaaaagctagctgctcgtgctgctgctccccgtcgaaataggatccatggcgctgttgattggtcgtcgtcgtcgtgggagctcgagatgatgcttggggggggcgggcttcttcctgctccgcacgacggagggcttccacgcacaccaatcgctcgtagctagcagccgcagggccggtcgagttgtgcagcacgcaggcagcgccatcgcaatcaggctaggtagtactaggtataggtagctagttggtaggctacgcgctcgcaggtggcgtgtcgtcttacgtcgtcctccactcgtcgtctcctctctctctctctctctctctctct

SEQ ID NO: 451872 - DNA, 523 bp, Sorghum bicolor
  unsure (1)..(523): unsure at all n locations
cgtccgcaagaattctagaatctctctcctctcctctcctctctttaagaggggatacagagtaggggagagacagagggggcagagagcgatgaacgcggcggcggcggcggcgcggaaggccgcgggcggcggcatggcgcgcgcgccggcgctggtgctagcgctggtggcggcgggggcgttcctgatctcctacaacttcttcgccatgctgttccgcggcggcggcggaggaataggcggcgcggcggcgtcctcggggacgagggaccctgtggtggccatgccggcgtggatgcgcgaggcggcggacaccgaggcgcggcggcgggcccgtccatgtggcgctcacggccacggacgcgccctacagccggtggcagtgccgagtcatgtacttctggtacaagcggatgcaggcgcggccgggcggggaggccatgggcggcttcacgcgcgtgctgcactccgggaagcccgaccgctcatggacgagaccccaccttcctngtcacccgct

SEQ ID NO: 451873 - DNA, 846 bp, Sorghum bicolor
gtcgaccacgcgtccgcccacgcgtccgatttgattttattgatggatatgttaagcctgttgtagggagaaagattaactggatgaaggcagggatcattgagagtgatctggttctaacagttagtccacattatgtaaaagaactcacttctggcccagaaaaaggtgttgagttggatggtgtccttcgcacaaagcctcttgaaactggaattgtaaatggcatggatgtttatgaatgggatcctgcaactgataagcacatcagtgtgaaatatgatgcaacaacggcacctgaagcaagacctctcaataaagaaagattgcaagctgaagttggattgcctgtggactcgagcatccccgttataatttttgttggccgtcttgaagaacagaaaggatctgacatactcattgcagccattccagaatttgtgggcgagaatgttcagataattgttcttggcacaggaaagaagaagatggaggaggaattgacgcagctggaagtgaaatatccaaacaatgctagaggcatagcgaaattcaatgttccattggcacatatgatgtttgctggcgcggacttcattattgtcccaagtaggtttgagccctgtggtctcattcagttgcaagggatgagatatggagtgatccccatctgttcatcaactggaggacttgttgacacggttaaggagggtgtcaccggattccacatgggttctttcagtgtcgagtgtgaaactgtagacccagctgatgtcacagcagtagcgtcaactgtcacacgagccctgaaacagtatgacacctcggcattccatgagatggtgc

SEQ ID NO: 451874 - DNA, 437 bp, Sorghum bicolor
cgtccggtgactcttatcatggtttaggaatggagatacatggctacaaagatgaactgaaggcgttgggtgttactgttgaattaaaacgaggtgctagattcgtcatcacaggcgtcagcattcccagtgacccttccaagttgtccaaaactacaatcttgtcactgcttgggtgcatcaagagctacttcacccttgcagctggacctcctaagggcttccaggaaaatatgtgcaagaagtggttgaggacatccatgggatatcagtgtccgaatgattgtatcctctttgatccaatgcagtcttctgtctgcatagaagatggccctttcatagatgaagcattctatggttcagagatagccttatttaaagatgctcttaccagaatcggagtaactatggatatcaaaccttgaaaagaacttggt

SEQ ID NO: 451875 - DNA, 460 bp, Sorghum bicolor
cgtccgcctcgttccttcgttgggatctcgcgcgtcaagcgctatggccgccgtcgcgccgcccccggctcccgcgcccgccgcgcctgcaccggctgctgctgctgctgctgctccggctccggctcctgccaccgtccctgtcgcggatcaaaccacggatctgctgcagaagctgtcgctggatccgcagcccaaggcggcggatgcaacagagcctactgctgctgccaagaagcagggcgctgtgacgagccagccgctaagtgtggccataccgccggagcggtccatcacaccggtgcttcaagactttatggatcccaacctattctatctaccagcgtattactatggaggctacgacagttccatgagcgagtgggatgattatccaagatatctaaattcagatggagtggagattgccccagcagtatatggagatatttatggatat

SEQ ID NO: 451876 - DNA, 478 bp, Sorghum bicolor
  unsure (1)..(478): unsure at all n locations
cgcgtccgccgtccgccaccgcggaacggatcactcactgctcctcatcactaccactacccgggatacacttgtttaaaaagcctagagacagagagggggtgtgcctctgcctcctccttcctccttcctcctcttcgtcctctcgcatcggcatcgcatgccatgccctcgtcgacctcgagatcccacaccgcgccgccgtcaacttcgtcaccgagctcttcacctccggcacgctgcggcagtaccgccggaaacacccgcgggccagcgccgccgcggtccggcgctggtgccgccagatcctcgagggcctcgcgtacctccacgcgcgcggcatcatccaccgcgacctcaagtgcgacaacatcttcgttaacggtagccaggggcaggtcaagatcggcgacctcggcctcgccgccgtcgtcacccgccgccgncgccgncgnggtaacgcggcgagctgcgtggt

SEQ ID NO: 451877 - DNA, 465 bp, Sorghum bicolor
cgtccgctctcgtcaccatgatcgataagccgagcctagataggtggctgccagcagtggcagtgctatgctatatagcgcccccggtgtgctcgcctcgggagcgccttggaagcagcagcagagaacagagcagagatatcgttgcgtagagggaggacgagtgctccttctcgttcgtctttggcgcaaagcaaacgacgaccaaccgcgcgcacagccggccggcgcccagctcgataatttgtggcggcggcggcggcagcaagcaaagcaaagcagcagtcacatacaggcggaagcgaaccggccaatgtattcttcgtcgcctgcttgggagaagaagaagcgcgtgagcagccaagagcacaacaagccagtcttctgcaactgcagaaggtttcactacaagccggtcatcagcaggtcgacgccgcactgacgacgacgacgacgacgatgggg

SEQ ID NO: 451878 - DNA, 533 bp, Sorghum bicolor
cgtccgatcgcagtgtggacgcgtgagagagagagagagactcactgaccggcgaccgacttggggaaggaagcagcagcaaaggatggcgccgctgaagctgtacgggatgccgctgtcgcccaacgtggtgcgcgtggccaccgtgctcaacgagaagggcctcgaattcgagatcatccccgtcgacctcaccaccggcgcccacaagcagcccgacttcctcgccctcaaccccttcggccagatcccggctctcgtcgacggagacgaagtcctctacgagtcccgtgccatcaaccggtacatcgcgaccaagtacgcgtcgtcgggcgcggcgctgctcccggcgacggcgtcggcgaagctcgaggtgtggctggaggtggagtcgcaccacttctacccgaacgcgtcgccgctggtgttccagctcctcttcaggccgctcttcggcggcgccccggacccattggtggtggacaagcacgcgcccgagctcgccaaggtgctcgacgtctacgaggcgcacc

SEQ ID NO: 451879 - DNA, 490 bp, Sorghum bicolor
cgcgtccgggcattatctgctgatgacatgagggctgtgagtgtatgcgttgcttatgtgggcctgataccaaaaagtcttcagtagggggttttgcactgaaatttgatgtccataagaagaagcacgcacatcgaaaagagcgaacaggggaagaatcagcatgggcactatcccgattgtagggggttgtggaggaattgattgaaaagcttagcaaaggtgagcttccaaaagatgaatataactgtatgaacgaccctagtcctagtgctcatggaccgccaaccagtagctctgcccgatcaagtcccgctcactctatgcgatccagacgaacaggtggcacatgggctagacctcgtggctctgatgatggatattcaagtgattctgggttgaaacatgcctccagtgacttcaagaagcttggtcagcgtatatttgtttttgtaataagcggtgctactcgatcagagtacgtgctgac

SEQ ID NO: 451880 - DNA, 306 bp, Sorghum bicolor
cgtccggaaccaagctggcgtgcttcttgcttgtggtgcgacattgtactgggcagatggcaagactgcaaatttcaactgctcatttcttactaacctcgcttttgacgtcaccttatatggcacaaacggtactctccatgtcactgacttggtcattccgtatgaagaaaattctgcggaggtcagtgtggcctcaaagtcaaactttgtcaaacccaccatcggatgggatccattgccaaggaagcatgttgttactacagatctgccacaggaggcgctcatggtccaggaattcacaag

SEQ ID NO: 451881 - DNA, 510 bp, Sorghum bicolor
acgcgtccgtgtcaactgtagaacatccctttgatgatatgacctacaatatacctgagaagccagtgacatttactgaaggtgcttcttatagtcttgtaatacttgctggactcggaattgcaggggtggctggatatgctgtgttcaaagagcttatatttgagccaaaagagtacaagatatgggggaaagctctagcaagaattcagagtgatagccaggtcacctcaaggattggccaccctattactggatatggccaggaaactagaaaccgtgcagctcggcagagaattccaaataagatttggacagatgaagatggtgttgaacatgtggaggtgaactttctcatccgtgggccacatggagctggaaaagtgtattcagagatgttcaaagataattctgatcggacatggaagttcacataccttgtttgtgatatagtggcaccaccacatgcaaaaacaacagctgatggtagaatcttacttaccagcataa

SEQ ID NO: 451882 - DNA, 469 bp, Sorghum bicolor
cccagcgtccggctgctgctcccttgccggcacctctgcctgtgccgctcgtgcgaggccgccgtggacgcgtgccctgtctgctcagccgccaagaacgcctcgctccatgtcctgctctgctgaagcataccacgttccagcacgccgatgagcatggaagggaagccaaggcctttaatttctccgagaagctgcctgctgctcgacgacgatctgttctcagcttccgcacttggatcactcgatcaagcaaggggcaaatcatacagctgcaatctgttagacaaggaaaggacaaggtggatggagttttgacatctaaatgagatggaatcatgcctcaatttgttcatgttatcagcctggcaaagcaatcttgtgcgacgagcttgcagtgcgacaagccgacaaacactgctctgatacgcaaaaatctggcgatggcaacaaggtttgtgtagcttga

SEQ ID NO: 451883 - DNA, 1166 bp, Sorghum bicolor
cgtccgcgcccccgcctccgccccccgcgccgcgctggcggccgccagtcctgtcaacccctcccacgccgccgccatggaccccgtcgccacatgggggctaaccccgctcgccggcgccgacccggagatctacgacctcctggagcgcgagaagcggcgccagcgtcgcggcatcgagctgaggggctccgagaacttcacctccttcgccgtcatggaggcactcggctctccgctcaccaacaagtactctgagggcatgcccggtgcccgctactacggcggcaacgacgtcatcgacgagatcgagaacctctgccggtcacgcgcgctcgctgccttccgcctcgacgccgcgttctggggcgtcaacgtgcagccctactcgggctcccccgccaacttcgccgcttacaccgcgctgctcaacccgcacgaccggatcatggggcttgaccttccctccggcggacacctcactcacggctactatactgccggcgggaagaagatctccgccacctcgatctactttgagagcctgccgtacaaagtgagcgccaccaccgggtacatcgactacgagaaactcgaggagaaggcacttgacttccgccccaagctcatcatctgcggtggcagcgcgtacccgagggactgggactactccaggctcagggccatcgccgacaaggtcggggccctgctgctctgcgacatggcgcacatcagcggactcgtcgccgcggaggaagctgcaaatccttttgaatattgtggatgtggttaccactaccacacacaagtctcttagagggccaagggctggcatgatcttctacaggaaaggccctaagccccccaagaagggccagcctgagggtgctgtgtatgattatgaagacaagatcaactttgctgtgttcccatctctccgaggtggccctcacaaccaccagattgctgcacttgctgttgctctgcagcaaactatgacacctggcttcaaggcctatgcaaagcaagtgaaggccaatgctgttgcaattggaaactatctcatgagcaagggctacaagatggtgactgatggaactgagaaccaccttgttctctgggatctccgccctcttggcttgactggaaacaagggttgaaaactc

SEQ ID NO: 451884 - DNA, 840 bp, Sorghum bicolor
cgtccgcgcaacagaacagggatttgctggtggcatgcgtgcagctctccacatcaatccgtactatgggaagacctcaactgaaggaatgatttctcattttgaggctgttctcccaatgggcccgaccatcatctacaatgtgccatccaggagtgcccaggatatctcccctgaagttatggtgagcaatttcaggctatacaaacatggcaggtgtcaaggaatgcgttgggcatgagaggattcagcagtatgctgacaaaggtataacaatttggagcggtaatgatgatgaatgccacgattctaggtggaaatatggtgctactggagtcatttctgttactagcaaccttgttcctgggctcatgcacagcctcatgtacaaaggcgagaatgctatgctgaacgagaaactattgcccctgatgaaatggttgttctgccaaccaaatccaattgctgtcaacactgctctggctcagctcggggtggcaaggcccgtcttcagactgccatatgttccgcttcctcttgaaaagaggatcgagtttgtccggattgttgaggctattggacgtgaaaattttgtgggagaaaaggaggctcaggttctcgatgatgatgatttcgtgttgatcagtaggtactagtaagtgagttagtgtgtattttgatgaataaaactgagagtttgtcccttgcgtttacagacttcgttctgttcatcagtggttggttttaaatctgtttattaattagcgctcccttggctgcattgtataatctatgtgtcacgtttatagtttattacattgaattgccctactaggtaca

SEQ ID NO: 451885 - DNA, 1230 bp, Sorghum bicolor
ggcacgaggcttcctccttccgcctccctccccgatctctctcgctctctcgccgccagatgcttcgcagtttggatcgtctcgaacctcggcgaagatgagagagatcttgcacatccagggaggccaatgtggcaaccagatcggtgccaagttctgggaggtggtgtgtgatgaacatggcattgaccctactggccgctacactggcacttctgaccttcagttagagcgtgtcaatgtctactacaatgaggcctcctgtggccgctttgtgccccgtgctgttctcatggaccttgagcctgggacaatggacagtgtccgcactggaccctatgggcagatcttccgccctgacaactttgtgttcgggcaatctggtgctggtaacaactgggctaagggtcattacactgagggtgctgagctcattgactctgttcttgatgttgtgaggaaggaagctgagaactgtgactgcttgcaaggattccaagtatgccactcccttggtggtggtactggatctggtatgggtacactgttgatctcaaagatcagggaggagtaccctgaccgcatgatgctgacattctcagttttcccctcaccgaaagtatctgataccgtggttgagccatacaatgctaccctttctgttcatcagtggggggagaatgccgatgagtgtatggttcttgacaacgaggccctctatgacatttgcttcaggactcttaagctcaccactcctagctttggggatttgaaccatttgatctctgcaaccatgagtggagtcacctgctgcctaagggtggggtggcagctgaactctgacctcaggaagctggcagtgaacctgatcccctttccccgtctccacttcttcatggttggctttgcgcctttgacgtcccgtggctcccagcagtacagggccctcactgtccctgagctcacacaacagatgtgggacgccaagaacatgatgtgcgctgccgaccctcgccatgggcgttacctcaccgcctcggccatgttccgtgggaagatgagcaccaaggaggttgacgagcagatgataaatgtccagaacaagaactcgtcctacttcgtcgagtggatccccaacaatgtgaagtccaccgtgtgtgacatcccgccgaggggcctgtccatggcgtcaaccttcatcggcaactcgacttccatccaggagatgtt

SEQ ID NO: 451886 - DNA, 440 bp, Sorghum bicolor
  unsure (1)..(440): unsure at all n locations
acgcgtccggcgagcgagcgagcggagcgggaggaagagatggagcgggcggcgccggtgaggagctcccacacctccacggccgacctactctcgtggccgcagccccagggccacgccccggccgccacgccgtcgccgccgcgcaggcccggccagccgtcggaggctatcaggaaggtggtgttcgggggccaggtcaccgaggaggaggccgacagcctcaccaagaggaagccgtgctccgcgcccaagtggaaggagatgacggggagcggcatattcgctgccgggagcaatggcgacgctggggaggcagctgccgccgccgcgaagcccgcccgaaccgcctcgcgccaggcgatcagtactgtcagccacatctcgtttgctggggatggcactggtcctcccaaaaagcccacttantanctgaggtg

SEQ ID NO: 451887 - DNA, 386 bp, Sorghum bicolor
cgtccgcaactacccttgatgctccaaagaagcttctctcatcagaggcccttcaacgattagagccctgcaaacttaccttggggtctccctcagatagattgaatgcacttgttgaggccgtccttgttaaaccatgcactggattttgcatcagtcatgaagtcgcagtgttcctcagaaattacttttttaggcatgatgggacaataacttcttttattactgctcaggcttgcatgctgtaagcacttctccatggaacctctaagctttttgtgcattggaatgctggaggaagattctgaggaattttggcgtgataagtttgaatcgctccctccaacaatacggaaatatgcttttgatctaccctcacccaaaaa

SEQ ID NO: 451888 - DNA, 456 bp, Sorghum bicolor
ggcgtccgagcaacttctggttgttcaaggcatgattctccctccagtcaaagtgtccatgctgggagtggcagccctgtatctcttgaagacagccactctggctctacaaatggcaatggatcacctgtgagtgcatcgtgtgtcactgaggaccctactgatctcaagcagaaactgaaggatcttgaggctgcaatgctgggtacagacccagagatcgtcaacagtctcgagatctccatagcagaccaactttcgttggagcccgaggagtggaagcacatgatgagcatgcccggagggaacctgaaggagctgctgattgcctgcgctagagcggtggaatataacaacagctacgccattgatctgatgatcccagagctgaggaagaaggtttcagtgtctggtgaaccacttgagaggcttggagcctacatgggggaaggtctt

SEQ ID NO: 451889 - DNA, 577 bp, Sorghum bicolor
cgtccgtacaaaacaaatttcttagatacgatcgatagccatggtggtcatccatctcctcatgcttttctcttattatgctgctgctgtggtgtcagatcctgtggctcgtcaagagttatccaacaatacgaaccgtcgttccacagcactccagctacggccagagtactttcccaacgagcgactctaccaagcgtaccttgtcatccagcaattcaagggcactataactagtgaccccaagaacatcacctcaacctggatcggtcatgacatctgcggcgagacgacctacctcggtttctactgcgcaacacccccagggttagatgacaaggtaacagttacggaggttcttttcaacggatttggcctgcgtgcacccagtttgcacggtttcatcgatcagctccctgatatcgcgattttccatgctgcatccaaccactttggtggagatatccctcaattagacagcctgcgttacctgtacgaattcaatgtcgctaagtacgacctccagcctctgcacccttctaattataatgggggcatgtttgctggggcagttgat

SEQ ID NO: 451890 - DNA, 541 bp, Sorghum bicolor
cgtccgataaaacaaaaacaaaattagcatcatgtcggatatgaaggactccaatgcgcctgctgcacttgatggaaatcctcaacctatggaccaaactgaagacaattctatgccctcagctcagcaacaggaagaagcaatcaagaagaagtttggaggactaatgcccaaaaagccaccactcatctcaaaggatcatgagcgggcctactttgattctgctgactgggctctaggaaagcaaggtgtggccaaacccaaaggaccgctggaggcacttaggccaaagcttcagccaacacgccaacagcagcaacaacgcgcaaggcgctccatttacacttcgtcagaaaacgaggacggagatggtgctggtgctgaggagatgagcatcaactgaagtggagtggaatctgtaggacgtgggtacggttgttgcagaatcgcagcttgctttggccattgccagaattgattgctgagtaagtcgtcagtatatgtcaagtgttgtattttgctttgcaattgaagggcagag

SEQ ID NO: 451891 - DNA, 855 bp, Sorghum bicolor
cgtccgcccgccagaagtgcggcggcgcaggcggaccaggaggaggcggaggagaagcagcggagccaagccaccgccgccaccatgggtatctcgcgtgactcgatgcacaagcgcagggccaccggtggaaagcagaaggcctggaggaagaagcgaaagtatgagctcgggcgccagccggccaacaccaagctgtcaagcaacaagacagtgaggagggttcgtgttcgtggaggtaatgtgaagtggagggctcttcgcctggatactggtaactactcatggggaagtgaagctgttacccgcaagacccgtatccttgatgttgtctacaatgcatcaaacaacgagcttgtgaggactcaaacccttgtgaagagtgccattgtgcaagttgatgctgccccattcaagcagtggtacctcactcactatggagttgacatcggtaggaagaaaaaggctcctgctgcaaagaaggaagctgctgagggacaagggggtgaggctgcagctgaggaagcaaagaagagcaaccacgtacaaaggaagcttgagaagcgccagcaggggcgtgcacttgacactcatattgaagagcaatttggcagtggaagattgttggcttgcatttcttcccgccctggacagtgtggccgagctgatggctacatccttgagggtaaagagctagagttctacatgaagaagctccagaggaagaaaggcaagggtgctgcatcttagagcattcatttagctagaacagcagaatatcttgttttttcatataatttgtgcacctgatgaacactataagtgaatcaactcgctttcgaagaaataacgatt

SEQ ID NO: 451892 - DNA, 1374 bp, Sorghum bicolor
tcgcgtccggcagtaattacaaggaaaaaaaactgcaccaccgtgttcaatgtgcctcggaacttctgatcaatgtgctttgaaggaaacacaattgcagcaataggtttgtctgcataaccaccaccttcatcgattatgaatcggaggccgtcgatgtggagcttcccgtggtggccacttacaatgatagtttgcttgccagtcagatccttgggtgtgttccaaacatcttgcctcccactaagcatttgaacctttggcacccttgtgtctctggttctcaaaactctaagttgctcattcaaatctatggtcctctctaggccagcatggacggcaatcagattgcagatgatttgtccttcatccgtatcgagacccaaccagaccaggggcggcgctggctgacgaggaggcggagttgagcggccggtctaactcgataccgccacagccaccatgggtatctctgcgtgactcgatgcacaagcgccgggccaccggtggaaagcagaaggcatggcgcaagaagcgaaagtatgagcttggccgccagcctgcaaacaccaaactgtctagcaataagacagtgaggagggtccgtgtccgtggaggcaatgtgaagtggagggctctccgcttggatacaggtaactactcatggggaagtgaggctcttacccgcaagacccgcatcctcgatgtggtctataatgcatcaaacaatgagcttgtgaggactcagactcttgtgaagagtgccattgtacaagttgatgctgccccattcaagcagtgggacctgactcactatggagttgacatcggtaggaagaaaaaggctcctgctgcaaagaaggaagctgctgagggacaagagggtgaggcagcagctgaggaagcaaagaagagcaaccatgtgaagaggaagcttgagaagcgtcaggagggacgcgagcttgatgcgcacattgaagagcaatttggcagtggaaggttgctggcgtgcatttcctcccgccctggacagtgtggccgagctgatgggtacattcttgagggtaaagagcttgagttctacatgaagaagcttcagcgcaagaagggcaagggcgccgcagcttagagcattctcatggatggtcttacgccgaaatgtgtggcctattaaatattactcttgcttttttgttagtcgtctcaagttcagagcgtctatgtcatgttttgcagacctgagaacactattttctgaaaatgaatcaactctatctagctcttaagaattgagattttccgggttgtattttcgtgatgcttattttgcttgtttactagctgcaacagttcctgttaaagcaggtttggttt

SEQ ID NO: 451893 - DNA, 364 bp, Sorghum bicolor
  unsure (1)..(364): unsure at all n locations
cgtccgcgccggccacccactaatccatccgcgcgcggctatggatcacgccgccgagcacctcgaccccaccactccggcaccctcgtctgcctcctcctccgccgccgtcgccgaggtaaatgcgtggctggcctccctcgccgcggaggcgggaggcccgggcggggccggagggcgagggggcggcggangtgcggcggcggagctgtcgctggggtccgaccccacaccgcgcggggtggcctacctccgcgcgctggcctctgcgtcgcaggcgcggtcccgcgccgncggaatcgcgggtgcggggctgcgngcgcaggcggncnanncccgngcccgggcggcncggnngcgggag

SEQ ID NO: 451894 - DNA, 465 bp, Sorghum bicolor
cgtccgcatcccggtcgaccacgcgtcctgccttcgagaaggccgcagagcgaaggaaactgcacagtgctacccgtttcttgggctcttggcgcggaagaagaagggagagcgcggaagaagaagaagaaaaagggagagagaggggggcgacgaagatgtttatccagaaggcatggcggacggcggcgtttgggctctacggcttcgcccagttcacccaatccggtttcctggagcatgccaagaaattcagagaggggggtttgcacatcccgttggatgggaaaaattgcctggtaactggagcgaattctggccttggttttgctacagctgagggtttggcttcacatggtgctaccgtctatatgctctgtcgtaacaaggagagaggggaggctgctcttgaccaaataagatccaaaactggcaatgcaaatgttcatctggagatatgtgacc

SEQ ID NO: 451895 - DNA, 468 bp, Sorghum bicolor
  unsure (1)..(468): unsure at all n locations
cgtccggctcagccagctcctctcttcctcctccagctcatctcatccgcccgggccacctcgctcccatcccatccgtcccaaccaaccacagccagcaagcagatcagaggaatggcggcgacgcggctggcgcttgccctcctgctggcggcggcggtggctgcgtcgcagctgccggcggcggcggtggcggccaactacacggtgggcgacgagaaggggtggaacccggacgtggactacacggcctgggtgaagaagcacaagcccttctacaagggagactggctcatcttccagtaccagaacggtcggtcggacgtggtgcaggtggacgaggttgggtacgacaactgcgacaaggccaacgcgctgagcagctacagcaagggcagcacctacgccttccagctcaaggaggccaaagactactacttcatctgcagntatggctactgctaccac

SEQ ID NO: 451896 - DNA, 1165 bp, Sorghum bicolor
cgtccgcccaattcgaacgccggagctcgacgaggacgacagcacgcagagatccggcctactgcaagttttgaaaaccgaactgtaagatggcatcagcagagctttcccgtgaggaaaatgtgtacatggccaagctcgcggagcaggcagagaggtacgaggagatggttgagttcatggagaaggtagccaagactgttgactctgaggagctcactgtggaggagcgcaacctcctgtctgttgcatacaagaatgtcattggagcccgccgcgcctcatggcgcatcatctcctccattgagcagaaggaggagggccgtggcaatgaggaccgtgtaacactcatcaaggactaccgtggcaagattgagactgagctcaccaagatctgcgatggcatcctcaagctgctcgagtcccaccttgtgccctcttcaactgctcccgagtccaaggtcttctatctcaagatgaagggtgactactacagataccttgctgagttcaagactggagctgagagaaaggacgctgctgagaacaccatggtggcatacaaggctgcccaggacattgctttggctgagcttgctccaactcaccctattaggcttggactggcacttaacttctcagtgttctactatgagattctcaactcacctgatcgcgcctgcagtcttgcaaagcaggcttttgacgaggccatctcggaactggacaccctgagcgaggagtcctacaaggacagcactttgatcatgcagctcctccgtgataacttgaccctatggacttctgacatctcggaggaccctgctgaagagatcagggaggcacccaagcgtgactcgagcgaggggcagtaaagccggctttacgtgcctagaaactagtagctagtgtttgctgctgtctaatgacactatgcaatgtgatctggaccctagtttcttgggtgcgacccttgtagccgtgttatgattattgtcgggaaaatttgggggctccccatatgagatgctgccgggcaaggcctcggtgtcccaccttgtttcaggcgggggcactggagccaggcctggttgggttgggaagccctttaaactgttgtcacttgcattttaccttttcatcgctgtttattgtgagtggtcct

SEQ ID NO: 451897 - DNA, 958 bp, Sorghum bicolor
cgtccgacattttttgccctgcgctgtcactccacgcgcgacgcagctgctgcttctactgaaggaaagctttttcccagaataaaggctctctgtctgtctcagtgagaggaggagccggcggcgagggagatgaagacccggagctcagcgagaggggagccgaggcggctcgggaatgcggctctcctggcgctcatgctctgctccgtcgtcgcgctctccctcatccgggggaggttcgccccaattggagacgccatcaaatccgaggacgacgctgctgcagcggcggtggcggtcagcaaggcggctgctgtcaacgttgacaccggcgacggcgccgacgaggccgccgctgaagctgctgctgaggagaaagacaaggaggaggtccagccgaagccagccgccgacggttcccgcggcggcgcagccaagccggtgtgctacgagacgagccgccgctccgacacctgcgaggcggctggcgacgtgcgcgtgttggggagctcccagacggtgtacgtcgactcgctggaccgggagtggaagaccaagccgtactgccggaagcacgacaacttcgcgctcgcccacgtcaaggagtggtccctcaagccgctcccctccggcgctgcgccgcagtgcacggtgaacagctcggccaccgcgttcgtgctctccacgggcggcttcacgggcaacccgttccacgactacacggacgtgctgatcccggccttcatcacggcgcacccgctccgcggcgaggtccagttcctggtcagcagctacaagtcgtggtggatgaaccgctacatccagatcttccagcagatgagccggcacgaggtggtggacatcgacgccgacgacgaggtccgctgctaccggaacgtggtggtggggccgacgttccaccgtgagctcggcgtggacgcgtccaagtccccgt

SEQ ID NO: 451898 - DNA, 383 bp, Sorghum bicolor
ccggtcgacccgcgtccgccacgcgtccgaacataatcctagcactgcacattcataaaatcaaaactgaaattttaaattttaaatgtgcacatccttctaaaacttattccttaataatatgacacgccagcacattcagaagatcttgcatttctctatagctattttcatattccaatcacattctttgcggcccttctcatgaataatagtgcaagagcctttcttttggtacgaatagtctaaattttagtagatgtacataaagggagttggtttgagctttggatcaacttcttcattgtgctaatctgcaagtacattgggaatcagacattgggctctggagctggacggggcacaacagggttggaaacttg

SEQ ID NO: 451899 - DNA, 394 bp, Sorghum bicolor
acgcgtccggcttctctcccggcggcgcctccacagctcgtctctcagatcgggaggcgaaaccaaggaatacatatacatatttgtagttggatcttcaaaaaaagtcaagatggtgaagttcacggctgaagagctccgtggcatcatggacaaaaagaacaacattcgcaatatgtctgttattgctcatgtggaccatggaaagtccacgcttacagattcccttgtggcagctgctggtattatagcccaggaagttgctggtgatgttcgcatgactgatactcgtgcagatgaagtagagcgtggtattacaatcaaatccactggtatctctctttactatgagatgactgatgagtcactgaagaactacaagggtgagagggat

SEQ ID NO: 451900 - DNA, 990 bp, Sorghum bicolor
cgtccgcgaagccagggttgcagtcctatctccaccgaaaccatccgattcttctccaaagccaagaaaccgacgagaccatcatggctgctggcagcacggccaagaccctgctcctcggcttcctccttgctctcacggcgacctcgacgccggcggcggccaccacgctgacgctccacaacctgtgcccgtaccccgtgtggccgctggtgaccccgaacacggggttcccggccatctccgagaacacgggccgcctcgacggcggcgggcgcgggctcgtctccttccgcttcccggacagcttctgggcgggccgcgtggtggcgcgcacgggctgcagcagcagatccggttcgccgccgtcctcgtcctcgtccggctgcgagacggggagcacgccgccggcgacggtggtgcagctggtggtgcacgcggaagggcaggacctggcggcgtacagcgtgagcctggtggacgggttcaacgtgcccgccgtggtgagcccgcaggcagtgggcggcgggcagtgcccggccctggggtgcgcggcggacctcaacggcgggtgcgcgcgctcgcagcgcgtggtcggggcaggcggcggcgtggtggcgtgcaagggccccgcggcgtacttcaaggagcggtgcccgctgacgcgcaccacggccaccgacgtcgagcccgtgccgcagcggtgcttcgcgcccggagagctcaaggtcatcttttgccagtccgccatggagaacaacaacgacgccttcggcgagcccgaaacgcatgctggcacacgttctgagctggcagttgtgacaatgaaaatctatcctgtcttacaaaatcatttagaagcaaaagcaaaacaatacaaggatccagccctgatgcacatatttctgatgaacaacattcactatatcgtcaaatctgtccccaaatcataagccaaggatttgttgggtgatgactggattaaaagca

SEQ ID NO: 451901 - DNA, 475 bp, Sorghum bicolor
cgtccgcggacgcgtgggttccatgatcaaggagtgtgctgggcacaatgatgcaatactgctcgttgtcatacccgcaatgcaagctgctgatgtcgcatcgtctcgagctctgaggttggccaaggatatcgattcagatgggacaagaactgttggtgttataagcaaagttgatcaagcggggggagatgcaaaaactatagcttgtgttcaggccctactgtcgaacaagggtccaaaaaaccttcctgacatcgagggggttgctctaattggacaatctggtgcgcttgcgttcagcacaatcacctgggtctgaaaactcgctagaaacagcttgtcgagctgaagctgaaagcctgaaaaacatcttaactggagctccccagaataagcttggtagaactgctttggttgatacaattgctaagcaaatcccgaaaagaatgaaagtgcgggttcctaacctatt

SEQ ID NO: 451902 - DNA, 431 bp, Sorghum bicolor
gtcgaccagcgtccgtcaggtatagtgatttcatcaacaaagagctgatactcttctcaatggcggacctgcagcgatccataccttcaatggttgatggccttaaaccaggtcagaggaagattctgttttgttcattcaagaggaattttgttaaggaagccaaggtggctcagttctctgggtatggggcagaacactcagcataccaccatgccgagcagagcttagcacgtacaattatctgcaatggctcagaattttgttggcagcactaccatcaaccttatgttccctggtggtcagtttggcaccagagctcatggaggcaaggatgctgcgagtcctatgtacatcttcaccaagctgtcccatatcacacgttcaattttcccgaaggatgatgatattctacttaattatctgaatga

SEQ ID NO: 451903 - DNA, 551 bp, Sorghum bicolor
  unsure (1)..(551): unsure at all n locations
cgtccgcattcccggtcgaccagcgtccggctgtgaccctggaacgtcttacgatcaggcatctcagtttaacaatgttagttctgggtggaatggtcaaactgccaacccggcggcgtccccaccagagcaaacactgaattatgatgatcaaagtggaaaccttccgccacctccttgggaggctcagtcagcggcgagcaatggagtgccaaatggccatttgggaggcatgcaacctctcacagggccaggccagatcggcggcatgcagcagccactgcaaccacaagttaaccacatgggaggtccacaaagccagccaatgtacagtaaccaaccaggagtcgggctgcctcagcaagcgatgcaacctggtcaagttgccgcaacacagatgcagccaggttttgcaaaccagcagttcggttcgctgccaccaacatccatgatgggtgtgcagntcggtggcatgcagccttcacaaagtatggcggatcgcagccagtcatgatgtaccccgaacagatgccagttggacagtatggagc

SEQ ID NO: 451904 - DNA, 491 bp, Sorghum bicolor
cgtccgcctgcgcccgccgattcgtccagctcgcctcgcgccctcgcccgctcgcctagctcccctgtctcttcccttcatcctccccacctcctcccccgcgaccgtgctcccgcatgccagcgcgctgaccggcaccggcggacgacggggggtcggggccgggtgggcatcatggacaagtacgagcctgttcgggacatcgggtcgggcaacttcggggtggcgcggttgatgcgcaaccgcgagacccgagggctcgtcgccgtcaagctcatcgagcgcggccaccggattgacgagaatgtgtaccgcgagatcgtcaaccaccggtcgctgcggcacccgaacatcatccagttcatagaggtgatcctaacaccgacgcattttgcaattgtgatggagtatgcggctggtggtgaactatttgatcgaattggcgatcgggggcgatttagcgaggatgaggccaggtattttttccagca

SEQ ID NO: 451905 - DNA, 566 bp, Sorghum bicolor
gcgtccggaagatgagagcatcgctacttcttccagcagctcagttagatgagtaagctagctgccattcaatgcacgtatgccaccgtgatctgaagctggagaacacacttctagatgggagtgatgctcctcgcttgaagatatgtgacttcggctattccaagtcatctgttcttcattcccaggcgaagtccactggtggaacacctgcttatattgcacctgaggttctgttgaaaaaagaatacgatggcaagattgctgatgtttggtcatgtggtgtaaccctctatgtaatggttgctggtgcatatccttttgaagacccagaacagcctaagaacttccgcaagacatttcagcgcatcttgaacgttcagtacgcaattccagacaacgtgaacatatctccagagtgcaggcatctaatttcgaggatttttgttggagatcctgctatgcgaataacaatccctgaaatccggaatcatagttggttcctgaagaaccttcctgctgatctgatggatgatgatagcatgaaccaccaatatgaggagcct

SEQ ID NO: 451906 - DNA, 545 bp, Sorghum bicolor
cgtccggtggaacgccagttagacagtctgcggggagtgcagggaaaatgttgaaaaggtacacagacttatcttctggaggtgattcgtctgacaatgataatgaaactgctgaggtgcctgaggacttggatgataaggagatggtgagtccagaaattaaggatgagagtgaaagcgaggagcgtgaaacctgcagattcttcaacagtagccctttctagcaaggagcctcttgttcaggctactttgtctagcatgtttaaaaaggcagaagaaaaaaagagatctacaaggagtcctaaagggtcccctgcaaccaaaggtgctgctgctaagaaacagcgagcaagtctaatggcaaaacagtcagcaggggtcaagaaggctagcggaactcggggaaagaaaaaaccaaaggtggaagaagatgaaatcgaagagctctcaagttcctctcaggataatggcacagatgatgattgacgacgaccatgatgatagtgacgaggactgggcccagtaatgccctttgtagttgatcg

SEQ ID NO: 451907 - DNA, 421 bp, Sorghum bicolor
cgtccgcccacgcgtccgcccacgcgtccgcggcgtgtgccgcaagccgcgactcgcgacgcgactctgcccgccgccgccgccgccgccgccctctcccgctgctccctctctctgcgcacgccgtcggccgcgctgctcctccccgccgtctgcgcacgtccgaagctccaccggatgctcgggggggccaccggcgccggcgccgccgcctaggttccgcctacccccataggcgaggcggggagctccgattcgcgactagtcgcgcctaggcgagcgcctagcggaactatgatttcagtgataagttggtttaaccttatgctatgtattgcagttcactttcagagtttgctggtcttggggttgaattgggttactccatggagaaccctaactcattggttctttgggaagc

SEQ ID NO: 451908 - DNA, 468 bp, Sorghum bicolor
  unsure (1)..(468): unsure at all n locations
gcgtccgcaattaattatacattatttgtcttggactctgtgatagagtcttgcattgtgagtgccctaagcaaaagaaaaggtggcgactgattcctaaaccacacacagcattgtgccgtacatattatagccagccttttgcatgtatacatgtactgaatttaataatttccctgcaagctggacaaaatagccaatgtgatgactcagcaactgagaacatcaaaaagcttagccatcagaaggtaactgatcctcctcaagctccattgtacatatgaaacattccctctggaaaattattaaattcaggacatgtatacatgcaaaaggctggctataatatgtaccggacaatgctgggtgtggtttaggaatcaggcgcccccttttcttttgcttagggcactcacaatgcangactctatcacagagtccaagacaaatnaatgttaattaattgcg

SEQ ID NO: 451909 - DNA, 501 bp, Sorghum bicolor
cgtccggttttccttcccccacaagtccaccacactgcgattccatggagacaggtcaggcagtccaggaaagcgctctgcacgccgggaggcaggcgtggtggcctttggacaccatggcatgcagcttggacgacgcgagcaccatcagcagcagcttcctccttggatgggatccacaggtggtgctactttggtctaggagcaatgggagctgccgccggcgattctgatacccatggccatgcgcgagagcttgagctcttcgtccccaaatgcatggagtctccggtgtccgaggcgtcaacagcagcggccacggaccggacgatgcaaaaggacgcggcagcgatgcccggggagctggatgaactactcatgagcctatgggacgactcggacaaggagctggccgggggcttcagttcctgcggcgctctcaaggagacgagtgccaccatctcttcccaatacgatgatcattccgatctgagctccctt

SEQ ID NO: 451910 - DNA, 726 bp, Sorghum bicolor
cggacgcgtgggcctccggctccgccgtcccatggccgcagcgccctgtgcctgtgcctgggacacctccttccacgaaaagcaatagcagctctacccctaccaataccaatctggatccaaatcgaccgctaagctaacactaaatcatcttcccttcccgttcgagatccaagagctagcagaggcggttcgcggagagattcagtaatctgcgctgccggcgaagaagaagaagaagaagaagggggaggtagagcggctggagatgggcaagtacgtggagctgctggacatgggcgtgcgcatcgcggcgcggttccactcccactgcccgcagaccgcgcgcctctactaccacccgcccgccggcggcaccgggtcccacgcggctgcggcatccggcggggacggccgcaagggcgacgccgcggcctcggccgcgatgatgatgaagaagcagcaggggcagaggctcgacgccccctcggagatcatcctctacaccgtcgtctagactagtcttggccggccgggattgttgtcgccggaggagccgtcgtccacaggaccggcggcgatgtatcattcattcgtgggagtcgatgtgttgctcccgttttttttttttccatttgggttttgggttggtggaactcgtgtgtaccatgagttttatttaatccatttcttcccaaggggctcaaatcgctcttggttccaaaa

SEQ ID NO: 451911 - DNA, 922 bp, Sorghum bicolor
  unsure (1)..(922): unsure at all n locations
ggcacgaggggcgtcgctcctaccgccaccggccggactcccccccccccccccccaccttgtccccatccgcttgcctcctcctccttcttcttcttcttcttctactaattgctctgctccgctgttaccgaggcccggagggaggaaagagaggatggcggaggagacggtgcgggagctgcgcgcgagcttcacggcggggcggacgcggtcgcccgagtggcgcgcggagcagctcaggggactcatccggatgatcgacgagaaggaggccgagatcagcgccgcgctccatgaagacctcgccaagccgcacatggagtcctatctccacgagatctcactgacaaagtcgtcgtgcaagtttgcgatcaacgggctcaagaactggatgaagcccgaaaaggtacctgcgtccataactacattcccgtcctccgctcaaatcgtgccggagcccctcggtgtcgtgctcatcatctcagcttggaactaccctttcatactctctattgacccggtcattggagcgatcgcctctggaaatgccgttgttctgaagccatcagaaatagcgccagctacctcgtctgtgttagcaaatctgctacccaagtatgttgataactcctgcattaaagttgtggagggaggcgttccagaaacaaccgcactggtggaacagagatgggataagatcttctacacaggtagtggaactgtagcgcgcatagggatggcagcagccgcaaagcatctaaccccggtggctttggagcttggtgggaaatacccctgttgttgtggattcgaatgttgatcttcatgttgccgttaagaggattgttgttggcaaatggggatgcaacaatggccaaggggggggggctccanattacatcataaccacnaaatcatt

SEQ ID NO: 451912 - DNA, 381 bp, Sorghum bicolor
  unsure (1)..(381): unsure at all n locations
cgtccgcactgtgaaaaccgtgagctcggtgcagcgtggaggaggtgcggacgacccttacgcgaggatcgtctacaactacgagacggcgttccacggcttcgcggcgaagctggacgaggacgaggccgagcggatggccgaggcggacggcgtggtgaccgtgctcccagagacgggcggtgcgggtgcacaccaccaggagcccggacttcctgggcatcagcccggagatcagcaacagcatatggtccgccgggctggccgaccacgacgtcgtcgtcggcgtgctcgacaccggcatctggcccgagagccccagctttagcgacaagggcctcggcccagngccggccaagtggaagggcctgtgccagaccg

SEQ ID NO: 451913 - DNA, 682 bp, Sorghum bicolor
cgtccggcattcccgggccgtgtttccaactccggtgactccaccagcaacccagcagcccgcgcagcgatcccactccggccaccgccatgtcgaggcgcggcgactgggtctacgagaacaacggcgggacctgcgtggccatcgccggcgccgattactgtgtcgtcgccgcggacacccgcctctctgtaggatacagcatcctcaggggcgaccactccaagatctgcgacctggctgacaaatgtgtactggcatcttctggctttcaaggggacattaaggctctgcacaagaacctagctgccagagaattgcttataccaacaccagcataataaaaggatgagctgccctgccatggcacagctcctctccaatacactgtactacaagcgcttcttcccatattacgccttcaatgtgctcggtgggcttgacagcgaggggaaaggatgcgttttcacctatgatgcagtaggttcctatgagagaaccggttacagcgctcagggaacaggatctactttgatgatgccagtcctggacaatcaactaaaatcaccaagtcctctattactccctgccagggatgctgtcacaccattgtcagagtcagaagcccatgatctaagtaaaggagtgtttgcatctgcaactgagagagacatctacactg

SEQ ID NO: 451914 - DNA, 534 bp, Sorghum bicolor
cgcgtccgcagccgcgtcctggaggccggagccatgaagcctgtcaatgtcgccgaacacaaccaccaccaccatggcctacactcccccacgcccgcgtcggcgaccaagatctcgattcccgtctcttccggcgaggcggcgctgttcgggaagggtaggtacaagggtgggccctcgccgccatcgccctcctcgcgctctggtccatgttcgccgcctccgtcacgctgcgcttgtcctccggggagctcgccgccacgttcggggacgtgagcgatccgctcatcgacgatctcgatcccctcgagatggagcaaagggaaaagctagtgcgccggatgtgggatgtgtacacacgcacggataatcatgtacgacttccacggttctggcaagaagcatttgaggctgcatatgaggagcttgctggtgatgatacgcttgctactgatgcggctatatctgagattgctcgcatgtcaatccataggcctgaggttgagcaatcatggaataagaattagtttctac

SEQ ID NO: 451915 - DNA, 437 bp, Sorghum bicolor
  unsure (1)..(437): unsure at all n locations
cgcgtccggcgccgcgcaatggcggccaagcagcggcagcggcagcggcagctgcgcctcctgcctctcctcgccgcggccgtcgcgtggtcgctgctgcgcgcgtgcggcaccgccgccgaggtcacgggcacgggcacgctcggcctccggcatagcaagcccgcgcggcagcacaacggcgcgcggcgcgggggagggaaccagcgtggccgtggccgtggcggcgccgcccccggcaccggcatggcgtcgtgcaacctggtccagggcagctgggtgtacgacgacacgctgccgatgtacgacacggcggggtgccccttcgtggagccggagttcgactgccagaagtacggccgccccgacaagctgtaccttaagtaccggtggcgcccgaccttctgcgacctnccgaggttcgacgggcaggagtt

SEQ ID NO: 451916 - DNA, 489 bp, Sorghum bicolor
cgtccgcttatgaagcgcattgcacggcaattggaagaagcatcagtgtcagatcttctgatccctacagtggatggggataccactgtttacgacattgacctgattcttagcattgttgaagaatttgtcagacaagatagtaagaatgcccagagacataatggtggtgaagtgaatgaccatgtatcagctcctagtgcatcaatgattacagtggccaaaattgttgatggatatctcgcagaggttgcaaaggacccaaatataccggtctacaagttcttcagtctagctgagacagtttcagccaattcaaggccggttcatgatgggctgtatcgcgccattgatatgtatctgaaggagcacccaggcttgggcaaaagcgataagaagaggctttgtgccctcatggactgcaagaagttgtcgccagatgcatgtgctcatgctgtgcagaacgagcgcctgcctctgaggattgtg

SEQ ID NO: 451917 - DNA, 464 bp, Sorghum bicolor
cgtccgagcaggaacactcacctagctactctctcgcttactagaaggtccaagaacactagagcgacaatggcgccgtcctcctcctcctcgtcggcggcggccgtgctcctcctggcggtggcggtggccgccatgctcgccgcctcgtcgacaccggtgctcgcggacctgacgcacgccaactgcgccaagaacaagaaggtgacggtgcagaacctgtgcagccacgacgtgacgctgacgctggagccgctggcgaacagcccggcgctgttcgccggcgcctacacgctgcacccgcacagccacgccgagttcccggtgtgctggtggacggggcggctccgggcgggcgccgacgccgccgtggtggagttccacgtcggcgtcgacggcgggtccttctacctggccccgcgccagccggcagccgtccggctcgtacccggacgtcgcgttca

SEQ ID NO: 451918 - DNA, 502 bp, Sorghum bicolor
cgtccggttactcgcttgaaggctgacaacccactttatggatcttcactgattgattatgcccatattgagcaatggatggactttgctacgacagaggtcgatgcaaacactggaaagtggttgtacccacgtatggggttttatccttatgctgctgtgacagaagaatcggccattgctgccttgaagagagcatttggttccctgaacactcatcttgcatcaaacacattccttgttgggcattcagtgactcttgcagatatcgtgctgacatgcaatctttatttgggctttagccgtatcttgactaagagttttacctcagaattccctcatgttgagaggtacttctggaccatggttaaccaaccaaacttcaaaaaggtcattggagatgtgaagcaggcagaagctgtgccacctgttccaaagaaggctgctccagccaaagagcagaagcctaaggaagccaaaaaggaggcccaaaaagaggccc

SEQ ID NO: 451919 - DNA, 914 bp, Sorghum bicolor
cgtccgcccacgcgtccgacgcaacagccgaaggaaaaatttccccccaaccaaaaaccctctctcccaaaccctagctaccttcggatcccgatggcgaacccgcgcgtcttcttcgacatgacggtcggcggcgcggcggcggggcggatcgtgatggagctgtacgcgaacgaggtgcccaagacggccgagaacttccgcgcgctgtgcacgggcgagaagggcgtggggaagtccgggaagccgctccactacaagggctccaccttccaccgcgtcatcccgcagttcatgtgccagggcggcgacttcacccggggcaacgggaccggaggcgagtccatctacggcgacaagttccccgacgagaagttcgtgcgcaaccacacgggccccggggtgctctccatggccaacgccgggcccaacaccaacggctcccagttcttcatctgcaccgtcgataccccctggctcgacggcaagcacgtcgtctttggccaggtcgtcgagggcatggacgtcgtcaaggccatcgagaaggtcggatcccgcagcggatccacctccaaggaggtcaagatcgctgactgcggccagctcagctagatcgtgggtctggtctgcccgtccgccctccctcccgtcatcgtccactccgcctgcgtcccgtcccgtttccggtctgcttcgatctgaataagatgatggtgatctgagcggtggcctgagttgagtcgtttatttatcatgcgcggccgtctgtgtcgctcgcgggttaatctagcggtgtaggtgtggatccccgaatcccatggcgcctctgcttacttcgtgtttcatcaccagttatatgttatgagatccaggataatgcattaatgctatgagaactgagattcggtttaaaa

SEQ ID NO: 451920 - DNA, 974 bp, Sorghum bicolor
cgtccgaaagccccgcccgcctctcctcgattaacaaatcccccaaccactccagatccccaaaaccctagccgcccccaccctccggcgatggcgaacccgcgcgtcttcttcgacatgacggtcggcggcgcaccggccggtcgtatcgtgatggagctctacgccaacgaggttccccgcacggccgagaacttccgcgcgctgtgcacgggcgagaagggcgtggggaagtcgggcaagccgctccactacaaggggtcgacgttccaccgcgtgatcccggacttcatgtgccagggcggcgacttcaccaggggcaacgggacgggaggtgagtcgatctacggcgagaagttccccgacgagaagttcgtgcgcaagcacacggggccccggggtgctgtccatggccaacgctgggcccaacaccaacggctcccagttcttcatctgcaccgtgccgacgccctggctcgacgggaaacacgtcgtgtttgggcaggttgtggaggggatggatgtcgtcaaggcgattgagaaggttgggtctcgcagtgggtccaccgctaaggaggtcaagatcgccaactgcggccagatctgataggtgtcgagcttgccgccgccgccctccgtcgttcgtcatcggctcgtcgtcctcccccctcctccttccatgctcctgttcaattcccttccccttcctcgctctgaataagatggcgtactgtcggtgatctgagaggtggtttgagtacttgagtctgaatttgtgtccctagtgtcgtttgtgtcatctgtccgtttaatcgttggtggtgactagggtttcataggtggccgatccgtggatctggtgtatcttgcctgcctaattatttcgtcgtcgtgtttctgctgtgtaatggtgtgatcgggcatgatgattatgctaagacaactgctgaaacttgctttaattttcttgttct

SEQ ID NO: 451921 - DNA, 532 bp, Sorghum bicolor
  unsure (1)..(532): unsure at all n locations
cgtccgcgaaagagagcagagcttggcaatggagcttccatggggaatgctgctgctgctggtcctctccgtctcctcctcgtcctcctcctcggctgccgccacgctcgccgtcagtgctccgcccccagtgcctgcgcctcgtcatgctcaagacgctgaagggctgctcatcaacggcaactttgagacggcgccgaggaagctgaacaagacccttatcgtgggccgtcactcgctgcccggatggacggtgcagggtcacgtggagtacgtctcgggcgggccgcagccagggggcatgttcttcgcggtgccgcacggcgtgcacgcgctccgcctcggcagccgcgcgtccgcgtcgcagaacgtgacggtgcgtccgggcgcactatacgcgctgacgttcgcggcgacgcggacgtgcgcgcaggacgagtccctgcgcgtggccgtgtcgccgtcgctctgggcgcccgccgacgtcgccgtgcgcacgctctacagcggcgcgtncgccgacacctgagcc

SEQ ID NO: 451922 - DNA, 466 bp, Sorghum bicolor
cgtccggggatggggtcgcgccagtcctgcctcaacggcgccggcacctccattgccgtcctgcgcgagtcccacgtccccgccttgctgtgcacgttcatcgtcgcgctcggccccctccagttgggcttcaccaacgggtactcctcgccgacgcaggacggcgtcgtccgggacctcaacctctccatatccgagttctcggtgttcggctcgctgcccaatgtaggcgccatggtcggggcgattgccagcggccagatggccaagtacattggccgcagagggtcactgatgattgcagcgattccgaacatcatgggctggcttgcaatctccttagcaaaagacacttcgtttctgtatatgggaagattgcttgaaggatttggtgtcggtgtcatgtcgtatgtggtaccagtatacgtagcagagatatcttctcagaacatgagaggagctcttg

SEQ ID NO: 451923 - DNA, 636 bp, Sorghum bicolor
cgtccgcaacttgacatcctactgtgagtcatcggcgattcagcgagcagcacacctgaccaaccgaactctgtagccaccaagaaccgaggaggagcaggagaaggacggacatggcggcagcagcgaaggcgtcgtggatggtggcgatgagtgtgggcgccgtggaggcgctcaaggaccaggcggggctctgccgctggaactacgcgctgcggtccatccaccaggccgccaaggccaacgctcccagcttcgcacaggccaagaagaagctggcgccggcggagaggaggcgggcggacaaggccgaggaggggatgaggaccgtcatgtacctcagctgctggggccctaattagttattgggcatagttgcctaggtcctctagctcttttccagctttcagtaacccagatcggtcctctggttgtaaaaatatgaccacgatgatgatgatgaaaggctcttttaaaaaaaaaaaaaagcggcgttagagtcaagtacgacctgctgcagatagctttatggaccaataatactgcgcgttcacgcggctgaacctggtccactatgctgaaatccttgcgtggatacaagcgcgtgctcaatgcacatgatgccctgcgctaccg

SEQ ID NO: 451924 - DNA, 1640 bp, Sorghum bicolor
ggcacgaggcagagacaggcgtcttcgtactcgcctatctccgcgactcaaagcttctcccccttctcccatttcccaccgccgccgccgttccacccttccgacgacaccatgagggagtgcatctcgatccacatcggccaggccggtatccaggttggaaacgcgtgctgggagctctactgcctcgagcatggcattcaggctgatggccagatgcctggtgacaagaccgttgggggaggtgatgatgctttcaacaccttcttcagtgagactggcgctgggaagcatgtcccccgtgctgtgtttgttgaccttgagccaactgtcatcgatgaggtgaggactggtacctaccgccagctcttccaccctgagcagctcatcagtggcaaggaggatgcagccaacaactttgcccgtggtcactacaccattggcaaggagattgttgacctgtgccttgaccgcatcaggaagcttgccgataactgcactggtctccagggtttcctcgtcttcaacgctgttggtggaggaacgggctctggacttggttccctcctcctggagcgcttgtctgtagactacggcaagaagtccaagctcggtttcactgtgtacccgtcgccccaggtctctacctcggtggttgagccatacaacagtgtcctgtccacccactccctccttgagcacactgatgtggctgtccttctcgacaatgaggccatctatgacatctgccgtcgctcccttgacattgagcgcccaacctacaccaacctcaacaggcttgtgtcacaggtcatctcatccctgactgcatccctgaggtttgatggtgctctgaacgttgatgtgaacgagttccagaccaatctggtgccctacccgaggatccacttcatgctttcctcctacgctcctgtgatctcggctgagaaggcctaccacgagcagctgtccgttgctgaaatcaccaatagtgcctttgagccatcctccatgatggccaaatgtgatcctcgccatggcaagtacatggcctgctgcctcatgtaccgtggtgacgtggtccccaaggatgtgaatgccgctgtggccaccatcaagaccaagcgcaccatccagttcgtggactggtgcccgactggcttcaagtgtggcatcaactaccagccacccagtgtggtgcccggcggtgacctcgccaaggtgcagcgtgccgtgtgcatgatctccaactccaccagcgttgtggaggtgttctcccgcatcgaccacaagttcgacctcatgtatgccaagcgcgcgttcgtccactggtacgtcggcgagggtatggaggagggggagttctccgaggcacgcgaggacctggctgccctggagaaggactacgaggaggttgctgcagagggcggtggtgatgacggtgaggaagacgaggagtactgatctgcttgcatgaatctctttggctgtcgagcgaggttgcggtgtcgaaaaactttttccgtttgcgtcctgggtagtgttgttttttgctttcatgtcacttgctgaactgctgtagtagttgcatgtcataattgaagtatgtcgcttaagcaataaaaaaaaaaaaataaaaa

SEQ ID NO: 451925 - DNA, 605 bp, Sorghum bicolor
agcgccccatccagttcgtggactggtgcccgactggcttcaagtgtggcatcaactaccagccacccagtgtggtgcccggcggtgacctcgcaaaggtgcagcgtgccgtgtgcatgatctccaactccaccagcgttgtggaggtgttctcccgcatcgaccacaagtttgacctcatgtacgccaagcgtgccttcgtgcactggtatgtgggtgagggtatggaggagggtgagttctctgaggcccgtgaggacctggctgcgctggagaaggactatgaggaggtcggcgctgagttcgacgacggcgaggatggtgacgagggcgacgagtactagaagctttctggttctacagcgtcgggcctatttgctgcaattatcccgtgatctgccctgagtggctcgtactatcttgtttgtctgtgggttccgaacttatctgtcattgtgtggtttacaacaccctgatgttgtaagacttgtggttaattccccgctttgccacttgttgggttattaagagcccgttatatggttgtctacattgttgcttcttgataattaagatgctgtcgtcatgtcatcactcaaaaaaaa

SEQ ID NO: 451926 - DNA, 888 bp, Sorghum bicolor
cgtccgctctggacttggttccctcctcttggagcgtctgtctgttgattatggcaagaagtccaagcttgggttcactgtgtacccatcccctcaggtctctacctcagtggttgagccatacaacagtgtcctgtccacccactctctcctcgagcacactgatgtcgctgtcctccttgacaatgaggccatctatgacatctgccgccgctcccttgacattgagcgcccaacctacaccaacctcaacaggcttgtgtcacaggtcatctcatccctgactgcatccctgaggtttgatggtgctctgaacgttgatgtgaacgagttccagaccaatctggtgccctacccgaggatcccatcaatccgctcttctcagtcttcagctttaggtccccagcggcggcgaggcgatggcggcgccggtgacggtgtacgggccggtgatctcaccggcggtggcccgcgtggcggcctgcctcctggagaaggacgtgccgttccagatcgagccggtggacatgtccaagggcgagcacaagtcgccgtccttcctcaagctccagcccttcggccaggtccctgccttcaaggaccacctcacaaccgtctttgagtcaagggctatttgccgttacatatgtgatcagtatgcggaccgtggtaaccaggcgctctttggcaagaaagaagatggtgcggttggccgtgctgccattgaacaatggatagagtctgaaggccagagctttaacccaccgagcctggctattatcttccagcttgcatttgcaccaatgatgggccgggccactgacctggctgtggttgagcagaatgaagccaaactcgctaaggtgcttgatgtgtatgaccaacggc

SEQ ID NO: 451927 - DNA, 581 bp, Sorghum bicolor
cgtccggcagtacccgtacgccgggtacattcccaaccgtccgtcggtcagccggaagccgatgccggcgccgggcagcgaggagtacgcggagctggggaagaacccggagaaggtgttcgtgcgcaccatcacgagccagttccagacactcgtcggcatctcgctgctggagatcctgtccagccactcctccgacgaggtgtacctcggccagcgcgacacgccggagtggacgtcggacgccaaggcgcaggaggcgttccggcggttcggggcgcggctgaccgagatcgagagccgcgtgatgaccatgaacgccgacccaagtctcaagaaccgcaacgggccggccaagttcccctacacgctgctctaccccaacacctccgacaagaatggcgatgccgccggcatcaccgccaagggcattccaaacagcatctccatctgagttctgagttctgagcgcgaggtccatacggaagccgcaacagttgctcctctcagtcccccaataataaagttatcaattgtgttccatctatttttctcttaaataaccggagtatgcatcatca

SEQ ID NO: 451928 - DNA, 440 bp, Sorghum bicolor
agttccaggccgtcgtcggcatctcgctgctcgagatcctgtccagccactcctccgacgaggtgtacctcggccagcgcgacaccaaggagtggacgtcggacgccaaggcgcaggaggcgttcaggcggttcggggcgcggctggtcgagatcgagaaacgcgtggaggccatgaacaaggacccacgctacaagaaccgctacagcgaggcccagttcccctacacgctgctcttccccaacacctccgacaagaagggcgacaacgccggcgtcaccgccaagggcatacccaacagcatctccatctgatctctgattcctgaggacagagcatgatgacctgaatgcaggcagggaatagctagcggtgattcccgtacgttatccgtttcattttatccatgaatgagaagcgttgcaataaataaaagattc

SEQ ID NO: 451929 - DNA, 988 bp, Sorghum bicolor
cgtccgatccctttgttgccgccgcctccaaagccactcccaaacccccgcttccagaaccttctcgaagctcaccgcctcctcctcctcctcctcctccactcgctccgatggcgaaggacccgatgcgcgtgctcgtcactggcgccgcaggacaaattggatatgctcttgttcccatgattgcgaggggagttatgcttggtgcagaccagcctgttattctgcacatgcttgacattccgccagcagctgaagcccttaacggcgttaagatggagttggttgatgctgcatttcctcttctgaagggagttgttgcaacaactgatgttgtggaagcctgcactggtgtgaatgtggccgtcatggtcggtggattccccaggaaggagggaatggaaaggaaagatgttatgtcgaaaaatgtttcaatctacaaagcccaagcatctgcccttgaagcccatgcggcccccaactgcaaggttctagtggtagccaacccagcaaacaccaatgctcttatcttgaaagaattcgctccatctattcctgagaagaacgttacttgcctgacccgtctggaccacaacagggctcttggccagatttctgagagactcagtgtccaagttagtgatgtgaagaacgttatcatctggggtaaccactcatccacccagtaccctgatgttaaccatgccacagtgaagacttccacaggggagaagcctgttcgtgagcttgttgctgatgatgagtggcttaatggcgaattcatcacaactgtccaacagcgtggtgctgcaatcatcaaagcgagaaagctctccagtgctctctcagctgctagctctgcttgtgaccacatttcgtgattgggttcttggaacccctgtgggaacatttggttccatgggtgtgtactctgatggctcataccggggtccttctggacttatatactcattcccagtaacatgca

SEQ ID NO: 451930 - DNA, 766 bp, Sorghum bicolor
cgtccgcatcccggtcgaccacgcgtccggcggcggcgtaggcagcggcggcgtgctcgtgatctcagcccccaggcgcgctcggctccggtcacccgtcgatccacgcaaccatgtcgaggaggaagaccagggagcccaaggaggagaatgttacccttggacccactgtccgtgaaggagagtatgtctttggtgttgctcacatctttgcatccttcaatgacaccttcattcatgtcactgatttgtctgggagggaaactctggttcggatcactggtggcatgaaggtcaaagctgatcgtgatgagtcgtcgccttatgctgctatgcttgcttctcaagatgttgcacagcgttgcaaggagcttggtatcactgcgctgcacattaagcttcgtgccactggaggcaacaagaccaagacccctggacctggtgctcagtctgctctcagggcccttgctcgttctgggatgaaaattggacgcattgaggatgttaccccggttcccactgacagcactcgcagaaagggtggtcggaggggtaggaggctgtaggcgtcttcgccttgctatctgccatctcctggcactgccctctgggtagtgttgctgttgctatgcttgtcaagaggagctttaattttgctctatgtcgaggagcatttaccgttagtcgaatctgtgatgtgcaattgtgcatggataatgttttggttgaggaattgacattaagctaaaaatgcattttcactctt

SEQ ID NO: 451931 - DNA, 457 bp, Sorghum bicolor
  unsure (1)..(457): unsure at all n locations
cgtccgaatgaaaccgcatcagttggaaggtttcaactttttggttaagaatttgattggagacaagcctggaggttgcattcttgctcatgccccaggttcagggaaaacatttatgcttataagcttcattcagagcttcatggcaaggtatccatctgcaaggccccttgttgtgctgcccaaagggatactaggtacatggaagaaagaaattcaaagatggcaagtgcaggatataccattgtatgatttctactctgttaaggctgaaaaaagagtagaacagttgcaaatcctcaaatcttgggaggacaagatgagtatacctgtttcttggatacaagcagttcgccacaatcgtcactgatgatgggggcagcaacgtcacagctgcatgtcgggacaggctgcttaagggtcccaaccttntgatacttgaccaggggcatacacc

SEQ ID NO: 451932 - DNA, 1198 bp, Sorghum bicolor
ttcccggtcgaccacgcgtccgggagaagccgccgccgccgccgccgctgccgctgcgtccgcgtccgcaggccgcagccacagcaggcgaccgagatggcgggagggttcgtcaagacccagaagaccaatgcgtacttcaagcgtttccaagtgaagttcaagagaaggcgtgctggtaagacagactacagggcaaggataaggttgattaaccaagacaagaacaagtacaatacgcccaaataccgattcgttgtgcgatttaccaacaaagacatcactgcacaaatcgtatctgcaagtattgcgggtgatatggttcttgctgctgcctattcccatgagctgccacgatacggtcttgaagttggtctgaccaactatgcagctgcctactgcactggtcttctgttggctcgccgtgtgctcaagatccgtggtttggatcaggagtatgagggcaatgttgaggccactggtgaggacttctctgttgagccagctgatgagaggaggcctttccgtgctctgttggatgttggccttatcaggactacaacagggaaccgtgtctttggtgccctcaagggagctttggatggtggcctggatattcctcacagcgagaagaggtttgctgggtttaagaaggatgacaagcagctggatgctgatattcaccgcaagtacatctatggtggccacgttgctgactacatgaagaaccttgctgaggaggagccagagaagtaccagtctcacttcagtgattacattaagaagggaattgaggctgaggacatggaaggtctgtacaagaaggtccatgctgccatccgtgctgatccatctgtggctaagtcaaccaagcagccaccaaaggagcacaagaggtacaaccccaagaagctgacatatgagcagaggaaggctagcctcgtccaaaggctcaaccaactcaactcctctggtggtgccgatgatgatgatgaggatgacgagtaaagtttagtcccatcgaagtagtgctatcttatgaggcgatcagaacttgtgctatggcatttatccttacctgtagtcctgcaacaggcatttttgtttaagtttggcgatgtgaacaaagctgtttctgttagtttcgagctggagttctggatatttactcttaatattaaaatgctgccgtttggcc

SEQ ID NO: 451933 - DNA, 269 bp, Sorghum bicolor
cgtccgcatcccggtcgaccccgcgtccgcaggagaaccccccccccccgcctccacagccacagcaggcgaccgagatgggtggttttgtgaagacccagaagaccaatgcgtacttcaagcgtgtccaagtgaagttcaagagaaggcgcgctggtaagaccgactacagggccaggataaggcttatcaaccaggacaaaaacgggggcaacacacccaaatacagatttgttgtgcgattcaccaacatagacatatctgggcaa

SEQ ID NO: 451934 - DNA, 930 bp, Sorghum bicolor
  unsure (1)..(930): unsure at all n locations
accgnccgatcccgtcgcccacctcgcagatggtggttttggaactgttcccgtcggcacgtgttgagactggtatcatcaaacctggtatggttgttaccttcggtcctagtggccttacaactgaggttaagtctgttgagatgcaccacgaggctctccaggaggcccttcctggtgacaatgttggcttcaatgttaagaatgttgctgtgaaggatctgaagcgtgggtatgtggcctccaactccaaggatgaccctgccaaggaggctgctagcttcacctcccaggtcatcatcatgaaccaccctgggcagatcggcaacggctacgccccagtgctggactgccacacctcacacattgctgtcaagtttgctgagctggttaccaagattgataggcgatctggcaaggagcttgagaaggagcccaaattcctcaagaacggtgatgctggtatggtgaagatggttcccaccaagcccatggtggtggagaccttctctgagtatcctcctcttggtcgctttgctgtccgggacatgaggcaaacggtggctgttggagtcatcaagagcgtggagaagaaggacccaactggagccaaggtgaccaaggctgccgccaagaagaaatgatgcgcctctgtttgctcgtgggatacctagttgaaacttcaaaaatatatcgtcattgctgttgctgttatcgcttgagcaactaaactgtgctggcaatgtttgtctggtccatctagtactgttatttttgctaaaaccagggtgctgttgagactcaattctgttatttttgtatcgaacaacgggtgttagccatatatggttgagtttttgttactaccggtgttgcagtgtttttctgaacttattttgctgtttctaaatagctgatgattcgctcgtc

SEQ ID NO: 451935 - DNA, 1736 bp, Sorghum bicolor
cgtccgcggacgcgtgggcagtcggccgccgcacaccgggagaagccgacgcgccgccaccgtatcctcagatcagcggcgagccgtaaccacgccactctgctgccgcccgacgagcagcgtaacagttgccttcagccatgggtaaggagaagactcacatcaacattgtggtcattggccatgtcgactctggcaagtcgaccaccactggccacctgatctacaagcttggcggtattgacaagcgtgtgatcgagaggttcgagaaagaggctgcggaaatgaacaagaggtcgttcaagtatgcgtgggtgcttgacaagctcaaggctgagcgtgagagaggtatcacaattgatattgccctgtggaagttcgagaccaccaagtactactgcactgtcattgatgcccctggacaccgtgacttcatcaagaatatgatcactggtacttcccaggctgactgtgctgttcttatcattgactccaccactggtggttttgaggctggtatctccaaggatggccagacccgtgagcatgctctccttgctttcacacttggagtgaagcagatgatttgctgctgcaacaagatggatgccaccacacccaagtactcgaaggcccgttatgatgagattgtgaaggaagtctcttcctacctgaagaaggttggatacaacccagacaagatccactttgttcccatctctggttttgaaggtgacaacatgattgagaggtccaccaaccttgactggtacaagggcccaaccctgcttgaggctctggacttgatcaatgagccaaagaggccttcagacaagccactgcgtctcccccttcaggatgtgtacaagattggtggtattggaactgttcctgtcgggcgtgttgagactggtatcatcaagcctggtatggttgtcaccttcggtcctagtggccttacaactgaggttaagtctgttgagatgcaccacgaggctctccaggaggcccttcctggtgacaatgttggtttcaatgttaagaatggtgctgtgaaggatctgaagcgtgggtatgtggcctccaactccaaggatgaccctgccaaggaggctgctagcttcacctcccaggtcatcatcatgaaccatcctgggcagattggcaacggctacgccccagtgctggactgccacacctcacacattgctgtcaagtttgctgagcttgttaccaagattgataggcgatctggcaaggagcttgagaaggagcccaaattcctcaagaacggtgatgctggtatggtgaagatggttcccactaagcccatggtggtggagaccttctctgagtatcctcctcttggtcgctttgctgtccgggacatgaggcaaacggtggctgttggagtcatcaagagcgtggagaagaaggacccaactggagccaaggtgaccaaggctgccgccaagaagaaatgaggtgtctgctggctggttctgtgttttctcgagggatacctagttgaaactttatatatcgtcattcctgttatcgcgcgagcaactaaactgtgctggcaatgtttgtctggtcgattgagtattgttattttcgttaaaaccagggtactattaagactcaatttctgttatttttgtatcgaacatcgggtgttggccatatgtggttatgagttttgttactacccttgttgaagtgtttgcctgttt

SEQ ID NO: 451936 - DNA, 512 bp, Sorghum bicolor
cgtccgggcgacctcgatcccctcccctgttggttctgtctgttgacttccccccatcgagctagctagtcagctggtcccgttgccatggggaaggagaaggttcacatcaacattgtggtcattggtcatgttgactccggcaagtccaccaccaccggccacctcatctacaagcttggaggcatcgacaagcgtgtcatcgagaggtttgagaaggaggctgccgagatgaacaagaggtccttcaagtacgcctgggtgcttgacaagctcaaggccgagcgcgagaggggcatcaccattgacattgccctgtggaagtttgagaccaccaagtactactgcactgtgatcgacgctcctgggcaccgtgacttcatcagatcgcggatataattgccgtgctaacatgctgactgtgctgtctatcattactcaccatgtggttttgggctgtattgcaggaaggcagaccggagatgctacttgttcaactgagtgacaatatt

SEQ ID NO: 451937 - DNA, 688 bp, Sorghum bicolor
cgtccgcccacgcgtccgcccgtatcacccccggcttaggtttaggtctcctcctctccgccgccgccagctgcggagagctcgccaaaatggttgcccacaggttccatcagtaccaggtggtgggtcgcgcgctgccaacccccgctgatgagcaccccaagatctaccggatgaagctgtgggccaccaacgaggtccgcgccaagtccaagttctggtactttctgaggaagctcaagaaggttaagaagagcaacggccaggtgctcgctatcaacgagatctttgagcgcaacccaaccactatcaagaactatggcatctggctgcgttaccagagcaggaccggttaccacaacatgtacaaggagtaccgtgacaccaccctgaatggtgctgtggagcagatgtacaatgagatggcctcccgccaccgtgtgaggtccccctgcatccagatcatcaagacggccacgggtgcacttcaagctgtgcaagagggacaacaccaagcagttccacaactctgagatcaagttccctctcgtgtaccgcaaggtcaggccgccgaccaggaaagctgaagaccaccttcaaggcttcgaggcccaacctgttcatgtgatttagctgtggtcagtgtatgtgatcgtaagagtcggaagtgttttgttttaagttttga

SEQ ID NO: 451938 - DNA, 692 bp, Sorghum bicolor
cgtccgctctccgtgtaccacaacgtgcacccgccgtccccgtcgctctactacgtgaacgtgacggggctcagcgtggggcgggccctggtgaaggcccccgcggggtcgttcgcgttcgacccgtccaccggcgccgcctcggtgatcgactcggggacggtgatcacgcgctggacggcgcccgtgtacgcggcgctgcgcgacgagttccggcggcaggtggcggcgccgagcgggtacacgtcgctgggcgcgttcgacacctgcttcaacacggacgaggtggcggcgggcggcgcgccgcccgtgacgctgcacatgggcggcggcgtggacctgacgctgcccatggagaacacgctcatccacagcagcgccacgccgctggcgtgcctggccatggccgaggcgccgcagaacgtgaactccgtcgtcaacgtggtggccaacctgcagcagcagaacgtccgggtcgtcgtcgacgtcgccggcttcgcgcgtcgggttcgcgagggagccctgcaactgagcccgaatccgtccgtgctcccattccacgcacggcgggatgacggcactgccgcatcgatcggtgtgcttgtcctgtcctgctgttaagcttttgctcctttccaatgttgtctgcaataaccgacgtgacacggagaaaaaaattgttcgtcacggac

SEQ ID NO: 451939 - DNA, 782 bp, Sorghum bicolor
cgtccggcggagtagagcgacagcacacccctccggtgcggcatgtgaacctaagcagcggcgcagaccagagctgcagcgccctcccgtccccttccctcgaccccaagccacggcacggtttcgaggcaacggcgcgctccctgggcggcgacgcggcctggcacggccccaagacgctggtgcatgcacccatcaagctcttcgaggggccagtcccctggcggctgtgcatccaggcccggagctgcaactcgtgtccaatctagtgaaggggaggaggaggagtagatctaatgatgatttggtgactccgtctgcctatttccttgatgaagacttcctaagagcagagttaggaaaccgaccattgcagattcaagactggatctgccttctagagggcgagcagcagtgcttgggccggtggttccatggatctgttcgtctgctgctatgtggtatctattggctaagttaatatttctattaaattgcctcgtagttggactatctaggatcatgtgatgcagagcccacagacctacggtatggaaacaggcatggagttagtgttatctaacgtggatgcacatggtgacgtagggcagcagggaagcaccttgcctttcttgtcgattggcattgggtcaatggtgataagtgtagctttactaacatgtacagcacctcctttagtatttgttgatgttccactacacttgtcatcatgtgaatattttaaactaggcaatcatagtgtgtatgctacttataatgtt

SEQ ID NO: 451940 - DNA, 390 bp, Sorghum bicolor
cgcgtccggttgatgcaagatgtgaccagactggatttgccttctggatagcgagcagtagtgcttgggccggtggttccatggagatgttcgtctgctgctatgtgactaagcatagcctgcaggctatattaaggaaccacagcagggcactagagcacgacactatgacattgcaactaggccacaaaattagtatctattggctaagttaatatttctattaaattggctcgtagttggactatctaggatcatgtgatgcagagcccacagacctacagcatggaaacaggcatggagttggtgctatctaacgtggatgcacatggcggcgtagggcagcagggaagcaccttgcctttcatgtcgattgggattgggtcaatg

SEQ ID NO: 451941 - DNA, 485 bp, Sorghum bicolor
gcgtccggtggtgcttgtttaagaagtcaaggggttcgggggcgagactagagagtttgggttatctcccacagtcagatatggttcagaagttctggaaactatgtgaacaacagctcaatatatcagatgaaactgaagatgaagatgcaaatgaagaatatattgaagacacaaacaggggtgcggggatgattgcagctgcaaagctagtgctcgctgatacagtatcaaaggattatcttggtccagagattgtttctcactatgtatctcacggagcaagtacaacagagataatcaaacatctaattacttctctaaagaaaaacacaaactttgacatgggagctctcttttttgaggctctgaaaagggcatatgaacgttacatggcccatgttcatgagggagaaaaccaaatcctgactggcaagtcttattcggaatgtcaagatcttgctagtcatcttgcagggtcctat

SEQ ID NO: 451942 - DNA, 297 bp, Sorghum bicolor
cgtccgcccttttaacctcgcgccgccacccccttcgtctctcgacgcccatctcctcctcaagccgccgccgccgccgccgaaggagaaggaggagaagaggatccggccgtctcatcgccccaatggcgtccgagaagaagcagtcgaacccgatgcgggagatcaaggtgcagaagctcgtccgcaacatctccgtaggggagagcggcgaccgcctcacccgcgccgccaaggtgctcgagcagctcagcggccagacccctgtcttattaaaagcgaggaacacggcggggt

SEQ ID NO: 451943 - DNA, 245 bp, Sorghum bicolor
  unsure (1)..(245): unsure at all n locations
gcgtccgggcttgttttcgagtgcagggacagggttctcgtcgttcccggctccaagaccggagccaagctggtctggggtcatcaaatccgaggacagctcatactacacaccccacccgcacccggtgctcagcaacaggccgcacttcgccggcggctccacgtcatcggcctactccaggggggggcggcgcttcccgttcctccaggacngcnaccannncancttcagcgcaggcgccg

SEQ ID NO: 451944 - DNA, 471 bp, Sorghum bicolor
cgcgcggacgcgtgggctaccccggaaagaatgcggatagtggtcaagaagttgcccaagtggatccacaggagctagtggttcccaagctgtctgagaggtttatgggcctgagagctgccttggtcaccagttgtccccgcgtcagctcctttgcggcgaatcttggtttccaagtttttcagaccaatgatttcgcccctcaatctgcctcatccggcgttactaaagaggttggattaatcaaccgagcatttgatctgcttggagtctcggatgggaatgtgcaggaaacatctgagttcgatctagttttcatgcatgttgccatggagaacacaagcagcaagttaggaaaattaggaatgaagacagatctcaatcggctggagaaaataagttggtgcagtcatggaatctgcgccctgttgttcagctattgctttacgtattcatgtatttgtcatttga

SEQ ID NO: 451945 - DNA, 339 bp, Sorghum bicolor
  unsure (1)..(339): unsure at all n locations
cgtccggttaagggaagcgattggcttgggggccagggttctattcagtacatgtgcagagaagcaccaaaagctgttatagagcttgagaactacggattaccattttcaagaactgaagagggaaagatataccaacgtgcctttggaggacagagcttagattttggcaaaggtggacggggggggggggtgtgcctgctgctgctgacagaacgggacatgctatgctacacacactatatggccaagcaatgaagcacaatactcaattttttgtggaatactttgcattggaccttntcatggacantgaaggaaagtgtcagggaatcattg

SEQ ID NO: 451946 - DNA, 210 bp, Sorghum bicolor
cgtccgcgcagagcatacccattaccgggattcggatgctgccacatggcgagaggggagagatggggctcacgttaaccaagctgatcagccgcttgttcgccaagaaagagatgcgaatcctcataggggcactaagactccgccggaaagaccaccatcctatacaaattcaagctctgagagaggggatcaccatccccagaatga

SEQ ID NO: 451947 - DNA, 670 bp, Sorghum bicolor
cgtccgctgaatttctgaacccaaaagaccacaagaagcccgtgcaggaggtacttgctgagatgaccaacggaggggttgaccgcagtgtggaatgcactggcaacatcaatgctatgatccaagcatttgaatgtgttcacgatggctggggtgttgctgtgctagtgggggtgccacacaaggatgctgagttcaagacccacccaatgaacttcctgaacgagaggaccctgaagggaaccttctttggcaacttcaaaccacgcactgatctgccaaatgtggtggagctgtacatgaaaaaggagctggaggtggagaaggtcatcacacacagcgttccgttcacggagatcaacaaggccttcgacctgatggctaagggagaaggcatccgctgcatcatccgcatggagaactagatttcgctgtctggtttgtgatctgacctgggttgggttaataaaaggggcaatgctgagcctgcccgttcgatgcggtagatacaggaccacgcttgtgtgtcgcgttcagtttggctttgtcaatcagtagaacaggttcccgtgtcttgtaattatatatcggcatgaggcttatgaaccaccatcttttggcgtaatatatatatggtatgctaccactatgagtctatgagtttcagtct

SEQ ID NO: 451948 - DNA, 786 bp, Sorghum bicolor
cgtccgtacatttctgaccctgggggccggaggccgtagggctatgatgatattcccaaggaaattcctgaccctgatgctaagaagcctgaggactgggatgatgaggaagatggtgaatggactgcccctaccattccaaacccagaatacaagggaccatggaagcaaaagaaaatcaggggcgcgggctaccagggtaaatggaaggcacctatgattgacaatccagatttcaaggatgatccatacatctatgcatttgacagcctgaagtacattggcattgagctgtggcaggttaaatcaggcactttgtttgacaacttcatcatcactgatgaccctgcgttggccaagactttcgcagaggagacctggggcaagcacaaggaggcagagaaggctgctttcgatgcggctgagaaaaagaaggaagaagaggaagccgccaagggtggtgatgatgaggatgacgacctagaggatgaggaagacgatgagaaggcagacgaggacaaggctgactctgatgccgaggatagcaaggacgactctgatgatgagaagcacgacgagctctagatggtgaggatgatgatgttgtggccaccgaacttggagccgctggcctggatttatcaactctcccactatgaacttctcttttttctgtgatcatcgacaaggtactgcatagagcattgctaataagccgagggataggttggggtgctggagcgttttttttttcccattattagaactgatagcactggacaagga

SEQ ID NO: 451949 - DNA, 364 bp, Sorghum bicolor
  unsure (1)..(364): unsure at all n locations
cgcgtccggaactcacagaaacaactggctggaggtcctgtaaatactgagcaatcttccctgaagaataccagagaaggtggaactggaatcccatccatggggaaccaggtagcaagagagtatgcaggcaatcctcagcacgtggcaccaagtatcaccatgcaatacgacatgagttcattggtccccggaggccagttcagtggttcctccgtgcagactcaaacttcacgaagctccaacatgcttgcactgcggccaatgcagcagcctcaaaacttcgagttctctgggcttggtcagnccacacaacctttagggctcaaccctttcgatgactggtctccatcgcaggacaacc

SEQ ID NO: 451950 - DNA, 921 bp, Sorghum bicolor
cgcgtccgctccctcagctagctctccgatccgtgcaccaccaccagcagcgagtacggacaagaccaataatggcgctgcgcatacccaccatctcctcgtcccacgggctggcctcctcgccggcgccgacgtgccggccggctgtcttcttggcggttggcagcagcagcagctgggcggcgggagcccagcagaagaggagcctgctgctggcgacgacgacgacgacggcctccgagacgaggggagctggagtcctcgcgccggtgaggtcgagcgggatcgagacgtcgacctcggtgggagctgaggccgtcaccgggcaggtcacggaggtcaacaaggacaccttctggcccatcgtcgaggccgccggcgacaaggtcgtcgtcctcgacatgtacaccgaatggtgcgggccttgcaaagtgatggctcccaagttccaggagatgtctgagaagaacctggatgttgtcttcctcaagctcgactgcaaccaggacaacaagccgcttgcaaaggagctgggaataaaggttgtgccaacgttcaagatcctcaagggtgggaaggtcgtcaaggaggtgaccggcgccaagatcgaggagctagcgcatgccatcgacacactcaagtcaggctgatctcacaagaacaaagcaaaatggcctcagctagctagctcatcaaagcaagatcgatccatccatacatgtgggcgaatgaactagctagctagcgcgtacttgatgtggtactagtgtagtgtagccaccacaccacgtactgcacatcccttttgtgggagtagatacatgcatgcagaaacacatcaagctattctagttcttctgcttatgatttatcgatcgcgatcggtcatcaggaccggcaaatacacaattattcattgtt

SEQ ID NO: 451951 - DNA, 329 bp, Sorghum bicolor
  unsure (1)..(329): unsure at all n locations
cgtccgtctccctctctcctcttcctctcggggcctgtggccgggtggaatagggaacggcgatacaccatggcggatttctccaaggaatcttgcccttctgtgaagaacattttgcttctggattctgaaggaaagcgtgttgctgtaaagtatttctcagatgattggcccactaatgcggggggggtagcctatgaaaaatctgtgtttactaaaactctgaaaaccaatgcacggncagaagctgagataacattgtttgatggttatattggcgcctacaaggttggacatgatctttactttttttgccaccgntggagatg

SEQ ID NO: 451952 - DNA, 332 bp, Sorghum bicolor
  unsure (1)..(332): unsure at all n locations
gcgtccggctacctcagaaatatctccttggagggcgtccggttgttgacattgataatggcaaattattaaatgaagatagtgatatcagatcggtccttcagtttttaatggatgatgtgtctgacttcttgtcaacacatttttctagttcagtggagagaagcaagactgacgagaaaggcggggcttctacacttcaagctttcattgattatatatctttnagggaaacccaaaattttcgatcccgaaaggaggaaaataagaattctatcacattaacaactattcatcagtcaaaaggtttggagtgggatgtcgtgtttatt

SEQ ID NO: 451953 - DNA, 1551 bp, Sorghum bicolor
ggcacgaggggatctctcgttttgatgtctggccatacctggagacatacactgaggatgttgccagtgaaataatgttagaaatgcaggccaagcctgaccttatcgttggcaactacagtgatggcaacctagtcgccactctgctcgcacacaagttgggagttactcagtgtaccattgcccatgccttggagaaaaccaaataccccaactcggacatatacttggacaaatttgacagccaataccacttctcatgccagttcacagctgaccttattgccatgaatcacactgatttcatcatcaccagtacattccaagaaatcgcagggagcaaggacactgtggggcagtatgagtcccacatcgcgttcactcttcctggactttaccgtgttgtccatggcattgatgtttttgatcccaaattcaacattgtctctcctggagcagacatgagtgtttactacccatacactgaaactgacaagagactcactgccttccatcctgaaattgaggagctcatctacagtgatgttgagaacgatgagcacaagtttgtgttgaaggacaagaacaagccgatcatcttctcaatggctcgtcttgaccgtgtgaagaacatgacaggcttggttgagatgtatggtaagaatgcacgcctgagggaattggcaaaccttgtgattgttgctggtgaccatggcaaggaatcgaaggacagggaggagcaggcagagttcaagaagatgtacagtctcattgatgagtacaacttgaagggccatattcggtggatctcagctcagatgaaccgtgtccgcaatgcggagttgtaccgctacatttgtgacacgaagggagcatttgtgcagcctgcattctatgaagcatttggcctgactgtcattgagtccatgacgtgcggtttgccaacaattgcaacctgccatggtggccctgctgaaatcattgtggacggggtgtctggtttacacattgatccctaccacagtgacaaagctgcagatatcttggtcaacttctttgagaagtgcaaggcagacccaagctactgggacaagatctcacagggtggactgcagagaatttatgagaagtacacctggaagctctactccgagaggctgatgaccctgactggtgtatacggattctggaagtatgtgagcaacctggagaggcgtgagacccgccgctaccttgagatgttctatgctttgaaataccgtagcctggcaagcgcggttcccttgtcctacgactagtgtgggaaagaagaatcccaagccggagaaccatcgcctgcattatgattgttcaccgcaattcgcattgttagtcgtgtatttgagttatgtgtacttggtttccaagcactttggttcctttttgcgagtttttgggcagcgctggctggttcctattataggaattagctgtgacttttgcttcaaataaaagcctgctcgttctcctgtcttccagagttaaatgcaatgttttgttgcccaagtcttc

SEQ ID NO: 451954 - DNA, 400 bp, Sorghum bicolor
gcgtccggttagaaagagcagagatagagagagggacaggggaggaagcctgaagaatatagcataatagtcaaaacagtgagagagtaatagtcgtttgatatgaaaataggcttgtgtgtgttcgggaaaatagagtctgaaatttatgaaatacagaggtgtgtgaggtaatagattgcggggggggcggcaaggaggaagggcataagaaggtagttgaaattcattcagactgcattaagctgaaattcattcagctgattgatggtgaggcatacataaataaatatccatccaaatccagagtgcgtctagcataaataaatataaacatgtttgtagaaatgctggagtactagggagggtggagggacatcatggccttttccctttcctg

SEQ ID NO: 451955 - DNA, 361 bp, Sorghum bicolor
cgtccggtcttcaaaaggtttttatatatgtggatgaagtgcactgcctatgtgcagtgcttgggatggattttgcaaagactgtaaaagaggttcacccaagtttgcatggagccaattctgaaaattcaacaaatattagtgataaaactcttgaaggtcttactcagactatcctgaagctcagagcagaaaagaagacaagagttttaaagttgcaagagactgtagaaaaacttcacaagttatggaatctgatggagtcaactgaacaagagaggatacacttctctgaagtagctgctggtcttggatctactgaggaagaaatcaattctccaggcattctgtcattggagac

SEQ ID NO: 451956 - DNA, 332 bp, Sorghum bicolor
cgtccgctcctcagcaagcccacttcttccatggcttccgccgccgccgctgctctcctcctcctcctcctcctctcgccgtccgctgcgcagcctggtttcatcagcttggactgcgggggagctcgcgatcacacagatgctatcgggatccaatggacttccgacgccaccttcgtctccggcggcggccagaccgcgcagctgcaggtccagaccgcccagcagcagctgaccaccgtgcgctacttccccgcggacaaccgcaagtactgctacacctatgattgacaatccagatttcaaggatgatccatacatttatgcatttg

SEQ ID NO: 451957 - DNA, 808 bp, Sorghum bicolor
gcgtccgggatgctccagactatccgtgaccgtgatgacgtaaggggctcggatgacactgacagtgatacagagagagacctggagagagcgagaagggagaggatcgagaggcggatggcgagggagaggattcaggagcggatggagaggcagagagagagggcaaggcaaattgagagagtgagtgctcgtggcagagagaggacagaaagcctaatactgatcaactccaacaatgaggctattattctgcaaggaacatttggatctgatgacaatcaagaggactcaagcaacacaagttctggtgtatcacttggggattactttcttggtcctgccctagatactctcttgcagcgtttggcggagagtgacctcaatcgttctggcacaccacctgccaagaaggaagcagtagctgcgctgccaactgtgaacatcgaggaagtgttgggctgttcagtctgtcttgaggattttgagatgggagcagaagcaaagcagatgccctgtcagcataagttccactcccattgcatacttccatggctggagctccacagttcttgcccaatctgtcgatttcagttgcctactgaggagacgaagaatccatgtgaatcagccagcactgcaggggccatgaacagagatggagacaatgctgctgcaagcagtagtgatacagaaagtagtaaccgcaatggagacaaccattctgatagtcctatcttctctgctctgagcacactcttctctgaaccaatctcatctgatgatgatgaaagtgttccacactcat

SEQ ID NO: 451958 - DNA, 379 bp, Sorghum bicolor
cgtccggcaatttagtttgtgaaaattcatggtatagtgtggattgaggtagtagtgatatagcttaccaaagcctgttatatttcacacttcacagtaagttaccatagatgaagttgtgcagatttttgtattattcacttattcagtatatatgatactgaccaaaggctacggcgatgcggtggaaaagaacaaactgcgttgttttctaatcacagattgcagtatttgcgatgctaattttttgccgctagctaaaagtgactttctgccaacttttgtcttccttcttgatcacatgggaccaagttcactagctcattggctcttgtctagctcatagatatgtccttaggggggggggtggagtatcata

SEQ ID NO: 451959 - DNA, 356 bp, Sorghum bicolor
cgtccggtttgtgctactacgggccgcaccggcggaggctcatttatgcccaaaagccacatctgttagagctggtggaggaagggtctgttccagaggcttctgctgatgtggagatggaggaggtggatgtcagcggatggctcgaggccttcgcggcgcacccggcgatcggaaccaccggggggggtgtctccaagtggagcaaggaggagcaatcggcagcgctctcaacagccacggattcgacagcccaggagctggcagagtggaatgccaggtacagggagaagtttggcttcgtgttcatgatttgcgcatccaggaggactgcgcctgaggtcttggctgagctt

SEQ ID NO: 451960 - DNA, 494 bp, Sorghum bicolor
cgtccgggagaagatgcccttaaggagggggtgggagggggcggcagcagtgatttccatagcccatttgacatttttgagcaactttttccgggttctagcggctttggtggtggctcaagaggacgcagacaaaagcgtggtgaagatgtggtacatactatgaaggtttccttagaagatcggtataacgggacaaccaagaaactatctttatcgcggagtgctttgtgctccaagtgtaagggtaaaggatccaagagtggggcatcaggaacttgccatggttgccgtggtgctggaatgaggacaatcacaagacagataggccctggcatgatccaacagatgaacactgtttgccctgaatgcaaaggatcaggcgagatcataagtgacaaggataaatgcccaagctgtaaaggaagcaaggtagtccaggagaagaaggtcttggaggttcatgtggagaaaggaatgcaacatagccaaaa

SEQ ID NO: 451961 - DNA, 462 bp, Sorghum bicolor
  unsure (1)..(462): unsure at all n locations
cccagcgtcccagaaagagctgaggaaaagaagcgtcattggatcctcggccatactttcgattgtttataaattggctctatgaccttactactaccgatggccaccatgatggttctaattttcagattttgactgcatttgcaaatgcattccacatgctacaacccttgagagttcctgcgggggggtgggcttnncttcancttatgattcacacaatcttcataccaaaacccttaatgtaaaatatacacaaagtgtctccattcctaactcggcanattttgccgncttccgngttctaagacctatacgggacttgagagcacgaaaagacatggntgagaatactgaaagggggggggtggaccaacgcatggaagttgctgttggagaaccatcaagaaacccggagcccaaagaaactagaattttgacaagacattcttttaaagaacc

SEQ ID NO: 451962 - DNA, 465 bp, Sorghum bicolor
cgtccgaccattagaatgtgagaaagagagggaaactgccgcccaggcatctatctatctatgcgtcggcgccggccatgccgagatcctcctccacctcctccaactccaaccccggctccaagcggatcctggggagggcgatggccaccatcctggcgctgccgctgacaccgatctccaaggcgaagctgggcctgctcctcttcaagaagggcgcgtcctccgccgccaggcgccgctgctgctacaactacaagccgttccgccactacaactacgcctacgtgggggagtaccagttctcgccctcccactccccgctcctcccggccccgccggggccccccggagtcacggcctggcggagggccagggccgccgccaagaggcgccggagcagggccagggtgatcctcgcctccctcttttgcggcggtgacgagctccacgtcgccgtgctcg

SEQ ID NO: 451963 - DNA, 385 bp, Sorghum bicolor
  unsure (1)..(385): unsure at all n locations
gcgtccgcccagcgtccgaactacagaccgttgtagcaggagcattgctgtccagactgagattggtggagtgactatcagaataggtggaatggctaaaggttctggaatgattcacccaaatatggcaacaatgctcggtgttttaaccacagatgctcaagtcagcaatgatgtctggagaggggggggccggacgtcagtggatggtgatactagtaccaatgactgtgttattgctatggcaagtgggttgtctggtttatctagaattcaaagtcttgatagcattgaggctcaacagttccaagcttgcctagatgcagnaatgcaaggtcttgcgaaatctatagcatgggggggggagggtgcaacatgcctaatt

SEQ ID NO: 451964 - DNA, 758 bp, Sorghum bicolor
cgtccgcttcagccaggccgggcaggtgggggcggggcgcgtctgcagggacgtcacctcgcgccgctcgctcggatacgcctacgtcaacttcagcaaccccttggatgctgcaagagcattggaagtgctgaactttgctgttcttaacaacaagcctatcagggtgatgtattcaaaccgggagggtggcagccgtaggagtggatctgctaacattttcataaagaatcttgacaagacaatagacaataaaacccttcatgagaccttttcttcatttggaaccattctctcatgtaaggtagccatggatgaagcaggccaatccaaaggctttggttttgttcagtatgaaaaagaagaagctgcacagaatgctataaaaagtctaaacgggatgcttataaatgataagcctgtttttgttggaccttttcttcgcaggcaagaaagagatcattcttttgacaagacaaaatttaacaatgtctttgtgaaaaatttgtccgagtctaccacaaaggaagatttactcaaagtatttggtgaatatgggagtattacaagtgctgttgtaatgattggcatggatggtaaatcaaggtgctttggtttcatcaattttgagaatccagatgcagcttcccgtgctgttcaggaacttaatggtaagaagataaatgacaaagagtggtatgttggaagagctcagaagaagtcagaaagagagatggaactaaaaaaggagatttgag

SEQ ID NO: 451965 - DNA, 547 bp, Sorghum bicolor
cgtccgcctccccccctctctcttcccccggggcgcaggtgccgcacttctccatctccgtctctagggctccattcccctgcacctccgccgccgccggatcccacctcgcctcgccgccgacgccgcttcgtcatcagaatcaccggattcggtggtgtttctcggctgcctcagcttccgcggggggaggcccctggcggcgctccccgccgccctccggccttcgctgagtcctctagaagctggccattgctgagacttgagaaggctgctgctgagtatatggtatttgtgggccattgtgctgtccatgcgagcggagagcatgcgtggcaactgtgcttcgggtgatgcccctgaccagagtagctgccgatgcattcggtgtgttgacaatcgcactgtttgcgctgtttgctgctctgggcctcttctgcattttccagtcagtctacttcaggtgtcggattcggagaggaccccccttcctttcgcttggttactttaacgggccatgggtgactcgcattgctctgattctgat

SEQ ID NO: 451966 - DNA, 337 bp, Sorghum bicolor
  unsure (1)..(337): unsure at all n locations
cgtccgcaacattttacctgagatgtatcagggggcggcacaaagttgtttttccgaactggccagattggcaaacttgaagatactcggaatcgtactctgcacggtattttaagggttcaaagctgtttcagggggcatcaagcccgtcatcatgcgagagaacgaataagaggaggtggggggcgggaatcattcattcntggtgagaatgcacggcaaatttattcctctttgtcgaggaaacatagagcagcagttattttgcagagaaatgtgagatgttggctcgcaagaaggtatttcataaaactccggaaggcctcggnaataatac

SEQ ID NO: 451967 - DNA, 242 bp, Sorghum bicolor
  unsure (1)..(242): unsure at all n locations
cgtccgccctattatgttgcccctgagggccgtcaagggtgctatggcccanaagctgatgtatggagcgctggagtgattttgtacattttgctatgtggtgtacccccattctgggcagagagtgaagcagggatcttcaggcagattttgcgaggcaaacttgatttggaatctgaaccgggggggggtatctctnatantgctaangatctantccntaaaatncttatccnnnatcc

SEQ ID NO: 451968 - DNA, 488 bp, Sorghum bicolor
cgtccggcaataagagatcccacatgtgcacttaatatggaaagactgcttgaagcaaggatttcatctgctgttgatttgcggcgcagtttgggtctcccttcagctgacacaaatgcttatcgcctcatcaacagtgaaggggaccgattgtctggtctaatagtggacatctttgctgatgttgctgtcattgcttcatctgctgcttgggttgagaaatataggcaagaaatacaatttcttgttagcaaagttaacggcatcagccatataaagtggaggccatcggcagatattttgaaagaagaaggattggatatatcagagcataaggagcctgcttcaccatgctcaactgttaaggtcatggagaatggcattgtctacttagtctcattagagggtcagaagacagggttttatgcagatcaacgggaaaaccgctctttcatatctttactttcaaaggaccaaagggtccttga

SEQ ID NO: 451969 - DNA, 340 bp, Sorghum bicolor
cgcgtccgccccgcgtccggcggttgtcgcagcggacggcgtcctcgtggacatcacctatgtggaaagcgccgtggccaaaggagcagtgtgtttggatggtagcgcgccggcgtaccatctcgcccgcggctccggctccggcgagaacagctggctggtccatttcgaggtttgcttcttggcgggtgtcaaggggaatggtcacaatctgcttcaactagtaatccatttttatatgttcagttcaactcagtgcagtagtgcactcattgctttttttttttcgatacgagggatctcccccatttccattgatttccaacgaccgtttgaacat

SEQ ID NO: 451970 - DNA, 426 bp, Sorghum bicolor
cgtccgctttgacttcatctgcaacaccagcgcaatcagtaactgcaagtgaagggctcccgttcatttctgcaagccatttggactagctatgcatttttttgaacatgcacgccatggaaagtggtgaggctacagactagcagtgaccctctgttatactttttaatgttatatcgacaggggggcatgtgtatatagttgcaaacagtaaacttcgtgatagtgttcagatagacaaaagataatcatagtagacactactgccctgtaagtgagaaacaagctaacaccatggattgaactgtcagcaagcttttccttgaaagctactattttagaaatttaaatactattgcaaactgaatttatgtgctaaaattgcaacactaaagctactgcttttacgtgagatgggtatattct

SEQ ID NO: 451971 - DNA, 313 bp, Sorghum bicolor
cgtccgcattcccggtcgaccacgcgtccgcgagattgttgggtttgcgagctcagcaacgagaaggtcctctactgcatcctggcctaaggcgtccgcgagtgctcgcgagctcactgacagggaggtcctccactgcatctccaccatcaaggtcaccgtgcccttactgctattactactaagctgtctaattatagcgggggggggtggcccattccccctcccgagcgctgaccccccacactccccctgctcctctcctgcctcaactctgccctgagtgatcctacccagtgcactcgctcaccag

SEQ ID NO: 451972 - DNA, 534 bp, Sorghum bicolor
cgtccggaggacttcgtgagagatatgaactggcatcacagactgcgatacacagatgatgctttaattgctgctgcacagctttcttatcagtatatcagtgatcgattcctgcctgacaaggccattgacttgattgatgaagctggatcccgtgttaggctgaggcatgcccagctccctgatgaagccaaagagctggacaaagagctgcggcagattaccaagcagaaaaacgaggctgtacgcagccaggactttgagaaggctggcgaattaagggaccgagaaatggagcttaaggctcaaattacagccattattgacaagagcaaggaaatgattaaagcagagactgaatctggtgaagtcggtcctcttgttactgaggcggacattcaacatattgtctcctcttggactggaattcctgtggagaaggtgtcatctgatgagtctgatcgtctcctaaagatggaagagacactgcatacacgtatcattggacaggatgaggctgtcaaagctattagt

SEQ ID NO: 451973 - DNA, 337 bp, Sorghum bicolor
  unsure (1)..(337): unsure at all n locations
cgtccggcacgttctatcatgaagttgcatggtgctaacagcacagagtttgatccaaccacaaaaacaccatgtgttattttcatgccagagggatccaaaacccatatgggggcaacaatgcgccttggatcaaggaggacctttttccaggtcactaactgcaaatctgctaaactgtatgggggggttagctacattgatgaaaggcaccgccacagatacgaggtgaagcctgatatggtcccagattttgagaaggcagggctttcttttgttgggagggatgaaagcgggaaacgcatggagattattgaactaccaactnatagggttt

SEQ ID NO: 451974 - DNA, 583 bp, Sorghum bicolor
ggcacgggcattgacgacgccccgagcatactcctctcatctgcaaataaagccattgggggcagtcagtgagtgagtgagtcagtgtgaggactgaggagagacctttgagcaagcaagcttgctttgagggtcagagggggctttcggcgccggccaaccatgggggaggtgaagcacctgtgcctggtgaagttcaaggagggcgtcgtggtggaggatgtcctcaaaggcatgactgacctcgtggccgggatggacatggtgaaatctttcgagtggggtcaggacgtgctgaaccaggagatgctgacgcagggcttcacccacgtcttctcgctgaccttcgccttcgccgacgacctggccacctacatgggccacgacaggcacgccgcgttcgccgccaccttcatggccgcgctcgacaaggtggtcgtcatcgacttccccgtcgtcgtcgccaagccgtcgcctccggcatgatctgccggcgggcattgtattgtacggcgccctttttcaggtagcattagatcagatccatgtgtgttgcagcgctgttgctgcttgtgtgctactg

SEQ ID NO: 451975 - DNA, 348 bp, Sorghum bicolor
  unsure (1)..(348): unsure at all n locations
cgtccgactttttgttggctgcttctatattaagggcagagacatttggaatacccatacctgattgggcgaaaaacccaacgaaactggctgaagctgtggacaaggtcatcgttccggatttccaaccaaaacagggtgttaagatagagacagatgagaaggctactagcctttcctctgcggggggggatgatgctgctgttattgaagagcttattgcgaagctggaaacaatttctaaaacattgccaccaggattccatatgaaccctatacagtttgagaaggatgatgataccaatttccatatggacttgatcgctggctttgncaacatgcgggcta

SEQ ID NO: 451976 - DNA, 486 bp, Sorghum bicolor
cgtccgatggagttgaggaggtagaattagcgaagagtggtgttgaagtaaaagaaagagctcggaagctactgcttgatgatatccgagccttatctacctgtggtgaatcatctcatgatcagagtcagtcaccaaaggctgatgacgctgcatggattgttactggttcaaggttaatgcgtggggaaacaactgaagaaacgactcgtgaatgtccgcaatggtcggaaagaagcatattctatgctaagaactgctatgcagaaagctgcacagttgaggttgatggaaaaggaaaagaacaaaagcccttcatttgccatgagaatttcggtgcggataaaaaagattgtgtggagcatgttagcagatggaaaatccttttctgaggctgagataaaccatatgatttttgatttcgaccgagactacaaagattttggcattcgcccagttgaccaccaagttgttcgtcctaaaaat

SEQ ID NO: 451977 - DNA, 1155 bp, Sorghum bicolor
  unsure (1)..(1155): unsure at all n locations
cgtccgaatcccggtcgaccagcgtccgatccccgcagcatctccacgccgtcgcaccgtgtgggcgtcgtcaccggcgagaagatggtcgggccgggcctctacgccgagatcggcaagaagaccaaggatctgctgtacaaggactaccagactgaccacaagttcaccctcactacctacacctccaatggcgtcgctgtcgcggcgtctagcacaaagaaggctgacctgatctttggtgagatccaatcacagataaagaacaagaacattaccgtagatgtgaaagcaaactcagagtcaaatatcattactacagttactgttgatgagattgcaacaccaggactgaaaaccatccttagctttgctgttcctgatcagaggtctggaaaggttgagcttcagtatttgcatgattatgctggagttaatgcaagcattggtctgacagccaatcctgtcgtcaacctctctgctgcctttggcactaaggctcttgcagttggtgcagatgtctcacttgatactgccactggaaacttaaccaaatacaatgctggactgaggttcactcatgaagacctcatcgcatccctgagcctgaacaacaggggagacagtcttactggagcttactaccacaaggtgagcgaattgaccaacacagctgttggggcagagcttacccacagcttctcgaccaatgtaaacaccgtcgcctttggcgggcagcacgctctggacccactaaccgtcttgaaggcccgcatcaacaactctggcaaggccagcgccctcatccagcacgagtggaggccaaagtctctggtcaccatctcggccgaggtcgacacctagaccatcgagatgagctcgatggtcgggatcgccgtggccctcaagccctgtttggttattagaccatttttttttccttctaagtctcctagcatgactgtttgggtcagatcaggtcagctggggaaaacaaaaactgttggggttcccggcatcctttggtcgttgcagtctgttgatttcatgaactgcgtaatgcttcgttgaggaaatttttcggtcatctgtgtagcgctctgttaaatgagcaaccttcacaataattcaagctttagaattcaaannnnaaaa

SEQ ID NO: 451978 - DNA, 188 bp, Sorghum bicolor
cgtccgaacttttcatcgtgcacaccaatctgctgtggggtggcatgacaggcttccagaaccaatcctcagttcatgcactacccaattttgaaattctatgctgttgtatattgaaagtaactaggggactttactcatgatgatacaatcatcattcccatgttcaatatttattgggggggggg

SEQ ID NO: 451979 - DNA, 372 bp, Sorghum bicolor
cgtccgcgtcttcccctccgtcctccgcgaggccagggggatcatccaggagtccgatatcatgaaggaggacgatagcaactggcccgagcccgatcgcatcggtcgccaggagctcgagatcgtcatgggcaacgagcacatttcattcaccacttccaagatcggctccctcgtcgatgggcggggggcaaggacccggagggcctccggatcttctactacctcgtccaggatctgaagtgttttgtgttttcactcatcaacctccacttcaagatcaagccaatccagtcttgagctccatcccaagccttcgggtaactgttttatgagtgttttaagagagaattttgtaccgtgtgagatgct

SEQ ID NO: 451980 - DNA, 570 bp, Sorghum bicolor
cccccgcccacccgcgcgccagcaccgccgcacgcgcacacaccgcaccctacccggcgagctcgttgccgtgcgctgctctccgactgctctccgctgccgtccgccgcgcagctagggcctacacacccggcggcggccatggcggaggagctggtgctggacacggcgatccgagactgggtcctgatcccgctatccgtggttatggtcctcatcggcgtgctccgctactttgtctccaagctcatgcgctccccgccgacctccccgtctcccgaccccaagctcgttaaggaagggcaggtggtcatcagggcgaggaacctgaggaccaacgcgcagttcataccgggcaaggctttcaaggcacgcaaggtttattacaccaacgaggaaaatggattacttcatgttccaaaggaagaggcgcagaaggctcaggcagccatgttttcagatccaaacatggccatggacatgatgaagaagaatctatccatgatagtccctccgccacattgcatggtgacttttctctcagtttgtgaggaaatccttcatgctaaa

SEQ ID NO: 451981 - DNA, 920 bp, Sorghum bicolor
cgcgtccgggagaggctggcgtgccgtttttctcaatttcaggttctgagtttgtggagatgtttgttggtgttggtgcttccagagttcgtgaccttttcaagaaggccaaggagaatgctccttgcatagtatttgttgatgaaattgatgctgttggaaggcaaagaggtacaggtattggtggtggaaatgatgaaagggagcagactctcaatcagcttctgactgagatggatggttttgagggcaacactggaattattgttattgctgccactaaccgagctgacatcttggattctgctttactcagacctgggcgctttgacagacaggtgtctgtcgatgttcctgatgtccgtgggaggacagagattctaaaagtgcatggtagcaacaagaagtttgattctgatgtttctcttgatgtcatagcaatgagaacacctgggttcagtggagcagacttggcaaaccttctgaatgaagcagccattctggctggacgacgagggaggacagcaatttcttcaaaagagattgatgattctattgacagaattgtggctggtatggaagggactgtgatgacggacgggaagagcaaaagtcttgttgcttaccatgaagttgggcatgcaatttgcggaactttgacacccggccatgatcctgtccaaaaggttacattagttccaaggggtcaagctcgtggtcttacatggtttatcccgatggatgacccaacactcatctccaggcagcaacttttcgccagaattgttggtggccttggtggtagagctgctgaggaggtcatatttggagagcctgtcgcgaccactggagctgctggtgacttgcagcaaattactagcttagccaagcttatggtcgaacttttggttgtctcaaat

SEQ ID NO: 451982 - DNA, 214 bp, Sorghum bicolor
cgtccgctaatggcgtgctgatctgctgcccaccacgcgctttattccccccctgtccctgtgtgtgagcttcatcgaagttttaatcccattcccgtgcccgtgccgtgccgtccctatcacgccggatcgccacccgctggcgctgccccctctccccaccccactccgccccacctggggggggggggatccacccccaatccggcaaccc

SEQ ID NO: 451983 - DNA, 352 bp, Sorghum bicolor
  unsure (1)..(352): unsure at all n locations
cgtccgcccacgcgtccgataagatggatgtgaacaagagtggcaagttaacattcgaggaattcaaggccggccttcgtaaactgggaaaccaaatgcctgattcagatcttcagatattgatggatgctgctgatattgataaaaacgggaccctagattatggggaattcgtcactgtggggggggatgtgagaaaaataggcaacgatgaacacatcgagaaggccttcacatacttcgaccggaataagagtgggtatatagaaatcgaagagcttagagaggcgctatctgatgaactggatggcaatgatgaccaccttatcaccgggntnatccgagatgcgga

SEQ ID NO: 451984 - DNA, 305 bp, Sorghum bicolor
  unsure (1)..(305): unsure at all n locations
agcgtccgtctctaggcgcagccagagatagcgggctgtgaattcaccacgctgaggcccaacattggcagcctgacctacgaggactacttctcagttaaagtggctgatatacctggcctgatcaaaggagcacatgagaaccgtggcctgggtcatgctttcctgaggcacatagagcgcgggggggttatcgcctatgtgcttgaccttgcagccacncttaatggcaggaagggtgtcccaccttgggaacagntgcaggatttggtctcaaagttggagcattaccaagaaggaatgac

SEQ ID NO: 451985 - DNA, 241 bp, Sorghum bicolor
  unsure (1)..(241): unsure at all n locations
ccggtccacgattcccgggggaaaaagaagagagagatcctgggtgttatagatcaacgggggcggtgattgcttcggatcccatgccattgacattttcatcagctagctagctatatacctacccaacaccataattacttataatacagcggctataattttttttcagcactatttatttgcagacataactcatcttccactgggggggggggtcacaataaacacacccncttat

SEQ ID NO: 451986 - DNA, 428 bp, Sorghum bicolor
gcgtccgggactatgcaattcaacatagatgcggatctggtgctttattttatctaaatcactactaagatgtcaacaggttttgggtccatggaacttaaaataaatccagattttactttccaggagtagaaagcataataattctatagttctgagtagcatgcttgcctgccaacgtggcgcgggcggggtattttgttttatctgataattccagcttccagtgtcatcaatttctgaatttattttaggctgcatgaaatcaacgcacctttgttctcatttaatttcaatacatgatccgtaaacagttgaaattttccaatattattccattttttagtatattttcagcaggaaagtatttcataactcgtaaaaagttgagcccataaatgtgatgtttcatttaatatatgatctgg

SEQ ID NO: 451987 - DNA, 413 bp, Sorghum bicolor
cgtccgctcacaagtggctgtgctcaagcaggggagatgggctgctctgtgttagctcgtcctggtgccaacatcttggtttcaaggcctggctacttattctatgaggcacgcgctgttttcaatggcatggaagcacgatacttcgatcttctacctgagaaagactgggaggttgacatggagggcgtccaagctcttgctgacaagaacactgttgccatggtcattgtcaacccaggaaacccctgtggcaatgtgtactcctatgagcacctggccaaggttgctgagaccgcgcggaagcttggcatatttgtcatagcagatgaggtttatgcacacttgacatttggagagaggaagtttgtgccgatgggtgtgtttgggtcttgggctccagtgctcacact

SEQ ID NO: 451988 - DNA, 493 bp, Sorghum bicolor
  unsure (1)..(493): unsure at all n locations
cgtccgcaattctctctccttcgcgcattctcgctcgccgccccacgacgatctcaagccgctcgccggggagtcgagacacgcgcacttctcgcctcgttcataagctcgtctctttgttctttccgctgttaatcttcttgtttgattattttctgtgcttgattctaacctgctattattgtaggtcgcgtttaattccatcgctactgctgttgttatttctctgttgtgcttgccctgttcttttgtttgctctctaaccatggacgcaggatcccactcgatctcctcggagaagagccgcgccgccgccgcgccccggccggcggtgcaggaggcggtctcccgcccctacatgccatcgctgggctcgggatgccgtaacccgtcggccaagtgctacggcgacagattcatcccggacagatcggcgatggacatggacatggcacacttnctgctcactgagcccaggaaggacanggagaac

SEQ ID NO: 451989 - DNA, 509 bp, Sorghum bicolor
cgtccgccgggccttcctattttttgacaagggtggggggtggttgtcatatgagcccgaggaacttcgggagggcgtctagtggatgaatggagcccagctgatagcatggaagctggtgaatgagcatattgcaagaagttgacacttgataaggatggcaagattagctatgacgaatttgtagcaatgaggggggggcggtacagattggagaaaggcatcccgacactattcaagaggaagattcaacagccttagcatgaagcttataaaggatgggtcggtaaaattgggtgttgagtgaaacggcaccctcgttcatatgtgtgcatgtagttaggcccttggcccactaagcagaagaacaacttttggccttccttttttctcccctcatgattatcttgcgtggaaatttagataggtggaagaaccctctgattgtcttacctgggtaattagctaccccgggttcgctgacaagcactgagcgaaccaaatgatgt

SEQ ID NO: 451990 - DNA, 1077 bp, Sorghum bicolor
gcgtccggaacaactgaaggcagaactgaggagaatttagggccagttatgccaagacgacatgcctatggtacgaagagctgctgcatccaatcttggaaagtttgctgcaacagttgaacaaagtcatttgaagacagaaatcatgtcaatatttgatgatctaactcaagatgatcaagattcagggcgactattggcagttgagggttgtgctgctcttgggaagttgttggagccccaagattgtgcagcacatattctcccagttattgtaaatttctctcaggataaatcttggcgtgtgcgttatatggtggcaaatcaactgtatgagctatgtgaagctggtggtactgagcccacaaggggtgatctggtgtcagcatatgttcgcctcctctgtgacaatgaggctgaagtgcggattgcagctgctggaaaagttacaaaattctgcaaaatattaaacccacaaattgcaattgaacatattcttccgtgtgtcaaggaattatcaacagattcatctcaacatgttcgttcagctttggcatcagttattatgggaatggctcctgtattgggaaaggatgccactattgaacaacttcttcccatttttcttgctttgctgaaggatgagttccctgatgttcgactcaacattataagcaaacttgatcaagttaaccaggttattggaattgacttgctgtcgcaatcacttctaccagccattgtagagctcgctgaagataggcactggagagttcggcttgccataattgagtacatacctttgttggccagccaagttaggtggtggtttttttgatgacaaattgggggcactttgcatgcagtggttggaagataaggttttctcaatccgagatgctgctgccaacaatttaaagcgtttggcagaggaatttggccctgagtgggcgatgcaacatataattcctcaggttttggagaagataaacaacccacattatctgtataggatgaccactttgcaagctatttctttgctagctcctgtcatgggtcctgatatcacatgccaac

SEQ ID NO: 451991 - DNA, 652 bp, Sorghum bicolor
cgtccggtacataattgctcgccggatatggggactggggggcgcctattattgtgtcacaaagggtataccatgctcatccgttccacggcgtaataaacctcgaagagttgatttgtattattcaagctggtgcatccgtgcagtggaatccaagagagggaacggagggttgacagcctgtgaggtgctcttgtttcaccatgaggacatgggtatcccatatgagattgcaaagcttgggattcggcaaggaatgtggggatgtgtaaagaaaattgagcctggactccgggcctatcaggaagccagggctgcaggggagccagcgtcacggagtgccttgatggcccgaatcaatactaaggtcggtgacaattttgttcggtcactggaatccaacagcgacgaatcagaaatcgtggaagcagaagagaagcctgcgaggaaccacgtggcaaggttccttgtactcggaggggcagttgctctggcctgtactcttgatcaagggctcctaaccaaggctctcatctttggcgtcgcacggaaattcgttgggcagaggaagacattgtagcatctctgatctttcccagcgtcctccacgtggcccatgtgctgattagactcgccctgattcgctgacctg

SEQ ID NO: 451992 - DNA, 435 bp, Sorghum bicolor
cgtccgcggacgcgtgggtcctgaatgacttttttcttgtcttgcgtgaacgatgcgaagcattgcaattgtcgaatacggcattagaagatcagtctttgtcaaaaacttcgtgtgcaatcaacgccgctcgttactgcgagaatgttcttcgggaatgggatgaagatactaccttcttggatatgggtcctcatggatctctgtttacagatgaaatcagctttttagttaaattagggaccaattacctggaacagatactgtcttcggttctgcttgagtttgaagatctgtcctgggaatatgtccagaacattggatcatggagtggacagaccatcttagatgatcagaccttggatgaagaaaatgcaggagtatcttctggttttggtgccagtctagaatgtctgacagacaggaccactaagt

SEQ ID NO: 451993 - DNA, 377 bp, Sorghum bicolor
cgtccggcaaagtgaaagcgtccggtagaacatctcgaatggaaagtttcaaggacaagagcttatcaaatggattattcttccttgagcttctaagcacagtacagccacgggttgtgaactggaaagttgttactaaaggggaagctgatgaggacaagaagctgaatgctacctacatcattaggattgcaaggaagattggatgctctgtgtttctgttgccagaggacatcgtcgaggtgaatcagaagatgatcctaacacttactgctagcattatgtattggagcctacagagacagcctcaatcacaatctgaaatgccagaacaatcagaaccatctagcatgacttcagatgcagcctctgacatt

SEQ ID NO: 451994 - DNA, 461 bp, Sorghum bicolor
cgtccgtagaaccctcttcccccgcgatggccgcagggagcggcggcggctcgcggcgcgcgcgtccgaacgtgctagtgacggggacgccggggacggggaagacgacgacgtgctccctccttgccgacgccgcaggcctccgtcacgtcaacatcggcgacctcgtccgcgagaagagcctccacgacggctgggacgacgacctcgagtgccatgtcatcaacgaggacctggtctgcgatgagcttgaggacgtgatggaagaaggtggtatactagtagattaccacggatgtgatttctttcctgaacgttggtttgacctcgtagttgtgctccagactgacaactcaattctgcatgatcgtctgaccggcagaggttatacgggttccaagctcacgaacaacatcgagtgcgaaatcttccaagtgcttctcgaggaggcgagggagagc

SEQ ID NO: 451995 - DNA, 516 bp, Sorghum bicolor
cgtccggaatttggttggctattgtgctgacggaggggggcatatgttattgtatgcatacatgcctaatgggagccttgcatcacacttatatggtgaaaacagtgcaccactgaagtgggatttaagagtgaacatagctctggatgttgctaggggtttggagtacttgcatgatggggcggtggcctccagtagtccaccgtgacatcaaatctcctaacattttgctggaccaagcaatgcatgctagggttgctgactttggattatctagagaggaaatggttactcgcaacggagccaatatacgaggaacttatggatatcttgatccagagtatgtatccacacgatcattcacaaagaagagtgatgtgtacagctatggtgttttgctattcgaactgattgctggcagaaacccacaaccgggtctaatggaatatgttgagcttgctgcaatcaacgctgatgcgaaaactgggtgggaagaaattgcagattctcgggtag

SEQ ID NO: 451996 - DNA, 469 bp, Sorghum bicolor
gcgtccggggaaatgtttgagaatgatttgagtgttgagctgcgcactgctgttcactggtcaaaatggcttcacgagattgagaggacgggtggtgcactaacagaagcacttcagcgaatatttccacctgattggaactcatcagaaaatttggaggcttcgagttctgtaagtgacgcagagggtgagtcttgcggtgactcagagtttagtgataatgatgaggatcatgatgttgatgacttgtgacataatatcaagacagttttaacctttctctgatccctcactactgcctcagtgccagagttaaactatcaaggctacttgcttgtggcctgccaagaggagggcctggaatctttttgtgtttttaagcctgagctgtctgtcctctgcggggtgtcaagagacgcagaccgctagtaactgttctgctggagctgatgacacacgctgtcaatgc

SEQ ID NO: 451997 - DNA, 207 bp, Sorghum bicolor
ggtcgacccacgcgtccgatatgtcgcacctttaaactttgtaattcttcttatagttctcaggcaatttactgtgattgaccaatcagtttattaataggaaatcaattgctgctatgtgctagcaaactgagcaaatccagaagtgtttgctaacactgcttttttactggacttctggatgtacattcatgggggggggggaca

SEQ ID NO: 451998 - DNA, 435 bp, Sorghum bicolor
cgggccgcaatcccgggtcgcccacgcgtccgccagtatcttcctccatccttccctcagagtcccagatctctctcggccccgtgcccagcgctcccaaacccttgcgccgccgcgggtgccaggccgcgagcgtcgccatgggcatcgtctttacgcggctcttctcgtcggtcttcggcaaccgcgaggctcgcatcctcgtccgggggctggacaatgccggcaagaccaccatactctataggctgcagatgggagaggtcgtctccacgatcccaacaatcgggttcaacgtggagacggtgcagtacaacaacatcaagttccaagtatgggatctcggcggtcaaacaagcatcaggccatattggcggtgctactttccaaacacccaggctatcatatatgttgttgattcaagtgatacagata

SEQ ID NO: 451999 - DNA, 889 bp, Sorghum bicolor
cgtccgctccgactccgatcctcgacgccgacgcatccaccggaaccctcctcctccgccgtcgctatgtcgatcttcgagtacaatggatccgccgtggtggcgatggtggggaagaactgcttcgcgatcgccagcgaccggcggctgggcgtgcagcttcagaccatcgcgaccgacttccagcgggtgtttaagatccacgacaagctctacatcgggctctccgggctcgccaccgacgcccagacgctgtaccagcggctggtgttcaggcacaagctgtatcagctgcgggaggagagggatatgaagcctgagaccttcgccagccttgtctctgcgctcctctacgagaagagattcgggccatatttctgccagccagtcattgctggaccttggagatgatgatgtaccgtttatttgtaccatggactgcatcggtgcagaggagctggccaaggattttgttgtttctgggacagcgtcagaatctttgtatggtgcctgtgaatccatgtacaagccaaatatggaacctgatgaactattcgagactatatcccaagctctgaattcttcagtagaccgtgactgccttagcgggtggggtggctatgttctgattgtgacgccgactgaagtgagggagcatgtgattaagagcaggatggactaaatcatggcgactagagttcttagcttgtttccaatgcttagaccaatgttgtgtttggattctgaagtaacattgtatcatcacacagttggtatgagaaggaaccctttgttttctttacccctgttttgcaagacttctgcctggatttcagctgaatgggtggatgacttgataatatcctagattgaggaattgttctcttgt

SEQ ID NO: 452000 - DNA, 1518 bp, Sorghum bicolor
cgtccgcgaccggcctctgaaagttcggagccgccgcccagtcctgcctccctctccgcctccggtgcccaaggccaatagttttgaggtggtaatggcggaccaggctaaccaacccactgtccttcataagcttggtggccagttccacctgagctccagcttctctgaaggtgttcgggcccgtaacatctgcccttctgtctcttcgtatgaaaggagttttgccacaaggaactacatgacacagagccttttcagcccttcaatgtctgttactggtggcatcaatgtcccagtgatgcgtaccccgctttttgccaatgctccagctgagaagggaggcaaaaacttcatgattgatttcatgatgggcggtgtttcagctgctgtttcgaagactgctgctgctcccattgagcgtgtgaagctgcttattcagaaccaggatgagatgatcaagtctggtaggctgtcagagccatacaagggtattggtgactgcttcaaacgtaccatcaaggatgagggtttctcttccttgtggaggggtaacactgcaaatgttattcgttacttccctactcaggctttgaactttgcatttaaggactacttcaagaggttgttcaacttcaagaaggacaaggatggttactggaagtggtttgctggcaacctggcctctggtggagctgctggtgcttcctctttggtttttgtgtactccctggactatgccaggacaaggttggccaatgacgccaaggctgccaagggaggaggtgataggcaattcaatggtcttgtggatgtctaccgcaagacactcaaatctgatggtatcgctgggctttaccgtggatttaacatctcttgtgttggaatcatcgtttaccgtggtttgtacttcgggctctatgattctatcaagccagttgtcctcaccggcaaccttcaggacaatttcttcgcaagttttgctctgggttggctgatcaccaacggtgctggtcttgcatcttaccccattgatactgtccgcagaaggatgatgatgacttctggtgaggctgtcaagtacaagagctccttggatgcgttccagcagatccttaagaaggaaggccccaagtccctgttcaagggtgctggtgctaacattcttcgtgccattgctggtgctggtgtgctttctggctatgaccagctccagatcctcttcttcgggaagaagtacggctctggcggtgcttaaatggagaaaaatgatgacgaacaagagcagttagttcccggtcctgcccaatcaggatctggagaagcttttgcctttcatatcgaagaaattaataattcatgtgcagggaggattcttccaacattcgttttgggcggtgactttgatctccgaacactcgtaactatcctactaagtggtggcattagtccccaaaaacatttatggcatagggtgagtcgagtctgcccttgctttgtgtgtcggccattttttct

SEQ ID NO: 452001 - DNA, 337 bp, Sorghum bicolor
cgtccgatagcacttagctccgactctgagcggagcgggacgcagtccgagagcagcgctagctccgtccgctcgaggaggaaggccatcaacaccctttcttctgtgctctcggctcgctcaaaggctgcctgtggaatcgctgataagcctagacaagtgatcgaagacattgacaaggggggcggcaacgatgagctcgcagtcgtggaatacattgaggacatctacacgttctacaagattgctcagcacgagagacggccatgtgactacattgaagcccaggtcgagatcaacgctaagatgagggctatcctgggtgattggatacttg

SEQ ID NO: 452002 - DNA, 392 bp, Sorghum bicolor
gtccgcattcctggtcgacccgcgtccgcggcgcgtgggcattaatgacttcgatgctctatcagattttaacctcagatattctgataaagcatataggcgagagtagcatcttatacttttatgtgttgttagatgttctgatttgaaaatcgcattgagatgtctaaatttacttctccagttgcttgcggatcttgctcaggggagatgtacgagtttatctctggctcttgttagatggtagaaagcagcaggcaacttgttttttttttgcttgcattacagtaagccggttgctttagatcaccccactacaaatactccttatagcaatggatagctcaggatagaaataaaatggggtggcctattatttatgggcaaaaagg

SEQ ID NO: 452003 - DNA, 478 bp, Sorghum bicolor
  unsure (1)..(478): unsure at all n locations
cgtccgcccacgcgtccgggacatagcaaactataatcagcttgacaaccaggatgaggctcaggaagaaactggatggaagttagtgcatggtgatgtattccggcctcctgttcactcaggcctcctttgtgtctatgttggcactggtgttcagttctttgggatgacacttgtaaccatgaggtttgctcttcttggattcttatcgcctgcaaaccgtggaggacttatgactgctatggtccttttgtgggtgttcatgggtgtattggcaggatacacctcatctcgcctgtacaagatgttcaaaggcactgaatggaagaagatcaccctcaaaactgccttcatgtttcctggtattatcttttcggtcttcttcttcctgaatgcactgatctgnggtgagaaatcatctggtgcagttccttttggaacaatgttcgcattgttcctcctctggtttggcatctct

SEQ ID NO: 452004 - DNA, 174 bp, Sorghum bicolor
  unsure (1)..(174): unsure at all n locations
acgcgtccgcttttgtaaactacaacagtctatctcttgattntgtttcacagggaagctattggaaaaattcttgcccgtggtcacagtcgtgttcctgtatactcagggaaccctaaaaacatcatcggtgtgctattggtgaagagtcttttgactgttcttactaaattt

SEQ ID NO: 452005 - DNA, 459 bp, Sorghum bicolor
cgtccgatcagcaaatgagagttctcaactatggtgtggacatagtggtcggaactccaggtcgaattattgatcttctcagaaggggtgttttaaacctttcacaaatccagtttgtggttctagatgaagctgatcagatgctggctgtgggtttcgatgaagatgttgaggtgatcatggagcaggtgccgcagaaccgtcaaagtatgctgttctctgcaacaatgcctagttggataagaaagatttcgaacaagtacttaaatgatccagttataattgaccttgttggtgactcagaccagaaattacctgaaggaatctctctctattccattgcctctgataacttccggaagcaatcaattcttggtcctttgattaaagagcatgccaatggtggaaaatgcattgtgtttactcaaactaaacgggatgcagatagattggcatatg

SEQ ID NO: 452006 - DNA, 299 bp, Sorghum bicolor
  unsure (1)..(299): unsure at all n locations
cgtccgcggacgcgtgggttgagaagcaggggtttgggcttaagccaatgaattgtccaggccactgtctaatgtttgctaatagggttcggtcatacagagagttgcctctacgcatggctgattttggagtgcttcatagaaatgagcttagtggcgctcttacaggtttgacacgtgttgggggggggcancangacnatgctcatatcttctgcagagaaaaccaaatcaaggatgaagntaaggctgntntggacttcatcaattatgtttacgagatatttgggttcaaatat

SEQ ID NO: 452007 - DNA, 207 bp, Sorghum bicolor
  unsure (1)..(207): unsure at all n locations
cgtccgcatcgatggcttgaaaaaactttatgtcgggggcgtgaagcctttggaagttacatacaagttcaatgattttgtctcccctttgctgacaagtagtgattttgatgcaaagccaatggttatgctcttaggtcaatattctactggtaaaacaacttttattaagcatctgctagggggggggtatccanntncccatat

SEQ ID NO: 452008 - DNA, 175 bp, Sorghum bicolor
gcgtccggggctgtgaccagaggcagggccctgcacccggggcttcgtaccagggtggtggtgactactacaagcagggctctcagccatatgatagccagccaccaagctaccctcctgggccagggaattacaacagttatgggcaatcccagggtcctaactatggccaacc

SEQ ID NO: 452009 - DNA, 536 bp, Sorghum bicolor
cgtccgcccacgcgtccgcaagcaggcatgagtatggggctcgcagctccaaccctgccaactccaacacaggctgctcatccttaccggttgattccctcgcacttcgcagcgtccgctgctccagagcaacccttggcctaaccatggtctaaaactgtctcgcttccaatgcgtcgagtgcgggcgtgcatctctaacaccaaacggcactattgtagatcatgtttatcagccaaagtgctcacctccatatcccacatggtcatgtggtgactggatattagctttagccccaggatgggcacaaagcttcatcccccaaggatggggtgttctaacagacaagtacaaaccccaaccattctaacaatagtccaaggaaggacttttatcagggagagttaatttcagacgtaccaagacaaggctgtagctaagagaaactaacagtcaagcatgacccagggagggttcatgctgatacttggcaaattggacaacaatgacagctaaataactgatttaactagcat

SEQ ID NO: 452010 - DNA, 510 bp, Sorghum bicolor
cgtccggccacgggcatagaaaccagtcaagactcaagagcgagttccagtagctatagccgcgcctgttgggaaagccatctgtgtcggcgatcatggaggatgagaggagcaccctgcagcaccagggcggtgaggtccaggagaacgccgccggcgatcaggtggaggtgaaggacaggggactcctcgacagcctcctcggcaggaagaagcacgaggaccaggacaagaagcaggaggaggagctggccaccggcatggagaaggtcacggtggccgagcccgagaaggaggaggaggagcacgaggccgccggcgagaagaaggagagccttctcgccaagctgcaccgctccagctccagctccagctcgtcgagcgacgaggaagaggagggatcgatgagaacggagagatcgtcaagaggaagaagaagaagggccttaaggagaagatcaaggagaagctgccgggccaccacaaggaccacgacggggaccaccacac

SEQ ID NO: 452011 - DNA, 451 bp, Sorghum bicolor
gcgtccggaaaacattggagaacttcaaaaagggcatagggttatcatcaccacaggatggctatgtaccatatcattcagcaagaatcgagctctgcccagctgcatcagcagacacctcaaagaagggtgaagtcttcacagaaatgctcaacaactgcttggatcagatccgtgcgccctcatccgacacccggacattcatgcgctgcgatgtgaatttcgaccagtccaaccaagggcgaagcctgaacaccatgatcggcagagcagcccacatcgagttcctggagactgacctctacgccaagttcatcatgtggtccttccctgacctgttccgatgacagacgacacggcttgtctttgtaatactgccacataccaaaccaatagcgcacactactgagtactgaccaggcaaggaaaactaagcttggataaagtttcc

SEQ ID NO: 452012 - DNA, 1178 bp, Sorghum bicolor
cgtccgcggacgcgtgggcaacttgaaggcggctcagaaggagctcaatggtgccctgagcaaatatctcaaggtccttgagaagtccttcaatccagatatatctaaggcatacagaaatgtggattttgaggttcatacggtaaacaatatcatagcgaatcatttctaccgccaaggcctctggtgatggttggtgatatgttcgctcgtgagtgtggggaattaggtggaacttcattgaagctaccgtttcaggagatgtatgctatccttgaagccatgaaagcgagaaacctcgagcctgccctcagttgggctgccaaaaaccatgaccagctgttgcagaatgggtctatgctggagtgcaagctttatcagcttcagtttgttgaaatactgtccaaaggaagtaggggtgagggcaaagatgaggctcttttatatgctaggactcacttggtcccctttgcagccgtgcacaaggaagaattccagaagctaatggcttgccttctatgggttggccggctggatcaatccccatattctgagttaatgtcatccgcgcattgggagaagctagctgaggaactcacccatcaattctgcagccttctgggccagtctagggagagcccactgagtgttgcagtatcagctggttttcaaggactaccaactctgctgaagctgacacaagtcatggctgcgaagaagcaggaattggcaagttatgaagcagctccctgtccccatagacatcgggccagaatttcagtatcactctgtctttgtgtgcccggtgctgcgggagcagtccagtgatgagaaccccccaatgcggatgccgtgtggacatgttgtctccaagcagtccatcatgaagctgtcgaaaagcagctcaaggcccttcaagtgcccctactgcccatcggaggctgtggcgtcgcattgcaagcagctgcatttctagatgtgctaatcttttctggctgcgcaaaacggcaaacctgttgttagcttcccctcctgttccctgttgcaccagtccaataacttatgtgcctctgtaatataaacatctacgtccggataaacatgtagtttcgtctgtatgtactaaactgtacagttgcatcttccaagtgtgttgcttagttctgttctggagattc

SEQ ID NO: 452013 - DNA, 343 bp, Sorghum bicolor
  unsure (1)..(343): unsure at all n locations
cgtccgcgacccacgcgtccgggtggattagagccttgggatggaaatcctgttctacagcagatgcggttccaatctcagcagtcatccctgcaagctgtgcagcaaggttatggtcagaatgcaagcgaatctggtttccttcaaaatcagctgcagcagctgcagctgttaaagcagcagtatgctgcgcagcancagcagcagcagacacaagttctgcagcaacaatcgcatcaggaaatgcaacagcacctatcagctagttgtcatgatattgctaacgtagcttctggcgtgaccgagtctggatctgctcgacaatcacaatcttgtttgcttc

SEQ ID NO: 452014 - DNA, 681 bp, Sorghum bicolor
  unsure (1)..(681): unsure at all n locations
cgtccgaatggtatctctccgccgtccaggccggccgctgcgacaagacctactccgccctcgccccccgctgcgacgagctcctcctccaggtcgcggccaagggagccatcaccgacgaatggccctactccgtccatctcctcgcccacctctacatcaatgacctgaacagcncgcgggggtgtgggaagtcnttnccncangaggtgaaggacacgccgccagagctcgccgcggtctggaggattggtcaccgcctgtggaacagggattatgctggcgtcaacacggctgcacaggggttcgagtggggccctgacctcgctgatttcatcactgccttcctagagagctacagacagaggatattcaagcttgtgacttctgcatattccacaattagcgttgctgatgtggctcatttcatggggatgagtgaggaggatgttacaaactatgctgtgcaaaacagttggagcttggatgcagcgactgggatgcttactgtaaaaaagccaaaggctcagaccaaccagaagcttgactcgagcaagctgcagcgtttgactgagtgtgttttccaccttgagcactgatgctcactgtcaattatgtcgcatccctggtggttctctacttcacattntatgaagcatgtttatcaattatcatgtgata

SEQ ID NO: 452015 - DNA, 667 bp, Sorghum bicolor
cgtccgcctggaaccgcgtgctataacagcaaccaaacggcggcgatgcggcttttctccggcgtcctcgattcttcttccgcgtttgcctccgccgtcctgggctccgtgtccgaccgcctcggattctcgcgcgtatttttcggtcgagcgagcccatccagcatgccggctctcgcttgtgaagccgcggcctcgtcttctgcggcagccggtgccgacccctgtgccggcgcccagaaaccatggctcttcgtcggtctggggaaccccgggcggatgtacaaaggcactcggcacaacgttggctttgagatgattgatgctattgcagaagctgagggcatttcagtcagcagtaagcaatttaaggcgattgttggaaaaggcctcattggtgatgtccctgtaatgcttgccaagccacagacttttatgaatgcgagtggtgagtctgtgggacagttggtttcatacttcaagataccactcaatcaattagttgtgatctatgatgatcttgatctaccctttgcgaaattgcgtctgctaccaaaggggggacatggtggacacaatgggatgaggagtattattgaccatttgaaacaaagccccaatttcgcgcgtctaaggattggcattggacggccacctgaggagcagg

SEQ ID NO: 452016 - DNA, 189 bp, Sorghum bicolor
gcgtccgggtcgagaagaccgtccagtacctcggcgggggcggcatggaccccggaacggagaacaacccgtacctgggcttcgtgtacacgagtttccaggagcgcgcgacggccgtctcgcacggaaacaccgcgcggctggccagggcgcacggggacgacgtcctggcgcgcacctggggggggg

SEQ ID NO: 452017 - DNA, 529 bp, Sorghum bicolor
cgcgtccgagatttcaggctattttgcccctaagaggtaaaattctcaacattgaaagaagggatgaagcagccatgtacaaaaatgaagagatccaaaaccttattcttgcgcttggattaggagtgaagggtgaggattttaagaaggaggctctccggtatcataagatagttatacttactgatgctgatgttgatggcgcacatatccggactctcctccttactttcttcttcagatatcaaagagcattatttgatgaaggttgcatctacgttggtgtacctcctctttataaggttgagcgtggaaaacaagcacattactgctatgatgatgctgatcttaaagagatagttaacaccttccctccaaatgcgtcatatcatatccagaggtttaaaggtttgggtgagatgatgcctgtacaactgtgggaaacaacaatggatcctgagaggcggctgttgaagcagcttaaggttgaagatgctgctgagggccatgttgtgttctcgtcacttat

SEQ ID NO: 452018 - DNA, 504 bp, Sorghum bicolor
cgtccgctcaactgcaacagctaagcttcgccggccagacagcaacatggctgaggaggcggccaagaaggtggaggtggaggtcaccaaggacaaggagcccgaggcggcgcccgcggaggccgtgccggaggcggcggccaaggaggacgtcgccgaggagaaggccgtcatccccgcgaccgagccgccggccgccgaggagaagccgccggccgacgattccaaggccctcgccatcgtcgagaaagttgcagatgaacctgctccagagaagcctgctgctgagaagcaagggggttccaatgacagagatcttgctcttgcaagggtggaaacagagaagaggaactctttgatcaaagcatgggaagagaatgagaagacaaaagctgagaacaaggctgctaagaaagtatccgctattctttcatgggagaacacaaagaaagcaaacgtagaagctcatctgaagaagattgaggaacaactggaaaagaagaa

SEQ ID NO: 452019 - DNA, 289 bp, Sorghum bicolor
  unsure (1)..(289): unsure at all n locations
cgtccggtttctctataagatctccccagatagagttaaagacgctgttaagtgcatgcatttccgggcatcaaaggctgattgtgtatttaaaggcgactacatactgtcagaggatggccagatagaaatggctctcctgtatccaggacatcggtacacgcttgtcaggatgcgccttaggggggggaggaaccacanntggtgcaaataacaagttgcatgtactgaaaattctaaccactggagngaatggaactgaactgcaaaattggaaaggcagcatact

SEQ ID NO: 452020 - DNA, 511 bp, Sorghum bicolor
ggtccgcattccgggtcgcccagcgtccgagaaatctgacatatcatggacactgattactgctgccctatcttctgttgcgaggacttgcatggtaaccatgcaggacattcttggcctcgacagttctgctcgaatgaataccccagctacgcagaaaggaaatcggtggccgaggatgccaggctcagttggcttcgacagtctcagccctgaagcggcaaagctgaaggagctgcttgcgctgtacaatcggcagtgaagtccccgaagtccctttaataaaataggcaaccaaatgtgagcggtttggctgccaagttctatgggaccatggtactcggtcccgcacaaacgttttgtgttctggttggctagaaacttgcgtgcttgaatatgaaggtcttgcactgcaggttgaggcctgaacacgaagtattgtactgtgtattcccattttttaacaatttcctttatgtgcgggcctatacaagtttccccccactttcgc

SEQ ID NO: 452021 - DNA, 189 bp, Sorghum bicolor
cgtccggttttattgcattattccatattcctgagtggagtggtgaaggtgggttctcaagaagaggtagctttcttctttattataacagtaatgcttttgcgtgcctcatcacaggtactttgctcacagaagttgaattttgcaatctgttttctttgtttgccatattacacataaggggggggg

SEQ ID NO: 452022 - DNA, 292 bp, Sorghum bicolor
  unsure (1)..(292): unsure at all n locations
ccgtccgaaaagaactaatgccagaagatttctgggttagggcaccaaagaaggggattatggtttttgcattgccaggagaacctggcttagccgaggtagctggtgatttcaagatccagtttcatgatcgacagggagatttttactgctggttaaatacaacaatgatggagaacagggggggggggagtcccactgatcttgatgattttgacaagagaaaattggcatcacctgggttccaggttgagggtgtcctggtagattacgatgggtcgnaaccaccaaa

SEQ ID NO: 452023 - DNA, 501 bp, Sorghum bicolor
cgtccgccaagactgatctcgatgatgaacaggagattgagattgtttttgatgaggaatcaggttcagatgataaacttcctttccctcaaccagatgatagtctccaatcaccacctgtcattattggggaaaattctcctggccctgtcattgagacagaaaatcaggagaatgaaagaattcccttttcccagagggccacatcactcccaaaggatgatgaaagtcctagcgttgacatttcttcccagactgcaatgctttcagaacctaacaattctttggaactgaaatattcagtttctagcccagggaagaattcttttcatgatcatgctgaaaagtctaattatccttctattggtgtgtctgggagatcatctgtacaagcagatcatcaacatttatctcgtagacatgaaaagagaagtccacgaaaatattctgagacttctctatcaagtggatcccatgggcatgagcatagacattccaata

SEQ ID NO: 452024 - DNA, 330 bp, Sorghum bicolor
cgcgtccgcggacgcgtgggtttacatgtgatgtatccaaactatctcaattctttaatgcatattgaacccccccccccccccccaaaaaaaaaaaaagaagtcaagtgtcttctacacacttccaagattgtgtacatttttcggtagggaaacccaatcttttcagtttgtgctttgctttgggggggcctggaagctggcccgatgctgtatacttctttgcccaaccacttttttatcaacaagtcttgttttttttaaaggtttttttttaaaaaagaatcttttttttttttggtgggggtgggcccctgacaacactttgca

SEQ ID NO: 452025 - DNA, 484 bp, Sorghum bicolor
aacggccacaccctcaccgtcaaggtcgtcagcgccacccgcgtgccgcgggcgcgcgcgcccaggcgcacccgccgccgtcccatcccgcgccccgcgcatcgccgagtgcctcgtcggggacgagaccggcgccatcgtcttcaccgcgcgcaacgaccaagttgatttactgaagcccaatgccacagtggtggggcgcaacgccaaaattgacatgttcaaaggatcgatgaggcttgcagtggacaaatgggggcggattgaggctacggagccagctagcttcacagtgaaggaagataacaacttgtcgctagtagagtatgaattgggtaatgtggctgagtaaccgctggagcgattctgctgcccctattttcgcgacataagaaggaagtaccatgaacgaacattataaagcctctcgaagcgagtttatttattaaggttgtatcggttgtgttagaactttggatccatt

SEQ ID NO: 452026 - DNA, 726 bp, Sorghum bicolor
cgtccgactccccctgctgccccaccctctaatttgattgtgatgaagaacagtggtcttcaccagcaacaagcaaaagttcctatgcaggctctctccactcctggtcaccaaccccagagttctttaagcatgagttcatcaaagatggggccttctgtgactaacctttctactggaggggatctatctcgatcttcgaatgcccctgttgcttctggttcaccatccaattcggtctccaaaagtactggaggcagcccacctgccacaggaaatgcaaagggtgttcagcagcctggccagttgccatcaccgcagcagcagtcagccaagaactctgcttcaacgtctggctccaagtccactgctacgaatcatttcagtatggctatgccatctatccttggccaacagcctaatgcatcacctggttctaatccggggagcaagcagcagtcacatatgccgccatcatcaatgaaacagccgccgttcctgcaaggccatttcttcatatccaacaactatgctcctcaggctccaggagcaggtggtgctgccgccctaggcctctacccgaagcgaccaggtgacaagacgcagcagcaggcaccacacacacagaatgccttgtcagcggcaacccagtcttgaggtggcatgccacacacccacatgtccgcggcacaattgacttttggaacaatgccgatgcctttaaaa

SEQ ID NO: 452027 - DNA, 916 bp, Sorghum bicolor
cgtccgagaaaatccctctgatttttggtgaaagacgccctggtgatgcagagattctcttttcagagactactaaagcagagagggagcttaactggaaagcaaaatatggtattgaagagatgtgtcgcgaccaatggaactgggccagcaagaacccttatggctatggatcgcttgactctaccaagcagaatggccaccaaacaaatggatctgctgactcctccaagcagaatggccaccacacaaatggttcaactgactcacccaagcggaagcgtccgtatgcctatgggtccgccgactcacccaagcggaatgggcactatgtttatggatcatcagacttcaagcagaatggtaatggtcacctgcgttgagcagagctgtttgacctgtgagctccctgtacattcggtcgcgatgtgagctccctgtaaggtctatggtgaacccactatccgagattgatgtggatcattgggttgacaggtcatacagtatagagtcgttggcagcggaattccagtttgctgtgggtaaagcctatcttctgcgttgtttatttttcccttcttgcaattatggtgtaggaatgtggtcatagtgtatcagctgattctattctttccctgctaattgaactgtattacgcttcatcaagtttggctgattactgtttaacggggaaaacttgcacctgtgtatgattatttatttgtacatgtactatgctatgtatgtatgaaagggagaactagcctcgcccgcgatagccctgatgaatttagccgcaattgctcccagatcagactgttgtttcatgtgaatgtacatatgatgccgctgcaaactttgagcagacaaaagtcgcccttttttttagggaacaattattaaatgttcgcttccc

SEQ ID NO: 452028 - DNA, 477 bp, Sorghum bicolor
cgtccgatcaaatcatcgatcggagtatccaggatgcgtacataaatgccatccgaagggcgaagaacttcatctacattgagaatcagtacttccttggaagttcatatggctggaaggccgaaggcatcaagccggaagaaattggtgctcttcacttgattccgaaggagctctcattgaggaggggcagcaagattgaagctggggaacggtttactgtttatgttgtggtgccaatgtggcctgagggtgttccagaaagtgcttctgttcaggcaatccttgactggcaaaggagaacaatggatatgatgtacactgacatcacacaagctctccaagccaagggaattgaagcaaatcccaaggaatatctcactttcttctgcttaggtaaccgcgaggtgaagcaggagggagaatatgaacctgaggaacacccagaacctgacactgattacatcccggctcaag

SEQ ID NO: 452029 - DNA, 413 bp, Sorghum bicolor
gcgtccgaaattaatgataaaggcagtgaatggatccacgatcttgcagacggttgtcctgttctgacaacattgaatttccacatgactgagcttcaagtgatgccagctgacctagagtttcttgcaaggagctgcaagtcactgatttccttgaagattagcgactgtgatgtttcagatgggggggggttcttccaatttgccacagcactggaagaatttgctggagggacattcaatgagcaaggggaactcaccatgtatgggaatgtcagatttccatcaagactatgctccttgggacttactttcatgggaacaaatgaaatgcctattatatttcctttttctgcaatactggagaagctggatttgcagtacactgtcctcaccactgaagaccattgcca

SEQ ID NO: 452030 - DNA, 472 bp, Sorghum bicolor
  unsure (1)..(472): unsure at all n locations
cgtccgcccattcgtccgaagcaattttcacgtaattgggcagtcctttaattcagaagctgttgtgtaaatcttttgtaggtggagaatggagaaaaacgagaagaaatgctatatatgaagggacctcagacagaattccaaagatatattcggtcatttaattctggtgtgtgattgcttgggggggtgtggaaaggacttggattttctttttattcggtgtcattgaataataggttctgatggctagaaatatttattttgtacactagaataatattaagatgacggtttccatttttgagggacaataaattagcttgtatgcttttntaatggtattttgcatttactaaaattggtttgaacataacctatttactataaatgggaggaatttggttaataaaatacgtattaattcataaatataggtgaaaaaaaaacaggaaacaaatgcncgagatat

SEQ ID NO: 452031 - DNA, 314 bp, Sorghum bicolor
gtcgaccacgcgtccgcttcaccttgaagccatgagtatttttgacatgggaaacaaattactggagaaggttagaaatgtgaacttcactggggtgtctggacaagtgcaatttaatgctcagtttgaactcattcatcctgcctatgatgtcataagcataattgggaatggcatgcggaccattggtttttggtcaaactatacaagattgctatcgactgtacttccagaggacctgtattcgaagcctcctaatacttctcttgccaatcaacaactctatgatgtcatttggcctggagagactgcac

SEQ ID NO: 452032 - DNA, 486 bp, Sorghum bicolor
cgtccgctcacagaagcggcggcggcggagcaagaggaggcgaaggcgagggcgagggcgcgagggagggacaggagcaccagccatggtgcacgtgagcttctaccgcaactatggtaaaacattcaagaaaccaaggcgtccttatgagaaggagcgtcttgatgctgaactgaagctggttggtgagtatggtctgaggtgcaagcgtgagctctggagggtccagtatgcactgagcaggatccgtaatgctgcaaggcacttgctcacccttgatgagaagaacccccgccgtatctttgagggtgaggcgcttctccgccgcatgaaccgctatgggctgcttgctgagggtcagaacaagcttgattatgtccttgcccttactgctgagaacttccttgcaaggcgccttcagacacttgtcttcaaggctggcatggccaagtctattcaccatgctcgtgtcctgatcaagcagcg

SEQ ID NO: 452033 - DNA, 499 bp, Sorghum bicolor
cgtccgagtagagattctacaattcatggtgatgaatctgatctgatgtccacagataatgaggaaaaaatggcagttgaacgtgagatacatgtaaattatgaggaaccaattaaaggtgctgctgtgacagaaacatctgggcagccacaacatccaaatcttgaccatgaactagatgcagtaggtatactggataccagttctgcactccctgtcagtaatacaagacctctttctcctgctggacagaaccagcaaatgcttaagatgaccacaacagcactagataactgccttcttgtgcctagtctcaatgatctgatggctaagcatgagcaagttgagtaccatgaagctgatgattacccggccacttatgatccccaggtaggatcagattctcgtgaggagattaatcatcacctgggggatgacaatcgaaccctctgtattccacctaatgaatccgaatcgccagcaaactccaataaagatg

SEQ ID NO: 452034 - DNA, 1415 bp, Sorghum bicolor
cgtccgaaaggacacaagggctaaaaccctctccaccacttctagacgcttcacttatctcgagcatctcctatctccgtcgtcctcgctcctcaactcgccatgggcaagattaagatcggaatcaacggtttcggaaggatcggcaggctcgtggccagggtcgcgcttcagagcgaggatgtcgagctggtcgccgtcaacgaccccttcatcaccacggactacatgacctacatgttcaagtatgacacggtgcacggccactggaagcacagtgacatcaccctcaaggactccaagacccttctcttcggtcagaagccggtcaccgtctttggcatcaggaaccctgaggagatcccgtggggcgaggctggtgctgactatgtcgtggagtccactggtgtcttcactgacaaggataaggctgcggctcacttgaagggtggtgccaagaaagttgttatctctgccccaagcaaagatgcgcccatgttcgttgttggtgtcaacgaggacaagtacacctcagatattaacattgtttccaatgctagctgcacaacaaactgcctggctccccttgccaaggtcatccatgacaactttggtatcatcgagggtctgatgacaactgttcatgccatcactgccacccagaagactgttgatggaccctcagccaaggactggagaggtggcagggccgccagcttcaacatcatccccagcagcactggtgctgccaaggctgttggtaaggttcttcctgatttgaatggcaagctcactggtatgtccttccgggttcccaccgtggatgtgtcagttgttgaccttactgtcagaatcgagaagggtgcctcctatgaggatatcaagaaagctattaaggctgcttctgagggcccactcaagggtatcatgggctacgtggaggaggatttggtttccacagacttcgttggtgacagcaggtcgagcatctttgatgccaaggctggtattgccctgaacgacaacttcatcaagcttgtctcgtggtacgacaacgagtggggctacagcaaccgtgttgtcgacctgatccgccacatgttcaagacccagtagagatttttctgctttccatagcatcccaatggccttggtcgctgtccatcccgctgcttgtctatgctgagaataaatgtgaatggtgccttctggacgcccgctccatgctgggtctgaacatgttttgtgtttccatttctgctaccatcctgtaacaaattcactaatatgggacctgagtttagttttttgcttgtgaagaatataaacagtggggttgcagttttgctgtgtttagctggtttggttgcatagatgagctggtccttcgggaataatagttttttgatttgtcc

SEQ ID NO: 452035 - DNA, 512 bp, Sorghum bicolor
cgtccggttcgagcagtcaccccttctgcatgattttgtggcctgaagaatgctcatttgctcatacatcagatgatttgtatttagcacctgccggccggccgcccgcccaggtgaataacatatatatgtgcctgaaaaggagcattgttgggttgtagcctgtagtttcaattggatacagatttggaggtatagcaggaaatgtaatatagtgtaggtggttggggtgatagggtaaaaaaaaaagggcgacgacaacttcatcaagcttgtctcgtggtacgacaacgagtggggctacagcaaccgtgttgtcgacctgatccgccacatgttcaagacccagtagagatttttctgctccccatcgcatcccaatggttttggtcgctgtccatcctgctgcttgtttatgctgagaataaatgtgaatggtcccttgtttggacgctggattcatgctgagtttgggcatgttttgtcttctgtttccttttctgccaccatcc

SEQ ID NO: 452036 - DNA, 794 bp, Sorghum bicolor
gtcgacccacgcgtgccccattctcgatcccgtttgaaatccatccgtcctcgtttcctccgtcccgcagcctctcgtccccatggccaagatcaagatcgggatcaatgggttcggcaggatcggaaggctggtggccagggtggccctgcagagcgacgatgtcgagctcgtcgccgtgaacgaccctttcatcaccaccgattacatgacctacatgttcaagtatgacactgtgcacggacagtggaagcaccatgaggtcaaggtcaaggactccaagacccttctctttggtgagaaggaggttgctgtgtttggctccaggaaccctgaggagatcccgtggggctcggttggtgctgattatgttgttgagtctactggtgttttcactgatcaggagaaggctgcagctcacttgaagggtggtgccaagaaagttgtcatttctgctcctagcaaggatgcccccatgttcgttgttggtgtcaacgagaaggagtacacctcagatattaacattgtttccaatgctagctgcacaacaaactgcctggctccccttgccaaggtcatccatgacaacttggtatcatcgaggttgtacaactgtatcatactgcccaaaactgtgtgactagcagcgaagggagctgtcttaattcaacctgtcagtggagctcgtagagtatgtgctcgtcacgtgatggcttcataagctctggtaaagtagtgttggcatagtagcttggagatgtcacctctgcaggcgttatcagtgtgctaccact

SEQ ID NO: 452037 - DNA, 784 bp, Sorghum bicolor
  unsure (1)..(784): unsure at all n locations
cgtccgcagcaccactggcagagaatctgaatgggaagcatgagcccaagtcccccaaagccgatccccgttcaccaaaagctgctactcatgggacctgggccacttctgtaaagaagcccattggtgcaaagaacgctggagctgccaaggctgttggtaaggttcttcctgatttgaatggcaagctcactggtatgtccttccgggttcccaccgtggatgtgtcagttgttgacctcactgatccgaatcgagaagggtgcctcctatggggatatcaagaaagctattaaggctgcttctgagggaccactcaagggtatcatgggctatgtggaggagggtttggtttccaccgacttcgttggtgacagcaggtcgagcatcttcgatgccaaggctggtattgccctgaacgacaacttcatcaagcttgtctcgtggtacgacaacgagtggggctacagcaaccgtgttgtcgacctgatccgccacatgttcaagacccagtagagagctttccgtagcatcccaatggccttggtctttctgctttccatagcatcccaatggccttggtcgctgtccatcccgctgcttgtctatgctgagaataaatgtgaatggtgcctctggacgcccgctccatgctgggtctgaacatgttttgtgtttccatttctgctaccatcctgtaacaaattcgctaatatgggacctgagtttagttttttgcttgtgangaaaaaaaaaaacaacaaatatttataaaaaaataaac

SEQ ID NO: 452038 - DNA, 724 bp, Sorghum bicolor
cgtccgcccataagtactctcctctcgccgcgccgcgccggcgccacttcctttctcctccccacctcggcggccggcctcctcttcttctcttcacccacacgcaggtcatcgagatgtcggcggcggaggcgaaggcggcggtggtcccggagtctgtgctgcggaagcgcaagcgggaggagcagtgggcagcggacaagaaggagaaggcgctcgcggacaggaagaaggcgctcgagagccgcaagatcatcttctcccgcgccaagcagtacgcccaggagtacgacgcccaggagaaggagcttgtgcagctcaagcgtgaggcccggctgaagggtgggttctatgtaagcccagaggccaagcttctgtttgtggtccgcatccgtggtatcaatgccatgcaccccaagacccgcaagatcttgcagctcctgcgtttgaggcagatcttcaatggtgtcttcctcaaggttaacaaggcaaccattaacatgctgcgcagggtggagccatatgttgcgtatggatacccgaacctgaagagtgttagggaattgatctacaagagaggttatgggaagctgaacaagcagaggattccacttagcaacaacaatgtcatcgaggagggccttgggaagcacaatatcatctgcattgaggaccttgtgcatgagatcatgacagttggcccacacttcaagggaggccaaca

SEQ ID NO: 452039 - DNA, 661 bp, Sorghum bicolor
ggcacgaggccgagccgaaatcaatctcagatcccccatttcgtatcctcccctccctccaaaccctaactctacccctcccccgagcgcaaccggcggcgatccaccatgccggcgacggcggggcgcgttcgcatgcccgcgaacaaccgcgtgcacagcagcgcggcgttgcagacgcacggcatctggcagagcgccatcgggtacgacccctacgcgcccgagaacaacaagcagcagccgggccgcccctcctcctccgtctccgccaacgccgccgccgcagccgccaacgacgccagcgcagccgccagcgccgcagcagcttccggatccggctcgggcgatggcaacgcctacaccaagagaaaatcaaagcacacaaggagtagaaggagtgatgatagtgaggatgaagaggaggaaggcagaagaggcagggacaggaagaagaggtccaacagatcgaagaagcatggaagatcagatgaggatagcagcgacaatagtgactccgataggcagaggcacaggaagaggaggaggagccatcgcaggagcgaggactcattggatgagaaggatgtgtctggaggtgaagaaaggaggcatcggcgtcactgcaagcggagccatcaccggagggatgcatctgact

SEQ ID NO: 452040 - DNA, 380 bp, Sorghum bicolor
cgtccggcgtctggccgcccacaccgatccggggcgagggggaggccatagaacgctcacccacctggccgggcatcgagcacactcttggcgatatcttcacctatgcggtcctcgtgcagctcgccatggcggaatccatgccggtgccgcacatcgtggtcacttctagtccatgtgggcggggggctgatcctcaacttcctcaatgacgatggctggctccctggaaccctctggctgctgtgggaggatatcatcacagtgggccggcttgccgtgctccctcaggtcatggggacaacgattgttccctttatccccaatagcgtactgcctggcataatctgtgggcctttggctgtttgagctgttgcgat

SEQ ID NO: 452041 - DNA, 498 bp, Sorghum bicolor
gcgtccggggggttcttccaatcaccatgctggcggtgccgtggatgacccggcagcggttgcggcagaattccagcgccgctgggttcccccgcagccaccgggcgtcattatgccagaggctgcggcggccatccggcaggccaggttggttccgaggcagcagcctggtgatgggcacctgagggctgatgttccgagaccattggagtctgccatggcaacaacagagcacgtgaacggtgcccctgaagcacctggtggagagttgccaagccacgatggtggtaccatgactgctaatgccagcagctgtggtgggagtgaagagcagcagcaggaagccgcttgagtgaagctttttggacgcccttcgatctgattctttgataggatcttgcacctgtgtgtatagtgtatgcatctgcatatgtttgttgacgtatatctcgtgtacgaaactgcagctggatggagatatataaagtgatattttgg

SEQ ID NO: 452042 - DNA, 591 bp, Sorghum bicolor
cgtccgcctcctcttctcgtccggagccgcggccctcgcaggtcacaacatcgccgcctcgagccctcctctccttgtcgtgtcgcatcagatcccgcacggcgcccgcccaccccgtccccggcggccggcgccccgacccccgccccttctgccgctctgtggttctgccttctatctcaggcttacattatttggcctccttcttgtcctgtttctggatctaccactggatatcgtcgtctggtcgaaccaccatgggtctgctggcgttgcagcggctcatgtccctacagcgcgaccggcagcggcgtcaacagcgaacccaagctctgaatggatcgattgattcatcaatggatataagaaagtgctcaccctgtgaacaagacacccatggtgattctcatgctgccaaaagaatgatgtgttcaatcccaacccttccggaggacattttgcaacatatacattccctgttgccactgcgtgatgctgcccgtgctgcttgctcatctcatgcctttctacgtttctggcgatgtcatcccaatctaaccttaaactggcatatccttggctcaaatgcaa

SEQ ID NO: 452043 - DNA, 423 bp, Sorghum bicolor
  unsure (1)..(423): unsure at all n locations
cccagcgtgcgggcgcgtgggtgcattttacatattcagctagaagcaggcatcaggagtggtgatattgagagtttcaagttcatcgagagcgctcggaagctcatctttcctagtgctgctaaagagaagtatggcgaccatggaaacaagagaggctcaatcggaacgggcgatagacaaaatagaaggataccaacagcacatgaatctagggagaggcttcgcaattcagatatcttcaagaggaagcttgatgactccaacgatgagaagcaaaagaagtcagattggaactgaggctcaaaatgctcgttttctcctgcattttcctgaatcaactgaaaaatggatagggggatgcatgaatttgtaggaagccatgcggctacaggggaaactgaaatggagctgtancagtct

SEQ ID NO: 452044 - DNA, 527 bp, Sorghum bicolor
cgtccgggagcggacagtaggtgccctaatagcaaacggagctgcatcaggtcctttaacagatccaacacagcagtatccatctggaagaactcctgctgatctagcatcagaaaatggtcacaaaggcattgctggttttcttgcagagtctgctttgacaagtcacctctcagctcttacactaaaggagtcacagggtggcaatgtggaagaaatatgtggagtaacagcaccagcagctgaagattttgcagaaccaagttcttctcagcttgcttgtgttaattctcaggaagagtccttaaaagattcacttggtgcagttcgtaaatcaactcaagccgcagccagaatatttcaagcttttagggtggaatcattccacagaaagaaggttatcgaatatggagatgatgattgtggactgtctgatgaacgcacactttcacttatttccctaagaaatccgaaacctggacatggtgatttgcattctgctgctgttccgatccaaaacaagttta

SEQ ID NO: 452045 - DNA, 538 bp, Sorghum bicolor
  unsure (1)..(538): unsure at all n locations
cgtccgtgctctccctgcagatccccaatcaccagatgatgggcttatgagtgagccagcagcagcaactgttaccagcatcatcaccaccactgcgaaagagcctaaagaaggggctccaaactcccacaaatctgagaaccaagctcagctgccaacttcacccaagctagccgatccaccatggacatgtcgccgaaccccgacagcccctcgtcaggagggggcaacggcatcgggccgagcagcggtggcgcgtcgccgtccgttggctccatgacggcgccgcagtcgccgagccggtacgaggcgcagaagcggcgcgactggaacacgttcgggcagtacctgcggaaccaccggccgccactgagcctggcgcagtgcagcggggctcacgtcctcgagttcctccgctacctggaccagttcggcaagactaaggtgcacggcccggcgtgccccttcttcggccacccgaacccgccggcgccctgcccctggccgctccgncaggcctggggcagcctcgacgccc

SEQ ID NO: 452046 - DNA, 804 bp, Sorghum bicolor
cgtccgcccacgcgtccgcccaaatccccaaaccctagcggacgcgcgcacgcacgcggcaccatggcggcggcggcggcgcagcagaagatccgcgcaccagggagcaaagctgaggaaccagctgcatccggtgacccactggctatggcgagcaagggaggtgctgttctcatggtttgcagaacctgtgggaagaagggcgatcactggacctcaaagtgtccctacaaggaccttgcaccaccgactgaaactttcacggacaggcctcctacgatcgatggccctcctgcaccaggcgggtctgtgaagggagcatatgtgcccccaaccatgagaggtggtgctgataggaccggagacgtgatgcgccgcaggaacgacgagaattccgtccgtgtcaccaatctctctggaggacacccgtgagcctgacctccttgagctcttccgtgcgtttggccctgtcagccgtgtctacgtcgcggtggatcagaagactgggtcgagcagggggtttgggtttgtcaactttgttcacagagaggacgcgctgaaggcgatcagctagctcaatgggtatggttatgataaccttatcctccgagtcgagtgggcgacgccaaggcccaactagttttgccgctacttgctagaattgcatatttctgtcttgaattatatcagtatggttgtttgaaacactagtacctgtgccatgggggcgtatcctgtcgtaaaaacctgctgttgtctgtgttttggttggacgagaataattatatactcgctgttgttttt

SEQ ID NO: 452047 - DNA, 948 bp, Sorghum bicolor
cgtccgcccacgcgtccgtgaggagcacctgtccaccctccaagctgataccccatactctgaatttcaccacaggttccaggaacttggtctggagaagggttggggtgactgcgctaagcgcgcacaggagactattcacctcctcttggaccttcttgaggccccagatccgtccaccctggagaagttccttggaacgatccccatggtgttcaatgttgttatcctctcccctcatggttactttgctcaagctaatgtcttgggttaccctgacaccggaggccaggttgtgtacattttggaccaagtccgtgctatggagaatgaaatgctgctgaggatcaagcagtgtggtcttgacatcacaccaaagatccttattgttaccaggttgcttcctgatgcaactggcaccacctgtggtcagcgtcttgagaaggtccttggcactgagcactgccatatccttcgtgtgccattcagaacagaaaatggaattgttcgcaagtggatctcgcgttttgaagtctggccttacctggagacttacactgatgatgtggcacatgagattgctggagagcttcaggccaatcctgacctgatcatcggaaactacagtgatggaaaccttgtcgcatgtttgctcgcgcacaagatgggtgttactcactgtaccattgcccacgcccttgagaaaactaagtaccctaactctgacctctactggaagaagtttgaggaccactaccacttctcgtgccagttcaccactgacttgattgctatgaaccatgctgggatggtgggtggtgtgtgtgaagtcgggtgtggtgctcccttagtttcctggatgggatgttgctccttgaataatgatcattgtggccttggtgcccttttcctgaaataagagtagcatccttcctttccttgtggttc

SEQ ID NO: 452048 - DNA, 1970 bp, Sorghum bicolor
cgtccgtgagaaggtggttggcactgagcactgccatatccttcgtgtgccattcagaacagaaaatggaattgttcgcaagtggatctcgcgttttgaagtctggccttacctggagacttacactgatgatgtggcacatgagattgctggagagcttcaggccaatcctgacctgatcatcggaaactacagtgatggaaaccttgtcgcatgtttgctcgcgcacaagatgggtgttactcactgtaccattgcccacgcccttgagaaaactaagtaccctaactctgacctctactggaagaagtttgaggaccactaccacttctcgtgccagttcaccactgacttgattgctatgaaccatgctgacttcattatcaccagtaccttccaagagattgctggaaacaaggacaccgtcggtcagtacgagtcacacatggcattcacaatgcctggtctgtaccgcgttgtccacggtattgatgtgtttgaccctaagttcaacatcgtgtctcctggcgcggacttgtccatctacttcccatacaccgagtcacacaagaggttgacctccctccacccggagattgaggagctcctgtacagccaaaccgagaacaccgagcacaagtttgtgctgaacgacaggaacaagccaatcatcttctccatggctcgtcttgaccgcgtcaagaacttgactggtctggtggagctttatggccggaacaagcgcctgcaggagctggtgaacctcgtggttgtgtgcggtgaccacggcaacccgtccaaggacaaggaggagcaggccgagttcaagaagatgtttgacctcatcgagcagtacaacctgaacgggcacatccgctggatctccgcccagatgaaccgtgtccgcaacggtgagctgtaccgctacatttgcgacaccaagggtgccttcgtgcagcctgctttctacgaggcgttcgggctgacggtggttgaggccatgacctgtggcctgcccacgttcgccaccgcctatggtggtccggctgagatcatcgtgcacggcgtgtctggcttccacattgacccgtaccagggcgacaaggcgtcggcgctgctcgtggacttctttgagaagtgccagacggattcgagccactggaacaaaatctcccagggcgggctccagcgtatcgaggagaaatacacctggaagctgtactcggagaggctgatgaccctgacgggcgtgtatggtttctggaagtacgtgtccaacctggagaggcgcgagaccccggcggtacctggagatgctgtacgcgctcaagtaccgcaccatggccagcaccgtgccgttggccgtggagggagagccctccagcaagtgagcgcgcggcggcggcggcggcgactagagatctcacctgatgagcgaaagggagcacttggagttgtgtcttttccctgggtttccttcccctgaccaggaggcgaaaaaagagtctgctttttcctaggcgacgggcgttcgttgctgctattcccttcaatcaagaattgttattgccttgtcatcaaggtcttgttccatcattgatccgggtgttggttttagtagtctgatctgaattgttagtagtttgtgttgagtcggttgagagggatgctgggatggtgggtggtgtgtgtgaagtcgggtgtggtgctcccttagtttcctggatgggatgttgctccttgaataatgatcattgtggccttggtgcccttttcctgaaataagagtagcatccttcaaaaaaaaaaaaactcggagaccgcggccttcgctggcccgcggatcgactggaaagagactccagaggcgcacgtgttcaaagcggacgtcccggtgctgaagaaagaggaggtcaaggtggagggtcgggactgcaacatccttcatatcagccgccagcgcaacaagg

SEQ ID NO: 452049 - DNA, 522 bp, Sorghum bicolor
  unsure (1)..(522): unsure at all n locations
cgtccgctcgatataaaaaggagcttggaatcaaggcttttgtaaaaaaggaggtccaagaagttagaacagttgatgagaggaaagctagtgaaattactcagcttacaatgccaaagctgtgtgtacggctcaacagtctatattatggtatcagccagttgagtaagttggaggacagcattaatgagaggtgggcttggaagaaaagtgaaaaaactaacatcagacgtacaagtgaaaagtcaaagagtgccatccctcagataaatcaatttgatggcagtagataagaaatcaatactgctattgatcgtctgtgtgaatttactgggacaaaggttatattctgggacctgcagcagctcatttattgagaatttatacagaaacggtgttgctcaagctcgattggacaccataactgaagtgcttgatttggtccttaatcaactntgtgatgtcattgtggaacaactgagggatcgtgtggttacagggctactgcaagcatccctggat

SEQ ID NO: 452050 - DNA, 814 bp, Sorghum bicolor
cgtccggatcaccaccacaggcacatcactgcctagtcacctacactacgaagctaggttggtagaggccggccggcaatggcgtccaaggttgagctggtggtggaggtcaagtccccggcggacaagctgtgggcggcgctgcgcgactccacggagctgttccccaagatcttccccgagcagtacaagagcatcgagaccgtcgagggcgacggcaagtccgccggcaccgtccgcctcctcaagtacaccgaggcggtgccgatgctgacgttcgccaaggagaagctggaggtggcggacgacgagaacaaggtggtgtcgtacagcgtggtggacggcgagctggttgacttctacaagaacttcaagatcacgctgaaggtggccaaggcggcggcggcggagggcgagggtgaggccggcgccgtcgtcaactggtccatggagttcgacaaggccaacgaccaggtgcccgacccggacgtcatcaaggagaccgccaccaagacgttccacgacctcgacgactacctcctcaagaactagcagatggagacggtccagtgtccagtttactgctactactactactagtgctctgctgctagtgcacgtcgctggtgtggtgttggttggttcgatcgtgtccatgctggtctatttgctacctagctacgtagctaccaaggtccgtgtcctcgtacgtctgaggttcatgttgctgcggcgccgcgtcgtcgtgcatctgacgacgtgtcgttgcacactggtcctcctgccgcgtcaataaagctatccgtgttcacgc

SEQ ID NO: 452051 - DNA, 532 bp, Sorghum bicolor
attccgggtcgaccacgcgtccggatttgccctttgcgtgttcattatctatgatcattgcatgtgacgccaaattatatactatcatttctgagcacatgccctatttccaaggattacattgccatacactttggttgtgtacggtcacttttgcctctcctatttctttgagtttttgggcatcaattttgtgctttcttgtgctgtacttgctttcattttggcacaattaatgtttccgttcacatttttagcaccatcgatgatgcttgcctgttgcttcataagaagaaacattgttcatccttttctatccagtcttgtggttgcatcaataatcacagtgttctcttcagacctgtaggctgtatatttatttggtatgtaatttggaccagcctattgccatattttccttcggtatgcatgagattaattttgggtgttatggagacagctgaaagtcgctggtctgtggtacattggtttgtgcagcaatcacaatagaatggatatgttcataatttca

SEQ ID NO: 452052 - DNA, 1428 bp, Sorghum bicolor
cgtccggttgattgtgaagtttcaagccctggtccgtggaaggaacgttagactttctcaagctttcattcaagcaactagggagctttccctagagaagtttgggggtgctaaacctggttcctggaaggagaagttgtcttcaaatgcatttgctcgcaagcttctatcttcaccaattgtggttgaggctcttcacttccagtatgatgaaatggaccctaattcagccttcaattggttagagaggtggacgataagtcatgtctggaagcccatttcccaaccaaagagggttggtgctgatgctaagccacatacaaggaaggccagttatgcaatggaaacagagtcagcgaaattaaagcgtaatgcacggaagagctctgcagtgccatctgaagcttctcaaacaaacaccaccattgaaattgagaagacaagacggaatccaaggaaattaagtagtactccttgctgagtcggttcctgatggccagttaacagaacttgagaaggttaaacgtagccttaggaaggttactaattccatggctgaaacctcaaagacacctaatccaacaactgagattcctgaccctcaagaggtccaatgtgagagaccactaagaagtgcaaagcaagttccaattcatcctgagaatcaagatcctcggaatgttaatctatcggacaattcaaagatagatattctggtacctgatatccagcctgacgtggaagatgcttcagatccagtcacaatcacaaatgaagaaaaagttgatgagccaccatccgttgttgctccagtggctgaaattatgccactgcaggacattaacaatgaagaaaatgctttggtgaatgatgtggaagagagatccaaagaagaacatccttctactgagagcctgaaaggcagcaagcggaggtcttcattctcaactaagcctgaatatccagaaaatggctccaaaaattctccagctttgccaagctacatggctgctacacaatctgcaaaggcaaaactgcgggggagtagttcaccaagacttagctctgattcagcagagaaaaacgggttcactcgtcgtcactcccttccatcctctaacaatggtaagatgatttcacattctccacgtacacaaaggccaacccttgctggtggcaaggatggagcaaaaggcgacaaggctatgctgtcatcaagagatgcaagcgagagaccactgaaagctgagtggagacgttgagatggcgaatgaaaccacaaatcctccatttgattagtgcaactgtttcggtggatggaatggcgtctgcagtttgctcggatggttttgcttgtgatgtaaaaaagatgttttcatcatcatccccggcgatgaatgaacgaacccgccttgccgtgatgaatct

SEQ ID NO: 452053 - DNA, 599 bp, Sorghum bicolor
gcgtccgggagaggaggcactctcgtctgaggatctgctttacttagagttccttgacaagtttgagaggaagtttgtgacacaaggagcatacgacacacggaacatcttccagtcacttgatcttgcatggacattgcttcgtatcttccctcgcgagcttctccaccgtatcccagcaaagaccttggaccagtactatagccgagatgcctcccactgaatcactgattgttgatcagtgttccaatattttggcaagggcagctttgaataattgaacagattggccttatggcccattttcctgtatttatctgtagtcaggtccaattcttttctgttggtgagcgcaagttatttgtagatgactctcggtcacggcaatatctgtaatattatgtcatgtatcgttaaatttcagttatttggtctgtttcacctgccagaactgttagcaagagcattccggaccaggatgctcgaacacaactggttgtatctacatttgtgaatggtgaataaaggaggggcaataaaccgcagcgaattatatgctgcctgacactgttgaaaaaattctctgttttgctgttttg

SEQ ID NO: 452054 - DNA, 691 bp, Sorghum bicolor
cgtccgaagcaaagcatagcgcacccatccagatacacacgagcacgcgcccgcgcccgcgcccgcacccgcatagcaccaccagtccaccaccaggccggcgccgccccgcgtcgccgcgtccctctcgcccaccatggcctccttcttcggcgacgacggcgccgacgagctcccgcgcaccacctcccaccccttcgactccgacgacttcggcgccgccgcggccgacggcgacggcgccggcgggtacggcgggtacgcctccttcgccgaggggggcgtcgaggatgtggacgaggagatcaccgtcgagtccgacggggtcccgatccgccacgtctccgggggttactcgccctcgccgttctcccccgagctcgagcccaacggcggcgacggcccgatcctgccgccgcccaccgagatgcgggaggagggcatcctcctccgcgagtggcggaggaaaaatgctattgaacttgagaaaaaggaacagaaggagaaggagctacgtgcccaaataattgcagaagctgaagaaattcagaaagctttttttgagaagaggatacagaattgtgcgtcaaatatggtcaacaacagagaaagggagatgatttttggagccaggcaggagaaattccatgccaacgcagaccagcaggactggaaatcgatttcagatctc

SEQ ID NO: 452055 - DNA, 591 bp, Sorghum bicolor
cgtccgagggaaccagaccggagcattcccctccgctccacaatccctgcgtcgcaccctagccctcagcaaaccctaacagctcgtcgccatgaaggacacctcgttcaaggccagcggcgccaagcgcaagaaggccggcggtgccaagcgcgggatcacccccttcttcgcgtttctggctgagttcaggccgcagttcttggagaagcaccctgagctcaagggcgtaaaggaggtgagcaaggcggctggggagaagtggcgctctatgtcggatgaggagaaggcaaagtatggctctaccaagaagcagggcgacatagcaagcaagaagagcactagctccaagaaggccaaaactgatggtcggcagggagaggaagcagtgaagtctgaggttgatgatgatgatgagcaggatggcaatgaggatgaaaatgagtaaatagtatgatggggaacagcagctttgcaattgggtgtttgcttcttgtttagcctacaatgtgctcgtacttgtgctgatatatatgcatgatgctagaagaaacatctgtacatgatggaaccttagggctatggcatgct

SEQ ID NO: 452056 - DNA, 1131 bp, Sorghum bicolor
  unsure (1)..(1131): unsure at all n locations
ggcacgaggcgcagtcatcagtcagcagccgcccccctcacacgcctccgctctcgctccgcccacgcttccctgccggctctccgatctccagggcttccgcggctgtgaggcgcccgcgggggcggctcccgtggtcgacgccgagtacctgcgccaggtcgacagggcgcgccgccacctccgcgccctcatctccaacaagggatgcgccccgatcatgctccgcctcgcatggcatgatgctggaacttatgacgtgaagacaaagaccggtggtgcaaatggttcgattagatatgaggaagagtacacccatggctcaaatgctggtttaaagattgccatcgatctccttgagcctatcaaagcaaagaatcccaagataacatatgcagacctttatcagcttgctggagtggttgcagttgaagggactgggggaccaactgttgagtttattcctgggagacgtgattcgtcagggtgcccccgtgaagggcgtctgccagatgctaagaagggtgcaccacatctgagggacatcttttatcggatgggcttatcggacaaagatattgtagctctatcagggggccatactctgggaagggctcatcctgacaggtctggattcgaaggtgcctggacaaaggagcctcttaggttggataactcatactttcttgagctgttgattgaggaatctgaggggcttttaaagctcccaactgataaggcactgttatcagatcctgagtttaggcgctatgtggacctttatgcaaaggatgaagatgccttcttcaaggactacgctgaatcacacaagaaactctctgagcttggcttcacgcctcgcagcacagcatcagccaaatcagaccttccaaccggtgctgtacttgcacagagcgcctttggggtagcgggtgctgcacccgtagtcatcgctggctacttgtacgaggctttcaagaaggccaagtagatcgcaaagttgttctttgcttagcaagtatgaagatcgaataacaggatcatagaaatgaggtactcggacaatgtttcgaaaacataacatccccttcatgtttacactggtttcatgnattacaatgatatggagat

SEQ ID NO: 452057 - DNA, 1332 bp, Sorghum bicolor
cgtccgcccacgcgtccgcccacgcgtccgctgccaaaccattcctcccaacaacacccgccgcctcctgcaatcctcgtagcctccgtcgagcatcgatcatgtcggcctactgcggaaagtacaaggatgagctcatcaagaatgctgcctacattggcacccctggcaagggtatccttgctgctgatgagtccactggcaccattggcaagcgtctttccagcatcaatgtcgagaacgtggaggagaaccgccgtgccctccgtgagctccttttctgctgccctggtgccctccagtacatcagcggtgtgatcctcttcgaggagaccctctaccagaagaccaaggatggcaagccttttgtcgatgtcctcaaggagggaggcgtcctccctggcatcaaggtcgacaagggcaccattgaggttgctggcacggacaaggagaccaccacccagggccatgatgaccttggcaagcgctgcgccaagtactacgaggccggtgcccgctttgctaagtggcgtgctgttctcaagatcggccccaatgagccatcacagcttgccattgacctgaatgctcagggcctggctcgctatgccatcatctgccaggagaacggtctggtgccgattgttgagcctgagatccttgttgatggccctcatgacattgatcgctgcgcttatgtcactgaggtcgtccttgctgcctgctacaaggctctcaacgagcaccatgtcctcctggagggtaccctcctgaagcccaacatggtgaccccaggctctgactctaagaaggtgacccctgagttgattgctgagtacaccgtccgcaccctccagaggaccgtccctgctgctgtgcctgctgttgtcttcctctccggtggacagagcgaggaggaggccaccctcaacctcaatgccatgaacaagctcaacaccaagaagccgtggtccctgtccttctccttcggtcgtgccctccaggcgagcacactcaaggcctgggctggcaaggtggagaacatcgagaaggctagggcggccttcctcgccaggtgcaaggccaactctgaggctaccctcggcacctacaagggtgatgctgctgctgacaccgagagcctccacgtcaaggactacaagtactgagttgcttctctttgcgtgcccgttttggaactcctgcctacgagtaggttgctgagtgtggtttgctcgtttgagcttatattcggacaacaaaaaaaaacatgcttcctatgtggatgatggttatctttatattcgtatattaactagtctctttggtgtt

SEQ ID NO: 452058 - DNA, 1280 bp, Sorghum bicolor
cgtccgcagttacattacataccatccaccgatcgacggtccaaggaagatgggagtgaacatgatgtcctggtcgatgcaggtggcggtggtggtggcgctggcgtttctggtgggcggcgcatggtgcggtcctcccaaggttgccccgggcaagaacatcacggccacctacggcagcgactggctggaagcgaaggcgacatggtacggcaagccgacgggcgccggccccgacgacaacggcggcgcgtgcgggtacaaggatgtgaacaaggcccccttcaacagcatgggcgcgtgcggcaacctccccatcttcaaggacggcctcggctgcggctcctgctttgagatcaagtgcgacaagccggccgagtgctccggcgaggccgtggtggtgcacatcacggacatgaactacgagcaaatcgccgcctaccacttcgacctggccggcacggcgttcggcgccatggccaagaagggcgaggaggagaagctgcgcaaggcgggcatcatcgacatgcagttccgccgggtcaagtgcaagtacggcgaaaaggtcaccttccacgtggagaaggggagcaaccccaactacctggcactgctggtcaagtatgtcgatggcgacggtgacgttgtgggggtggacatcaaggagaagggtggcgacgcgtaccagcccctcaagcactcctggggcgctatctggaggaaggacagcgacaagccaatcaagtttcccgtcaccgtccaaatcaccaccgagggaggcaccaagaccgcctacgaagacgtcatccccgaaggctggaaggccgacaccacctacaccgccaaataaactgtccaacagacctaacgctgctctgggctcggttggattggatcccaacttcccaagcaatgcattacacttacgcatgcattgatccatgcacaatatctatttttttactgctgctactgctacgacaatgtcctcctttgtcctctccatatatagctagagtcaggctccgctctcttatattattattatataagataagaaataggagagagaggggagagagaccgagtacataataagtgtctaattaaagagagatttgagaggcctttattttatatataataaagaatccaaggagtgaggcaaacagcaacaaaaatgcgttgtactgtccatggatttccatgtaatctcaattataccatgtctacattttaatagaatacacactttttaatgattaattgaaatttatgat

SEQ ID NO: 452059 - DNA, 874 bp, Sorghum bicolor
  unsure (1)..(874): unsure at all n locations
cgtccgcggacgcgtgggcagttacatacattattacataccatccaccgatcgaggatccaaggaagaagatgggagtgaacatgatgtcgtggtcgatgcangtggtgttggtggtggcgctggcgtttttggtgggtggtgcatggtgcggtcctcccaaggttgccccgggcaagaacatcacggccacctaccagcccctcaagaactcctggggcgctgtttggaggaaggacagcgacaagcccatcaagttccccgtcactgtccaaatcaccaccgagggaggcaccaagaccgcctacgaagacgtcatccccgaaggctggaaggccgacaccacctacaccgccaaataagctatccaacagacctaccactgctctgggctgggttggattggatcccaacttcccaagcaatgcattacacttatgcatgcattgatccatgcataatacctattttttactgctgttgctgcgacgatgacgacgccctccttcatcctctccatacgtagctagagcaaggtttccttcatcctctccatatatagctaggacaaggctccatccgctctgttattatattaaaaaaagagaaggacgaagaaacaaagagaccagatacataatatgtatctaacgagagatttgagaggcttttgtatgtaataaaaggagagcgagacaaataacaattgtccatggatctcctatgtaatctcaattttatcatgcctgcatctcaagtgaatacacctttttttcaagactaattgaaatttatgatatgcacatttgattcttnnnnnnnnnnnnnnnnnnnnnnnnnnnnnnnnnnnnnnnnnnnnnnnnnnnnnnnnnnn

SEQ ID NO: 452060 - DNA, 516 bp, Sorghum bicolor
cgtccgcccacgcgtccgctgcacactctagagagtagagaaagagaaagaggaagtgaagtgggataaggagagggggtgctcgtctgctcgtccgtcagtggcaatggcgttgtggaacggtggtggtggagcctttccggcggcggccgtgctggtggctgcggccgtggcggcgctgctgggcgccggggtgggcgccaccaagttcgacgacgtggtgcagcccagctgggccaacgaccacatggtgtacgacggcgacctcctcaagctccgcctcgacgccaactccggcggaggcttcgtgtccaggagcaagttcctgtacggcaaggccagcgccgacctcaagcttggggcccgtgactccgccggcgtcgtcaccgctttctatctgtcgtcggccggggacaagcacaacgagttcgacttccagttcctgggcaacgtgaccggcgagccgtacctggtgcagacgaacctgtacatcgacggcgtgggcaacagggagca

SEQ ID NO: 452061 - DNA, 602 bp, Sorghum bicolor
  unsure (1)..(602): unsure at all n locations
gcgtccgggaagtgtgcaagcaagcaagtggcggtaatggcggcggctctgcaagccacgccgctcaaaaccctagccatctcccgccggcgcgtcggcgtcgcgggggtgcggcagcggccgatggtggcgagcttccggtgctccgcggcggcgcggagctacaacatcacgctcctccccggggacggcatcggcccggaggtggtcgccgtcgccaaggacgtgctctccctcgccggcgccctcgaaggcgtcgagctccggttccaggagaagctggtgggcggctccgcgctggacgccaccggcgtgcctctccccgacgagacgctcgacgcggccaagggttccgacgccatcctcctcggtgccattggaggctataagtgggataacaatgagaagcacctcaagcctgagaccggcctgctgcagctccgtgctggactcggngtttttgccaatctgcgaccagctgcagtgttgccgcagttggtagacgcatccactctgaagaaagaggtacctgaaggggttgacatcatggttggtagagagcttactggaggcatctacttcgggaaacccaggggttttgg

SEQ ID NO: 452062 - DNA, 826 bp, Sorghum bicolor
cgtccgccgccgccgccgctcaccttgccgtgcccgggcccttgcccagcatgtggggtagcaccgacggcggaacgccggaggtcaccctcgagacctccatgggcgccgtcactgttgagatgtactacaagcacgctcccaagacttgccggaacttcgtcgagctcgcgcgtcgcggctactacgacaacgtcatcttccaccgcatcatcaaggatttcattgtgcaaggtggggatcctactggaaccggcagaggtggcgagtccatatatggagcaaagtttgaggatgagataaagtcagagttgaagcacactggagctggaattctgtccatggcaaacgctggcccaaatacaaatggaagccagttcttcataactcttgcgccttgtcagtcacttgatgggaaacatacaatttttgggagggtatgcagaggaatggaaattgttaagcgccttggtagtgtgcagactgacaaaaatgacaggcctatccatgaagtgaaaatcttgcgagccatcgtcaaagattgaagcattgcccagatgtaactcgaatgttggtttaggcttagtaatggccccgttcatgtaagttgcgccatgttagttgcgcggacctttgggaaaagatgaaagatacagctagttccggcctgtgtgactctcagtccctccatccgcctgacctgaaaacctacctgatgagtagattgtaccttttgagcaaggtgtttgaaacaacttatacgtatgcgtctgtggttgagtttttctgcatggagtatgctgcggaaacattattattgtgaaga

SEQ ID NO: 452063 - DNA, 786 bp, Sorghum bicolor
cgtccggacttcccctcgccacgcaaaagccaccgcggccccgcccgtgcttccgtctcgcacctgccgatctactccccggcgagacgagcgccccggcgcgcccccagggaatgcggagcgatgaggcggcgctcaggcacttgacgtcgccggcctgcgcaagctgcgcggcgaccgaacctgccaccgcaagcacgttgaggacgggtagacccatccatccatccatccttccttccatcttctagtcgtcatcgtcgtagggtagtttgcagatagctagctcggtcgtttctagtaagggatcgatccatcgatcgatcaggcggcatgggtgagggggaggcggcggaggtgaagggcggggtgctgcagggccgctacgagctgggccgcgtgctggggcacggcaacttcgggcgcgtccacgcggcgcgggacctgcgcacagggcgcggcgtggcggtcaaggtgctcgtcaaggacaaggtgctgcgcgcgggcatgatggagcagatcaagcgcgagatcgccgtcatgaagcgcgtgtcccaccccaacatcgtggagctccacgaggtgatggccacgcgctccaagatctacctcgcgctcgagctcgtccgcggcggggagctcttcgcgcggatcgtgcgcgccggccgggtcaagggagacgtctcgaggcgctacttccgacagcttatcttcgacgtcgacttttgtcacgcgcgcggcgtgtactaccgcgacctcaagccggagaacctcctcattgactaa

SEQ ID NO: 452064 - DNA, 1024 bp, Sorghum bicolor
cgtccgcccacgcgtccgcccacgcgtccgcccacgcgtccgggagagactcatcaccagagaggagatcgaggaggtgacgtgaggtgaggtttgcagcttgcaagtcggtcggcgtcatggcatacaacggccgtgaccagcggtacggcggcggcatcgctacgccggggtacgcaccgccggtgccgtacgggatgtcgcaggtgaacatcgagggcaacgggtgcggtcggccgctgccgccgcagccgaccgtgaaggtgtactgccgcgccaaccccaactacgccatgaccatccgcgacggcagggtggtgctggcgccggcgaaccccaaggacgagtaccagcactggatcaaggacatgaggtggagcacgagcatcaaggacgaggaaggttacccggcgttcgcgctggtgaacaaggcgaccggggaggccatcaagcactcgctggggcagtcccacccggtgcgcctggtgccctacaacccggacttcctggacgagtccgtgctctggaccgagagccgcgacgtcggcaacggattccgatgcatccgcatggtcaacaacatctacctcaacttcgatgccctccacggcgacaagtggcacggcggtgtccgcgacggcaccgacatcgtgctctggaagtggtgcgagggcgacaaccagcgctggaagatccagccctactactgaaccaactgatcgatgatgagatctatcgatgatcatccatcgtcgcgtcgatcgatcctgtcgtcatgcatggagacgacgtgcatgtacgtatggcctatgtatatgtatctatatatgtacgcatgtatacgcactagcagaataactgagcctcgatcatctcctatgccgtctgctcgtctttctgcacgcatgtctgtcagcatgtgtgcatattagataaagcagcaggagcgagatgaggggtactcatggtcatgtatatgtaccttgccacaataagtagcgatacaacaccatacttattatgg

SEQ ID NO: 452065 - DNA, 1492 bp, Sorghum bicolor
cgaacgtccgccgacgcgtgggcaaatcctccacactgttcgatccacccaaccctccccaaaacccccgaccaaggagagtagagcgcgagaagatgttcggcttcgggcaccacggccaccaccacggcgagaacccgccggcgcaccctcctgcccacggcggcgtgcacccgcccaccttcaagatcttctgcaaggccgacgaggggtactgcctcaccgtccgcgacggcaacgtggtgctggccccctccaacccgcgcgacgagcaccagcactggtacaaggacatgcgcttcagcaaccagatcaaggacgaggaaggcaaccctgcgttcgccctcgtcaacaaggccactggcctcgccatcaagcactccctcggccagtcccacccggtgaagctggtgccgttcaacccggagtaccaggacgagtcggtgctgtggacggagagcggcgacgttggcaagggcttccgctgcatccgcatggtgaacaacatccggctcaacttcgacgccttccacggcgacaaggaccacggcggcgtgcacgacggcaccaccgtggtgctgtgggagtgggccaagggcgacaaccagagctggaagatcctcccctggggcgacgaggcctacgccggcggcagcggcggcgccgccgccaacgcgccgtacggccacggcgagccgacggtccgcatctactgcaaggcggacgacgggttcagcgtgaccgtccgcaacggcagcgtgtgcctggcgccgacgaacccgcgcgacgagtaccagcactgggtcagggacatgcggcacagcaaccgcatcaaggacgaggaagggtacccggcgttcgcgctcgtgaacagggtcaccggcgaggccatcaagcactcgcagggcgagggccacccggtgaagctggtgccgtacaacccaaactaccaggacgagtcggtgctgtggaccgagagccgcgacgtcggccacgggttccgctgcatccgcatggtgaacaacatctacctcaacttcgacgccttccacggcgacaaggaccacggcggggtgcgcgacggcaccgccgtcgtgctctggaagtggtgcgagggcgacaaccagcgctggaagatcgtcccctggtaaatgtgcggtgctggggctgcattggtcatcacccaagatctggagatggagttggagagcacagccacctgtggtcagcagctgctgctgctgccgtgttgttagaataaagctggtgtgcgatcgatccgtggtgatggtgtgtctttgtgtgtgttcagtcgtgtgtcctcggagccagtcctgcttccgtgagagaggggtacttcctcggtgagcttatctcacaaagccttaccccatctgaagcttgttatgcagagagagttttcagaccttgagtgttaactctgtgttgtactcggttccttccctttttatctaagtgggttttatcaaaa

SEQ ID NO: 452066 - DNA, 738 bp, Sorghum bicolor
cgtccgcccacgcgtccgggtaccggagagagaggagaggagaggagaggagaggatgtcgtggttcgggcaccaccaccacaaccagccggctcccccggcgtcggggccgaaccaggtgttcaagatcttctgccgcgccaacgagaactactgcctggccgtccgcgacggcgccgtggtgctggccccgaccaaccccaaggacgagcaccagcactggtacaaggacatgcgcttcagcacccgggtcaaggacgaggaagggatgccggcgttcgtcaagcactccctcggccagtcccacccggtgaagctcgcgcctttcaaccctgaccagcaggacgcgtcggtgctgtggacggcgagcaaggacgtgggcaagggcttccgctgcatccgcatggtcaacaacacccgcctcaacttcgacgccttccacggccacaaggaccacggtggcgtgcacgacggcaccggcgtcgtgctctgggagtggtgcaagggcgagaaccacagctggaagatcctgccgtggagacccgaggcgaacgccgcggcggtggccaacggcggcgtgcacaccgtgcgcgtcttctgcaaggccggcggcgaggactactgcctgacggtgcgcaacgggacggcgtgccttgcgctcaccaacccgcgggacgagtaccagcactggatcaaggacatgcggcacagcacccgggtgcggtacgaggaagggta

SEQ ID NO: 452067 - DNA, 624 bp, Sorghum bicolor
cgtccgttcacacagggccggtaccggagagagaggagaggagaggagaggagaggatgtcgtggttcgggcaccaccaccacaaccagccggctcccccggcgtcggggccgaaccaggtgttcaagatcttctgccgcgccaacgagaactactgcctggccgtccgcgacggcgccgtggtgctggccccgaccaaccccaaggacgagcaccagcactggtacaaggacatgcgcttcagcacccgggtcaaggacgaggaagggatgccggcgttcgcgctcgtcaacaaggccacggggctcgccatcaagcactccctcggccagtcccacccggtgaagctcgcgcctttcaaccctgaccaggaggacgcgtcggtgctgtggacggagagcaaggacgtgggcaagggcttccgctgcatccgcatggtcaacaacacccgcctcaacttcgacgccttccacggcgacaaggaccacggtggcgtgcacgacggcaccggcgtcgtgctctgggagtggtgcaagggcgagaaccagagctggaagatcctgcctgggggacccgaggcgaacgccgcggcgggggccaacggctgcttgcacaccgtgcgcg

SEQ ID NO: 452068 - DNA, 560 bp, Sorghum bicolor
cgtccggctctggaccgagagccgcgacgtcggcaacgggttccgctgcgtgcgcatggtcaacaacatctacctcaacttcgacgccttccatggcgacaaggcacacggcggcgtccacgacggcaccgagatcgtgctctggaagtggtgcgagggcgacaaccagcgctggaagatcctcccatggtagaccaaggatcttccaaaggagctactagctgctactcctacctaataataattctgctggctgcggcgatccccaaataaaagagaccgggtgcgatagcgatgcatcgcggacttccgagtggagtggtgttttcgtcagactgtcagtcactgtatctgtatggctagtgttccaacatttgtcagcccgttttcgagcaaggggagtgacagagtcaggagaagggccgggccataagctgctgcatgtcttatgtctgtactctgaatgaactctgtatgagatgagatctcatctcctttctcctaccgaatgaatgaaccatttggctttgctttgctaaaaaaaaaaaaaaaagcggacg

SEQ ID NO: 452069 - DNA, 1012 bp, Sorghum bicolor
cgtccggctggccggccagaggcctcttgcttcttgctgctatctagtatctatcctccctctagcagcttaattagcagcttgctctagtacacacgaacgaacggtacgtacgtccatcgctagctcgctcgccatggcctccctctcctctgccaccatcaccgccccttccgccttcgccgcgccggccgcccgcgccgtggccaggaggtcgtccttcaccgtgcgcgcctctctcggcaaggccgccggcacggccgccgtggccgtggccgccagcgcccttcttgccggcggcgccatggcccaggaggtgctgctgggcgcaaacggaggcgtgctcgtcttcgagcccagcgagttcaccgtcaaggccggcgacaccatcaccttcaagaacaacgccgggtacccgcacaacgtcgtcttcgacgaggacgaggtgcccagcggcgtggacgccaccaagatctcgcaggaggagtacctcaacgcgccaggcgagacctactccgtcaccctcaccgtgccgggcacctacggcttctactgcgagccgcaccaaggagccggaatggtcggcaaggtcaccgtcaactaactacgtcctactactagtatcttctccatatatattgcgccgccatggatccggccaccatgcatattcctcctcctcctcctcctcctcctcctcctcctcctcctcctccttactagctgttgcatttcctgctttatttgtactccggtccacatgcatcctcgattatccaccgtccgtaccatcgatcgatctcttctttcacaccaacaatgcaagaagcagtgccgtgcagtgtgtgtatgagagtgagagctagagacccgccttctttttgtttgctgatgaatcgatacagtcgtcatcgtgatttatgttcactactgcaataacaatttcagtcacaaaaggttaacagaagcgggcgagacacccgtctctgattacacaaaaaaaaaaaaaaaa

SEQ ID NO: 452070 - DNA, 562 bp, Sorghum bicolor
cgtccgggagaagcggcagaaagaaattgttaaaggcgaccggtctattaaaaaattgagccgtagagaaagaaggaaagcttctcagattgagcgtgaaaaagagcgggaggcagcacgttctgttggacgggtttcttatcgtgatccttacagggatcaaaggagaagcccatcatatgaagcatattcaaggggcagaagatcaaggtcaagatcaagatctcgttcaccatcccattctcggcgtcatggccgtgggatgcatgctgaaagcaattatcggagcaagcagaaggctcctagggttgaatatattactgaatttggaggttctgatgacaccagtgaaccaaaagtttcagggatctctccaccttcgtctccaatacgaattgacatacctaaccggtcgggaaactcgacttttaatatctgaaatatacattggacgaacttttctctgatggagcttattacatcagtcctggtatcctgaagatgactatgtcaaggataggatagatcaagacatggtcatgatggtatctatggtggaaac

SEQ ID NO: 452071 - DNA, 865 bp, Sorghum bicolor
cgtccgcccacgcgtccgcgaatcccgaacagcaccggtcgtcgcccgctcgctcgttgcagctacgcacgcacgcacgcacggcaccccacctactcctcctccccttcccttagcttccagaaggcggttcggctcgggccggcatcgacctccagatcctctccgcgcaggtcacacagtcaacggatttcaccgagcttgcaaaccaggagccatggctctcatctatgaagttggttgtgaaacctgacatgctcttcgggaaacgtgggaagagtggacttgtggccctcaacctagatcttgcccaagttcgccaatttgtcaaggagcggttgggtgttgaggtcgagatgggtggctgcaaagctccaattacaaccttcatagttgagccatttgtgccgcatgaccaagagtattacctttcgattgtatcagaaaggcttggcagcaccattagtttctcagagtgtggaggtattgagatcgaggagaactgggacaaggttaagactatctttcttccgacagagaagcaaatgacacctgacgcatgtgctcctttgatcgccaccttgccattggaggtccgcacaaaaataggtggtttcattagaggtgtattttctgttttccaagacttggatttctcatttcttgagatgaacccattcaccttggtaaatggtgaaccgtatcctctggatatgagaggagaactagatgacactgctgctttcaagaactttaataagtggggcgacatcgagttccctctgcctgttgcaagagttctcagccctcagaaagctttatccacgaactggatgagaaggcaagtgcttctctgaaattcaca

SEQ ID NO: 452072 - DNA, 566 bp, Sorghum bicolor
cgtccgcccggcccgaatcccgaacagcaccggtcgtcgcccgctcgctcgttgcagctacgcacgcacgcacgcacggcaccccacctactcctcctccccttcccttagcttccagaaggcggttcggctcgggccggcggcgatggcgcggaagaagatccgggagtacgactccaagcgcctcctccgggagcacctcaagcgcctcgccggcatcgacctccagatcctctccgcgcaggtcacacagtcaacggatttcaccgagcttgcaaaccaggagccatggctctcatctatgaagttggttgtgaaacctgacatgctcttcgggaaacgtgggaagagtggacttgtggccctcaacctagatcttgcccaagttcgccaatttgtcaaggagcggttgggtgttgaggtcgagatgggtggctgctaagctccaattacaaccttcatagttgagccatttgtgccgcatgaccaagagtattacctttcgattgtattagataggcttggcagcaccattagtttcttagagtgtggagggattgagaacg

SEQ ID NO: 452073 - DNA, 480 bp, Sorghum bicolor
ggagaactagatgacacagctgctttcaagaactttaataagtatggttcacgcttttgatgtacctcacagatcaccgttgcctcctgcatattagtcataccagtcatttttatgtgaaaagtataggtttttctactgtattgccaatcataacgaccactgtttttcatgtacaggtggggtgacattgagttccctctaccttttggaagagttctcagtccctcagaaagctttatccacgaactggatgagaagacaagtgcttctctgaaattcacagtactgaacccaaaaggacgcatttggacaatggttgcaggtggtggtgctagcgtcatatacgcggatactggtggtgatttgggatatgcttcagagctaggaaattatgcagagtacagtggagctcctaaggagggagagggttctgcagtatgctagagtacttctggattgcgctactggtgatcctga

SEQ ID NO: 452074 - DNA, 420 bp, Sorghum bicolor
cgtccggggatgtcttcatgggagcttaccacacggtgttcgacttcggcaacgacaggattggcttcgcggaatctgcatgagtgtgggtggctcttcatgaaaatatcctatatatatcagggatgtgtagtttctctatcccctacgtgcagacagcacgccgcaaataaatggatggccaaaaatgctgaaactgaaaacgtgaacagagctttctttctggagaaaagcaagtggatgctcgaagacatgtatgcttgaagttgaagagcaaatgtttggacagggctttcttgaaaactgtttgttcatggtagtacaatttatcacatgtaaaataatttatggattgcctttgaactgatgagcatgtataaatgcaatcttgtttcagtaggatagctcttgccttcttgg

SEQ ID NO: 452075 - DNA, 616 bp, Sorghum bicolor
cgtccggagaaaatgctgtttttaccattcctccagaactggcttatggagcatctggttcaccgccaactattccaccaagaggcggggctgcagtttgatgttgagctgctttcatggaccagtgtcaaagatattcgcaaagatggcggcatattcaagaagattcttaaagagggggagaagtgggagaacccaaaggatcctgatgaagtacttgtgaaatatgaggcccgtctcgaagatggtactgttgtatccaagtctgagggggttgagttcactgtaaaagatgggtacttttgtcctgccctggccaaagctgtcaagaccatgaaaaaggcagagaaggtgctccttacagtaaagccacaatatggatttggcgagaaaggtagaccagcagctggagaggaaggtggtgtgccaccaaatgccactctgcacattgaccttgagttggtttcgtggaagactgtcacagaaattggtgatgataagaaaatccttaagaaggttctcaaggagggagaaggttatgagctgtccaacgagggtgccgttgttgaagtcaaaattaccggaaagcttcaagatggcacagtgtttacaaaga

SEQ ID NO: 452076 - DNA, 577 bp, Sorghum bicolor
  unsure (1)..(577): unsure at all n locations
cgtccggcgttttctcttctggcagatcgaacttgtaccaacagctaaatcactactagcagcggcggactgcaggagtggacgaacggacgacgatggctgcgccagcgccgcatcaggggcaggggcagcagggcgaccaccaccagccgaagctgcagaaggtgatggtggcggtggacgagagcgagtgcagcggccacgcgctggagtgggtgctgcggaacctggcgcccacgctggcgccgccgctgctggtgctcaccgtgcagccgcacttccccctcggctatgtctccgccgcggcctttggcgcacctctgggcaccgttcctccggtagctccggagctcatcaagtcgatgcaggagcagcagaggcagctcacgcaggcgctcctcgacaaggtcgtggccatctgcgctgagcatggggtatgtgcaccgcagatccggtttccttttccagagccatagagagattcaggttgcaacttctaacaactntatccgacttcattaaaaaaaaccaactttacctgaacattatccactggctctgtaacatgtacaaagag

SEQ ID NO: 452077 - DNA, 547 bp, Sorghum bicolor
cgtccgcggacgcgtgggctacacgccaccattagtgatctgatcgaagagttactgaaccatggcgacgacgtgctcgctccttcccatgaataacaactccctaccatgcctcctcgtcgtcgtcctcctcgctgtctccctcggcgccggcagctgctcaccgacggttcacctggttggcggcggcggcggctacgtcgacgacagcagcagcatcgacagtgctactgatgatcagatgatggagcggttccaacgctggaaggtagagtacaaccgaagctacgcgacggcttcggaggagcgccaccgtttccaggtgtacgccggcaacatgcggtacatcctggcgaggaacggcgaggacccctcgtacgagctcggtgagacggagtacaccgacctcaccaccgacgagttcatggctatgtacaccacggccacgctagcgctggacgacggcttcgacgacgacggcgacagcaacgacggcggcgacggagacgacgacagtgatggcgatgatggcggggactttgacacc

SEQ ID NO: 452078 - DNA, 509 bp, Sorghum bicolor
acgcgtccgaacaacaccttccacggccgcacctcgacaggcctcgagcttgagctagggtttcctccgtcgctacctaccttttacgcggccggcgcgcagccatggcgctggtacaggcgggcatgggcctcacccgggtcgtggtcctcgtcggcgccggcgtcgccggctccgtcgtcctccgcaacggccgcctcgccgagatcctcggcgagctccaggagatactagacaaggggaacaaggggaaggacggtggagggggagacggggaagccgatctcaaggaggcgcttacctcgcaggtgcgtagcctagccatggagatcaggcaacttgcttcatcacgtccgataacctgttctcaacaatggaggctccggacaatcaggagtatcaggcctgatagtacctgcagcaactgtaggagcactgggttatggttatatgtggtggaaagggatctcatttgctgacctaatgtatgtcaccaagcgcaacatggc

SEQ ID NO: 452079 - DNA, 1164 bp, Sorghum bicolor
cgtccgccacgcgtcccccgactcgtcccgatcggaccaccgggccagtagcagagcgggtcgtgacgtcagcagccatggtgaaggcctaccccacggtgagtgaggactacctcaaggcggtcgacaaggccaagcgcaagctccgcggcctcatcgctgagaagaactgcgccccgctcatgctccgcctcgcctggcactccgcgggcaccttcgatgtggccaccaagaccggggggcccttcggcaccatgaagaaccccgccgagcaggcgcacggagccaacgccggactggaaattgccgtcaggctgctagagcctatcaaggagcagttccccatcctatcctatgctgacttctaccagcttgccggagtcgtggcagttgaggtaaccggcggacctgatgtccccttccaccctgggaggcaggacaagcctgagcctccgccagaaggccgccttcctgatgccacccaaggttctgatcacctcaggcaggttttctccacacagatgggtttgagcgaccaggacattgttgcactttctggtggtcacaccctgggaagatgccacaaggatagatctgggtttgagggagcctggacatccaaccctttaatctttgacaactcttacttcacggagcttctgagtggagagaaggaaggccttctacagctaccaagtgacaaagccctcctctctgatccatccttccgcccacttgttgacaaatatgcagcggatgaggacgctttctttgctgactacgccgaggcccacctgaagctttccgaattgggatttgctgaggcgtaaggtgaggtgctcataaagaaggggacaggcggggcagggctgggcaggtgcggatgaagattgttgcctagctgatttatcttgtcttgctggctatttggcatctaagaccaatgagaaccagaagagtatggtggatgtaataaacaatcgtcggccttgtgaggcaggcccatcttttgtgtgtttcccttgaatggttagagtaatgtgatttcctttccggcattgatgaactcagctgaagatgtagtgtgtaatgtcatggttcgcttttctatttattatttatctatatctatcgatatcgaagctctgataatgaatggagtct

SEQ ID NO: 452080 - DNA, 483 bp, Sorghum bicolor
cgtccgggacattgttgcactttctggtggtcacaccctggttggtggaactggtcacctagcctgtgtatttttttgggtgtttggcaacttgaaaggtggtgcttatgcagaattgtctctcttgtagggaagatgccacaaggatagatctgggtttgagggagcctggacatccaaccctttaatctttgacaactcttacttcacgtacgtgatctgtttcttttgaagaaggcaactcttatttctactcataccatgttttgttggttaaactgaatagctgtgttacaatcctggagcatgaactctgacacgagtcttcattaagataagttgaattaactatgacagggagcttctgagtggagagaaggaaggccttctacagctaccaagtgacaaaaccctcctctctgatccattctttcgcccacttgttgacaaatatgcaacggggtgtcatttaattcttgcata

SEQ ID NO: 452081 - DNA, 647 bp, Sorghum bicolor
  unsure (1)..(647): unsure at all n locations
cgtccgctccctccgctgtccgactgtgccctgtcgccgcctctgtcctctcccagtccctccccctccatctccggtgaggcgcgaatcgagttgcatcgaatccatgggcagctcctcgaataccaacacgagcggcggggccagcgacaaggaggagaagaagaaggaggacaaggtcaaaggcaaggactcgtcggagccatccttcaaggagaacgaaagggtccttgcctaccacggccccctcctctacgaggccaaggttcaaaggatcgaaaatcatgaagatgaatggcgctactttgtccattatctcggttggaataagaactgggatgaatgggttgcaaatgaccgcttgttggcattaacagaggaaaacatgcgcaaacaacaagagcttgacaagaaccaggtagttgacaaaacaatgaagtctggacggtcaacacagcataaaccaaaaggctccaatgcagatgcaaaagctgataaagatgacactaagagtctcatgaaggggaagaaacgtaaaagtcagcctgggactgagattcaggaaaaggaaaaaagatcatcacagagtctactagtgttgcagtttcctttgacactgaagaagcnacttgtggatgattgggagt

SEQ ID NO: 452082 - DNA, 938 bp, Sorghum bicolor
cgtccgcagcaaattgctactgtgtccaattccaaagggtttagtggtctaccaggaattctgtgcctggctcatatgttgggatgcctgattccaaaagggtttagtactctaatggaaattttatacctgccagatatgttggggatagttttggaagcgtgtctctattaaagcttggtttcgctcagatatattggggatagttttggaagtgtgtctctattaaagcttggtttggctcagagaatgcctagcagacatgctagatgggattccttgtactgaatcttgtcgtacaatgttgctaaactagaaatatatgtctaccattttcaaagcaaaatttgtcaataaatcttattttttggattttttcagtaagtgcttatatttagaaggtagcactactcagacatttatttagtttccagaatattttttgtcaaaagagcatccataaattcaggtggagcactaaaatcggtcccattctggataattaactctcgcaatgaatccatggtcagtgcatttcattctgctgcctgcttacctctagatttagtcattcggctgcccattgctacctccctgtgcagttttttaagcccactgaacctagcagtaccagctggtctactttctcaagaagtttatcttctcagttaccctcaccgaacactcatatacctctaggtcaaggaggcaatacctgatcaagttcattttagatagaccggacgggcatacctcatcattaaatattggtacctctgcagctgctgcacagattgttccagaatcaagcaccagttccatacaaccagcaagtacacttggtgctccatagtacgcagtctgaaccacagcctgtatgctttgactgtggaactaaatcgacacctgctccagcagctgtcccagaggatacacct

SEQ ID NO: 452083 - DNA, 416 bp, Sorghum bicolor
cgtccggttatattgcctctttttattattgactgtggaactaaatcggtatgttatattgcctctttttaattattcatgctccgttacatacgtctacacctgcataacctattttctgatttcatacatagacacctgctccagcagctgtcccagatgatacacctctaaaggatcttggcgccaagtcgccaacaggaacatcacacgctcataggaaactgtttcgagaaaacactctcactgaaaaggaaaccatagcggaacaaaatttgaacgcaaacggaatcataaggataaccacaatggtccaattgatccactactgcaggcaaaagaaaaaaaagggagatacttgaatttagatgatctagaccaagagaacaaaaggtcgatacttgaatttagatgat

SEQ ID NO: 452084 - DNA, 416 bp, Sorghum bicolor
cgtccggtcttgtctctcttttgaagctttcctcccggtttccaccaacatcggagaggataaaagatatagttgctcaaaataaagggaatactgtgcttgagttgcagcaaagatctattgagttcagttccattatacaaagacatcagtctataaaatcatctttgcttgaacggatgcctgtattggatgaagctaattatttggtgaagagagctgcttctacacaggctgcagtttcatctgtaaattctgctccagcagccacttctggagggccacttaagcttccaaatggtgtagcaaaaccaccagcagctcctttagctgatttgcttgatttgagctctgatgatgctccagtgactacttcggcccctactacagcacctaatgattttctacaggatctg

SEQ ID NO: 452085 - DNA, 499 bp, Sorghum bicolor
cgtccgcgacggcgacaagctcaggttccccggcggcgggaccatgttccccaacggcgccgacgcgtacatcgacgacattgggaagctcatcccgctccacgacggctccatccgcaccgcgctcgacaccgaagaggagaacccggtacgccacctcccgctcccgcaccacctccccatccctcgacttctccgtgcgccacgccgcggccatcgcgctcgacgatgccgacggcaccgcctcgcccggcgcctcctcctcctcggccaccccgcggaggtacccggcgtgcgcggccaagtactccgagtacacgccgtgcgaggacgtgggagggtcgctgcggttcccacgggaccgcctcgtgtaccgggagcggcactgcccggcgtcggagcgggaggtgcctgggtgcctggtgccggccccggccgggtaccggacaccgttcccgtggcccgccagcccggacgtcgcctggttcgccaacgtgcc

SEQ ID NO: 452086 - DNA, 405 bp, Sorghum bicolor
cgtccggcaagaagctgttctccaactcgcccgaggggtccaagcttgtcaagaggagcgatgaaaccgtgctgtcagggcgtctccacttgggtgatgaagatgaggggattggtgtatcaagcttcaaggggagcagtgactacagctgtgcgtcttctgtaaccgatgaggaagggcgtgagatgaaggcgccaggtgtggtggccaggcttatgggcttggacgccatgcccacctcgggtgttccagagccatactgcacaccgttccgagacacaaggtcgttcagggacagccacagcctcaagaggagccctgagtactcaatgaatgaccagttcggtcatgttcctcgaagagttgatggctatatcaggaagccattggatctcagagcaccca

SEQ ID NO: 452087 - DNA, 321 bp, Sorghum bicolor
cgtccgggagaacgccgcttccggtcctgttcgcggctcgtgatttcgccgccggagagccgagggagagggagcgagatggggttcgtcggagacacgatggagtcgatccgctcgatgcagatccgccaagtgctcacgcagatcatcagcctcggtatgattgttacctctgcgttaatcatatggaaggggttgatagttttcacggggagcgagtcaccagttgtagtggttctctctggttgcatggagcctggatctacaggggtgatttcctgtttatggatctgatcaaagatcctattcgcacggcagaaa

SEQ ID NO: 452088 - DNA, 718 bp, Sorghum bicolor
  unsure (1)..(718): unsure at all n locations
ccgccgcacagtttgcaaagttgtagttcatccatcgttgcggctaggtgtagcgctatatatagctccatctgctgcgacgacgtggcgggcaccaccaggaggagcaggaagtcctcgtcgtcgagctcatcggcgcagcagcagctggctgccggcgcgctgcttgtggccgttgtcgtgttggtggcggcgtcgtcgtcgggcgtgctgatggcggtggaggcggtgtgcgacatgagcaacgagcagttcatgtcgtgccagccggcggcggcgaagacgacggacccgccggcggcgccgtcgcaggcgtgctgcgaggcgctggcgggcgcggacctcaagtgcctgtgcggctacaaggactcgccgtggatgagcgtgtacaacatcgaccccaagcgcgccatggagctccccgccaagtgcggcctcgccacgccacccaactgctagccatgctaataataagctaagcaagggcgctggcctggctagcattgccctacgttgtactacgtgtgttgttgcattatatatatttattattactgtgtgtacatctgcagcaggagggggcccggccgtacgtacgtgccacatcgatcttgtcacgtactaacatgcatatgttcttgtcgtgtgtgctccgtgctggcgtgtgtgtgtgtgtgtgtgtgtcgtcnttggtacatcttgtcacgtactaacatgc

SEQ ID NO: 452089 - DNA, 652 bp, Sorghum bicolor
  unsure (1)..(652): unsure at all n locations
cgtccggngaaagaggagaataaaaagggtgggggcgaggcggccggacaggagccgagcgcaagagctcaggcttcgccgcgaaaccccagacctcgcgccggcccttcccctccccggcgtcgtcctcgctctccgatccaagatgtataagctggggagaggaaaccgcgacaaggtgcagcagttcatgaccataaccggcgccagtgagaaggttgcccttcaggcactgaaagctagtgattggcacttggaaggagcttttgacttcttctatagccaacctcagatttctgcggtcaatactcggcatcttgaagatattttcaacagatataaagaacctgatggtgatatgatcatggtggaaggaatatctcaactttgcaatgatctgcaggtggatcctcaggatattgtcatgcttgtcatatcatggcacatgaaagccgccacaatgtgtgaatttactcgtcaggaattcattggtggactgcagtcnaattggggtagattcaatcgagaagttccgtggaaagttaccatcattacgagctgagctaaaagatgacaataaggtccgtgatatatacaactntgcattcactngggcaaggggaaagggtcaaaagtctctctcactggagac

SEQ ID NO: 452090 - DNA, 542 bp, Sorghum bicolor
cgtccgcgagcgctacggcagcagcgcgtctctctcttcctcttccggtgctcgtgctctccgccctccgcctccctcgcgcggaacccaggcggcccccgccgcagccgcagctacgcaaaggcgaatggtggcacttttacattacctatgctagtttgcctcatgctatatttccaaaatggtgaagctcactatgatagcacgtgtcactgatggccttccattgtcagagggattagatgatggtcgggatctgaaggatgctgacttctacaagcagcaagcaaaactgttgttcaagaacttgtcaaaagggcagcatgaggcatcaaggatgtcaattgagactggaccataccttttccactacatcattgaaggccgtgtgtgctatttgactctgtgtgatcgttcttatcccaagaaacttgcattccaatatcttgaagatctcaaaaacgaatttgagaaagtcaatggcagtcaaattgaaactgctgcaaggccatatgcatttattaaatttgatgcattcatac

SEQ ID NO: 452091 - DNA, 824 bp, Sorghum bicolor
gcaggtaatatctggtaaacaatatgctggacctgaggttgatgtatggagttgtggagtgattctttatgctcttctttgtggaactcttccatttgatgatgagaatattcccaacctgttcaaaaaaattaagggaggtatctacacacttccaagtcatttgtctgctttggccagggatttgatcccacgaatgcttgttgtcgagcctatgaagagaatcacaattcgggaaattcgggatcatcaatggttccagactcgccttcctcgttacttggcagtgcctccaccagacacgacacagcaagccaaaatgatcgatgaagatacacttcgagatgttgttaatatgggatttaacaagaaccatgtgtgtgaatcactgtgcagcagacttcaaaatgaggcaactgttgcatattatttactattggacaatcgatttagagcaactagtggctatcttggagcagattatcaagaatcaatggtcaggactctttatcacctgggtgtttgaaccaaaaaaagaaaaaaaaaatcttgagggtttctttgatctattgatgtttgaatagttgcctctccaggacaggaatttaaatcagatggcgtcgtccgaatcatctagttctggtacgaggaattatgttccaggaagcagtgatcctcatagcagcggtttgcggccacattatcctgttgaaagaaaatgggcgcttggactccagtctcgggcccaccctcgtgaaataatgattgaggtcttaaaagcacttcaagaattaaacgtcagctggaagaagaatgggcactac

SEQ ID NO: 452092 - DNA, 1081 bp, Sorghum bicolor
cgtccgcaaaaccctacccgtcaccgcctccttatataaaaggctcgccctctgcgcgccgcagttccttcgcgcacacaagcaaaccctccgccgcccgccgcccgcccgcccgcccgcccgaggaggaggaagagaaggcgaaggagtagcagcaccgggcaacatgaagacgatcctggcgtcggagacgatggacatcccggagggcgtgacggtgacggtggccgcgaagctggtgacggtggagggcccccgcgggaagctgacccgcaacttcaagcacctcaacctcgacttccagctgcaggagggcgggcgcaagctcaaggtggacgcgtggttcggcacccgccgcaccatggccgccatccgcaccgccatctcccacgtccagaacctcatcaagggtgtcaccaaggggtaccgctacaagatgaggttcgtctacgctcacttccccatcaacgcctccatcaccaacagcaacaccgccatcgagatcaggaacttcctcggcgagaagaaggtcaggaaggtggacatgcttgatggcgtgaccatcctgcggtccgagaaggttaaggatgagctcatcctcgacggcaacgacatcgagctcgtctctcgctccgccgccctcatcaaccagaaatgccatgtcaagaagaaggatatcagaaagttcttggacggtatctatgtcagcgacaagggtgtgatcgaggaggagcagtgagcgacaacgtagctaaaatgcctggagatgatccagaagtgctacatctgcctggcatgttgccattatcgtttgggttgcaattttcggagactgaattttgttcttggttaggatgtgttatggagcatgttatcttatcctacatattgtcgtccctgtttaagaatatgaaccttgtttctcattccctaaagaatagttgactgccagtgttgtggttgaaacgaaaatggtaggtttattaactgatttgcgcattcgattggatcgccatgctgactgctacgagttcatcttgtttgaattttgcctcagttaaaattctgttttcgaaaggtc

SEQ ID NO: 452093 - DNA, 535 bp, Sorghum bicolor
ggtcgaccacgcgtccggcctcgggccaaaccctagcagggagttgagtgaacggttgcagccatgagtaagttgcagtccgaggttctcaaggatgccatctctcagattgttggggatgccaaggagaagaataggaagttcaccgagactgttgagcttcagattggtctgaagaattatgatccacagaaggacaagcgtttcagtggctctgttaagttgccccacatccctcgtccaaagatgaaggtgtgcatgcttggtgatgcccagcacgttgaggaggctgagaagatgggacttgactacatggatgttgagtccctcaagaaaatgaacaagaacaagaagcttgttaagaagcttgccaagaagtaccatgcgtttttggcatcagaggccatcatcaagcagattccccgtctccttggtcctggtcttaacaaggcaggcaagttccctacgcttgttactcaccaggagtccctggaatccaaggtgaatgagacgaaggctactgtcaagtttcagc

SEQ ID NO: 452094 - DNA, 450 bp, Sorghum bicolor
acgcgtggtcggacgcgtgggcctcgtccgccgcagcgccgctaatccacccgccgccgctgccctggaatgtatgatatagaaaaaaaaaatgggtgtgttacgcacaaagtcgcatcctccggccgccgttgattcgccaaaagtaaatcagccggacacctgatctacgcacaaaggagcacctccagaggacactcttggagctcctgggggttgtcgcagatcgccgcagtgggctgccgattgcaacatgtgtttcctcccgtgatgagcttgatgccgtctgtgctgccgtcgccaacctctcctttgtgtcaatgtcaccgctgtatagtgatcaagctgaagcagagcgtgcatctgttcttgagaagtttcgtcaagaaacaattcagtggaatcaaactactaaagctaccaatattgccgaaagttctaggcttgaaa

SEQ ID NO: 452095 - DNA, 901 bp, Sorghum bicolor
cgtccgcgcctagctagcagagaatatagagagatagagagaagctagggcaataaggtcgtcgttgatggctccgatgaagctgtacggtgcgacggtgtcgtggaacgtgacccggtgcgtggtggcgctggaggaggccggcgccgagtaccagatcgtacctatcgatttcgccaccgccgagcacaagagccccgaacacctcgcccgcaacccgttcggtcaagttccagctttccaagatggcgatctccacctatgggaatcgcgtgcgatttgcaagtacgttgcccgcaagaacaaggcagcagagctgctgagggaaggcaacctccaggagtcagccatggtggacgtgtggctggaggtggagtccaaccagtacaccgccgccctgaaccctatcctgtacgagtgcctcgtcagccctatgttcggcggcaccaccgaccagaaagtggtggaggagaacctggagaagctgaagaaggtgctggaggtgtacgaggcgcggctcgccaagcacaagtacctcgccggagacttcctcagcctcgccgacctcaaccacgtctccgtcacgctttgcctgctcgcgacgccccatgcttctgtgctcaacgcgtaccctcacgtcaaggcatggtgggatggcctcatggccaggccgtctgtccagaaggtcgccgcgctcatgaagccgtctgcttgaaattagtgatcgagtcttcgttcgttcactgcttggcttaatataaataagcccatcgacccctgtgtgtgtcctcgttctcgatcggcatgtgtcatccaggtgttgaaataagctagctagccgatcgagttgcatgcatgttttcgtgttctttgagaataatattaagctatgtgtttgggt

SEQ ID NO: 452096 - DNA, 561 bp, Sorghum bicolor
cgcgtccggcgagagacagacaaccactgcgaacgaatccatcgccatggcgtctcgtctcgttgcggcggcagcggcggcggcctcctcctcctcctcagcgtcccccctcgcccgcctaatctctcgccgcggccttgccggtgccgctgacggccatggacctgccaaggtgcccttgtggaaagatccgttgagcccgagcaagtggaaggaagagcactttgttctagcaagcctgtctatgtggggggctcttatttatggcggtttcaagctttttggtggaaagaaggaagacaagactgaggtggcaccagcaaaggcatagttgcttgagatggagctctacctatttctgcggtcaggcaacaatgttaaataaaaaagaacgttctatgttgtgctttaaagttgataaattgtggcaaccagagattttgatttatgtatgcaagatacacttactctcatccaccatgaataatcttgctgcagtggaatttcatgtctgcaaacactgcaaaagatggacttctttcatgtgattgagtagatgtt

SEQ ID NO: 452097 - DNA, 1465 bp, Sorghum bicolor
cgtccgatcacaattatgtttggtccagataagtgtgggtcaaccaacaaggttcatttcatccttaagcacaagaatcccaagactggaaagtatgttgagcatcacctcaaattcccaccttctgtcccatatgacaagctctctcatgtctacacggctatcttgaagccagacaatgaggtcagaattttggtcgacggggaagaaaagaagaaggcaaacttcctttctgctgatgattttgagccagcacttatcccatccaagaccattcctgaccctgatgacaagaagccagaggactgggatgagagagctaaaatccctgatccagatgcagtgaaacctgatgactgggatgaggatgcccccatggaaattgtggatgaggaagccaccaagcctgagggatggttggatgacgagcctgaggagattgatgatcctgaggcagccaagcccgaggactgggatgatgaggaggatggtgaatgggaggcgccaaagattgacaacccaaagtgtgaagaggcacctggatgcggtgagtggaagaggccaatgaagcagaatcctgcttacaagggcaagtggcatgcacctatgattgacaaccccaactacaaggggatctggaagcctcaggagatccccaaccctgagtactttgagcttgacaagcctgattttgatccaattgctgctattggtattgagatctggacaatgcaggatggcatcctcgttgacaatatcttgattgctgatgatgagaaggttgccacctccattctggagaagacctggaagcccaagtatgatgttgagaaggaaaaggagaaggctgaggaggctgctgctggtgcggatggtctttctgagttccagaagaagatttttgacgtcctgtacaagattgctgatgttccgttcttggcaccctacaagaccaagatcattgatgttatcgagaagggagagaagcagcccaacatcactattggcattttggtctccgttgtcatcgtgttcgttactgttctcttcaggatcctttttggtggcaagaagccagcggtacctgtgaaacccgcagctgaggcgagaagcccaaagccacagagaccgacggtgctggaagcagtggtacaaggatgagaaagaggacgaaaaggaggagacagcagccccccgtcggaggacccgcagggagacgtagagacctgtttttgatgtgtttggctgttctggcgcctgcttattttgagaactcttaatatttctgagtgtataataggaacttaagtcacctctgccgctccccctgctgctgatattgtttttacatggttagacccggacccttcacgagctgtagaatttagttcttgttggtcatttgtgtgctgtgcctgacgggtataatcacttgttcaatcagatagaggtgatggtttttttt

SEQ ID NO: 452098 - DNA, 520 bp, Sorghum bicolor
cgtccggactagtatcaggatcgggagaccgtcctgagaagctccatcaagagtgccttgttcacgcgcttcttcaggtctgctcattttgtttcagccttcacattctaaaaatttccctttatgctattaacatgtgcttttataattgtattttctaccattttcacactacttaaagctcatgttgtagcatcgcccgttttccctctatggtactgtttgcagctctattacattatttctagtaaaccttgctttcatactttgttgtgaattgtgatacaatgtcttttcaaaactactgcagaggcccttttcctgcaccgttgatggttgccccttgagctatagcaggaaggatcatttgaacagacatttacttactcatgaagggaaactatttgtgtgccctatcgaaggatgtggccgaaagttcaatatcaagggtaatatgcagagacatgttcaggaaatccacaaagatggctctccatgtgaaagtaagaaagagttcgtc

SEQ ID NO: 452099 - DNA, 1220 bp, Sorghum bicolor
cgtccgcggacgcgtgggctcccgcagcgacacaagcaccacaccatctcagctcagctcagcaagtagcttcttctagctctagctaaccaagctcggttgctgcaagaagctaatagtagccggcgcgcgacatggaggggaaggaggaggacgtccgcctgggcgccaacaagtactcggagcgccagcccatcggcacggcggcgcagggcaccgacgacaaggactacaaggagcccccgccggcgccgctcttcgagcccggtgagctcaagtcgtggtccttctaccgcgcgggcatcgccgagttcgtcgccaccttcctcttcctctacatctccatcctcaccgtcatgggcgtctccaagtccacctcaaagtgcgccaccgtcggcatccagggcatcgcctggtcctttggcggcatgatcttcgccctcgtctactgcaccgccggcatctccggcgggcacatcaacccggcggtgaccttcgggctgttcctggcgaggaagctgtcgctcaccagggcggtcttctacatcatcatgcagtgcctgggcgccatctgcggcgcgggcgtcgtcaaggggttccagcaggggctgtacatgggcaacggcggcggcgccaacgtcgtcgcgccaggctacaccaagggcgacggcctcggcgctgagatcgtcggcaccttcgtcctcgtctacaccgtcttctccgccaccgacgccaagaggaacgccagggactcccatgtgccgatccttgctccgctcccaatcgggttcgcggtgttcctggtccacctggccaccatccccatcaccggcaccggcatcaacccggcgcggagccttggcgccgccgtcgtttacaaccagaaccatgcctggtctgaccactggatcttctgggtcggccccttcatcggcgctgccctggctgccatctaccaccaggtgatcatcagggccatcccgttcaagagcaggtcttaagtaaacctcctgttgctttcagatgccgccgatggaattactcgtattcgtggttgtttccaatgcctacaatgttacgtggagttcctccgttcctctttcaagttcgctctgcttttatctgaactccaagacttgtataatttcagtaccccaattgtgtaatatgccacccgctgttatgtgaaatgaaaacaaaaaaaaaaagtctttgaagtg

SEQ ID NO: 452100 - DNA, 514 bp, Sorghum bicolor
cgtccgcccacgcgtccgcagacacacaccgctcgctgcttcaagaaaccaccgagctcccaagcgcgcaaggcaggagagagaggagcggaaatggaggggaaagaggaggacgtgcgcctgggcgccaacaagttctcggagcggcagcccatcgggacggcggcgcagggcgccggggacgacaaggactacaaggagcccccgccggcgccgctgttcgagcccggggagctcaagtcctggtccttctaccgcgcgggcatcgccgagttcgtcgccaccttcctcttcctctacatcaccatcctcaccgtcatgggcgtctccaagtccaactccaagtgcgccaccgtcggcatccagggcatcgcctggtccttcggagggatgatcttcgcgctcgtctactgcaccgccggcatctccggagggcacatcaacccagctgtgactttcgggctgttcttggccaggaagctgccctgactagggccatcttctacattatcat

SEQ ID NO: 452101 - DNA, 413 bp, Sorghum bicolor
cgtccgggacatcgaagcatcggggcccgaggccggcgagttctcggccaaggactacaccgaccctccgccggcgccgctgatcgacgcggcggagctcacccagtggtcgctgtaccgcgcggtcatcgccgagttcatcgccacgctgctcttcctctacatcaccgtggccaccgtcatcgggtacaagcaccagacggacgcgacggcgtcgggccccgacgcggcgtgcggcggcgtcggcatcctcggcatcgcctggtccttcggcggcatgatcttcatcctcgtctactgcaccgccggcatctcaggtgggcacatcaacccggccgtgaccttcggtttgtcctggcgaggaaggtgtcctggtccgcgcgctgtctacatatcgcgcaggctggcgcatt

SEQ ID NO: 452102 - DNA, 575 bp, Sorghum bicolor
  unsure (1)..(575): unsure at all n locations
ccgtccgggtatggatgtgtctcatggccctnnnnnnnaataggccttcagttgcagccgtggttagttctcgtcaatggcctcttatctctaaatatagagcatcagtgcacacccaatccgccagactagaaatgatgtcctccttgtttaagccacggggtactgatgatgatggcctcattagggaatcactgattgacttctacactagctctggcaagcgaaaaccagaccacattatcattttcagggatggagtcagcgaaagtcagtttacccaggtcatcaacattgaactggatcagataattgaggcatgtaagtttcttgatgagaagtggtcaccctagttcactgtgattgttgctcaaaagaaccaccacaccaagttttttcagaccggatcaccagacaatgttcttcccggaactgtcgtggacaataaagttggccatcctaagaaccttgacttctacatgtgtgcacatgctgngatgattggaacaacanggccgacccattatcatgttctgcacgatgagatagggttctctgctgacgaaatgcaggag

SEQ ID NO: 452103 - DNA, 961 bp, Sorghum bicolor
cgggtcgactcacgcgtctcccccatttctcttcccctgcgatccgagcccgcacccgcagggaagagaagggatcacctgatcaccagggcgcggcctcgcgatctcgcggaggagcggagatggggctcacgttcacgaagctgttcagccggctcttcgccaagaaggagatgaggatcctcatggtcggtctggatgcagctggtaagaccaccatcctctacaagctcaagctcggcgagatcgtcaccaccatccccaccattggatttaacgttgaaactgtcgagtacaagaacattagtttcactgtttgggatgtcgggggtcaggacaagatcaggcccctgtggaggcattacttccagaacacccagggtctcatcttcgttgtggacagcaatgacagggaccgtgttgttgaagcaagggatgagctccaccggatgctgaatgaggatgagctgcgtgacgctgtgctgcttgtgttcgctaacaagcaagatcttccaaatgctatgaatgcagctgagattactgataagcttggactgcattcacttcgccagcgtcattggtacattcaaagcacttgtgctacaactggtgagggattgtacgaaggcctggattggctgtccagcaacattgcaagcaagtcctaaattttcaagcgaggtttggatcatctaggagcttttggatgatgatggtgctggatatttagggttgggttgatatttccgtatgtaagatgtatgccctgagctcaacaggtattgagcttctgcttaagttttcccagttaaattgttttatgtaatttgggccttgagatgtttctgaaccaaacagctaaaaagaggtcagttgagttaattggttgccattacattacgagattcattcatggtccatatgttcaacagaatcacatcaagaatgatatgttttcacc

SEQ ID NO: 452104 - DNA, 1019 bp, Sorghum bicolor
  unsure (1)..(1019): unsure at all n locations
cgtccgccgatccccaattcctcctcctcctcctcctcctccggatttcgcattcagcacgcagcgcaggtggtgaaggaaaggggggcccgccgcggaggaaggaggaagatggggctcgcgttcgggaagctcttcagccggctcttcgccaagaaggagatgcggatcctcatggtcggcctcgacgccgccggtaaaaccaccatcctctacaagctcaagctcggcgagatcgtcaccaccatccccaccatcggtttcaatgttgaaactgttgagtacaagaacattagcttcaccgtgtgggatgtcggnggtcaggacaagatcagacctctctggaggcattacttccagaacacccagggtcttatctttgttgtggacagcaatgaccgtgaccgtgttgttgaagcaagagatgagctccacaggatgctgaatgaggatgagctacgtgatgctgtgcttttggtgtttgcaaacaaacaagatctgcctaatgccatgaatgctgctgaaatcaccgataagcttggcctgcactcgctgcgccagcggcactggtacatccagagcacatgtgctacctctggtgagggtttgtacgaggggcttgactggctttcgaacaacattgccaacaaggcttgaagcatctaggcagggcttcaatcaatggaaacactctggatacttggggtacgaactgcctctaccattacagcgatgaactatagtcgtgtctgtcggatgtggggatgtttttgggaggataaaaggctctttggtcaaggagctaggtatcagatgttttcgtggtattgttaatttctgttttggtttgtgcaaggtataccatgtccgactgtgtgctgtgtactcccccctgttctataatgtgctgtatactctcgacccctgactgaggcgttgtactatatatctcgatctgtctagctgtctcttggcatagcaaaatggtggcctaatttgttagcaaaaaaaaaaaatat

SEQ ID NO: 452105 - DNA, 1197 bp, Sorghum bicolor
cgtccgatccaaattgagtccctgaacaagaagtatggatgcagtgtccctttacttctgatgaactctttcaacacccatgatgacacacagaagattgttgagaagtattccaactccaacattgaaattcatactttcaatcagagccagtatcctcgcattgttaccgaggacttcttgccacttccaagcaaagggaactctgggaaggatggctggtatcctccaggccatggtgatgtgttcccctctctgaataacagcggaaaacttgacatcttattggctcagggcaaggagtatgtcttcgttgcaaactcagacaacttgggtgctatagtcgacatcaagatcctaaaccatctgatcaataaccagaacgagtattgcatggaggttactccaaagacgctggctgatgttaagggcggtacactcatctcttacgaaggaagagttcagcttttggagattgcccaagtacctgatgagcatgtcaatgaatttaaatcaatcgagaagtttaagatattcaacactaacaacttgtgggtgaaccttaaagctatcaagagactcgtagaggctgaggctcttaagatggaaattattccaaaccccaaggaagttgatggtgtaaaggtccttcaactcgaaactgcagctggtgcagctattcggttcttcgacaaagcgattggaattaatgttccccgctcaaggtttctcccagtgaaggctacatctgatttgttgcttgtgcagtctgatctttacaccttggttgatggctttgtcatccgcaacccagccagagcgaatccagctaacccttcgattgagcttggacctgagttcaagaaggttgccaatttccttgctcggttcaagtccatccccagcatcgtcgagcttgacaacttgaaggtttctggtgatgtctggtttggctctggaattacactcaagggcaaggtgacaatcacctgccaagtctggagtgaagttggagattccagatggagctgtacttgagaacacggatgtcaatggccctgaggatctttaagcgatgcttgacgtcaccagtttcccccgcggacatgtcacaggagcctgcaaaccttaatcacccccactgagctctatcttttgtaattttcttgtgcattccgcttccgttgtgagggttct

SEQ ID NO: 452106 - DNA, 722 bp, Sorghum bicolor
cgtccggctcgacatcgagcgagtgagcgacgcatcccgagcgagcgccgattgcttcttccccatccaccgcaccgcccagatccaggcgcagccgaggttgatgcccagctccagatccaggccgccgccgccgagcttcccccaccggctcttcagaaacttattcacccaaacattgtgaagctgaaggatgtgacaatggaaaatcatgagccattcttcatctttgaaaacatggtgtgcaaaccaagacctgtccatgatgcttcccatacaaaaacaaacgaacctacaggatctaatccaagttccagctggtcggacctcccaaaggatcttgtcctcagcatcctgcaacgccttcaactcccagaagctatggcttatgcatcagtatgcacatcatggctctcagctgccacagctgctggcgtaccacgctcttgtacaccaatgatcatgtcttggcggaacattctcgagagcagagaatcgcgaggggccaagggcagctcttctgtcaactgcaaggtcctccatctgttggatgttcataaggctgatgatgtgagatatgcccaaggattatgcttcatggcatgctgtggatcctgccatggctggctgaatctggtgaacgaactcgccaatctagtgctctacaacccgctcaactacgaaatgatccctgtaacaacaattactgaattcacatgcgt

SEQ ID NO: 452107 - DNA, 755 bp, Sorghum bicolor
cgtccgaattgtcatccccctcagaagtgtcagtcgatttgattgatggtggtagcactgttgtcaaaggcaaaaacataataattgcaactgggtctgatgtaaaatcacttccaggaataacaattgatgagaagaaagtggtttcatctactggtgcactgtgcttgtcagagatcccgaagaaactggtggtaattggagcaggttatattggccttgagatgggttcagtctggaaccgccttggttcagaggtcactgttgttgaatttgcaccagatatagtaccatcaatggatggcgaggtcaggaggcagttccaacgcatgctagaaaaacagaagttcaagttcatgctcaagacaaaggttgttgggtgtgataccagtggagatggcgtaaagctgacacttgagcctgcagctggtggggagcagaccatccctgaagcagatgttgtccttgtctctgctggcagaaccccatttacttctgggattgggcttgaaactcttggtgttgagacagacaacgctggcaggatccttgttgataagcgcttcatgaccaatgtgaagggagtctatgcaattggggatgccatccctggacccatgcttgcccataaagctgaagaggatggtgtcgcatgcgtagagttcattgctggaaaggaaggccatgttgactatgacacagttcctggtgtggtctatacgcatccagaagttgcatctgttggcaagactgag

SEQ ID NO: 452108 - DNA, 866 bp, Sorghum bicolor
ggcacgaggccccaatcccatcccgtcggagaaattcatcgaagcgaagcgaagcgaatcctcccgatcctctcaagatgcagatcttcgttaagaccctcactggcaagaccatcacccttgaggtcgagtcctcagacactattgacaatgtcaaggctaagatccaggacaaggaaggcatccctccggaccagcagaggctcatctttgctggcaagcagctcgaggatggccgtaccctagctgactacaacatccagaaggagtcgactctccaccttgtgctcaggctcaggggtggcatgcagatcttcgtcaagaccctcactggcaagaccatcaccctggaggtggagtcctctgacaccattgacaatgtgaaggcaaagatccaggacaaggagggcattcccccggaccagcagcgtctcatctttgctggtaagcagctggaggatggccgcacccttgcagactacaacatccagaaggaatccactctccacctggtgctccgtctccgtggtggccagtaagtcctgggccatgagcagccgtccttccagggttcacatgtctggtgccttcctctgtccctctgatggagattatctgcatgtcgtggtcgtgtcttgatcgagtcggtgaagagtccctatgtttccctttctcagaaaatcgtcctatgtcagtctggttgtgttcgtgaacatttctgctggtgcccagcagtttggttggaactgtgcaatggaataattgaaccctgaatttcgtgtgacaatttgtcttcatggtttctggaaaaattgtttgttaacatgtttgtggagtggaagctctattttttgggttgctgctcc

SEQ ID NO: 452109 - DNA, 807 bp, Sorghum bicolor
cgtccgccggatctctcttcgcgcgcggcgtcttccccatcggcggcggcggcttcttcaccattctctacggcgacgcgtccacctccaccagcgtcgtcgtcggcgtctcttcatcgactggggtctgcatcgacactagggggcggcggcgtgaaccactgtgagcttattcctcttcgctcactactttctgtgatactagcgtcgatttcgacctatggttgcgtagcaattgtctgcgtgtaaaattccgtaagtcggcttccatttgctagtggtggcgtgtggtgaggaacggtccgtcgacccatgttgcggagcaagtctccgtgtgaaatcccgaccccccaaccgccgtcgagaacatccaggttcaacaagatgcagatcttcgtgaagaccctgactgggaagaccatcaccctcgaggtggagagcagcgacaccatcgacaatgtcaaggccaagatccaggacaaggaaggaatcccgccgcaccagcagccgctgatctttgccgcgaagcagctggaggatggccgcaccctcgcggattataacatccaaaaggagtccacgctccacctcgtgctcaggctccgcgcgggtatcattgagccctcgctgcacgcgctcgcacgcaagtacaaccaggacaagatgatctgccgcaaatgctatgcacgcctgcaccccagggctgtcaactgccgcaagaagaagtgtggtcacagcaaccagctgagggccaagaagaagatcaagaactgaggtgttgccgctagtcagattcatggacaattg

SEQ ID NO: 452110 - DNA, 1234 bp, Sorghum bicolor
cgtccgcccacgcgtcctgctcggacttcggagcacacgcacaacccgatccccaatccccctcgtctctcctcaccggcttcgcggatctccgcttcaagatgcagatctttgtgaagaccctcaccggcaagactatcacccttgaggtggagtcttctgacaccatcgacaacgtcaaggccaagatccaggacaaggagggcatccccccagaccagcagcgtctcatctttgccggcaagcagcttgaggatgggcgcacccttgctgattacaacatccagaaggagagcaccctccacttggtgctgcgcctcaggggaggcatgcagatcttcgtgaagacccttactggcaagaccatcacccttgaggtggagtcctcggacaccatcgacaatgtcaaggccaagatccaggacaaggagggcatcccaccggaccagcagcgtctgatcttcgctggcaagcagctggaggatggccgcacccttgctgactacaacatccagaaggagaccaccctccacctggtgctccgcctgcggggtggcatgcagatctttgtgaagaccctcaccggcaagaccatcaccctggaggttgagtcctctgacaccattgacaacgtgaaggccaagatccaggacaaggagggcatccccccggaccagcagcgtctgatcttcgctggcaagcagctggaggatggccgcacccttgctgactacaacatccagaaggagagcaccctccatcttgtgctccgcctgaggggtggtatgcagatctttgtgaagaccttgactggcaagaccattacccttgaggttgagagctctgacaccattgataacgtgaaggccaagatccaggacaaggagggcatccccccggaccagcagcgtctgatcttcgctggcaagcagctggaggatggccgcacccttgcagactacaacattcagaaggagagcaccctccatctggtgctccgtctccgtggtggtcagtaagccataggtcgtttaagctgctgctgtacctgcgtttgtctggtgccctcttgtgtacctgcatatggaggttgtcgtctattaagtatctgtggtttgttttagtcgtgactgagttggtttgaaggacctgttgtgtcttgtgtcccgtgtgtctacccaaaactattatgccgcagtatggcttcatcatgaataagttgatgtttgaactt

SEQ ID NO: 452111 - DNA, 765 bp, Sorghum bicolor
cgtccgatcatcatcatccatcggcttgattcctcaatcaacaccgcaagagccctcgttcggatcggggcttgctgcgacttggcgaggtaaaaccctagctccagatcgcgggtcgtagccggcgagatgcagatcttcgtcaagacgctcacggggaagaccatcacgctcgaggtcgagagcagcgacaccatcgacaatgtcaaggccaagatccaggacaaggagggcattccgcctgaccagcagaggctgatttttgctggtaagcaattggaggatgggcgaacattagctgattacaacattcaaaaggagtcgactctccatttggtcctgaggctcaggggtggaactatgatcaaggtgaagacactcactacttgggaaggaaatcgagattgacatcgagcccactgacacgatcgataggatcaaggagcgtgttgaggagaaagaaggcattccacctgttcagcagaggctcatttatgctgggaagcaacttgctgatgacaaaactgccaaggattacaacattgaaggtggttcagtgctccatcttgtgcttgctctgaggggtggccaatagattaaaaagttatagtttctgcttatgctatccgttacatacggttgtttcagaattgaagccttgtattgggtggttgattgtgccatgcaattagcagactactagagtcaggtgtcatctgtactgtttgagaaatgcttgaactaaggtcattcagttgccatctc

SEQ ID NO: 452112 - DNA, 511 bp, Sorghum bicolor
cgtacgcccacgcgtccggtaccctcgctgactacaacatccagaaggagagcaccctccacctggggctccgcctgaggggtggtatgcagatctttgtgaagaccttgactggcaagaccattaccttggaggttgagagctctgacaccatcgacaatgtgaaagctaagatccaggacaaggaggggatccccccggaccagcagcgtctgatcttcgccggcaagcagctggaggatggccgcacccttgcagactacaatatccagaaggagagcaccctccatctggtgctccgtctccgcggtggtcagtaagccgtgggtcgtttaagctgccgctgtacctgtgtcgtctggtgccttctggtgtacctgggaggttgtcgtctatcaagtatctgtggttggtgtcatgagtcagtgagtcccaatactgttcgtgtcctgtgtgcattatacccaaaactgttatgggcaaatcatgaataagcttgatgttcgaactt

SEQ ID NO: 452113 - DNA, 398 bp, Sorghum bicolor
cgtccgaagaatttcttgggcgttcttcggtttcgttctcacgcagttctgttcgagttcggcgccgcgccgtcaagtcccctgaccggccttgcgcgagggaggaagaggcgaggagaagatgcagatcttcgtgaagaccctgacggggaagaccatcaccctcgaggtggagagcagcgacaccatcgacaacgtcaaggccaaaatccaggacatggaagggattcccccagatcaacagcgactgatattcgctggcaagcagctggaggatggccgcacactggctgactacaacatccaaaaggagtcaactcttcaattggtcctcaggctttcgggtggaaccatgatcaaagtaaaacttttactgggaaaagaaatcggatcgacat

SEQ ID NO: 452114 - DNA, 471 bp, Sorghum bicolor
cgtccggcaactgagttcgaatgctagtgttggcatgcatgctagcttggactattcaggcacaggaggactcgacaagatttgccaggagagccgagcattggaaactagcccttttggtatgaggagcttgcccgatctcggttctttcggtggctacagcagatcaaccgcagaatcgacatcgtcagtgcaaccatacctgagatccagcaatctcgctgaaaccagtaaacaagagccggatattgtgtcggcaaggagcagcagcagtggcagtggagcggcgagcgatcgaaagaagcgggcgtccgaggaaaggacgagcaccgtggagaagtctaagcaagagggctctaaaccatctcctcccaagcaacaagtgcctaaagtgaagataggaggagaagatcacagcattgcaaacagatcgtttcaccatttgggaagactgatacagcatcagtgctg

SEQ ID NO: 452115 - DNA, 515 bp, Sorghum bicolor
cattcctgatgatgctacgatgataaaagaaacgcctgctcaggcacggaagttaagtatcgattcgtccctcacaagtgaagaaagggagcagaaacggaagcaagccagcgtcagagccacattcgtgcaagacctgctgctctctactctattcggggactaataaatcaggatgagccaagttatcactggaagggtgcttcccggtgcaggtctgcagagactagcgtgctccacccaacttgctgaattcctcgacggaacatatgcgcgcatccggggtgctagcctttcgtcccttccagtgtggtgcagaatcgatgtgggcatgatgtgtcttctaagttattgtaagccggtctctctatcctcagttccttcataactgacgatcagcatgtgatatgcatgcaagtcgcggttgtgcgtgtacctcatctgtgtctgaactctgaagcattggtttgttgtaccaacataataataataatgttacaacaccggatggctat

SEQ ID NO: 452116 - DNA, 501 bp, Sorghum bicolor
cgtccgagggcgcccctttctcggccatcctcgccgacttcctcggccgcgggatattcaacgtcgacggcgactcctggctcttccagcgcaagctcgccgccgccgagctcgcgtccccagcgctgcgctgcttcgcggccggcgtcgtggcctccgagctccggtgccgactcattcctctgctctactctgcagccggcgacggagacagcagcggcgagaggctgctggacctccaggacgtgttccgccgcttcgccttcgactgcatatgcaggatctcgttcggcctcgatcccggctgcctggagctctcgctgcccatgtcggcgttcgccgacgcgttcgacacggcgtcgatgctctccgcacgacgcgcgacggcgcccatgcacgtgctctggaagctgaagcggctactcaacgtcggggaggagcggagctccgcgacgccatccgcctcgtcgacacgctcggcggctgggtcatccggcagcg

SEQ ID NO: 452117 - DNA, 382 bp, Sorghum bicolor
  unsure (1)..(382): unsure at all n locations
caagcccattgtggtcaaggccaagctcatctccaaggtcgccgagaagaagatcaaggccgccggcggcgccgtcgtgctcaccgcctaggtttcagtccttgttcgcctcttggttttgagatctatatctgaactagtagtgctttcctgtctcagctatttgtgttaagaagacctgtagtttttaaatctgtggctgctgcctgttgggacagtgctttatgaggattttgatgccagttcatatcaaatatttcagatatattaaagctatctgtgctaattgctccactttcaactgtgcaattgatttatgatccacgtgcaatcttcggtgttgtgaaacncaaaaaaaaaaaaataaaaaacaaaacggacg

SEQ ID NO: 452118 - DNA, 581 bp, Sorghum bicolor
cgtccgagcaaatgctacggaccgccaaggaatttttttgggatcggaaaacattctcccttctccaccaccgccttcgctccttgtacctcgccccgtctgcctccacaccgctgctatccagaactcggatcgatcgctcctcgtcgcgtcgactgccaagatggataagctcagtggttctgcacgtcttatgattgtttcagatcttgaccatacaatggttgatcatcatgacgaggagaactagtccttgcttaggtttggcgccctgtgggaatctgcttactgccaggattctctacttgtcttctcgactggaagatcaccaactctttacaaggaattgaggaaagagaagcctatgctgacgccagacatcactatcatgtctggtggctccgtgataacatatggggaggcaatggttcctgatgatagctgggaagaatatctgaacaataagtgggacagaaatattgacgtacaagaaactgcgggcttttctgagctgaagcttcagccagagacagaacagtgcccgcacaaggacaggtttttgggtgatacgaatagtgccc

SEQ ID NO: 452119 - DNA, 878 bp, Sorghum bicolor
cgtccgcccacgcgtccgcccacgcgtccgcccacgcgtccgcccacgcggcttgtgcatctcctccgcctccgcttgacccatccaagtcagggatcgccatgtcggactcggaggagcaccacttcgaatcgaaggccgacgctggtgcgtccaagacttacccgcagcaggctggcaccgtccgcaagaacggcttcctcgtcatcaagggccgtccctgcaaggttgtggaggtttctacctcaaagactggtaagcacggccacgccaaatgccactttgttgccatagacatattcaacgggaaaaagcttgaagatattgttccttcttcacacaactgtgacattccgcatgtgaaccgtactgagtatcagctgattgacatatcagaggatggatttgtgagccttcttacttcagatggcaacactaaggatgatcttagactcccaactgatgagactcttgtggcccagattaaggaaggttttgaaagtgggaaggatcttgttgtgactgtccagtctgctatgggggaggagcagatctgcgccctgaaggatattggccccaagtaacttccctgccttggaagacggaactactgtatctcaaaacttaaatggaaaaagaagtgtatcaccaaaggattgctactgagacgttcacctggcttgagctggcttttgctatagcaaacacaagtgcagggattgctgggtgtcgcaccgtatctgactttcattatctgtggttacattctggaccctgtattttctatgattttatgccacctactttttagtattaagtatcaataaattggtttggaacggttgaattgcatccaattcatgaggtttcttgttggt

SEQ ID NO: 452120 - DNA, 826 bp, Sorghum bicolor
ggcgtccgcgcagtttccccccgaccacaccgttccgccgcgcacaggagagcacagcccccgcgcccaggagtaagtttgttcttttaccaacatgtcgagggaggagaatgtttacatggccaagctggctgagcaggctgaaaggtatgaggagatggttgagtatatggagaaggtggccaagactgtagatgttgaagagctcactgttgaggagcggaacctcctgtctgtcgcatacaagaatgtcattggggctcgccgtgcttcatggcgcattgtctcttccattgaacagaaggaggagtctcgtaagaacgaagagcatgtgaaccttatcaaggaataccgtgggaagattgaggctgaactgagcaacatctgtgatggtatcctgaagctacttgactcccacctagtgccttcttctactgctgccgaatcaaaggtcttctacctcaagatgaagggtgactatcacaggtatcttgcggaatttaagactggtgctgagaggaaggaatctgctgagagcacgatggtagcctacaaggctgctcaggacattgctctggctgagctggcaccaacccatccgataaggcttgggcttgctcttaacttctcggtgttctattatgagattctgaactccccagacaaagcttgcaaccttgcaaagcaggcgtttgatgaagccatctctgagttggatacccctgggggaggagtcatacaaagatagcactctgatcatgcagctcctgagggacaacttgaccctttggacctctgacctcacggaggacggtgctgatgagtg

SEQ ID NO: 452121 - DNA, 532 bp, Sorghum bicolor
  unsure (1)..(532): unsure at all n locations
cgtccggaaaaaagtaagacaactacgcgcgtccgcaagagtgaggtttgttccaaaagcaaaagatatgagaccattagtaaatctcaaagctcaatcaaaaaatgtcctcctcaataattgtcatctgattataaaaaaagtaagggatgagaatccagacaagtttggttcttctgtttttgattacaataatgtgcatcaaaatctctggcattttatttcttcagtaagaagtcacctgaaggaaaaattcaagatatatattgttgttgccgatgtatcaaaagcatacgattgcattaatcatgatatgttactgaaaggtgtggatgatgcgttgaaatgtgatgactatgttctgaggaaatgcaaaaaagtagtttgcaactggtctaagaatgccctctaccgctttgattcaaatgtttctatctccaacggtgatggtatatgtgattntctcgatcagttatcatcaaggggtggcattttagttgaccagggaaaatttaacaagatacaaaagaaa

SEQ ID NO: 452122 - DNA, 839 bp, Sorghum bicolor
cgtccgcccacgcgtccgctcaatatggacaacagatcctagatcttttactagctgagacacaaccagcgaaggtctgttctcaggttggtctgtgcacttttgatggcactcatggtgttagcgctggaattcggagcgtagtggatgatgaagctgggaaatcaaatggtggtctcaagagtgacccaatgtgcagtgcctgtgagatggctgtggtatggatgcagaaccaacttgcccagaacaagacacaggagctcatcctgaactacattaatcagctttgtgagcgtcttcctagtcccatgggagaatcagccgtggactgtgccagtcttgggtccatgcctgacattgcgttcaccatcggaggcaagaagttcaagctgaaaccagagcagtacattctgaaggttggtgaaggacaagctgcccagtgcatcagtggattcacagccatggatatcccaccgcctcgtggccccctctggatcttgggtgatgttttcatgggagtctaccacaccgtcttcgactacggcaagctgagggttggcttcgcagagtcggcctaaggatatggtttggcgcctcgtccagaggcgaacgcatgcgccgagagagaagcttagcttgtttttaacttgtgtctttatgcggccggcgatgtgtgtatatatgctactacatgtttagtgatgctttcagagaccagagacaacgcccatctgttttaacctggcgcaagaatatttctggatgtattggtcatcacgcttcggcctcttgtactgaattgttgccgtgcaccctagcaacgagaactgaagaagtat

SEQ ID NO: 452123 - DNA, 783 bp, Sorghum bicolor
cgtccgcccacgcgtccgtggagatggtggcattgttggaggctcagattaaagatttgagcccaaacctggattccatagcagagtaccgcacaaaggctcggttgtatggtgaccgtgttgatgagctaaatgctaccactcaggaacgtgatgatctgaaaaagttgtacgatgggttaaggaagagaaggctagatgaattcatggctgggttcaacataatatctctgaaactgaaggagatgtaccagatgattactcttggaggtgatgccgaactggaacttgttgattccttagacccattttcagaaggtgttgtttttagtgtgaggcctccaaagaaaagctggaaaaacattgccaatttatctggtggtgagaagacgcttagttcgctagctttggtgtttgctcttcaccactacaaacctactcccttatatgttatggatgagattgatgctgcgttggactttaagaatgtatcaattgtgggacattatgtgaaagataggaccaaagatgcacagttcatcattataagtctgaggaacaacatgtttgaactagccgacaggttggttggtatttacaagacggacaactgcaccaagagtataacaatcaacccaggaagcttcgccgagaggcatgaaagtaagtgtagtataagtgtggctcaaagctacgggtcctgctgctaaatgtaactaccttagtgtccttcgttaaattaaccactctaaatgtaaccttgtagtatcctcgtggaaccga

SEQ ID NO: 452124 - DNA, 600 bp, Sorghum bicolor
ccgtccggacgaagcaccactattgtattgtgctacttgattaaatacaggaacatgacccctgaagcagctttggatcatgtccgatccattaggcctagagtgcttttggcaccatcgcagtggcatgctgttaggtcatttggaagtctcaccactggacaacttccagttcggagtacgaacctgggctgcttcttagaagccattggagctcggtgtattgaccccggaaaatggtgattaccacgtgatggagtttgactgccaagattgtggcttaccactttctcaaattatgctatctaagccagccagccccactgggtgcaccgatgcactcctcataacagaagcagatcttgagggctatgatacttatattgggactcggaaagatgccgcgtcattggtagtagccactcgcaggcccatcatgaggagagtgtcctgcctctttggctccctgaaacttaacaagcagcagtgtgaaccagcttcaagccggttcactgaggttcgtgcctgctaggtagtggctttcttcagatttccatgttgaatcaagagtgtatctctagataggcgatcattctaata

SEQ ID NO: 452125 - DNA, 732 bp, Sorghum bicolor
cgtccgcggacgcgtgggcaggggttcttcatgcaagcttatgatgacaatcatcaccgtctttctttcaacaaccagtttcaggatcagggttcagctcatcgctttgcggatccatacttctatatggcccaacaaccttctttgactggtggattaagcaccagggcaccaacagcaaacaacgacttgcgtttctggggcgaccagaattcgatctattgtaatccaagtgatcaacagcagcagggtttcagctttggacaaaacccatcaagttggttgaaccagccatttccccaggttgaacagccacgagtggttaggcctcatgcaacagttgctccatttgatttggaaaagaccagagaaggcagcgggttcaagatctttgggttccaagttgatacaaccagtccatctcctgcccaggtgagctctccattatgtgctatctcgggagcatgtggtacaaacccgaccatcggcaccagtgaatggattgcaacctgtgccaaatgagtgcttgcctgagggatctgtaagcactgctggaactgcaactgagaacgagaaaagcattcagcaagcccagcaaagttcaaaagatattcaaagcaagtcccagggtgcttcgacaaggagctgcacaaaggttcataagcaaggggttgcgcttggcagatctgtggacctctcaaaattcactgactacgatgaactaaagcagaa

SEQ ID NO: 452126 - DNA, 1206 bp, Sorghum bicolor
cgtgcggacccagtaaaatattgccagtccggccgacgagatggcccaacgccgcctgctcgccctcgccgccgtcctcgccctcgccctcgcgggcaccgccgccgcggacaactccgacttcgccgactccaacacgatccgctccgtcaccgaccgcgcggcctccgcgctcgagtccaccgtcttcggcgcgctcggccgcacccgcgacgcgctcgccggcaaccaccggatgcgcgccgccgccgtcgcgctgccgaagacgaaagactggagggaggatgggatcgtgagcccagttaaaaaccagggccactgtggatcatgctggaccttcagcactactggtgcacttgaggctgcatatacccaggcaactggcaagcccatctctctttctgagcaacagcttgttgactgcggaaaaccattcaacaatttcggatgtaacggaggccttccatcccaggcctttgaatacatcaaatacaatggtggccttgacactgaggaatcttacccatacaaaggtgtcaatggaatctgcgacttcaaggctgagaatgttggagtcaaggttttggactcggttaacatcaccctgggtgctgaggatgaactgaaggatgctgttgctttggttcgcccagttagtgttgcctttcaggtggtcaatggtttcaggcagtacaagagcggagtttacactagtgacagctgtggaaatactcccatggatgtgaaccatgctgttctggctgttggctatggcgtcgaaaatggtgtcccctactggctcatcaagaactcatggggcgccgactggggtgataagggttacttcaagatggaaatgggcaagaacatgtgcggtgttgctacgtgtgcatcataccctattgtcgcatgaggcccctacgaaatgttacagtctggcatcaataatgcatgtttaacctgagctcggtgatgggttatacagaacggaaagtctgctgtgaatagaaaatcgtgaagggaagggaattcgcccctgcttgtacgtctcccccgtatggttgtgtaggtagattgtcagttggggttccaaattagtcatacgtgtgtatgacattttatttgtgaaacaaaatacccattaatcatgatggtgcagcttgggacattttataataaaataatgtcccatttgcagattgcaca

SEQ ID NO: 452127 - DNA, 467 bp, Sorghum bicolor
ggcacgagggtaaaatattgccagtccggccgacgagatggcccaacgccgcctgctcgccctcgccgccgtcctcgccctcgccctcgcgggcaccgccgccgcggacaactccgacttcgccgactccaacacgatccgctccgtcaccgaccgcgcggcctccgcgctcgagtccaccgtcttcggcgcgctcggccgcacccgcgacgcgctccgcttcgcacgcttcgccgtcaggtacggcaagagctacgagagcgcggcggaggtccagaagcggttcaggatcttctccgagagcctccagctcgtccgctccaccaaccggaaaggcctctcctaccgcctcggcatcaaccgcttctccgacatgagctgggaggagttccgtgcgacccggctcggcgcggcgcagaactgctccgccacgctcggccggcaaccaccggatgcgcgccgccgcc

SEQ ID NO: 452128 - DNA, 587 bp, Sorghum bicolor
cgtccggctgactgctgtgctactgtccgccgccgcaggcatccgcttcttctcttatcctaggttcaggttcagctctcgaggcatttgtgcagttttcaggaggaaggtaatagctgcctacctgcttgctgttctgggtggaaacacttctccgactgctgatgatgttaagaacattctggaatcagttggtgctgaagctgatgaagagaaactggagttcctgctcacagaactcaaagacaaggacataacagaagtgattgcagccggaagggaaaggttatcctctgtgacttcaggtggtggtgcaattgccatgggagctccggctgctgcagctggtggtgcggcacctgctgaagagccaaagaaggaggagaaagtcgaagagaaggaagagtctgatgaagatatgggtttcagcttgttcgattaaagcaccactgcccgtttccagtttctctcgcgaatggtcccataatattggccggtgtccacgaaataacagtgtcaatagctactacatacttatgctattttgcgtgtgatatacgagtgtgcatcttcttcaagaattttta

SEQ ID NO: 452129 - DNA, 599 bp, Sorghum bicolor
cgtccgatccccagcaattcctcaagtatccaaggtcccaactataatcttgggaatggatgtctcccatggttctcctggacattctgatgtacgcgtccattgctgctgttgttagttctcgtgaatggcctcttattctcgaaatatagagcttctgtccgcccccaatcacctaagatggaaatgattgactctttggttaagccacgggaaactgaagatgatggtctgatccgggagtgtctgattgacttctacaccagttctgggaagaagaagcctgaccaagtcatcatcttcagggatggtgttagtgaaagtcagtttaatcaggtgctgaacattgagttgcaacaaatcatcgaggcttgcaagtttttggatgaaaaatggaatccaaagttcacgttgattattgcccagaagaatcaccacactaaattttttattcctggaaagacagaaaatgttccagctggaactgttgggacaacaaagtttgtcatccaaggaactttgacttctacatgtgttcacatgctggaatgatcgggactaccaggccaactcattatcatatactgcatgatgagata

SEQ ID NO: 452130 - DNA, 814 bp, Sorghum bicolor
cgtccgcccacgcgtccgttcccctccctcctcgtcgtctccgttgtcggcgtcggaccaaagccggatcccggagccctaaccctagcaagcaggcggcggcggagatggtgtactacgcgctgttggtgggcgcggagctggacggcctcaccaacctgcagccccgccgcggctgcgacgaccccaacttcccctactacctcaagctcaagtgcgagaactgcggggaggtcaccgccaagtccacctacgtcaccctcagcgagcaagtcgacctgcccaaaggacacggcaccgctcacctcgtccagaagtgcaagctttgtgggagagatggaacaattgtgatgattcctggtcaggggacgccacttactattgagcagagccagaaagaagagaagacttgtttgatggtgtttgactgcagaggctatgaacctggtgagttttcttttggcgctggctggaaagctgaatctgtgcatgggactcctttcgaaattgactgctctgaaggtgaattttctgagtatgatgagaagggagaatgccccgtcgagctaagcaagctgcagtcaacattcaaagtggtgaagaagcatgacaagggtggcaagactagatttgtctagatccaatgacttggaggctgtcaggtattggaatcgaaggtgtacaaatggtacatttgggccaaaggttgtgcgtaatcagacgtccttttttctatctggtgattctggggatgccatgaaccatgtgaaccttttagtgatagtgtccacaggggcattggcctggaccgact

SEQ ID NO: 452131 - DNA, 525 bp, Sorghum bicolor
cgtccgctgagaagttagttaacatgaaaattcatccaatgactatcattgcaggttacagaatggctctcgagtgtgccagagatactttgctacaaaagaccatggacaacaaagaaaatacagataagttcagaactgatctcatgaatattgctatgactactcttagttcaaaaattctttcccaagacaaggagtactttgctgaacttgcggttgatgctgtcttgaggcttaagggtagcaccaacttggaatctattcaaattctgaagaaacctggaggatctcttaaggattcctttttggacgaagggttcattcttgacaagaaaattggcattgggcagccaaagcgcattgagaatgccaaaattttggttgcaaacactgctatggacacagataaagttaagatatatggggcacgggttcgggtggattcgatgtctaagggtgcagatattgaagctgctgagaagcagaaaatgagagagaaagtcaaaagatcataggtcacgg

SEQ ID NO: 452132 - DNA, 778 bp, Sorghum bicolor
gcgtccgatcgtctcccaccctcgctaccaccgtctgctcgccgccttcttggactgtcacaaggtcggttgcccgccggaagcggccgaggagatcgcggcgtcggcgagggagcgcgaggcgtggcagcgcgcagtcgtgggcgacgcgcacaatacaaggccggactcggagctcgaccagttcatggagtcctacagcgagctgctcgtggcgtggaaggaggagctgacccggccgcttcgggaggccaaggagttcctgacgacggtggagttgcagcttaacttcattaccaacaccgggccacccatgggagctctcatctcttcagctgcagaagataacactggactcgacatgtccgacgatgaccaagaagaaggcagcggcggcatggaggcagaagcagccctggggatcgacccttgctccgatgacaaggagctcaagaagcagctcctcaggaaatacagcgggtgtttgggcaacctgagaaaggagctgtgcaagaagaggaagaaaggcaagctccccaaggaggcccgtcagaagctgctcagctggtgggagctgcactatcgatggccctacccctcggagatggagaagatcgcactggcggagtcgacggggctggagcagaagcagatcaacaactggttcatcaaccagcggaagaggcactggaagccgtcggaggagatgcagttcgccgtcatggatgggttcacccaggggcgccgccgaaacgccgcgcgttctacgtcgacgcac

SEQ ID NO: 452133 - DNA, 1158 bp, Sorghum bicolor
cgtccgccaagtcatatggaggatcctatggactacactccagctccagcagaaacattagatcatgatgttactattgaggaaatacaggagtacttcacaaactacatagttaatgagagtcttggcattatcgccaatgcgcatgtggtctatgcagataaggaagatctgaaggctaagagtcgaccatgccttgaactggccaagctcttctctatagctgttgatttcccaaagactggagtgccggctctgattccacctgaattacatgtcaaggagtatcctgattttatggagaagctcgacaaagcaacctatgaatcaaagggtgtgatcgggaagctctacagggaaataaagaagcacacaccgcacataaggcactggacgagggaagtggcaagcggtcttatgacaccgatttgattgttgatggctatgaagactacattactgaggctatagagttcaaggaagagtacgatttcaggctgggtaatcttatggatcactatggaataaaaagtgaagcggagataataagtggatgttttctgaagatggcaaagaatttcaccaagagtagtgatgctgatgcaattagaatggcggggagatctttgaggaaagaagctaggttcatggttcaatgagatgagcacatgcgaggatgaccaagatgccacagaggccaaggcgtctgcttggtaccatgttacttatgatccacagtactggggcaactacaatgaaggatatgatcggccgcatcttattagctttccatggggcgtatatgacaggctggtgatcattaagcagaggaggaatttcttcacgcagatggatcctaatctggtgtctcccatgaataacatgagattgcatgagcattgccagcaggtttgctcttgtacgtatccttgatcaatttgcagtcagcactgccagcaggtgtgcatgaatgatctgatgcattaagacaggcaaactgccacaagctgacgtctggcatacgttcttaaaactttctgatgctgctgtttaactaaatgcattaccatggtttccactggagccttgaggttatgaagtgtgtaaattttctatcatttggttagtacgtgtacccagaaatatgctgcttatgat

SEQ ID NO: 452134 - DNA, 817 bp, Sorghum bicolor
  unsure (1)..(817): unsure at all n locations
cgtccggagctgctgaaaggtgcatcagcgttttgcttgagctgattaagataaaagttaattatgttgttcaggaagctataattgttatgaaagacatcttcagacgctacccaaacacgtatgagtctatcatcgctacactttgtgaaagtctggacactttagatgaaccagaggctaaggcatccatgatttggataattggagaatatgctgaaagaattgataatgctgatgaacttcttgagagcttcttggaaacattccctgaagaaccagcattagttcaactgcagctgctaaccgctactgttaaattgttccttaagaagccaactgaggggccgcaacagatgatacaggctgttctcaataatgcaacagttgaaacagataatcctgatttgagggacagagcttacatatactggcgacttctgtctactgatcctgaggctgcaaaagatggtgttttggcggagaaacctgtgatcagtgatgactccaaccagcttgactcatcacttcttgatgagctactagcaaacatttccaccctttcatcagtttatcataagcccncagaatcatttgtcagccgtgttaaggcagctcctagggctgatgatgaggagtttgctgatacagcggaaacagggtattcagagtccccatcccagggagttgatggtgcatcaccttcctctagtgctggtacttcttctaatgtacccgtgaaacagccggcagctgcatccccaccttcagctgcaatgccagaccttttaggtgatctgatgggtatggacaatgc

SEQ ID NO: 452135 - DNA, 668 bp, Sorghum bicolor
gcgtccgaataaatatgaacactgcatatcaaaagggtatttcaacatcgatgcgaaagacgaatgaagtatacaaggctagatgcgaggggcatacgctgagttctacactggtgatattggtcagttccatcctgatgggtgccttgagattattgacaggaaaaaagatatagtaaagcttcagcatggagaatacgtgtctcttggcaaggttgaatcggctctagcaacaagcaattatgtggagaacatcatggtttatgccgatccatttcatagttattgtgttgccctggttgttccggcacaccaggccttggagaagtgggctcaaaattctgggataaactataaaggctttgaagagctttgccaaaatgatcaagcaaataaggaggttcagcaatcactatcaaaggccgcgaaagcagcgaggctcgagaaattcgaggtgccagcgaagatcatgctgttgcctgaaccgtggacaccggagtctgggctggtgacagcggcgcttaaactgaagagggagcagataaagaccaaattcaaagacgatttggacaagctctaccactgaagaagcgacagaaggtggtttgcacctatgcgtccagaaagcttgtgttgccaaaagctccctggatgaaactttactgacc

SEQ ID NO: 452136 - DNA, 526 bp, Sorghum bicolor
cgtccgccagccgccgccatgtcgaagcgagggaggggaggtacggcggcgaacaagttccgcatgtcactgggtctgccggtggcggcgacggtgaactgcgcggacaacacgggcgccaagaacctctacatcatctccgtcaagggcatcaagggccgcctcaaccgcctcccgtccgcctgcgtcggcgacatggtcatggccaccgtcaagaagggaaagcctgacctcaggaagaaggtgatgcccgccgtcatcgtccgccagcgcacgccgtggcgctcaatggatggtgtctacatagccttcgaagataatgctggagtgattgtgaatcccaagggtgagatgaaaggttctgctatcactggacctatcggcaaggagtgtgctgacctttggcctaggattgctagcgcaacaaatgccattggttgagaacttgtttgaatgtgtttagacctctggatgatcatctcagtttctggctcaactggtgctaagagtgctattggaccttaat

SEQ ID NO: 452137 - DNA, 582 bp, Sorghum bicolor
ggcacgagggaaagatgacccgtgtcgtccttgaggtggatgtgaacggcgaggagctcttcttcgttgataaggacgttcttgcgcgcttctgcggtaggatcaggaggctggtggccgccggcgcagcgacggcgaggcggcatccgagggtggctctgcacggattccccggtggacccgaggtgttcgagatcgtcgcgaggttctgccacactgacggcgggcgcggcgcggcggtgaccgcggccaacgcgtgcgtgctgcggtgcgcggcggagccctcgcgcccggcggcggcggacgcacccgaggccgcgtccacggccgcgccgagcctggtgcggatgacggagaaggcgctcgaggagatgccgcactggccgtggcacaccgtcgtggacgccgtgaagcagtgccagcgcctactcccgctcgcggactccacaggcgcgttcgacgcggccgtggccgcgctggtgtcccagatggccgtacccccgccggcggcaggtgacaccactcccacgggctcctcgtcggagagcactgtgtttcggttcttgtgcgacaccaatagca

SEQ ID NO: 452138 - DNA, 417 bp, Sorghum bicolor
cgtccgcctagccccagagcagccgacactacctgcccctctctcgtccggcggcgttcggcaggatggcggcgtctacggcgaggacggtgaaggatgtcaacccccatgagttcgtcaaggcctactctgcccacctcaagcgctccggcaagatggagctcccagagtgggttgacatcgtgaagactgcgaggttcaaggagctccctccgtatgaccctgactggtactacaccagggctgcatccattgcgaggaagatctacctgaggcaaggcattggtgttggtggcttccagaagatttccggtggccgccagaggaatggctcccgcccaccgcacttctgcaagagcagtggtgccatttcacgcaacatcctgcagcagctgcagaagatgggcattattgatg

SEQ ID NO: 452139 - DNA, 467 bp, Sorghum bicolor
cgtccgaaatcacttatggatagaagtgcttattaactaaagattttgaagatgaagctgatgtctgctggaggtaggcttccttgaaatctaacgtctaaataacctttaagagcataacaacgtgcacgagtggtacatgctaacacgtcaaaaccttgtcatgaaagaattgtgtttctttctttcttccatttcctggcatttgatgctatgatgtgttcctcttgccagagaatggtgtggacaacgcggtaaatttggtgcagatggatgctgtgttcaaattgattggagttctctggatggatgcctatcgagtagtataattcctctctcagctcactgtccagataattagtgctatctgtgactgttgggtaatcagattgtcgagattttactggttggagctgtccggcattgctttcatcttttgtcaatatgcccggtcttcggcagcatgt

SEQ ID NO: 452140 - DNA, 779 bp, Sorghum bicolor
  unsure (1)..(779): unsure at all n locations
cgtccgcccccaactacccccagtctcaggagagaaccttccagaagcacaagaatccaaggccgtcgccttcctcgccgcgggggccgcctgagatcacataaacaatggtgaaggctgttgctgtgcttggtagcagtgagggtgtcaagggcaccatcttcttcacccaagagggagatggccctaccactgtcactggaagtgtctctggcctcaagcctggcctccatgggttccatgtgcatgctcttggtgacaccaccaatggctgcatgtcaactggaccacattacaatcctgcgagcaaggagcatggagcaccagaagatgagaaccgccatgccggtgatcttggaaatgtgacagctggagcagatggtgttgctaacatcagtgttaccgacagccagattccacttactggaccgaactcaatcattggcagagctgttgttgttcatgccgatcctgatgatcttggaaagggtgggcacgagctcagcaagagcactggaaacgctggtggccgtgttgcttgtgggatcattggactccagggctgaaaatgatcgctggattttgggtgcctgagagtgtcgtctttgtcttctgccgtcgccaacagaccagcctgaactttcctagacatcgtgaaataagagtacctgatctatgatcagtgtatttgccattaagcacctgtagcaaccgatgaactaaactgtgttgaactatgctggatcgcctgagtatgtgctacgngggtcggttttgag

SEQ ID NO: 452141 - DNA, 520 bp, Sorghum bicolor
cgtccggatgaactgagagatgatgaggcatacgatgacattgtggaggacatgagggaagaagggcacaaatatggtaaactgcacgagacccatctacttctcttaccctcttgttttaaaagcttacattctgctgttatcattatgattgatacagttactgaaatgttttccctttgtgtttttgtcttttgtgtgtcttttttgtagtcccacataatgccattgcagagtgttttatagtccgaccctatgcaatattggcaatcgggccttaacccacagaagacactatgcttttgagtttgattaatcattatattattagcctcttgtctatatatgtactcactaacacttggacaggtaacttggtgaaagttgtaattccacggcctgaccccagcggtgctcctgttgctggtgttggaaaggtgttcttggaatatgcagatgtggagggctcgaccaaagcaaagacggggatgcatgggcggaaattcgacggaaaccaagt

SEQ ID NO: 452142 - DNA, 615 bp, Sorghum bicolor
acgcgtccggaggtggtgaaggtcatggggaaatcaaaggttctggtgaaggtacatcctgaaggcaaatatgtggtggatctggataagagcattgatatcacaaagatcacaccttcaacaagggttgctcttcggaatgacagttatatgctccatctgattctaccaagcaaagttgatccattggtcaatctcatgaaggttgagaaggttcctgattctacttatgacatgattggaggccttgaccagcaaattaaagagatcaaagaggtcatcgagcttccaatcaaacatccagagctttttgagagccttggaattgcccaaccaaagggtgtcctcctttatggacctccgggcacgggaaagacattgctggcacgtgcggttgctcatcacactgactgcactttcatcagggtgtctggctctgagctggctcagaaatatattggtgagggttcccggatggttcgtgaactatttgttatggccagggaacatgcaccgtccattatatttatggatgaaatagactctatcggatctgctagaatggagtctggaactggcaacggtgatggtgagtgcaacgtaccatgcttgagc

SEQ ID NO: 452143 - DNA, 300 bp, Sorghum bicolor
gctcccatccatttggaaccagattcgactagtctctctgaaggagacagggaagccttgggatatattcttgaagcagcaatagttattgatgacatattctatgaacaagtatggaatagtaacaaaatgcttcgagactggctgaaagcacattctgaatcctcatcattcgataaattgaagtgggcgtatcattccattaataagagtccctggtcctgccttgacgagaataaggcctttctatcgactgcagattctgctgtgaaattactcacagatgccacgaagccagtt

SEQ ID NO: 452144 - DNA, 829 bp, Sorghum bicolor
  unsure (1)..(829): unsure at all n locations
ggaacgtggaacccttgcagccggcagcgtcgcgccgctcccgccccttgccgcctcggctcgtcgccggtggccggcctcgctccatccagcaagctgaccagctcgactgctcgagctcgtccttgacgtcgccgatttgatttctccctttcagcccaacccagcccaaagccgccagatcacgacactccgtccaaccttcggcgccacccaagcaccaatccccttctccgccgcctcttctcttcgtcgccggtgaagatgatagccccagagccagagcagctccctgcagcgccttcaacacgtcgagaagcggatagtgcgggtgctggagcttgcgggagcggtgatggaggagctgggaaactctcagggccctcgcaccgatgcagtcggcgcgcactgccgcgagttcatgatcgctatgaaggaaattcaaacaacgttgcgtgaggaaatcaaaagtgcttgtgaatatcgtccatttgaaaagtgtgattacagcgcaaggattgctaatgagatatgttgtaagaagctggagtatgtaattgagaagttggataccatgcaacagaaccttgaacagagcactgatgatgtgtgagcgagctggctacacagtagtttgggagcaacagatgatcgagcagtacgcagaaggaatgtagaagcattctatcaacctataattgcaggaagctgttgctcaactctgggactgtaactngtggtttgcttgtattccatgttctgtgacagagttcttagtttagctgcctggtgattctcagtagcattgatcttggcctgagtaggatag

SEQ ID NO: 452145 - DNA, 421 bp, Sorghum bicolor
cgtccgggtgtgtgtcagcctatcactgccatttcgcccccgaagaaatcgcgagaggggagcgtgccgagctgagcaggcaggcggtagtggccgagcgaaagcatcctcgatctcgtagcagccgccgccgctcgggtaggaaggaaggagagcaatggagagggcggtgccggttcggaagccgcacaccaacacggccgaccttctctcctggtcggccacgggccctgacgcatctgcctcgccggcggcggcctcgcgccccagcctcaagccggccgcggggattacgccggcgatgttcggcgcgccggtcaccgatcaggaggccgaggatgtgagctagagtgaaagaaaattttgctctggcctcgaagttgaaagagatgagtgggagtgggattttgctgagaagagt

SEQ ID NO: 452146 - DNA, 527 bp, Sorghum bicolor
gcgtccggttggagcaatatctgtctgcacatgttcaccctggactttttgaatcaagtggcaaacagccttgagaaggacagtgtatatcatctagctgagaagaagattccttccatccatggccttacaacaggcctgaagcttgaacagtttatattcgatgctttcacttattccccatccacggcactttttgaggtcatgcgggaggaggaattcgcaccagtaaagaatgccaatggcgcaacatatgacacccctgatagcgcaaagctcatgctactccgcctccatagcagatgggtagtcgccgctggtggcttcttgacgcattctgtgcccttgtatatgacagggcgtcgaagtttctccactttcctcctatgctggagagaacctggaagcaatctgccgtgggcggacattccatgcgccaagtgagatatcattttatgtaggcctgtccatggcagcagctgagcaagagttgtgtaactgtaaaacaaacgaaaggattgaggatg

SEQ ID NO: 452147 - DNA, 776 bp, Sorghum bicolor
cgtccgcgagattctttgcttgcacaggattttttattgattgggatgacaaatgtcaagataacaatgtttctactattctgacatctgcgagcttggttagaaattctgatcctttcgatggtgagaacaaggttattgacggtttgaagattgaagtgaaacatccaaaaggaccactactagaggggtcactaatacattataatctagattataatgtggctctagtcagtgtcaagagactcaagagttatagtgcctgccctcttgcaatttgtaaacgcaatttgatatatgagtcttctaaggtggtgtctgtagggtggtggctttcaaaacgggcaaattaatggcttcaggtgggaaactggttgcctggtcaggctcgcttgattgcaaattgcttatctactccacatgtgaaatcaccaaggctgggattggagggcctcttgttgattttgatgggaattttattggcatgaacttctatgacccgaaattgggcaccccggctgtgtcttgtgatgatattgttgatgtcctagaacgttttaaggaaaaatggactggtggagttgacagtttgtctaatccaaatggtgtgggtggtgttcaagggagatgcagtgttagtctgaactggtggccagtgcctaggccataatggcgtcagccagatgaacctgagaagtcttatttggatgaatatgaacgtggggtcctagacagcggcagcaagttccagtaccttggtggatacatatacattc

SEQ ID NO: 452148 - DNA, 771 bp, Sorghum bicolor
ggcacgaggcgccactgccctccagcccccgccgccgcttcgctcttctcacggccacgccgtccgtcgaggcgaggttaggtcagcatggtgagggtcagggtgctcaatgatgcactcaagtccatgttcaatgctgagaaccgggcgaagaggcaagtcatgatcaggccgtcctccaaggttatcatcaagttcttgacggtcatgcagcgtcatggctacattggtgagttcgaatatgtggatgaccaccgttctgggaagattgtggtggaactgaatggaaggctaaacaaatgtggtgttattagccctcgctttgatgttggcgtgaaggagattgaaggatggactgccaggctgctcccatcccgtcagtttggctacatcgtgttgacaacttctgctggcatcatggaccatgaggaggcccagtaggaagaatggtgggggcaaggttctaggcttcgtctattgaagggagtatggcgagagcactgatgtttccaacaagaactcatctgagcttttgttttttggtctaaatagagtgctttgttaagattgtggaacgtgttgtgtgcttcagaaattgagaaccctgctatgagctatccctgcagttaattattatgacctatatgcctgtcttgtgtttctcgtcttgccatctcagaggaagattagagttccttcttttacttaatgttgttgactatacttgtgtgaagcactgatttcattaagtttgatatctaaaactgagct

SEQ ID NO: 452149 - DNA, 719 bp, Sorghum bicolor
  unsure (1)..(719): unsure at all n locations
cgtccggaatagcaacacagaaagttctggtagtcaccacttggagaggactaaatgctcaaaatcatcaggaaacattgaagaacttgctgttgcagctacatcaggaatggattgtacattatctaaaggaagtcatttgagcatggaggaactccggatgatgcatgttgtgaaatggaggaaagtctaccaacataacagattgtgccattggggtgttaggagatgtcctaaaattcagttgtttcctgagctaaggctacaaaagtcctctgcagctataacttctgatagtatgtcaactccaacaaaagaacagtcatctcagaagagcacaggaagccttgatatcaccaaacttctggatgaactagagataccatctcgttctcagaatagcatatcgtcttcagttttgcttgtgaagaagcttctgcagtttgattaaagttctaggccagcatactatggtacctggagaaagaagagttctacagttagtgcaaggcaaccctttcagagggatgaggaactcaattacgatgtccagagtgatgaagaatgggaagaggacgatcctgatgatcctggtgaaagattgtcttgatttgaggaagatgatgagaaaactatgaatgaacatgattccataattgatgcagaaagaggagctgagaacaagtttgtagtgcccaatgactatctttcanatgatg

SEQ ID NO: 452150 - DNA, 280 bp, Sorghum bicolor
cgtccgcacgcgcgacctcggctacacctacgacgccgagtacgacagggacctgccgtggctgcggcccaagatcacgaagctggtgccgcacggcaaggagagcggcgcggcgtgcgaggtcgtcggcggcggcgccggtgttccctgctcgcgctgaccaagggccaggtcgtggaggtgccggccgtggctgtgccggccagggaggccgggaaggagcagctgctggtgatcgacggcatcgagttcgacccgcaggcgaacaacaagttcgacg

SEQ ID NO: 452151 - DNA, 682 bp, Sorghum bicolor
cgtccggacttgtagtcgaggagctggggagcaagcaagcaagaagagagccgagagagctaagctagcgcgcgatggcgaggtcttccaagatgatgatggcggcggcggctctactggccctggctctggccgtggcgacgaccgccgaggcgaggaacatcaagacgacgacgacggcggcggcggcggagaagaaggcggacaacgacgcggtggtgcagccgcagaccttcccgcccttcgaccgcctcggcggcggcgcgtccccggcgttcggcggcctccccggcaccggcagcagcattcctggcagcagcattcccgggttcagcctgcccgggagcagcggcggcagcagcatgcctgggttcctgcccggcagcggcagcatcggcagcatgcccctcttcggcggcggctccccgttcagcggcttcggcggcatgcccggctcccccaccgccggctccgtccccgagcacgccaacaagccctgaactccgtcagtcgccggcgtggtagtagagtgatgctactatagacgtcgcgtcgcgcgcgtcggcggcggcggcatgcatgctgtggtggtgatggttcctactcatacacagtctggttagctgttactggttagctgttagtaccgagctatggcgtgaggtcattgtgtgttatatag

SEQ ID NO: 452152 - DNA, 556 bp, Sorghum bicolor
caactatctccccctcggctccgatcccttccgcgcccttcccatccctccccctccgcctccgttctcaacccctcctcgctgcctcccgccgcctcctcctccctgtccccaaggcctcctcctgggacgaatccgtcgccgaggagggaggagacacggaggaatccgccgccgctggggacgaggaggacgaggacgagaagccgcggccggagccggtgtcgtcctccgagttccagttcgcggcgccccccgagggctacgtggagcccgcggcgttcgacgagctgcctccggagtccccagaagacggggcggcggcgtacgagtcgctctacgggccggccttcagcggcgagtcgctgctggggaacaacgtctacgaggtcaaggtggtcgaccccatcgacatggaccgggagcagcgccccaacgacgatttcaccgagcgcgtcgtccaggtcaaccgcgtcaccaaggtcgtcaagggaggcaggcagctctcctaccgcgcaattgtcgtcgttggcgacatgaaaggccacgttggtgt

SEQ ID NO: 452153 - DNA, 1200 bp, Sorghum bicolor
cgtccgcccacgcgtccggcgcacggcgcagccgtctgtcagaaaccctaaacttcggcgtcgacgatggcggcggcaccggcaggcggcgccgcgcgggcgctgtcccagcgggagcaggacatccagatgatgctcgccgccgacgtccacctgggcaccaagaactgcgacttccagatggagcgctacgtttacaagcgccgctctgatggtatctacattattaaccttgggaagacctgggagaagctacagttggccgcgagggtcatcgttgcaattgaaaacccccaagatatcatagtgcagtctgctaggccctatggccagagggctgtgctcaagtttgcgcagtacactggtgctcacgccattgccggcaggcacactcctggtacattcaccaaccagttgcaaacctcattcagtgagccacgccttcttatcctcactgaccccaggactgatcatcagcccattaaggagtctgcacttggaaacattcccactattgccttctgcgacactgactcccctatgcgctatgttgatattggcattcctgccaataacaaggggagacagagcattggctgtctgttctggctgcttgccagaatggtcctccagatgcgtggtacaattcttccaggacacaagtgggacatcatggttgaccttttcttctacagagacccagaggaagcaaaggagcaggaggaagaagaggctctggttgctcctgactatggcgcagttgcagaatatactgctccagggactgacaactggggcgctgattggggaactggtgaagctgcagctgcgcctgctggcattccagctgctggtgcagactgggctgctgctccagctcctcctgctgatggtgtctgggatgcagctgcggctcctccagcagccaccggatgggaacaaggcactgcccctgccgcggcacctactggatgggagtaaagagtaaatcagcatggttgatggtttataattgtcgtcatcagaagttgttggtagacactgcttcagtagcagctttgaactttttacgtgctactagatgagaatcaatgttgtgttattgactctgctgagacagcgagtgaaccggtccccccttttttgttatcatgtcaaatggatagctctgttttaagcgtattttgtgaactgtaaagg

SEQ ID NO: 452154 - DNA, 794 bp, Sorghum bicolor
ggcacgaggctcctcctttgcctcccgcccccgccgcgcgtcgccgcgtctcctcccagtccgcgccatggcgtcggggaacccctacgccgccgagctggccgccgccaagaaggccgtcaccctcgccgcccgcctctgcaagacagtgcaacaggacattgtgcattctggtgttcaggccaaggcagacaaaagtcctgtcacggtggctgattatggatctcaaatattggtcagtcttgccttaaagatggatgtagcatctggaccattttctttggttgctgaagaggactcggaagaattgagaaaagaaggtgctgaagaaattttggaagaaattactgatcttgtgaatgaaaccatcgttgatgatggttcatataacatttcatttacaaaggaaggtatactctctgcaattgatgatgggaagtctgagggaggtccatctggacgacactgggtgcttgatccgattgatggtactaaaggtttcttgaggggagaccaatatgccattgcattggctctgcttgatgaaggtaaagtcgttttgggtgtattggcttgtccaaatcttccattgtcatcagtaaacaacctcaatggtaactcttcgggagatcaagtcggtgccctgttttctgctacaattggttgtgggactgaagtggagtccctatatggctctccaccacaaaagattagtgtttgctccattgacgatcctgtcaatgcgtcattttttgaatccctataaagtgcacactccatgcatgatttgactg

SEQ ID NO: 452155 - DNA, 1377 bp, Sorghum bicolor
cgtccgggatggaacaattgagttaaacagaggtcctagatctggccgtttcaagaaccagaaattgtatggtcatactgtcactattgctgtgaaagggcagagccttccttctggtgaaagcaagaatgatagtgccgtgcccgatagagcacagttcaatagagacgacttccctgttcagtatgatgctgcaaagttcttcgtcatcaagtcgtacagcgaggatgacatccacaagagtgtaaaatacaatgtgtgggcaagcacaaccaatggaaacaagaagcttgatgctgcttatcaagaagctcagtcaaagggctctgcatgccctatattcttgtttttctcagtgaatacaagtggtcagtttgttggtgttgctgaaatgactggtgctgttgattttgagaaaactctggagtattggcagcaggacaagtggaatggttccttctctgttaagtggcatattgtcaaggacgtgcctaacaatattctcaagcacatcatcctagagaacaatgagaacaagcctgtcacgaatagccgtgacacccaggagatacaccttgaacaaggccttcagatgctcaagatcttcaaggatcatgtcagcaagacatccatcctggatgactttaccttctatgagagccgccagaaattgatgcaggataagaggtcgaaacagcagcaggtccaaaagcaggtctgggacagtaggacccccatttctgtcaccagcgagcaacatcaggaagctgctaatgggaagcccaatccgtctgatgtaccaaatggtgtcactgcagaggtgaaggcggtgaaggctcctgcagagaaacccgtcctcgccaatggagtcaccaacggagtaaccaccactcccgctgtttcctatgcagctaaggtggcccaaacagcaacagggaaacccatcctcgccaatggagtcgccaagaccggttagctcgaccgccaccaatgcttccatagctagccgcaagcgaggttggatgtcctgacaactcgactgaggcgcaagggaaaatggtgtgaccaaccaaggcaggctgtggaactggcagcatggcccgaagagcgttgctgctccatctcatcgctactggagagcagttggctagttagcgtttttcctagtttctcttttcgctgtgttctccgtttgaagactcttttctacggtagtatcagaatgccagagacccgtggctggacaaaaggatttttgcgaagcccgtctggttggttgtgtgttgcgtcgtcggggtcgagtataccctgttctgttcgtcgttatattgagtggatctgaatgaaagtgggttagattggagcttttcttctttt

SEQ ID NO: 452156 - DNA, 836 bp, Sorghum bicolor
cgtccggctcataatctgcttgatcctactcaaatgcaagttccttaccaacaatgccacaataacggtgtcttgcatggtggtgttaattaccctggaaaccgtctccacttaggtccgcgaattccagttctcttctccagtcctgaacgtacttttggacctccacagcatccattcctggcaaatccagttaaccaccgcaacataaggattctaccacccgagcatgccacaataatggatttttcgagattgtatgaagtgtcaaatactgtagatgagcatagagatatgcgtctagacatagacagcatgacgtatgaggagcttttagcattagaagagcagattggagatgtcaatactggcctgacaaaaagtcacattgtagataaattgaggactagcctatatgttccaggaacatcaagcatgcctgatcagccatctaaatcttctctagagaatgatgcttgcataatatgccaggaggagtaccaggctagagactgcgttggcacccttgactgtggtcacaggtaccacgcagagtgcgtgaagcagtggctgatggtgaagaacttgtgccccatctgcaagacaacagcattgtctgccaacagaagacaaggaaaatgagcaggaatgaaataagcctgttacttatttgcttcgacaaacgttcagctcaattttgtacataagatgtggtagacaatggtgctacctgtatttgttaactttgttgtgaccgggagtacccagcttcctaaaactgtacagccataacatttattatttttcttcaaatgtagaatatttttaaatcaaaa

SEQ ID NO: 452157 - DNA, 1253 bp, Sorghum bicolor
  unsure (1)..(1253): unsure at all n locations
cgtccgcggacgcgtgggcgtttccgcacgctccacaggggatcctctgcgccaccgcaaccgtgtaaccccggccgtgccgccgccggcgatcccgatccgccgacccgacccgtcccgtccccccgctcgcagccatgtcgccgtcggagccgacgcgggaggagagcgtgtacatggccaagctggcggagcaggcggagcggtacgaggagatggtcgagttcatggagcgcgtggcgcgctccgcgggcggcgcggggggcggggaggagctctccgtggaggagcgcaacctgctgtccgtcgcctacaagaacgtcatcggcgcccgcagggcctcgtggcggatcatctcctccatcgagcagaaggaggagggccgcgggaaccgaggcgcacgccgctncatccgcgcctaccgctccaagatcgaggccgagctcgcccgcatctgcgacggcatcctcgcgctgctcgactcccacctcgtcccgtccgccggcgccgccgagtccaaggtcttctacctcaagatgaagggcgactaccacaggtaccttgctgagttcaagtcaggtgcggagaggaaggatgctgcggagagcaccatgaatgcttacaaagctgctcaggatattgctcttgctgatttggcaccaacccaccccatcaggcttgggctggcactcaacttctcagtgttctactatgagattctgaactcccctgatcgcgcttgcaaccttgcaaagcaggcttttgatgaggcaatctctgagctagacagcctgggagaggagtcctacaaggacagcactctgatcatgcagctcctgcgtgacaacttgaccctatggacttcggacaccaacgaggatggcggcgacgagatcaaggaagctgctgccccgaaagagtccacagagggtcagtaagatggactcgatctcccgacctgatgcatttgctgatgttgggagaggggtgaccaggaccgctgtgcttgaattctgatagcttatcttctagtataccttgttgttgtcttccgtcatcacacgcaccggtgtatgcatgcgatggagctgctgccattgctgctgtttttaattaagcactctagatgtcgtcatgccgcgcgccttggtgtgttcggttttttcaagtcgataaaatgatggctggatgctggttttcgtgctccaagccagccgccaccaaggaaaaaagacctgctcatcttgtgttgc

SEQ ID NO: 452158 - DNA, 695 bp, Sorghum bicolor
cgtccggcatcctctatataagccaacaaaagaaaagattgtccctcctagagatttgttatgccaagaactgcaaggcaaccagaactactgtgaaacctgcaagcagtgtgactatgaaattgaatatgcagaccaaagctcctctatgggtgtccttgcaagggatgatatgcatctgattgcaaccaatggtggaagggaaaaactagattttgtctttgggtgtgcatatgatcagcaaggccagcttttgtcctcaccagcaaagaccgatgggatccttggacttagcaacgcagcgataagccttcccagtcagctggctagtcacgggattatttccaacatttttggccattgtatcacgagagagcaaggtggtggaggatatatgtttctgggagatgattatgtacctagatggggaataacatggacttctatttcgaagtggtccagataacttatatcacacagaagcccaccatgtaaaatatggagatcagcaactccggatgcgtgaacaggcaggaaacactgttcaagtaatttttgacagtggaagctcctatacgtacctcccagatgaaatatatgaaaaccttgttgcagcaatcaaatatgcgtctccgggctttgtccaagacagctcagatcggacattacctttatgctggaaagctgatttccct

SEQ ID NO: 452159 - DNA, 571 bp, Sorghum bicolor
cgtccgctttccccaactcgctcgattttggcttcccccgcaccgccccgcgtcggcgccgtcggtcctggccatctccggcggctgatcactctcagtggcatggactgctccaagaacgagggcgcggtggcagtggccgccctccccgacgaccccctggtggagatcctctcccgcgtccctgcaaagtccgtctgccggttcaagtgcgtctccaaggcctggcgcgacctcattgcggaccctcaccaccggaagaagctcccccaagcaatgcaaggactcttcttcatggtgccagaggaccttatcgatgtcagtttcagtttcatcgatctgacagcgaggtccgtgcctccagacatcgaccctgccttctccttcctgaaagaacggcctggattccagttccacaaccttggcttcctggactcctgcaacggtcttatcctcttcaagaaccaccaggagccgccgtattctgatgcagtgggctatgttgtctgcaacccgaccactaagagatgggcagccgtgccgacttgtggctctctggatctgacaacct

SEQ ID NO: 452160 - DNA, 862 bp, Sorghum bicolor
cgtccgcttagggaagctgtgaggttgccccctggagaggatatcaatgaatggcttgctgtgaatactgtggatttctttaacgaagttgatctgctgtatggcacactcacagaattctgcacacctgagagctgcccgacaatgacagctggcccaaagtacgagtacagatgggctgatggtgtgcagataaagaaacccatagaggtatcagcaccaaaatatgtggagtatctgatggattggattgaaggccagcttgacgatgaatccatatttcctcaaaaacttggcacgccatttccacaaaacttcaaggaagtagtgaagacaatattcaagcgcttgtttcgtgtctatgcccacatctaccactctcatttccagaagattgttagccttaaagaggaggcccatctcaatacctgtttcaagcacttcattctgtttacaaatgagtttggcctgattgacaagaaggagctggctccactccaggagctcatcgaatccatcatcgttccttactgataatacactactaaacatggatgcagagctctcaacgctgatggctgtgaaatttagtctattttcgacaatacttcactggctcattgcatagagcttcttgatccagttattagacataaaaggacatgctatctgtgcgtgtacctgtgtgtttcttcctgatcctgtattggcctgtgtgtttcttcctgatcctgtattggccatgtaagtgtgcctgttatcagctatagaacggtggtgatgtactgcagaaagaaaaacacaagaaagctgtgttggattaatgtatgtatgcagcgtttgtttcctcatggtttatgtt

SEQ ID NO: 452161 - DNA, 708 bp, Sorghum bicolor
cgtccgttcctcctccaacccccaactccgacgagagccccaggatttctgagccaaatcctttttgtgacccaatgggagaggcctcgccgtcgatcgccaaggacgtcaccgagttgatcgggaacacgccgctggtgtacctcaacaaggtcaccgatggctgcgtcggccgcgtcgccgccaagctcgagtccatggagccctgctccagcgtcaaggataggattggctacagcatgatcacagacgcagaggagaaggggctgatcattccaggcgtgagtgttctgattgaaccaactagtggcaacacaggcattggactagcctttatggctgctgccaagggctacaaacttatactcacaatgcctgcctccatgagcatggagaggaggatcatcttgaaggctttcggtgctgaacttgtccttactgacccactcctgggaatgaaaggagctgtcaaaaaggcggaagagattcaagcaaagacacccaactcatacatccttcaacaatttgaaaatccagctaacccaaagattcactatgagactacagggccagaaatctggaaagctacaagccggataaattgatgcccttgtatctggtatcgggacaggaggtaccataactggtactgggcgatacctcagagagcaaaatcctaatgtcaagctctatggtgtggagccagtg

SEQ ID NO: 452162 - DNA, 1195 bp, Sorghum bicolor
cgtccgatcgctgccgtgacttgtgggatcggattttggcgcagggtttagtttaggggaggaatggcgaccaagaagagcgtgggcaccctgacggaggcggatctgaaggggaagaaggtgttcctccgcgccgacctcaacgtcccgctcgacgacgcccagaagatcaccgatgacacccgcatccgcgcctccgtccccaccatcaagttcctcctcgagaagggcgccaaggtcatcctcgctagccacctgggtcgtccaaaaggtgtcaccccaaagtacagcttgaagcctcttgttccacgcttgtctgagctccttggagttgaagttgtgatggccaatgattgcattggtgaggaagttgagaagttggttgctgctttgccagaaggtggagttcttctcctagagaatgttagattctacaaggaggaagagaagaacgagcccgagtttgctaagaagctagcatctgttgctgacctttatgtcaatgatgcttttggcacggcacacagagctcatgcttcaactgaaggagttaccaagtatttgaagcctgctgttgctggcttcctcatgcagaaggaacttgactatcttgttggagctgttgccaacccaaagaagccttttgccgccattgttggtggatccaaggtctcaactaagattggggtcatcgagtctctgctggcgaaggttgatatcctcatccttggtggtggtatgatctacacattttacaaggcacagggatattctgttggaaaatctcttgtggaagaagacaaacttgagcttgcaacttcccttattgagaaggcgaaggccaaagggggtttctcttttgcttcccactgatattgttgtagcagacaagtttgcagctgatgctgagagcaagattgttcctgccactgctatccctgatgactggatgggtcttgatgttggccctgatgccaccaaaacattcaatgaagcattggacaccacccagactattatttggaacggtcccatgggagtgtttgagttcccgaagtttgcagctggcactgaggcgattgccaagaagctggctgagcttacaaccacaaatggtgtcaccaccatcatcggcgggggtgattctggtgcttgctgttgagaaggctgggcttgccgacaagatgagccacat

SEQ ID NO: 452163 - DNA, 181 bp, Sorghum bicolor
cgtccgggccccgcccacctcctcactcgtcgtcttctgcttcatcaactgctataaagaacgggagggcacgggcaaggcagctccaactcctatgcaatcgcagtgtggacgcgtgagagagagacagagactcacttgccggcgaccgacttggggaaggaagcagcaacaaaagatg

SEQ ID NO: 452164 - DNA, 471 bp, Sorghum bicolor
cctctaacaaattggcctaattatgaatcatgtctaccatgtatacacttgattttattcttcgagccaacatcagggttgagtaaaacccactccattttgcttgaggagctaaaggggatttgtcacatggtgaatcagaacctcaagctcaggaggcagtgcaagcaggcaaaaaagctctatgaattggctattcgtctcgaatttggatttcttgaagttgcaacctacctgatctgcttgttgctaaaggacggcattgatgccttggtttattggagttgcactggccctagctgatctgcgtattgctaaacgatgacattaatgcctgctgctctacatcacacgtttcgcattgaaaaacttattgttgtattagtataaactagatattttggtgaattatttagctgtatgcataatttgattctgaacacagtaagaaacatgattttagcttgaggc

SEQ ID NO: 452165 - DNA, 805 bp, Sorghum bicolor
  unsure (1)..(805): unsure at all n locations
cgtccgctcaagatgatgagcttgatgaagaagacttcaaggaggaacagaactctgtagcgcgtctaattcacatgttgcacaatgatgatcctgaagagatgctgaagatcttatgtactgtacagaagcatatacttcagggaggccccaagcgtttaactttcactgtgccttcgttagtattctctgctcttaagctggtcaggcgattacaaggtcaagatggagatgtcactggggaggatgttcctgcaactccaaagaaaatattccagatattgcatcagactattgaagcactttcttgtgttccttccccagagttagctctgagactatatttgcagtgtgcagaggctgccaatgactgtgatttggaaccagttgcttatgagttctttactcaagcgttcatcttatatgaagaagaaattgcggattcaaaggctcagatcactgcaattcacctgataattgggacccttcagcggatgaatatatttggggtggaaaatagagacaccctcactcacaagacaacagggtactcagcaaaacttctcaagaagcctgatcaatgccgagcagtctatgcgtgttcacatcttttctggactgatgaccaagatgggataatggatggtgaaagggttctcctttgtttgaagcgtgccttgagaatcgcaaatgctgctcaacagatggctagcgctacaaggggaagcagtggatccgtaaccctatntattgaaattntgaacaagtacttgtacttctttgagaaaggcattccacagatcac

SEQ ID NO: 452166 - DNA, 742 bp, Sorghum bicolor
taactggcgcgacatctggaggttacagtgcatgctagaaaggaatatgacgtaaaggtaattaaattcacgtaacttcgatgaactcgttgtcaaaagcaaggacctttggattgtggaattctttgcgccatggtgtgggcactgcaagaaattggcacctgaatggaaaaaggctgcaaagaacttgaagggacaagtgaagctaggccatgttgattgtgatgctgaaaagtccttgatgagcaagtacaaggtggaaggttttccaactattttggtatttggtgctgataaggagagcccattcctctaccagggggctagagtttcatctgccattgagtcctttgcattggagcagttggaagccaactctggcccagctgaagtttctgagttgactggaccggatgtcatggaagagaagtgtgcttctgctgccatttgttttgtatcattccttccagacatccttgattcaaaggcagaaggaagaaacaagtaccttgagcttctgctctctgttgctgaaaagtttaaaaagagtccatacagttttgtctggacagctgctggcaagcaaatcttgagaaccaggttggagtgggcggttacggctatccagccatggtagctctcaacgtgaaaaaaggtgcatacactccactccgtagtgccttccagcgcgacgaaatcatcgagtttgtgaaagaagcagggcgcggtggaaagggaaatc

SEQ ID NO: 452167 - DNA, 653 bp, Sorghum bicolor
gtcgaccacgcgtgcggcaggtcgaatggcaagacatctggaggttcaagtgagaaaagtgaaccaagtgcatcactagaattaaatccacgtaacttcggtgaactgcgtgtcaaaagcaaggacctggggattgcggaattctttgcgccatggtgtgggcactggaagaaattggcacctgaatggaaaaaggctgcaaagaacttgaagggacaagtgaagctaggccatgttgattgtgatgctgaaaagtccttgatgagcaagtacaaggtggaaggtttgccaactattgtggggtttggtgctgagaaggagagcccattcctgtaccagggggctagagtttcatctgccattgagtcctttgcattggagcagttggaagccaactctggcccagctgaagtttctgagttgactggaccggatgtcatggaagagaagtgtgcttctgctgccatttgttttgtatcattccttccagacatccttgattcaaaggcatcgctgccttgtacgataaactccttgtttcttcagagctctggcctcttggggagaagctgagggcaaattatgaagagaccaaacgtcttctcccttaggttgctggacaacaggatcttcttggaggggatttatacctg

SEQ ID NO: 452168 - DNA, 551 bp, Sorghum bicolor
ccacgcgtccgcgctcacccttttggtacgactctgcttgtctggtcttccctccctttcctgcagtttactactttcctctgatccccgcagccgcacggcgaataaccctagcaagcaaaccaccgtccaccggaggagcggcgcttgcgcgggcggagccatggcggacgaagattacaacgacgtcaacatgggctacgaggacgagcccgaaccacctgagattgaggcaggggatgaagacgagcttgagaacatcgaagatgcccctgatgaaatcatacgtggagagggtgaagagaaagagcaggaaaagaccaagcgcgagcgcaaaacatcgaaatacatgaccaagtatgaacgtgcgcgcatcttgggtactcgagccttgcagataagcatgaatgctccagtcatggttgagcttgagggagaaactgaccctcttgagattgcgatgaaggagctgagagcacgcaagatacccttcacgatcagacggtacctacctgatggaagctatgaaaactggggagtagacgagctca

SEQ ID NO: 452169 - DNA, 744 bp, Sorghum bicolor
  unsure (1)..(744): unsure at all n locations
cgtccgcccacgcgtccgctctcttgctgcctggtccgtggccatggcgtcgtcgtccatgctctccgccaccaccgtgccactccagggggccgccggcctgtccgagttctccgggctcaggagctccgcgtcgctgccgatgcgccggaatgccacctccgacgacttcatgtccgccgtctccttcaggacccacgcggtcggcacgagcggcggctcgaggcgggcgccgacggaggcgaagctgaaggtggcgatcaacgggttcggccggatcgggcgcaacttcctgcggtgctggcacggccgcggcgacgcctcaccactggaagtcatcgccatcaacgacacgggaggcgtcaagcaggcgtcgcacctgcttaagtacgactccacgctgggcatcttcgacgccgacgtcaagcccgtcggcgacaacgccatctccgtcgacggcaaggtcatcaaggtcgtgtcggaccgcaaccccagcaacctgccgtggggcgagatgggcatcgacctcgtcatcgagggcacgggcgtcttcgtcgaccgcgagggcgccgggaagcacatccaggccggggccaagaaggtgctcatcacggcgcccggcaagggcgacatccccacctacgtcgtcggcgtcaatgccgaccagtacgaccccgacgagcccatcataagcaacgccttctgcaccaacaaactgctngcgccggtcgtcaaggtgctcga

SEQ ID NO: 452170 - DNA, 836 bp, Sorghum bicolor
cgtccggcttcatcatcttgttacacattgttcaaaaccataaatgaggccaagtttgggttgtggcaaactttggcaagtaaagccaaggaagttctcaatggggatggcttggcgcctaagtttgaggacttagggaataaccggtgcatccagaaaatatcaggtttcttttcttgtaatttcaggcccgtaactctcgttgttcatttgaaaaccaccggaagacaggagatgtggcatcacgagccagacctttgatcatttgaaaaccactgaggctctttctgtttctatcaaccagcttagtgcatggaagaataaaaaatgctttggaagaaggtgtcacaattgtggatagttagacatccagtttcattgagttgaggaaacaaagaaaattcaaattagaaggaaacctgccagttcgagttctcatatatatgccgaattcagcagtagatacacataaaccctcgctcctgatctctcaccatgaacctgcatctgcagcccaggagactggtttgtacgcttctcgtgacaacaggttgctaatgtaatggctgctaaagcaaaacttctactctatgagcaaaaatctattgaatcgatccagattttgagaagcagagatgtgctcagctagaagtactagaagcaaagaagaaaggggacaaaaccgaagagtgatttccatgcaactggagacattgctgtcccatgaatcaaggctggcacaggaaaacttaacataatgcagtgaaaaaccggtcctacgtgagacagtacatttttatcaattcaccacccaggacaatgccttattggatgat

SEQ ID NO: 452171 - DNA, 738 bp, Sorghum bicolor
tttgaggacttagggaataaccggtgcatccagaaaatatcaggtgaggcagcaagtatatctgaatatctgaacatattggcagtaacaaatgaacttttcgtgtatggcattgtctctctcttcattaagattgttccaggctttcttttcttgtaatttcaggcccgtaactctcgttgttcatttgaaaaccaccggaagacaggagatgtggcatcacgagccagacctttgatcatttgaaaaccactgaggctctttctgtttctatcaaccagcttagtgcatggaagaataaaaaatgctttggaagaaggtgtcacaattgtggatagttagacatccagtatcattgagttgaggaaacaaagaaaattcaaattagaaggaaacctgccagttcgagttctcatatatatgccgaattcagcagtagatacacataaaccctcgctcctgatctctcaccatgaacctgcatctgcagcccaggagactggtttgtacgcttctcgtgacaacagcatttcaaaatataagcattgctcctgcctgattcgtttgggaaaaaaacaaaaacaaaaaagctaagcattgtgaccatcagaatagcagagttgctaatgtaatggctgctaaagcaaaacttctactctatgagcaaaaatctattgaatcgatccagattttgagaagcaagaatgtgctcagcctgaagtactagaagcaaagaag

SEQ ID NO: 452172 - DNA, 561 bp, Sorghum bicolor
  unsure (1)..(561): unsure at all n locations
cgtccggagcaacaagcctagttcaaaagtgcagtcaagagcagagtctcgttcaaaggctaaggttcccaaagatgaaaaanagagcggcgatgacnatggggatgaggaggcggaggagcacgacaacaccctgtgtggaacctgcggaaccaatgacggcaaggaccagttctggatctgctgcgataactgcgagaagtggtaccatgggaagtgcgtcaagatcacacctgcccgagctgagcacatcaagcagtacaagtgcccagactgcaccaacaagagggccagggcatgagcgacgagcatcccatcggcgaccttgctaggaaggaagaaagcaccctcctggcgtcaaagatccctagatatggcgtagctccctagtctgtaagcctgcattttcattcatggttattattatatctgttcattagctgttcgacctagcagtgtcttaaaacgtgacatgtctcctgtgctgagcgttgacatgggccctcctccctctagtctgtaaacgctgtcactgaaggtacctctcaactgaccatttct

SEQ ID NO: 452173 - DNA, 911 bp, Sorghum bicolor
ggcacgaggaaggaatccccgatggctcatcgcgttctcctcctcctttctctcgcggcggccgtcgcggtagccgccgccgtcgacacggaggatccgctgatccggcaggtggttcccggcggagatgacaacgagctggagctgaacgcggagtcccacttcctgagctttgtgcagcggttcggcaagtcctacaaggacgccgaagagcacgcgtaccggctgtccatcttcaaggccaacctgcgccgcgcgcgccggcaccagctgctggacccgtcggcggagcacggcgtcactaagttctccgacctgacgccggccgagttccgccggacctacctcggcctccgtaagtcacggcgcgcgctcctcagagagctcgggaagtcggcgaacgaggcgcctgtgctccccaccgatggcctgcccgacgacttcgattggagggaccacggcgccgtcacccccgtcaagaaccagggttcgtgcggctcgtgctggtcgttcagcacgtcgggagcgctggagggtgcgcactacctcgcaactggcaagctggaggtgctttccgagcagcagatggtcgactgtgaccacgtgtgtgatacatcagaacctgattcatgtgattctgggtgcaatggtgggctgatgacgaatgccttcagttatctccagaaggctggtggccttgagagtgagaaggattacccttacactgggagtgatgataaatgcaagtttgacaagtccaagattgttgcttcagttcagaacttcagtgttgtgtctgttgatgagggtcaaattgctgctaacctcattaaacatgggcccactgccaatcggcatcaatgctgcctacatgcagacatacatcggaggcgtgtcatgtccatacatct

SEQ ID NO: 452174 - DNA, 509 bp, Sorghum bicolor
  unsure (1)..(509): unsure at all n locations
cgtgcgtgtggaaccccagccaggtggtgttcatggtcgacgacacccccatccgcgtctacgagaaccgccagaacgccacggtgcacggcgcgcaccaccgcagcaacaacgccaccaacgccagcacatccaccgcgtcgccgccgccgttcccggggccgcagccgatggccgtgtacagctccatctggaacgcggacgactgggcgacgcatggcgggcgcgtgaagacggactggtcgcacgcgccgttcgaggccacgttccgggaggtgcgcgtggacggctgcgcctgggcggccaacgccaccgacggcgaacgcccgggaggtcccgcggtgcagcgagacgtcgtggggaaaagaaggccggtactggtggaaggagaaggagagtgtcngagctgtctgtgcaccagagccaccaacctcgtgtggcgccgccaccactgttacacttctggtgcaccgacgttcccttagcgctgatgcccgccgtgtatctac

SEQ ID NO: 452175 - DNA, 881 bp, Sorghum bicolor
  unsure (1)..(881): unsure at all n locations
agtccggccgaatccggtcgcccaccgtcgcgaccgtggtctgagagtgannnnnnnttgaagtgaagtgggataaggagagggggtgctcgtctgctcgtccgcagcaacaacgccaccaacgccagcacatccaccgcgtcgccgccgccgttcccggggccgcagccgatggccgtgtacagctccatctggaacgcggacgactgggcgacgcagggcgggcgcgtgaagacggactggtcgcacgcgccgttcgaggccacgttccgggaggtgcgcgtggacggctgcgcctgggcggccaacgccaccgacggcgacgccggggaggtccggcggtgcagcgagacgtcgtggggaaaagaaggccggtactggtggaaggagaaggagatgtcggagctgtctgtgcaccagagccaccagctcgtgtgggcgcgcgcgcaccacctcgtctacgactactgcgtcgacaccgaccgcttccccgttcagccgcctgagtgcgccggccgctgatcatcctcaccaacgccggcggcgttgctcttgctccatcggtggtggtagcttactgctagctagctagtctttggacacccgtcgatgcggcgcatgcatcgattggtatggaatggttggaactgctggtttccctgggggttggttcgtgttcgtgcgtcgtttgcagcaatggtgcctgtctgtcagactgtagtttcgtttcggctttgcgaggtcgcattgttggcgaccttgtgtggtgaactggtaatcttgtggaggttgtcttttgtaaaaaaaaaagtgaaatgggatgatgaatgagccacgctacgctccgtatcagggatttggcactcccttccttctgaaaa

SEQ ID NO: 452176 - DNA, 446 bp, Sorghum bicolor
cgtccgcagaaatgtatgctcttattcaggaaatcaatatccttcacaacaataatgttccggtggctgagatgtcatcacaactgtctccatgggcagctgctctgttccagttcttgccacccttcatcagaagagagctgctgctccaccaagaatcagataactctgcacagttgtcccagattgacacggagcaactgttagcccatctagtagaaacagaaatgataaagagaacaaaagaaggaagatacaagggaaggaagttcacttcactttgtcatttctttggatatcacgctcgaggatctataccggcaaattttgactgtgactatgcttatgctcttggacgtatctccctgcatatgatcacagttggattgactgggtacatggcaactgtggctaacctgaaagaccctgttgaccaatggagatgt

SEQ ID NO: 452177 - DNA, 432 bp, Sorghum bicolor
cgtccgcggacgcgtgggtcggacgcgtggggggaagcttgcacctaacgaatttcaagggggaactctcagtatctcgaatcttggaatgggccctgggggccatttctgtgcaatcattaaccctccacagtctggcattctcgcagtcggtagaggaaacaaggttgttgaacctggtgtggacagcgatggaacagagatggctgctgcggttacaaagatgagcttgacactatctgctgaccatcgtgtctctgatgggcaagtaggaggcatgttcttcacggagctggcgctgaattcagtgacattaggagactgctattgtaaatgaaaggaggcaaatacgttgtttgaagaattctttgggggcgaaaaccgctcaagagaacaattagatgcaacgcgagctctgctggcttatcgtta

SEQ ID NO: 452178 - DNA, 529 bp, Sorghum bicolor
cgtcgcgcggccacagcacaaatcacaaccagctccctgacaagaacccaaccatggcttctcccaagatgctccccctcctcctgctggccagctcgctcctcctgagctgcggcctcctggtgtccgccgactacgctcccatgaccctgaccgtggtgaacaactgcccctacccggtgtggccgggcatccaggccaactccggccacgacgtcctggagggcggcggcttcttcctcccggcgctctcccacaagtcgttcccggcgccggcgcacccctggtcgggccgcatctgggcgcgcacgggctgcaccggcgccggcgcgcagctccactgcgccacggtcgactgcggcgggcggctgcagtgcggcgggctcggcggcgcggcgcccgcgacgctgacgcaggtgaacctgcaccacggcatcgaccagacctcgtacggcgtgtgcgtgctggacggcttcaacgtaggcctggccgagactccgcactagggccgatgctactgcccttttct

SEQ ID NO: 452179 - DNA, 478 bp, Sorghum bicolor
cgtccgaagctatccaggtgcccatattggaccagagccaacaacagacagatttgtagttgtcatgtcaggacctgatgaaaggactattcctggaaatactattgctgttcaagctgacatgccttttagtggtcttacaacatttgggactgcatttttgtccaagtttgagtgctctcagatgcgacatccactgctagagcatatcacatttgttgacacacctggtgttctttctggtgagaagcaacgcacgcaacgcagctatgatttcactggcgtgacatcatggtttgcttgcgaaatgtgatcttattcttcttctgtttgatcctcataagcttgatatcagcgatgagttcaaacgtgtcattggatcattacgtggacatgatgacaaaaattcgtgtagttttgaacaagggcagatcaagtagacactcaacagcttatgagagtttatgggggcattgat

SEQ ID NO: 452180 - DNA, 746 bp, Sorghum bicolor
cgtccgaaaaaggggggcaagcaaagaagaaaccacggacggagcgggctccgagcgtctctcatcctcccgtctataaattcccttccttttcttcctccatatatagggggcgccatccaagccaagaagagggaagagcaccaaggacttcccggcgcccgttcaggatccacatccttcccgagcgagttcttggttgacctcttcctcttcgaccacctcctaggctcttggtgtagcttgccactctcaccaatcaagttttcatgtctgatctcgacgttcagatcccaactgccttcgatccctttgctgaggccaatgctggggactctggtgcggcagcaggatcaaaggactacgttcatgtacgcatccagcagcgtaatggtcgcaagagtctgactactgtccagggattgaagaaggagttcagctacagcaagatcctcaaagatctcaagaaagagttttgctgcaatggtacagtggtccaggacccagaacttggacaggtcattcaactccagggtgatcagaggaagaacgtctctaatttccttgtccaggccggcattgtgaagaaggaacacatcaagattcatggtttctgagcgaccgccgggtccatagcaagccctgcatgcaaagcagctatatatctgaggtggagcatatctattctggctgtgtacaagcaggcctactactacgcctgcgggttttcctatactacacataac

SEQ ID NO: 452181 - DNA, 563 bp, Sorghum bicolor
  unsure (1)..(563): unsure at all n locations
cgtccgcgcgcgtctctggttcgctcgtgccgttgcgctgcggctcgcaagcctctctctcctncacccgcacacgccgnccccgcgggagcgaaaccctagctagggttctgcgccgccgccttcgatccagacgcgggcacccttctccgcgagcccgccatggacgccgggcgcaagcggaccgcgccggaggcgggcgccaacggcgcgggcggcccgaagcgcgcgagagaatcggagacaactcaaatgggtgtaggaagcaaatccaagccgtgcaccaaatttttcagcacggctggttgtccctttggtgcaagttgccattttctccataacttcccgggtggctaccaggcggtttcaaagatgaccaacttaggtggaccgcctgttccggctccaccaggaagaatgcctattgtgggaccctgggttgtgggccacctttaacctgctgtgaagactcgcatgtgtaacaagtacaacactgcagaaggatgtaaatgggggagcaagtgccactttgctcatggagaaagggagcttggaaagcccct

SEQ ID NO: 452182 - DNA, 599 bp, Sorghum bicolor
cgtccgcctccgccgccgcttcgttcgtgtgcaggggagaagagaggaaatggcggcgaccgagggcgtgctcctggggatgggcaaccccctgctcgacatctccgccgtcgtcgacgacgccttcctggcaaagtatgacatcaagctgaacaatgccattctcgctgaggagaagcacttgcctatgtatgatgaattggctagcaagagcaatgttgaatatatggctggaggagccacccaaaactctatcagggttgcccaatggatgcttcaaactcctggtgcaacaagttacatgggatgcatcggaaaggacaagtttggtgaggagatgaagaaaaatgctcaagctgcaggagttactgctcattactacgaggatgagactgctcctactggcacatgtgctgtatgtgttgttggtggtgaaaggtcattgattgcaaatctgtcggcggcaaactgttacaaatctgagcatctaaagcaaccagagaactgggcactagttgagaaggcaaaatacatctacattgctggatttttccttacgggtcgcctgattctatccaactagttgctgagcatgctgc

SEQ ID NO: 452183 - DNA, 454 bp, Sorghum bicolor
  unsure (1)..(454): unsure at all n locations
cgtggcgcccacgcctgctagctccgatccctcgacatggcggccaccactactaccatccttctcctcctggtcgccgccaccgccgcctcggcggccgacctctccgtgtaccacaacgtgcacccgccgtccccgtccccgctcgagtccatcatcgcgctcgcccgcgccgacgacgcgcggctcctcttcctctcatccaaggcggcgtcgtcgtccggcggcgtcacctccgctcccgtcgcctccgggcagaccccgccctcgtacgtcgtccgcgcggggctgggcaccccggtgcagcagctcctcctggcgctcgacaccagcgccgacgccacctggtcgcactgcgcccgtgcgacacgtgccccgccggcagccgcttcatcctgcagctgctctcgtacgcctcccctccgtgcgcctncgactggtgcccgtcttcgac

SEQ ID NO: 452184 - DNA, 800 bp, Sorghum bicolor
cgtccggtggaagaaattgatgcccagcgtgtccttggttacgcattattcaaagatgggaggaacacaaagcttgcttatcccttggagaagttccattctgatgttgctggtaggagctttcacaatgggaggtttatacagaggatgcgtcaaaaagctgcgtctttgcccaatgtccaattagagcaaggaactgttacatcacttcttgaagaaaatggtactgttaaaggtgttcaatacaaaaccaagtcaggtgaagaactaaaagcttatgctcccctgacgattgtatgtgatggttgcttttcaaatctacgacgcgccctttgctctccaaaggttgatgttccatcatgttttgttgggcggtattggagaattgccaacttccacatccaaaccatggccatgttatcttggccaatccttcgccaatcctagtttacccaattagcagcacagaggtgcgctgtttggttgatgtccctggtcagaaggtgccttccatagctagcggtgaaatggcaaattatctcaaaactggtgttgcaccccagattcctccagaaatctacgactctttcatagcggccattgataagggaagcataagaacaatgccaaataggagcatgccagcggctccacatccgacccctggggcacttttgatgggggatgcattcaatatgagacaccctttaactggtggaggaatgactgttgcattatccgacattgttgtcctacgtaatcttctcaagcctctccacaatcttcatgacgcatctttc

SEQ ID NO: 452185 - DNA, 828 bp, Sorghum bicolor
cgtccgacgctgccgcgcctccgagagcctcatctcctccacccacttgcgagcgagctagggttccgagagccgccggcgccatgttggtctaccaggatctgctctctggcgacgagctcctctccgactccttccagtataaggagatctttgacggcgtcctctgggaggtcgagggcaagtgggtcgtcaaaggagctgtcgatgtggatattggtgccaatccatctgccgagggtggtgaagatgagggtgttgatgaccagactgaaagggttgttgacattgttgacaccttccgcctccaggagcaacccacatttgacaagaaaacatttgtgactaacattaagcgctacatcaagaacctcactggcaagctggagccagagaaggcagatgaattcaagaagggcattgagggtgccaccaagttccttcttagcaagctcaaagatcttcagttctttgttggtgagagtatgcatgatgatggaagcctagtgttcgcttactacaaggaaggtgccactgacccgacattcctctattttgctcatggtctgaaggagattaagtgctaggcgggcatgccctctttacctcatgttgcttgttatcatctttacctcatgtcgatggttatcatctatataatactatcctatttttgttctagtatggattatgtcatggatggttatggaaaaactgttttggaaaaaaactgttggaagaatggattcggattatgacgtgaaatgttttggaaaaactgagaagattggattggagttttccaatatctatgttgctgtatgcgtc

SEQ ID NO: 452186 - DNA, 677 bp, Sorghum bicolor
  unsure (1)..(677): unsure at all n locations
cgtgcgaggtgcatttaagatgctcacctgggcagtctatttctgcaatcaaatttgcaagctttgggacacctatgggaacgtgtggaaattgccagcaaggagattgccactcanctaactcacacactgttctagagaagaaatgcattgggctccaaagatgtgccgtcgccatctcccccgagagctttggaggagatccctgcccgagggtgactaatagggtggcggtcgaggcagtatgttctcccactgcttagccctacttctcttaagcaatgaatttgaaggcggtcgtcggtcgccatctctgcaatgaatttgaaggcagtcgtcagtcggcaaaaaagattggccgaaaccaatgtgggtagagtggaactgtaagtatcgacttcgattagatgtgtctggctggagagattaggtcttgagcttagcgttgttcgtcgtcagattccagatttaggattgtttactctgctacatctccatgaattgttcaaagtggccagctggatattgtagctggtccaggaatggagtgtagagaggagtgaaggcagaagactgattatgcattcttttgcttggtggtagctgtagaaattgaagcttgtgatggctatcatggtagaagagtacctgctaccaatgtccttatccttagattt

SEQ ID NO: 452187 - DNA, 699 bp, Sorghum bicolor
cgtccggcagcatatgtggagcatgcaaatgcaattcctaaatggactgggttactgcctaaatctggaaacatggtaattaatacagaatgggggagcttggaatccgacaagcttcctctttcagaatacgacaaagccatggactttgaaagtttgaaccctggagagcagatatacgaaaaaatgatttctggcatgtatctgggagagattgtgcgaagaattttactgaagttggcacatgacgcttctctatttggggatgttgttccatctaagctggagcagccatttatattgaggacaccagagatgtcagccatgcatcatgactcctcgcatgacctcaaaactcttggagctaaactgaaggatatagttggggtcgcagatacttccctggaagtaagatacattactcgccacatctgtgaccttgttgcagagcggggagcacgcttggcagctgcaggtatatatagcatcctgaagaagataggccgggacaaagtaccaagtagtggcggtaaaatgccaaggactgtagttgccttggatggtgggctctatgaacattacaagaagttcagcagttgcgtagaagcaactcttacagacttgctcggcgaagaggcctctttctccgtggttgccaagctggccaatgatggctctggcattggagctgcttttctt

SEQ ID NO: 452188 - DNA, 505 bp, Sorghum bicolor
cgtccgcccccgcacaccagaaaaaaaaattccccaattgtttgtctctgtcagtgaagaggtcgcggcggcggcggctatgggggggcgcgggaagggcggcaaggggctgggcaagggcggcgcgaagcgccaccggaaggtgctccgcgacaacatccagggcatcaccaagccggcgatccggcggctggcgcggaggggcggcgtgaagcgcatctcggggctcatctccgaggagacccgcggcgtgctcaagatcttcctcgagaacgtcatccgcgacgccgtcacctacaccgagcacgcccgccgcaagaccgtcaccgccatggccgtcgtctacgcgctcaagcgccagggccgcaccctctacggcttcggcggctaggctagatgggctgggcgccctctcctcccttgagtctgtttaccggtccgaaacgactgaaatgttagctgatttatcgcgagagaaaatacctatggttgacataaaaaatac

SEQ ID NO: 452189 - DNA, 516 bp, Sorghum bicolor
taccgtccgaattccggtcgaccacgcgtccgataaatccacctccacaatctcctctcgacttcgagctcctcgctctcagccatgtcgggccgcggcaagggaggcaagggtctgggcaagggcggcgcgaagcgccaccgcaaggtgctccgcgacaacatccagggcatcacgaagccggcgatccggaggctggcgcgcaggggcggcgtgaagcgcatctccgggctcatctacgaggagacccgcggcgtgctcaagatcttcctcgagaacgtcatccgcgacgccgtcacctacacggagcacgcccgccgcaagaccgtcaccgccatggacgtcgtctacgcgctcaagcgccagggccgcaccctctacggtttcggcggctaagctcggtccgcccccaatctccgctccggcggcatctctggttcctggtcgccgtgcgcgtcggtggtgctatgtttagcagctgttagggtttcgtgtcgtctggtgtctgtgctatct

SEQ ID NO: 452190 - DNA, 519 bp, Sorghum bicolor
  unsure (1)..(519): unsure at all n locations
ccaccaccagcaaccgcaaccggaaaatccccaatcccctcggcttcgcggcgaacatgtcggggcgcggcaagggcggcaagggcctgggcaagggcggcgcgaagcgtcaccggaaggtgctccgcgacaacatccaggggatcacgaagccggcgatccggaggctggcgaggaggggcggcgtgaagcgcatctcggggctcatctacgaggagacccgcggcgtgctcaagatcttcctcgagaacgtcatccgcgacgccgtcacctacaccgagcacgcgcgccgcaagaccgtcaccgccatggacgtcgtctacgcgctcaagcgccagggccgcaccctctacggcttcggcggctaggccggccacgtcntcgctgtcgctggggatctagtgttgctccagttcgcaagttgtcagttgtgccctaggtgggaaaatgctagttactgtagaactgagcaatcatctgcgatatggttgttgctgtttcatattgaaatcgatcctg

SEQ ID NO: 452191 - DNA, 568 bp, Sorghum bicolor
ccgtcgcgtccgctcccccgccccccaatccctctcaaacctccgctcctccgagcagctcccccctgcgtcgtcatgtccggccgcggcaagggaggcaagggcctgggcaagggcggcgccaagcgccaccggaaggtgctgcgcgacaacatccagggcatcacgaagccggcgatccggaggctggcgaggaggggcggcgtgaagcgcatctccgggctcatctacgaggagacccgcggcgtgctcaagatcttcctcgagaacgtcatccgcgacgccgtcacctacaccgagcacgcccgccgcaagaccgtcaccgccatggacgtcgtctacgcgctcaagcgccagggccgcaccctctacggcttcggcggctaggctgatggctttggctcccccttctgcagctgcgacgttgtctggccgtgcccacaagtcttgcggtcaagaaagtttcaggaactcttggtagttcatctctggctgtagtaggtttatctgaattgtaagactgtagcaggcatgaagcagtaatgaaattatgtgcatctaatgttgg

SEQ ID NO: 452192 - DNA, 448 bp, Sorghum bicolor
  unsure (1)..(448): unsure at all n locations
cgtccgctctctctctttcctccctcttggaggagagagaagagggggagaccccagccacagccacagccacagccacagccagcacaagaccacccagcccctctcgctgacgtcgccgccgcaatggagtccggtggcgccagtggaggcggcggcggcggcggcggggacgaccagctgcacggcctcaagttcggcaagaagatctacttcgaggacgccgccgcggccggctccagcagcggtggcggtggcggtggcagtggcaatgctagcgcgaccaccgcggctccagcgacgcagcagccgtccccgccgcaggccgcttcgcccagggcagccagcggcggcggcggcatggaggggcagggccgccggcggcccctccccggcgcccggcccgcgcgctgncaggtcgacggctggcacgtgaacctaaccgacg

SEQ ID NO: 452193 - DNA, 394 bp, Sorghum bicolor
ggcacgaggcaacccgccttgagcccgagcaaaggagaaaggcggacgcggcgccggcggcggagcggagatggcggagaggaagcgcggcgccggcacccgcaaggatgaggtggtgacccgcgagtacaccatcaacctccacaagcgcctccacggatgcaccttcaagaagaaggccccaaatgccatcaaggagatcaggaaatttgctcagaaggccatgggtactacagatgtcaggattgatgtgaagctcaacaagcacatctggagcagtggtatccgtagtgtgccgaggcgagtccgtgtcagaattgcccgcaagaggaacgacgaggaagatgctaaggaggaactctactccctggtcacagttgctgagatccctccg

SEQ ID NO: 452194 - DNA, 372 bp, Sorghum bicolor
cgtgcgaggcaatgggaccgccctggtgctcttcctctccccagtgcctaccttcatccgcatctggaagaaagggtctgtggagcagtactggcgcgatcccgtacgtggcgacgctcctcaactgcatgatgtgggtgctgtacggcttgccggtggttcacccgcacagcatgctggtgatcaccatcaacggcaccggcatggccatccagctcacctacgtcacgctcttcctcctctactccgcgggggcggtgcgccgcaaggttttcctcctgctcgccgccgaggtggccttcgtcggggccgtcgccgcgctggtgctcaccctggcgcacacgcacgagcggaggtccatgatcgttggca

SEQ ID NO: 452195 - DNA, 665 bp, Sorghum bicolor
tccgccgttcttccccaaccccgccgccgccgccgccaccgcaactgccaccgtcgccatggcccggatcaaggtgcacgagctccgggggaagagcaagacggacctgcaggcgcagctcaaggagctcaagtctgagctctccctcctccgcgtagccaaggtcaccggcggcgcacccaacaagctctccaagatcaaggtggtgcgcacctcgatcgcgcgcgtgctcacggtgatctcgcagaagcagaagtcggcgctgcgggaggcgtacaagaagaagaagctgctccccctcgacctccgccccaagaagacccgtgccatccgccgccgtctgaccaagcaccagctttctctgaagacggagagggaaaagaagcgtgagaagtacttccccatgaggaagtatgctatcaaggcctaggtcagaactgtgagaaactgtgatgcttgtgcttagcatattatcggctgtttctttccctaggacgtgtcaaagttttgatttgtatggacatttgctgtgggtcaaaagtacaatgtttttgctctgtaaccacaaatgccaagagtggtatgactggcaattcgtattggctctcataattggtgttaatttctcttggtcaacaatcttatcgcaagatgtttaacggtca

SEQ ID NO: 452196 - DNA, 550 bp, Sorghum bicolor
cggacgcgtggggtgtctcggtttggcgataaggcgcacaacacaatcattggctactctacaattttcagcaagactacaacaggccattgttcaaagaatgaggtcaaagctgaagatgctccagcctctcaaaacaatgccctgccttccagacaagcccctggaactcaaaatgatggtggtaccttgcgaactaaacgcgatgcagttggatgtaaatagtcaggagacagcttcctcccaccaacctgcaccatttacaaatacttgtggtgaacaaacagttgttgggaagccctcgcaggagatggaacctaaggctggtgcggggaaagatacttctggtgtctctgccattgctaatggtgccgctacattgtccaaggcagacaaactgacttctcagcctcaaacaactccattttccgaggtagctccccatgtaaatggcacagctgcagagtttgctgcacggtctttatcaaagaagggttctgttgtttcaaaatggtgttggcctgccattggatgtctcactttcagtgag

SEQ ID NO: 452197 - DNA, 395 bp, Sorghum bicolor
cgtccgcacaacgcaatcgttgtctcccaccctccagtaaccctagcgacagcctcggctcgtttgatccccgcggtgagctgtacatctgcaagcgggcggtgcggcgtccggatcgggcagtgaatatgactgaatccctggtgcggaacaagccggggatggccagcatcaacgagatgccggtggtgcaggacgggccgccgcccggcggtttcgcgcccgtgcgctacgcccgccggatccccacctacgggcccagcgccaccgccatcttgctcaccaccttgggtgccttcgcggatggcatgtaccacgtcggtcacgggaatacatggtccgccgggcactcaaagaagagaaaattgctgctcgtagtgctatactgccaatgc

SEQ ID NO: 452198 - DNA, 479 bp, Sorghum bicolor
tcgacccacgcgtccggcagcaacaaccattcgagacggtgcaagtgctactcctgctccttcccactagcggtagtgcccgtcgtctcgccgccgcctcctcgccctccgggctcccgccgccggaccgcgtcgtcagcgatggccgaggcacacagcgggcggcgcgtggggatggtaggcgacgtccgggacgcgccggagggccacgagaacgacctcgaggccatcgagctcgcgcgcttcgccgtcgacgagcacaacagcaagaccaacgcgatgctggagttcgagaggctggtgaaggtgaggcaccaggtggtggccgggaccatgcaccacttcaccgtccaggtgaaggaggccggcggcggcaagaagctgtacgagggccaaggtgtgggagaaggtgtgggagaacttcaagcagctgcagagcttccagccggtcggggacgccgcggtcgcctgaggtagtg

SEQ ID NO: 452199 - DNA, 408 bp, Sorghum bicolor
ccggtcgcccaccgtcgcactacatgctcctggcctgctaggaatatgatggaaaggtcgccgatgtttggtcatgtggagttactctgtatgtgatgcttgttggtgcttatccatttgaggaccccgacgaaccgaagaatttccgcaagacgcttactcggattctcagtgtccaatatgcggttcctgattttgtccgagtttcaatggagtgcagacatctgctgtctcggatctttgtggcgatccctgagcaacggataaccatcccagagatcaagaaccacccgtggttcttgaagaacctgcccatcgagatgaccgacgagtaccagatgaacctacagctggttgacatgaatggcccctcgcaaagtctggaggagatcatgaccatcatacaag

SEQ ID NO: 452200 - DNA, 768 bp, Sorghum bicolor
cggacgcgtgggcgcgaaccacagacgcacacaacaccactcaagcttgctgctgcactactgccgaatcgtacgtgagacacatggctgctccgaagggcgcgacgctggcgctggccgtgctcctggcggcgaccgtggtggctccgccggccgcggtgcgcgcggcgatgtcgtgctccacggtgtacagcacgctgatgccgtgcctgccgttcgtccagatgggcggggcccatgccgccgcatgccctgctgcggcggcatccgcagcctgctggcgcaggccaacaacaccccggaccgacgcaccatctgcggctgcctcaagaacgtcgccaacggcgccaacggcagcgacacctacatcaaccgcgccgtcgcgctgcccagcaagtgcggcgtctccctgccatacaagatcagcaccaacgtcaactgtaacacgattaactgaggcgtcgtcctgtgcgaggaatgcatcatggctgattgagagtaataaaataatgctactggtttggtatttgaagctagatcgagtgtgggctagatcgagttgtgcctgtgtctcgagtcatttatggtgtttaggaatcgtctacacagtttgtaaccgtgtgtcgtggatgcatgttgccgcgagcagagtagccatgaactggtgtgtgccggtgtgccctgctgtgtaatttctatgtaatgtgttggtgcttcgatccagatgtatcccctcgtggtcttggaaatagtagattgttgcagtat

SEQ ID NO: 452201 - DNA, 545 bp, Sorghum bicolor
ggacatacttgtgctttatgacagcaaagaggctgatgctatgacctttgatgattgtggagatatcctgcagcttatgcggcctgtcgtatctgtccacgttgaggatttcctgataattgttttccacaccagtgacggtaaatcagagagcatacaattcgctccaatgttcaacggcagagacgaaggtcaaattactgttggtgctaccaagatgtgtgtgaagcttgcttggtcagtaatgaaaccttgactgtgctgttaagcttcgttggtaggacccttgatgcttcactattgtagctacgtctggttcagtgatgctgcagtcatcttaggttatgcaaaattagtgggaccttataagtaaaacagtgtgtgtaactaccctattgtgcttggctgttatatttgaaccaatttctaccgtgttgggtttgttgaccactatataaatctaatatctggggcttgttatgctgaaccactatctaatatgtggggtttgttcgctgaacgactaacctatggctatttgggtg

SEQ ID NO: 452202 - DNA, 526 bp, Sorghum bicolor
cgtccggattgctgcaatcgctcccttttctcaccgccttgcatttgatgatttgcctgcggatcttcaacgcttgcgttgtaaagttaacttccaagctctggtctttcggtctcacattatctcactcggagagacacttgtgaagcgcttgaggtcttcagtcgggggtcgttccaataaatctatccatcaagttgtaggagacacaaatcaagctcaaaaatatgcagttttgcatctccgttttgataaggatatggctgcacattctgcctgtgactttggaggtggcagagctgaacagctagctcttgctaagtacaggcaagttatatggcaggggagggtattaaattcacagctaactgatagggagcttcggaacacaggacgctgcccattgaccccagaagagattgggctgttactggttgcccttggctttgacagcaaaactcgactctatcttgcttctcacaaggtatatggtggagaagccaggatctctagcctgcgcaaacta

SEQ ID NO: 452203 - DNA, 940 bp, Sorghum bicolor
ggcacgaggtgtgtttgtatggtcttcccaatgaaacatgggaagtgaacttgcctgcagaggaggttcctcctgaacttccagagccagctctgggaattaattttgctcgtgacgggatggatgagaaagattggctgtcactagtagcggtgcacagtgatgcttggttgctggctgtggccttttactttggtgcaagatttggatttgacaaagaatccaggaagcggctttttgtcatgattaataacctccctaccatatatgaagttgtcacgggaactgccaagaagcaaaccaaggagaaaactcccaaaagcagcagcaagagcaataaatctggctcaaaaccaccacgccagccagaacccaactcaaggggttccaagatgccacctccaaaggatgaggatgatagcggaggcgaggaagaggaggaagaggaagatcatgaaaacacattgtgtggtgcttgtggtgacaactacggacaggatgagttctggatatgctgtgatgcctgtgagacttggttccatggcaagtgtgtcaagatcactcctgccaaggccgagcacatcaagcactacaagtgtccgaactgcagtggtagtagcaagagagcgcgggtgtgatcctgctggatatatccatctctcatgcctgaagaaccaagaatttgacttgctgtaaaacgggtcgaatgcccgatggttatgcatttagttgttgctttcagtttaggaccagctgtagggtcttgatgtgctgtttgttgtatgtcagagacattctagatctattgttagtaactaggaactaactgtagtagcctgtatttcttcaagcttctcccagtgcgcctgtactggactgagaaactgttttagatctaagttgtgcattatgtacgaccgtctactcatgttagtttgtt

SEQ ID NO: 452204 - DNA, 438 bp, Sorghum bicolor
cgtccgcaaacattttacattgcatgcatacccaactaaaaagtctttatttggaaagacacacagagttcagaaagacttctgctttatagcctctacccttgacgaggccattttgtgggtgacatgctttgccgaacaaagtatatatgttaatttactacctcgccctgcagcatctagtatcaatccagactcagacaatcccctcagtgagtctttattcgaccagccaccgattaaatgcaaatctccgcaaagagtacttgttatattgaaccctcgatctggacatggtagatcaagtaaagttttccatgagaaagctgaacctatatttaagcttgcaggttttcagatggaagtagttaaaactactcatgctgggcatgcaaaatctcttgtatctacatttgatttcagtgtatgccctgatga

SEQ ID NO: 452205 - DNA, 577 bp, Sorghum bicolor
cgtccgcagcttaaactatgtgactttggtagtgcaaaagttctggtcaagggggaaccaaacatatcgtacatctgctcccgatactatagggctcccgagctcatatttggtgctactgagtataccacagcgattgacatttggtctgctggatgtgttcttgctgagcttatgctagggcagcctctgtttccgggtgaaagtggcgtggaccaacttgttgaaatcatcaaggtccttggtactccaacaagggaagagattaaatgcatgaacccgaattacacagagtttaagttcccacaaatcaaagcacacccatggcacaaggtattccacaaaaggatgccgccagaagctgttgatctggtctctcggctactccagtactccccaaatctgagatgcactgctgtggaggcacttgttcacccattctttgatgagcttcgagatcctaatacccgccttccaaatggccgctttttgccaccccttttcaatttcaaggctcacgaattgaaaggagtcccagcagacattgttgcgaaattgattccagaacatgcaaaga

SEQ ID NO: 452206 - DNA, 887 bp, Sorghum bicolor
  unsure (1)..(887): unsure at all n locations
acgcgtccgccttgctcaaggtacatgccctccccttcccggccctatctttgattcagcacttttaatgtcgtattgcttaattgtgcagctacgtatctgaaatctgaaatattaagttttgaaacagaaaatatctgattttaggttccatatatggtatagttgtttgtggcccatatgatttggtgcagatttctttgcttgtgctagacaacctgttttcaatttgtttaggcatcactagaaattggaacatgcttcaggtgcttctggttaattggtatgcttttcaagtctatgctcaatctatcttttataaagcaatgaatcttcatacttcagtagttgcattgtgggagcatttcagtggatgggaatttattattttctgtcctactagtttttttctagcatcttgctttctatattttctggtcgtttcatttgtgataaacaggcttgatgagggatcaatgggaagcaccagcgtgttgaaaaggttttgctttctcttgccgcaccagtcaaagcatagaaagatggtggcaaacattagtgaaagcgcatcacttgacggctggagctgaacatgaccatcatggaaaagtggaggaaaagagcaacctattgagtgccatgataacaaagatgccagcacactaaatccggatagaacacaacaacagctggaaatactgcaaaccaagtgggagaagacccaatttttaagtttttaactgcaatagttattacttttgtgcagtttgaagtttctcatttgtaatagctattttgtatttcatagtttgttcagtacctttaggaaagatngaataagatatggtttttatgtctctaaatgaatttccaagtgccattgctct

SEQ ID NO: 452207 - DNA, 690 bp, Sorghum bicolor
  unsure (1)..(690): unsure at all n locations
cgtccgcccacgcgtccgccacgcggaggtccttcgagctcaccgccatcgtctcgggaagccgctgcgtcggctccagcaacggctggctcgcgctctccgtcgtcctcttcagcggccagaacgtcttcgtgctcctcaaccccatcgccgccgtggagatcgtcctcccgcccctgggctacgagagccgctgggtttccaaggtcgtcttcaccccgagccccgccaaggacgacttcgccgccgcggcaatctgcgacatcgacaggatcgcgtacgtcaccgccggtgccaggaggtgggccgtcatggaacccgtccgcctcaccagcggggaccagctcaccgacgtcgtctacaccgacaaaggtaaggtctactgcctcaccaagtgccgggacgtgcatgtgctccgcctncctgagcgccggcgccggaagcctgccaacgccgatgaagcatggacctcggagccagagttntctgttctccagccaccacagcctactgaacgcattaatttccgcccactgcgatggcaacatcagcgcaattttcggatgctgcgctatgaacaggcccgaccaagagaggatccaactattccactgagggtaacgttctgtgcagagacattcatcctttctataagaagttcctcctgaatcgcaaggaccacacctaaat

SEQ ID NO: 452208 - DNA, 878 bp, Sorghum bicolor
cgtccgcttcctcttgccctctgtgccgccgtccacttcgccctctgccaacaacctcgccaggcccgtctcacgctctggcatcccacccagcatccacccgcgactcctccgaaccctagcgccggcgcctccacttcgcttcctcaccccatctccgctcagggtccggcggcggcgaagggaagggcaagatgtacaccgcgaggaagaagatccagaaggagaagggccttgagccctccgagttcgaggactccgtcgcgcaggcgttcttcgaccttgagaacggcaaccaggagctcaagagcgacctcaaggacctgtacatcaacaatgctatccagatggatgttgccgggagcaggaaggctgttgtgatccacgtcccataccgcctgcgcaaggccttcaggaagatccatgtcaggctcgtcagggagctggagaagaaattcagcggcaaggatgtggtaattgttgccacaaggaggatcgtgaggccacccaagaagggttcagctgttcagcgccctcgcaccaggactctgactgctgttcatgatggcatcttggaggatgttgtctacccagctgagattgtggggaagcgtgtcagataccgtctggatggtgccaagatcatcaagatcttcttggacccaaaggaaaggaacaacaccgaatacaagctggagacctacactgcagtgtaccgcaggctgtgtgggaaagaagtggtctttgagtaccctatgaccgaaaatgcataaagatgatgccctggatatctccatttcaatttcgtggaatctggatggtttggtggggtctcaactagtttgctccctatgtacttcaaaaaccataagtttgat

SEQ ID NO: 452209 - DNA, 682 bp, Sorghum bicolor
cgtccgattgaagagttcatgagagtgaccacctgtgcatactttatccaaggctatggtttaacagaaacactgggacctagtaccgtctgctacattgatgacatggccctggttggaagtgctggtgtacctgccacctacactgaaatacgactggaagaagtacccgagatggggtatgatccacttggtgtcccttcacgtggtgaaatctgcattcacgggaaatctctcttcgctgggtactacaaaagtccagaactcacaaatgaagcaatagttgacggatggtttcatacaggtgacattggagagatgaccccagacggaatcctgaaggtgattgaccgaaaaaagaacatatttaagttgtcacaaggggagtatgttgcagttgagtacctggagaaagtgtatggcttccctccacttgttgaagatatctgggtatatggggacagtttcagatcaagtttagttgcagtagtcaatccacacgaagaaaacacaatgaagtgggcacactccaatggctataagggttcgtttgctgaaatctgcaaacttgaaggacttaaagagtgcatcctgaaagagctggcagctggtgcacagaagaacaagctacgaggttttgagtaccataaaggcataggggtggatcctgtaccttttgaca

SEQ ID NO: 452210 - DNA, 675 bp, Sorghum bicolor
  unsure (1)..(675): unsure at all n locations
cgtccgggaggaatcccccccccccctcctcacgcacgctcctctactcgccatctttagcctgggccccacctcccgtgccgtggccattaaagcgggaccgaccgggcgctccctgcctcctcgtcgttccgttccgttccgttccaccgaccagatccacccgcccagccatgccggcgccgacgcttccaacgccgccgccttcgccgctgctgccgccggcgggggagccgttccgcgtgttcgtggggtacgacccgcgtgagcacgaggcgtacgaggtgtgccgccgcagcctgctccgccgctcgtcgatcccgctggacgtgcgcccgatccggcaggcggacctccgcgccgcggggctctacacccgggcgcgcggccccaccgagagcaccgagttctccttcacgcgcttcctcaccccgtacctcgcgggctaccgcggctgggcgctcttcgtcgactgcgacttcctctacctcgccgacatccccgagctcctcgccgccgccgtcccgcccgccgacgccgccgaccgcattgccgtcgcctgcgtcaagcacgagtaccagcccgctgaggccaccaagatggacggcgccatcccagacgggtacccgcgcaagaactggtcctncatggtgctctacaactgcgcccacccca

SEQ ID NO: 452211 - DNA, 684 bp, Sorghum bicolor
cgtccgctaaatattctgctggactctgattatactgctaaactgtctgattttggcctggcaaaagctggccctgaaggtgatgagactgatgtgtcaacgagggtgatgggaacctatggatatgctgcccctgaatatgtgatgactggtcacttgactgctagaagtgatgtctacagcttcggcgtcgtccttctggagctcttgacagggcgcaagtcaattgacaagtcacggcccagcagggagcagagcctagttgactgggcccttcccaagctcaatgacaagaggaggcttctccaaataatcgacccgaaactggggggacagtattcgggcagagcggctcacaaagcctgcagcctcgcattctactgcttgagccataaccccaaggcaaggccactaatgagtgacgtcgtcgagaccctggagccgttgcagggcggtggcagtagcgatggagctggtcaatcttctggccttcctgattatagagctcgacgcaggctaacagggaacaacgtccacttaagggccatcccaaaccccaagtgctcccctgctgtccccgcttgcagagtgcggtgatagccgacaggccgacggtgctgttccagttgctgctggaatagggttgggttgtatattacaaagtctaaaccaatgggcgatgtg

SEQ ID NO: 452212 - DNA, 965 bp, Sorghum bicolor
  unsure (1)..(965): unsure at all n locations
cgtccgcccacgcgtccgcccacgcgtccgcccacgcgtncgctgctctctgccctcggcggagcggcggcgcaggtgttcccgccgtggaacggcacgttcccgatggggcctggcttcagaggcgggagcagcggcggcgggggcgcgggcgcggcggcggcggcgacgctcgtgccggcgatgttcgtgttcggggactcgctgacggacaacggcaacaacaacgacctcaactcgcttgccaaggcgaactacccgccctacggcatcgacttcgccggcgggcccaccggccgcttctccaacggctacaccatggtcgacgagattgctcaactcctgggcctgccgctgctgccgtcgcacccggacgcctcgagcggcgacgcggcgctgcacggggtgaactacgcgtcggcggcggcggggatcctggacaacacggggcagaacttcgtgggtcgcatcccgttcaaccagcagatcaagaacttcgagcagacgctggacaccctgagcaagcacctgggcggcgcctccaagctggccccgtcgctggcgcggagcatcttctacgtcgggatgggcagcaacgactacctcaacaactacctgatgcccaactacaacacccgcaacgagtacaacggcgaccagtactccacgctgctggtgcagcagtacgccaagcagctcggcacgctctacaacctcggcgcgcgcaggttcgtcatcgccggcgtcgggtccatggcgtgcatccccaacatgcgcgcgcggagccccgtcaacatgtgctcccccgacgtcgacgacctcatcatcccgttcaacagcaaggtgaaggccatggtgaacaccctcaacgccaaccgccccggcgccaagttcatctacgtcgacaactacgccatgatctcgcaggtccttcgcaacccatggtccttcgggttcagcgtgac

SEQ ID NO: 452213 - DNA, 761 bp, Sorghum bicolor
gtcgccacgcgtccggaacgcccctcctgagtctcgaaccaaccgcatcgtcccccgtctccttcccccttcgtccccgacatccccgacccgatggcgcccaaggccgagaagaagccagcggagaagaagccggccgccgaggagaaggcggagaaggcgcccgcaggaaagaagcccaaggccgagaagcgcctgcccgcctccaagtcctccggtaaggagggcggcgagaagaaggggaagaagaaggccaagaagagcgtggagacctacaaaatctacatcttcaaggtgctgaagcaggtgcaccccgacatcggcatctcctccaaggccatgtccatcatgaactccttcatcaatgacatcttcgagaagctcgccggcgaggccgccaagctcgcgcggtacaacaagaagcccaccatcacctcccgcgagatccaaacctccgtgcgcctcgtcctccccggagagctcgccaagcacgccgtctccgagggaaccaaggccgtcaccaagttcaccagctcctagatggggcctcgtcgtctcccgtctcgctcgggcttcggttccgttcaggaagtagtagggtggtcgtgtgttgcagtggcggtagttgcccctgcgtcgatctccaactgtagtcgtctgatgatttgtgtaaaaagtagtgtggtttgtggtaatgttgctgttcatctttgcaatttctgattgcaaatatatgagaaatcccatcctggtatttgctg

SEQ ID NO: 452214 - DNA, 499 bp, Sorghum bicolor
cgtccggcgaaagcgaatccctccccgccgcagcctcacatcgcacgccaccgcgaaaccccagcagccgcatccatccatggcgcccaaggcggagaagaagccggcggcgaagaagcccgcggaggaggagcccgcggccgagaaggcgccggcggggaagaagcccaaggcggagaagcgcctcccggcgggcaagtcggccggcaaggaggggggcgacaagaagggcaagaagaaggctaagaagtcggtggagacctacaagatctacatcttcaaggtgctgaagcaggtccaccccgacatcggcatctcctccaaggccatgtccatcatgaattccttcatcaacgatatcttcgagaagctcgccggcgaggccgccaagctcgcgcgctacaacaaaaagcccaccatcaccttccagggggatccagacctccgtccgcctcgtcctccccggcgagctcgccaagcacgccgtcttcgagggcac

SEQ ID NO: 452215 - DNA, 420 bp, Sorghum bicolor
cgtccgaattccccgtactcaaatcgacctagctagcgaatccctccgtccccgcagcctcacccccacagcatcgatggcgcccaaggcggagaagaagccggcggcgaagaagcccgcggaggaggagcccgcggccgagaaggccccggcggggaagaagcccaaggcggagaagcgcctccccgcgggcaagtctgccggcaaggagggcggcgacaagaagggcaagaagaaggccaagaagtcggtggagacctacaagatctacatcttcaaggtgctcaagcaggtgcaccccgacatcggcatctcctccaaggccatgtccatcatgaactccttcatcaacgacatcttcgagaagctcgccggcgaggccgccaagctcgcccgctacaacaagaagcccaccatcac

SEQ ID NO: 452216 - DNA, 740 bp, Sorghum bicolor
cgtccggatggaagccagctacctaacagtagagtttttccgcaaacttcctactgaaccagagaaagcagctgataagaacactccagtgagtgatagatatcaggacaatcatctcagaagaatcggatcgaatgtgtcatcttacatcaacatggtctgtgagactctgaggaacacaattccgaaagccattgtacattgtcaagtgaaagaggcaaaaagaaatttgcttaaccgtttctatgctcatgtgggaagcaaggagaagaaacagctgagcgcgatgttggacgaggaccctgctttgatggagaagagggatgccttggtcaagaggctagagctgtacaaatcggcaaggaatgagatcgactcggtcgcatggaaatgattggcttgtgacagccacagctggaatgtagaatgtacaagcgcagcagcacacgtgtgattgcagtagaatgttcaattcttttttacatttgaatttatcctggaggccttgtacgcagttttcactcgagtcatattccagacatgcttatttggcggtcttggccttaaacacgattgtgttgtgcgtggacgatctggtctccggttgatataagagtatagatgtattcttttgttgattttactgaccttgatgatctcattagttttgccccgttttgcccccgtgagaatcatgtttttgacttaggtgcttgcttgatagccctgagtcagtggca

SEQ ID NO: 452217 - DNA, 789 bp, Sorghum bicolor
  unsure (1)..(789): unsure at all n locations
cgtccgtcgacccacgcgtccgctgggaccatgcagagtaccgtgaagctcgcggtgctcgctctactgctagcggcagcagctcaccacggtctgctgccgctgccgacggcgctatgctactggctcaacccagagatctacgacgccggcgggctgagccgccgcgcgttcccggagggcttcgtcttcgggacggccgcgtcggcgtaccaggtcgaggggatggccaagcacgggggccggggccccagcatctgggaccccgtcctagagccccccgggaccatccctaacaatgccaccgctgatgtgacggtcgacgagtatcatcggtacaaggaagatgtgaacataatgaagaacatgggctttgatgcgtaccggttttcaatttcttggtcgaggattttcccaaatggaactggcaaggtgaaccaggaaggagtggattactataacaggctcatagattacatgcttcagcaaggtatcacgccgtatgcaaatctctaccattatgacctcccattggcactccatgaacagtacttgggctggcttagcccaaagattgtggaggcgtttgcagactacgccgagttctgcttccagacgttcggagacagggtgaagaactggtttaccttcaacgagccgaggtgcgtcgctgctcttggctacgacaatggcttacacgcanccgggaaggtgttccgagtgcgctgccggaggcaactccacgacggagccgtacctngctgcacaccatctcatcctttctcatgc

SEQ ID NO: 452218 - DNA, 907 bp, Sorghum bicolor
cgtccgagcaaacaatgccctggctcgtgctactcatgtgtttgtcaagaagcagccagagatccatctgtttagggcgcgctttaaggagcttaatggggatatttctggagcacgtgcagaatatcagcatctttactcagatttatgtcctggctttctagaggccattgtcaaacattctaatatggaacaccgactgggagagaaagaattatcttgcacagtctacgaaaaggccattgctgctgagaagggaaaggaacagagccagctcttgccaacgttgcttattcagtactcccgtttcttatttttggccgtccgagacttggagaaggcaagagagatattaaatgtgctgcatgagcagttaaatgtaacaaagccagtgcttgaggctgtcatccatctggagtcgatttttccatgtgaaaagcgtattgaatttttagactcacttgtggagaagtttgttacacctgaatcatctcagggagaggtggcaagtctagttgacaaagaagaaatatcttccatatttttagagtttttggatctctttggggatgcaaagtcaatcaagaaggctttaactcggcatacaactcttttttcatgtaagagaagcattctgccatcaaagaaacggaaagcagatgatgttgttgtgtcagagagggacaaatttgctaaaactggggctgggcagtcagccacgggaactgatccaaatgctttcaatccttctgtttggcctgcaacttctgaagcatctgggcaacaatggggagcttcttatgcacagcaggctgcatatcctgcatatggaacttatgactacagccatcaaatgcctcagcctgctcctcaagcagctgcctatggtgcttatcctccaacatac

SEQ ID NO: 452219 - DNA, 486 bp, Sorghum bicolor
  unsure (1)..(486): unsure at all n locations
cgtccgcgaatgcttactctntggtttgaatttggaagcatatatgtccgaaatgaatcttcctccaatcaacgaatgaaagagattaatgcaaatgttttaggcctcatacgtgggtgtttgaaggatctaccaacatatcagtggcttactgtgctgtctcagttgatctcccgcatctgtcaccaaaatgctgatgttgtcaaaatggtcaaatgcatcatcacatcgattttacgggaataccctcaacaagctctttggatgatggctgcagtgtctaattccactgttctggcaagacgagatgctgctgcagaaatattgcagtcagcaaagaaaggatgtcggcgtgcgagtaatgcactcttcagtcaatttactaatcttataggccatcttattaggctctgctctcatccagggcaaccaagggcaaaaacaataaacatcttaaactgaggtcagtgccttgaaaagaatgat

SEQ ID NO: 452220 - DNA, 840 bp, Sorghum bicolor
cgtccgggactggtcactcggcacgcaggcagcacagcagcagcagccaggacccccctccctgctctttcccctgctcgcttcgcttcctcggcggattcctcctcctactctcgttcgtgcccttccgacgcgcgagctcgcccgagatggcaaatgcaagatcgggtgtcgctgcgaatgacgagtgcatgctgaagtttggcgagctgcagtcgaagaggctgcaccgcttcataacttacaagatggatgacaagttcaaggagatagttgtggaccaggttggggatcgtgctaccagctacgaggacttcacaaacagcctccctgagaatgactgccgatacgcaatctatgattttgactttgtgactgcagaggatgtccagaagagcaggatattctatatcctatggtccccagactctgccaaggtgaagagcaagatgctttacgcaagctctaaccaaaagttcaagagtgggctcaatggcattcaggtggagctccaggctacagatgcaagtgaaatcagcattgatcagatcaaggatcgggcacgctaggcgcagtgcaccgccatcacgtgtttcatgatcatgcatcatggactcgcctactactgtggatttgtacgccattatagacttggtgctgtgaaagactgcttgatgatttgcaggtttgttgctgtgtaaaaaaggtcctcggcttccagaagaccatgaaggtttggatctatcatgtaattccttgttatctgccaattatgtatggactatggacatgtgttgcgctgttcaacttactacaaataagtaatcgatatgttcccta

SEQ ID NO: 452221 - DNA, 490 bp, Sorghum bicolor
cgtccggcgccagcggctgcagctcagacctcaacctcatcagaggctcctgccccgccgccgatcccgtcctgtctcttccccgctgcggagccgtctccagccctgcccgcgcagatggcgaacgcggcgtcagggatggccgtggacgatgactgcaagcgccggttcctggagctcaaggccaagaggacccaccgcttcatcatctacaagatcgacgagaagaagaagatggtggtggtggagcaggtgggtgagcctgtgctcaactacgatgacttcgccgccagcctccctgccaacgagtgcaggtacgccatcttcgactacgacttcgtcaccgaggagaactgccagaagagcaagatcttcttcatcgcctggtctcctgacacggcgcgcgtgaggagcaagatgatctacgccagctccaaggagaggttcaagcgggagctggacggcatcaggtggactccaggcaccgatt

SEQ ID NO: 452222 - DNA, 485 bp, Sorghum bicolor
cgtccgctcaacgccagccacgccgagaggagagagaccaaccgccgccaccggaatggctgggtgaggaagcccgcgccggacacgacagaggaaccgccgctacccccgccgccgcgacccacaggacaggacaccgggtagaggaagagatccagccagccagcgagccatggggagcgacgtgcccatgagccccgagctcgagcaggtggacggcgagatccaggacatcttccgcgcgctccagaatgggttccagaagatggacaagatcaaggactccagcaggcagtccaagcagctggaggatctcaccgccaagatgagagagttgcagcgtttgatcaaagaatttgaccgtatactcaaggatgaggagaaaaagaacacctctgatgtcaacaagcagctcaatgacaaggaagcagttcatgatcaaagaactcaactcctatgtaacctgaggaaaacgtaccagagca

SEQ ID NO: 452223 - DNA, 657 bp, Sorghum bicolor
cgtccgcctttcagaaccttccgtcgccttccagaagcccaccccctcagcaccactataaactgccctctcccgcctcgtcactccccacaccgagaaatcgagcaatccaagaaaccaacacagcgacaagcaaagcagcgatccgagatccgccagcggcagcggcagcgagagcgagagatggacgcgaggatgttcggtctcgagaccccgctgatggtggcgctgcagcacctgctggacgtgcccgacggcgacgccggcgcggcgggcggcgacaaggcgggcgccggcgcgggcggcggggccacgcgcacctacgtccgcgacgcgcgcgccatggcggccaccccggccgacgtcaaggagcttccgggcgcgtacgcgttcgtggtggacatgccggggctgggcacgggcgacatcaaggtgcaggtggaggacgaccgggtgcttgtgatcagcggcgagcggcgccgggaggagcgcgaggacgccaagtacctgcgcatggagcggcggatgggcaagttcatgcgcaagttcgtgctcccggacaacgccgacatggacaagatctcggccgtgtgcagggacggcgtgctcacggtcaccgtcgagaagctgcccccgcctgagcccaagaagcccaag

SEQ ID NO: 452224 - DNA, 512 bp, Sorghum bicolor
cgtccgcccacgcgtccgcatcattgaattcttcaagcggttccctaatgttgatatgacctatgtggtccgtgcgggtgacgatataagcactggtgacaatgtaaccgtgcaggtaacgctggagcgcgacatgactaacttgccatctgaggttggttcagtccatgcgccaaggttccccaagcccaaggaagaaggctggtggctggtgatcggtgacagctccacaaaccagttactggccatcaaaagagtggcactccagaagagggcgagagtgaaacttgagttctctgctcctccagaagcagggagaaaaaattacatgatttacttgatgtcagactcttacttgggctgtgaccaggagtatgagttcaccgttgatgtcaaggatgctggtggggattgatgatgaagactgacactgtgtcgcatagaagcagttgactttggagtgtgtattgtaggcttgtagcacgttattagtgtcttggaacattctatgt

SEQ ID NO: 452225 - DNA, 482 bp, Sorghum bicolor
  unsure (1)..(482): unsure at all n locations
cgtccgcgcccctccgcctctgctccttccgccgccgccgccgccgccgcgtctcctctacaggtgaaggagaggaagagggcgaaatggtgaagcacaacaacggtatccccaacgggcacttcaagaagcactggcagaactatgtcaagacatggttcaaccagcccgcccgcaagcagaggcgccgcatcgctcgtcaaaagaaggctgtgaagatattcccacgcccaactgctggccctcttcgccccattgtgcaatgccaaactctcaagtacaacatgaagtcaagggctggtagaggctttacccttgaggagctgaaggcagcaggcattccaaagaagcttgccccgaccattggcatttccgtggatcaccgccgcaagaacaaatcccttgaggggctgcaggctaatgtccagaggcttaagacatacaagggccaagctggttatcnttcccaaagcgtgctcgca

SEQ ID NO: 452226 - DNA, 543 bp, Sorghum bicolor
cgtccgggcccctgttcctgagaagcagggtgcactggaggatactccacaggcagaggagaacaaggagaacaaggatgccacagctaatgaggaagaagagaaggaagaggataaggagatgactcttgaggagtttgagaaaataagggaggaaaagcggaagtcacttcttgcccttaagactgaagagaggaaggttgaagttgatagggacctgcagtctatgcagccgcttgcaaacaagaaaggaaatgatgaaattttcgtgaagctgggttctgataaggatgctctgaagaagaaagaaaattgctgaacgtgatgaacgcgctaagaagtccgtgagcatcaatgagttcttgaaacctgctgaaggagaaaggtactatggcgggcgcggccgtggcaggggccgtggagacccgtgaggtttcagagggggataattttttggtgggcatccccaccagctgctcctgcaattcaagaccaatcccagttcccttcgcttggtgggaagtgaaacatctggtacctgaa

SEQ ID NO: 452227 - DNA, 571 bp, Sorghum bicolor
taccgtcccgattccagttcgacccacgcgtccggctgcctcggcgcgagccgcgagctgccctccatctctctgcacctccgccctcctgcgctccagcttcttctcacccgtggtggctggcggccggcgggctcctctcgactcccgtcctccgcgactgcctgactaggaaccgggaagcgggagagtggcgcgcggcgcgctagcagatctgccgccgccgttcgctcccccctgctctgccttgaccgccggctgggcactgcctactccacactggcagtgccacgtcgaccccaggctccggcggcaccgcgtcaccgccccctgcaccagagcacagctcacgcctcacgataagcaagacaatgcagctctgttcgggacgctgcttagtgtacctaccgtcggcgcagcatggaggtcgccatctctgcgagccccagcacagctgtgggcaggatcagctgactccctgaggacctgctccacgagattctcacccgtctcaggtctcccgatgaagctgcatgcgctgggacagtctgccacagctgctgggcttcac

SEQ ID NO: 452228 - DNA, 430 bp, Sorghum bicolor
aaatgaatataagcataatattgctgattgttccaatatcaatttccataacatcaatatcaattgcagttctgtcgaactgaagcgaggagcttagcagagctagctgaattttacattatatgcaaaagcaaatttggcagagttcgataaacaactgaacccattttttcaggctttatgtacaggagtacctactatagggatataggtaaacagcgaccgccgagccatgctttagtcaaggatgagcgaccaggtgatcattttgcatgctggggctctaatcaccctggctgttgacggccttaatgccatgctgcgttttctcaagcgctgctcttcatgccatcagtgttgccagagaaagcccagtgcggcttggccagggtgcgcttcgtagccttcactgacagtgggctgtccttgc

SEQ ID NO: 452229 - DNA, 450 bp, Sorghum bicolor
cgtccgccagaggacgtgggaggggtcgaggcagagggcgaggtcggccaccaaccaagagaaaggaagttggttatgtgcaatttgaagatgagagcagcatgtttgctgaacaaggtgaacccttaccaggagaggaaacagttcaagagatcaacaatggcaacgagatcatgcctcaaagcacgcaacctccagtagaggctccgccaacagcccctgcacaagctacaagttctaaggtggaagaagcgaacaccaatcatcagtcagattggcctatgccagatgccattggaagcatcggtgtcggtccgtctggttttgggcatctgacagtgcaggtcgatgaagacgaggactacgacaatgaggactagtcagggccattctcattgtatgcactaacaggactgttctgtgttgtaaaatgtaaatatagtttgaaat

SEQ ID NO: 452230 - DNA, 685 bp, Sorghum bicolor
cgtccgagcctctctgctccagcctcccattagggtttatccaccggcggcgcgcgcgacggcggcaagatggtgcagcgtctgacctaccgcaagcggcacagctatgccacaaagtccaaccagacgcgggtcgtcaagacccctggtggtaagctcgtgtaccagtacaccaagaagagagccagcgggcccaagtgccccgtgaccgggaagaagatccaggggattccccatcttaggcctgctgagtacaaaaggtccaggttgtctaggaaccgcagaactgtgaaccgcccatatggtggagtgctctctggaactgcagttagagaaaggatcatccgtgctttcctggttgaagagcagaagattgtcaagaaggtgttgaaattacagaagaccaaagacaaaacttcctcaaagtaactctgaaacagaagtgaaccactcttctgtaaacaagggaagatatttttgtcgatggtgatgatcaatgaagtagtctcttctagctgtgttctagtatgtcttgagccgacaactgtttttagggtaccttgaaatctgtctaccattgtggtgtcaaagattatgagatgacatatgatccccatgttgcttttgttcacttcgctaaaactgcaagtctgagttcatatgagttgggcttcagttggtattt

SEQ ID NO: 452231 - DNA, 777 bp, Sorghum bicolor
  unsure (1)..(777): unsure at all n locations
cgtccggcggaggaagcccgcaggaagccacgcgcacaccgcaaccgcaaccgcaaccggaacaggtcgacgacgactttcttcgcgtctctcacctcccgcctcgcctcgcctcgcctccgatccgtccgagatagtataaagaaggcacaaaggcgacgagggagggggagagtaggctcgccgcgagatctgtgagagctccccacccattcttcccaagatgcacgacttctgctncaccatcccctacgggttcgccgtgctggccggcggcgtgatgggctacctccgccgcggcagcaccgcctccctcgcggggggagccggcgccggcgccatcctcctcctcgcgggcttcgtcagtctcaaggccttcgagaagcgccgcaactcctacgtcgccctcgcgctccagacgctttgtgcattagccttaacttacgttatggggcaaagataccttgagacctcgaagattatgccagctggtgttgttgctggtctcagtgccgtgatgtcagtgttttatctgttcaaaattgcgacgcggcggcaaccacatccctccaaagaaagagtaaaccaggctttaacttgtagtctatgttcgattgaacttgaagactacgagcgattgtgtttgtctagttgcatggtaacttcagggactagcatcttgttctccttttgtaatgtggctagaatgtaccatggtttgtgaacaatgtacaanaaataaatatgcgattcacggaaatgaatgtgatgttactg

SEQ ID NO: 452232 - DNA, 723 bp, Sorghum bicolor
ttttcttcccgcgtccgcttcctcgcgcggcgacactcccccaccgatttgaagcgtgcggagcgagcgaagcagcggcgggacagatggctcgtaccaagcagactgctcgcaagtccacgggagggaaggctcccaggaagcagcttgcaaccaaggctgctcgtaagtcggcccccaccactggaggagtgaagaagcctcaccgctaccgccctggaactgttgccctccgtgagatccggaagtaccagaagagcactgagctgctgatcaggaagctgcccttccagaggcttgtcagggaaattgcacaggacttcaagactgatctgcgtttccagagccatgccgtgcttgccctccaggaggctgctgaggcataccttgttgggctgtttgaggacaccaacctgtgcgccatccatgctaagcgtgtgaccatcatgcccaaggacattcagctggcaaggaggatccgtggcgagagggcctaatccccccctcaaatcattgtgacaaaaatgaagtcttgtgtcgtagcaatgaatttaatctggtgccgtgtaaggacatatgagtagggtttgtttggtggatcataagtttctctactgccgcactatgtgttgctgctccctttgctggtgttattactagtggcgaatgcttaaattggctagtcatgtaatgcgctgacaatctgtgacctgtattcgatgt

SEQ ID NO: 452233 - DNA, 890 bp, Sorghum bicolor
ggcacgaggcagtgctcagggggcttgcaagtttggcttctatgagttctttaagaagtactactccggacattgctgggccctgagtatgcccagaagtacaagaccctgatctacctggctgggtccgcttctgctgaggtgattgctgatgtggctctctgcccctttgaagccgtgaaggtccgtgtgcagacacaacctggatttgctcgtgggctcagtgatgggctccccaagttcgtccgatctgagggtgctcttggggctctacaagggaattgtccctctctggggtcgtcagattccttatacaatgatgaagtttgcttcctttgagaccatcgttgagcttatctacaagcatgctgtgcctgttccgaagtctgagtgcagcaagactacccagttgggtattagctttgctggcggttacattgctggtgtcttctgtgctattgtgtctcacccggctgacaatcttgtgtctttcctgaacaatgccaagggtgctacagtgggcgatgctgttaagaagctgggtctctggggtcttttcactagaggacttcctcttcgtatcgtcatgattggtacccttactggtgctcagtggggaatttacgatgctttcaaagtgatggttggactcccaacaacgggaggacctgcaccagcagcggtggctgccccagcagcagaggctgaatcgaaagccagtgcttgatttttctgtattccctgagatcatatttggtggaggttggagttgtgtaattcactcgagagcttagttcccgaatcatttttttttcttaacggaaaatttgtccgtcatccttatgatgagaggaactcattaaacaagtgaaataggtcttttttgcccc

SEQ ID NO: 452234 - DNA, 613 bp, Sorghum bicolor
cgtccgcaaaaagggaaaagaagggttcgggggaacgccgctcgaatccgtaaccctaaacctccccaaaaccctcctcgcctccctcccctccatccaatcctcgagacgagcgcgcgtgcgaggaggaaccccacggagatggcggcggtggcaagggttttccgcgggtccctcttcctcatgtccccggcggcgggcacgggcaaggcggcgggagccaaggcggcggcggcggcggcgaccaagaagcggaccaaggcgccgtccacggagccgagggtgccgaccgggatctcgaagccgataccggtgtccgctgagttgagcaggttcgccggcggcgcgcccgaggtcgcgcgctcccaggccgtgaagctcatctgggcccacatcaaggctcacggcctgcaggacccagccaagaaaactgagatcaactgtgatgcaacactcaaaagcttgtttggtgggagggacaggattggaatggctggagatcatgaagctactgcgtcctcacttcctggagaactagaaagcggccctggagccagcgataggtgctttagtctacgaccttatttggatgggcctctttgtgatccatgtg

SEQ ID NO: 452235 - DNA, 684 bp, Sorghum bicolor
cgtccggctttaccatctgcgggattcagcacgtccagttctgcctcaaccacttctcgtccgatgtctatgtcggcccacccaagggcaatgactggtttgagaagcagacggcaggcacgctcgacatcctgtgccctccctggatggattggttccatggtggtctgcaattccagattgagcaccatctgtttccccgcctacctcggtgccaccttcgcaaggtcgcgccggccgtgcgtgacctttgcaagaagcatgggctcacttattctgcagcctcattctggggcgcaaatgtgcttacatggaagacactcagggctgctgcattgcaggccaggagcgccacaagcggtgccgccccgaagaatttggtctgggaggctttgaacacccatggatgaatgggatgaggatatatgaactgaaggcagcttgtggtgttcagctttgtgcccatgcgattgtctgattgcttctcagttatttagagatactattgatcatttaacccgactgagtcgggttggaattttcgtgttgacaagtgactgtctatccagttgaagagttgatgcttcaattgtctggttgttcgccggctgttctgttctccctatcatggtaactatattatgatccttgctttaagtcatgaacctctgttttaagaatatg

SEQ ID NO: 452236 - DNA, 514 bp, Sorghum bicolor
cgtccgggcggtcttcccccaagtcgtcgtctaaactaaaccctaatccccaaatccccgacgcagacagcacgacgcgcacctgcgttcacgaggagcaagcatgagtcgccacccaatcactaagtgggcacagaggtctgacagggtgttcttgacgatagagctgcccgacgccaaggatgtgaagctgaacttgaagcccgaaggtcatttcaacttctcggctaagggctcagatgacttgccctatgagtttgaccttgagctgtttgatgctgtgaatgtggaggagagcaaagcagctgttgccccaaggaccatatgctacctgatcaagaaagctgagagcaagtggtggccaaggctgctgaaaaaggagggcaaggcacctgtgttcttgaaggttgactgggacaaatggcaagatgaggatgattgaggatgttggatttaatgacctcagtgatatggacctctcgaaactggacatgggaggtgctgatgatgacca

SEQ ID NO: 452237 - DNA, 418 bp, Sorghum bicolor
cgtccgcggacgcgtgggatcgataaaagaaatcattcctctgttggagcagacaacacagttaagagcaccacttcttataattgcagaggatgtaagtggcgaggcgctggcaacattagttgtaaacaagcttagaggaattctaaatgtggctgcaatcaaagctcctggctttggtgagaggcgtaaagctcttcttcaggacattgccattgttacaggtgctgaatatcaatccaaagatcttggtctactagttgagaatacaacagtagagcagcttggcatagctcggaaagttacaatctcaagttcctcgactaccattatagcagatgctgctagcaaagatgatatccaagccagaattgctcagctgaagagagagctttctcagacggactcggcttatgac

SEQ ID NO: 452238 - DNA, 337 bp, Sorghum bicolor
tcgacccacgcgtccgcccaccaccacccgtctccttcctccctgccttccccgagccgagcgcaaagccagcgcagcgtcgcgcccatcctcttctccctccttgttggatcgcagctccttcctcctagcgtccgatacaccaggcttccttctgcgagcaacgattattggcgtgcgcactggcaatggcgtccacgtcgagctcgacgacgccagccgtggagctggaggcagtggatgaaaggggccggaagcggtagcgcgcggtcggggcggctgagccagcggcgccgttgcagccgttcaagtggcggacgcggcgcgagcactagat

SEQ ID NO: 452239 - DNA, 816 bp, Sorghum bicolor
cgtccggacccacgcgtccgcgacccacgcgtccgggcgaaccctcgtcgcgatccggccccaaggtctcgagatgaacgcgagggcgaagtccagcggcggcgactccaggctttcggtgaagaagggcaaggctcagaaggacccaaacaagcccaagaggcctccgagcgcgttcttcgtcttcatggaggagttcaggaaggactacaaggagaagcaccccaatgtgaagcaagtctctgtgattggcaaggcttgtggtgacaagtggaagtccctgtctgatgctgagaaggctccctacgtctctaaggccgagaagctcaaggttgagtacaccaagaagatggacgcctacaacaacaagcagtctggaggccccacagcgtctggtgattctgacaagtccaagtctgaggtgaatgacgaggacgaggagggtgacgagtgatggatgacggatggagggagctctcgcctgcccaagtgcttgcagtcagtagggaaattctcatcgtcgtgggccgaaccgggcttttgctgctccttttagcctctggaagctgtctgtctgtctttctagatgcagtagactagtagtagtggccgctcgttctctgagttggtagtcgcaagtgttgtccgtccctgaagtgatgcagtttagctggtagtgtgttcgcttcttcggcacttgaccgcttgttggaatggcatgggatgtttagcctgcagtctgtacttacccacgagcatctatgatgcctctgttttaacaatctcagatctcaatagatgcctgttttaagtctc

SEQ ID NO: 452240 - DNA, 416 bp, Sorghum bicolor
cgtccggaacagagtcacttcgccacagacagcagcgcatctcgatcgctgtcgtcgcccagctcaactcggctccagcctccccgcatcggccatggcccttcaggcggcgctcctcccttccactctctccgtccccaagaagggcagcctcgccgccgcggtgaaggacacggcattcctcagcgtcccccagaagaagctgcaggcggcgtcgctgtcggtgaggacgcaggtggcgacggcgcctgtggccacgccggggtcgagcacggcgaccaaggacgggaagaagacggtgcggcagggcgtggtggtgatcacgggcgcgtcgtcgggtctgggccttgcggcggccaaggcgctggcggagaccggcaagtgggcacgtggtgatggcctgccgcgacttcctc

SEQ ID NO: 452241 - DNA, 641 bp, Sorghum bicolor
cgtccgcggacgcgtgcgcagacgcgtgagcggtacgcgtcgtggtcgacccgcctgagaacggtcacggtaccagatgacgctcctgcgcagccgtgggaatattcctaagcttattcgagcttgtgatgaacagcatcactggaaagaacttacctacctgtacatacagtatgatgaatttgacaatgctgccaccaccattatgaaccactctgcagatgcatgggatcatatgcagttcaaggatgtttgcgttaaagctgcatatgtcgagctatattacaaggcagttcacttctatttgcaagagcatcctgatctcattaatgatatgctaaatgtgcttgcacttcggttagatcataccagagttgtagacataatgcgcaaggctggccaattgcatctcgtgaaaccatatatggttgcagttcagagtaacaatgtctctgctgtgaatgaagccttgaatgagctttacgttgaagaggaggactatgagagactccgggaatcagttgacatgcacgacaactttgaccagataggtcttgcccagaagcttgagaagcatgaattgcttgaaatgaagaggatggctgcctacatttacaagaaggctggcaggtggaagcaat

SEQ ID NO: 452242 - DNA, 820 bp, Sorghum bicolor
cgtccgatcatctcatcgaaggctggcctgaagtacctgggtcctgatgttgatgctatgaaagctgtggccgatgcctactccaaaaggtctgtgaagtactttgaaactgctcttcgtgattacaaagctcagctggaagaagatcctattgtccacaggcacctttcttcactgtatgatactctcctggagcagaacctctgcaggttgattgagccctactcaagggtggagattgcccacatagcagagatgattgagctgccaatcaaccatgttgagaagaaactgtcccagatgatccttgacaagaaattcgcagggacactagatcaaggtgctggctgcctcatcatctttgaggacagcaagactgaggagatcttccctgccacgcttgaaacgatcaagaatgtcgggaaggttgtggacagcctgtacatgagatcggccaagatcatggcctgaaaaatgcagtggaaggcctaggtgttgtcaacttcttttcacggtctactgtcagtccagttgaccatacttgagctctccaagtgtcatcttattctggagtttttctttttctttttcgggtggcagactgtttgggttacaattagccatgttgctcatggatactcttgtttcggatgatggaagtactgtttaacgctattttatttttcctactttatgttattttcactggcgtgaaaatccaggttagctacctctgcacctgttgtgaacaggtaacatgttagccatttgttagatgtcgtataatcagtgtttgtctaatagtccccgttttctgttt

SEQ ID NO: 452243 - DNA, 880 bp, Sorghum bicolor
cgtccggtacataggagcattaagtataatgtttgggccagcacagccagcgggaacaggaagctggattctgcttaccgtgcggccaaagagaaagaagagcattgccctattttcttgtttttctcggtcaatggaagtggccaattctgtggcgtggctgagatgattggacctgtcgatttcgacagaagtgttgattactggcagcaggataagtggagtggccaattccctgggcgcgggcgcataattaaggatgtgccaaacaaccttctgaggcacatcattcttgagaacaatgacaataaacctgtcacaaatagcagggacacccaggaggtgaagctggaacagggcctccagatgcttacaatcttcaagagccatgaggctgagacaacaatcctggaagatttcgacttctatgagcaacgggagaaagccttgcaggagaacagacgtcaacagcagcctgccagcaccgaccctcagaagctggtggataccaaggctcaaggtcctgtggccgatatatcggatgcatttgctaaggccgttcagttgaaggatattgagaacagtgggacaaccccgaaagctgagggcgcatcagctgaaaacggatccgctgccacagccaaggttgaaggaagtgcagacctgaacatgggccctgcggaggaaagcaagttgatttgtttcccttctgtctgcaaatttggagcagcagatgaatagcatgctgcaatgtgaaggtcggaaaggggaaagtgcaggttgattgtgttaaatatggtcgtgcccgcgtcagttgtacaacatcataggctttgtttttatctccatttaggttatataatttcaatatcatagttcc

SEQ ID NO: 452244 - DNA, 443 bp, Sorghum bicolor
cgtccgcccacgctctctccgacccaagccggcctcctcatcgcatctcccgtcctctctatgcagcagcacatcgcatcgtctcccctccagcccagatctgagatgcaccctaagatgggatctggcgtcacgaggttgcccaagatcaaccctcgcgtcttcttcgacatgaccgtggccggtaagccggtgggtcggatcgaaatggagctgtacgcccccgacgcccccgccgccgtggagaacttcgtcgacctctgcaacggcgggtgtgtgggagacagcgggaacaaactccactacaagggctccgtgtttcacagcgtcatccccggttacatgtgccaggggggcgacatcacccacggcaacggcaccggcggcgaaactgtcttcaagaagccgttccgcgacgaaatcaatcgggagctgcaacgggt

SEQ ID NO: 452245 - DNA, 1140 bp, Sorghum bicolor
cgtccgtgcttctttcccggccggtccggttgcccccatcccatcctcggaagccagcctcgcctcgatctccccgttccctcgtgtgccgactgagggcggcggggcgactaatggggacggtgagcgcgcgggcgatggccgccgcgctcgccgtcttgcttctcgcctgctctggcgccgtcgctgtcgccagggcgcatgacaccgagcggatcgaaggaagtgctggtgatgtgctcgaagatgatcccgttgggaggctcaaggtgtatgtctacgagttgccaaccaagtacaacatgaagatggtggctaaagattctcggtgtctcagccacatggttgctgcagagatcttcatgcaccgcttcctgttgtctagtgcgatccgaactttaaatccagaagaagctgattggttctatactccagtatacacaacatgtgatctcacaccatggggtcatcccttgccctttaagtctccacgaataatgagaagcgcaattcagttcatttccaaccgttggccatactggaacaggacagagggagcagatcacttctttgttgtgccacatgactttggtgcatgcttccattatcaggaagagaaggctatcgagcgaggagtccttccattgcttcgccgtgctacactagtccagacttttgggcaagaaggatcatgtctgcctaaaggaaggctccatcaccatcccaccatatgctcctcctcagaagatgaaaacccaccttgttcccccagggacccctaggtcaatctttgtctatttccgtgggttgttttatgacactgcaaatgatcctgagggtggttactatgcaaggggcgcccgtgcatcagtatgggagaacttcaagaacaacccgcttttcgacatctcaactgaccacccaccaacctactatgaggacatgcagcgtgccgtcttctgcctgtgcccactgggctgggccccatggagcccccgtttggtggaggcggtggtgttcggctgcatcccagtgatcatcgccgacgacatcgtccttccctttgcggacgcaatcccatgggaggagattggtgtctttgtggctgaggacgacgtcccgaagctggacaccatcctg

SEQ ID NO: 452246 - DNA, 525 bp, Sorghum bicolor
cgtccgcctcatcaagcagttggagggttcagttgatgaaaataaatcccgcttgatatgtcttgactcccgcttgcaatgcatggagcaagagctgaagctaaaagatgatgtttgtatcagcctgaaaggaaatctagcaagcagcgaaagtgaaaagaacagcttggagcttatgaataagggacacattctggaaattgaaaaactatgccaggacaataaggatcttaatgaattgcttagcagcttcatggttaaaggaactgagctagataaagagcatgcctctgtgtcaagtcatgtatctaggctgatttcttcatttgaaaggttctatgacatggcccaagaggagaaattgctaatggccagatcttctaaggataaatttggacatcttcaaagccagtatgtatatttgatgtcagaaaacaatgctctgaaaactgaaattgaagaactgaagtccaaacttatagagttgcagagaactcaagaaattgttatggctcaacatgttga

SEQ ID NO: 452247 - DNA, 493 bp, Sorghum bicolor
cgtgcgctttcacgtctttccggtttctcctctcgctcccctccgccggcggaggagctcatggcatcctcttccatggccgccgtcgcctgcgccaccggcaccgccctctcgccgtcgaccgcgacggcccagaggccgtctgtccagggccgcctcgtcttccccgccgcgccctcccgctcccactctctccggctccgcgccgccggccgccggtcaactcgggcatccaaggttgtggtggcagcgttggctgacccactcaaggtcatgatatcaggggctcctgcatctggcaagggcacgcagtgtgagctcatcaagaccaaattcggtttggtgcacatctccgctggagatttgttgcgggcggagatcgctgctggctctgacaatgggaaggcggccaaggatttcatggagaagggccagctcgtgcctgatgagattgtcgttaatatggtgaagaacgtcttctgcaaccagatgc

SEQ ID NO: 452248 - DNA, 998 bp, Sorghum bicolor
  unsure (1)..(998): unsure at all n locations
ggcacgaggttccgttccactcccaggctcccactctccccctaccggctacccacacacacacaaacagccactcctcacctcccccaccctccggttcatgtcctgctgctccccatgtcgcccccactcgagctcgactacataggcctctcgccgcagccggccgccgccgccgccgccgccgccgatgccgacgacgacctgaagggtaccgagctccgcctcggtctgccagggtccgggtcgccggaccgccgtgtcgcggctgccaccgctaccaccctggagctgctcccggccaagggcgccaagcgcgggttttctgacgaggcgcccccgccatctcccgctgccgctgccgggaagggaaagaaggtggcggaagaggaggacgacgacaagaaggttgcagcgacgccgcagccggccgcaaaagctcaggtggtgggatggccaccaatccgcagctaccgcaagaacacgatggctaccacccagctgaagggtagcaaggaggatactgaggccaagcagggccagggattcctggacgtcaaggtcagcatggatggcgcgccgtacctgaggaagattgacctcaagacttacaagaactacaaggacctgtctactgcgcttgagaagatgttcagtggcttcagtactggcaaggatggcttatctgagtaccgcaaggatggtgaatatgttttgacttatgaggacaaggatggagattggatgcttgtcggcgatgtaccatgggagatgttcgctgactcttgccgcaggctcaggatcatgaaaggatcagatgcaattggacttgctccaagggcagctgataagtccaagaaccgcaactagaatggttgcttcctacagtccaaagcaagagggagatccaatggcttgagggatctttatgaaaaccaaaaagtctaacantttttagaaaaaaattttgnctttatgtctggactacattggtttgt

SEQ ID NO: 452249 - DNA, 792 bp, Sorghum bicolor
cgtccgcgtctcctcccgatgccagacgccaggggcgacgagatggcgacggcgccgacgccggccgcgagcggctccccgcgggcgccctcctcctcctctgcctcttcatctgcctcctcctcctcctcttcccgtcctcctcctccgtcgttcctcatgtgctcctgtgctacaggaaaccctaggtgcttctgctcgaggaccccagctgcgcgtgccctcttcctttgcgccggtggttcagctccgcagctggatgtggcggttgctggcccctccaccctgggttctcagcagcggcggcgacgccgagtcatcccctcctcgcttctcttcagtgcgcacaggctcagccaccagttgtcagcaaataggatgcacgaagatcagctttttttgcctagctacactactgatccaagagtctatggcgttcccataccatgtgtctgatgagtcattatcatagccatgtgaatgtaaaagcttcattgatcagggcccttctcatggtacaacatggtggctgtttttggggaatgcgtctatggatttatgccagtgcgaagtgtggtctgcatggtcttcaggatgggatatggattgttgtaaatgatccttatagcaacaaatatgatgatgtgaaattgcctgataagaaacctgctagttcactctttctattcacgaagttgtatggcttcactctatgtccttattgcctgctagatgaacaggtatttcattctacaatttaagtagtgcatctctgttacttgtcttcaatgt

SEQ ID NO: 452250 - DNA, 513 bp, Sorghum bicolor
cgtccgcttcaaagtcagatgactaccaagacagcgatggtgaacaagaaaatgaggcacttgatcgcagcaaccggcgaaggaaaagatctcagagatacacacaagactttgttgaggctgtctcggatattgatcctaactttgatagtgatgatgatatcatgggagaggcagtgtatgatgaggaatacctgagaagtcgcaaacagaataaagcatcaagtgcctctgaagaggatgaagagttccggttggaagaagatgctgaagatgatgatgaagaggaatattcattaagtagcagtgaagatttagaggagccgcaaccacaacggcataaaaaattggaaactcgtggccggcgaggtaccaagctgagatctgttgatgaaatcgaaacaggtctcagacgcagccagcgttcttctcgtcctcgtctctataactaccgcctatattttcgactcgatcgagctgaaggatgaattgtcataatctgtctgtcatgca

SEQ ID NO: 452251 - DNA, 664 bp, Sorghum bicolor
cgtccgcccacgcgtccgcggacgcgtgggtgagatttggaatgcgatgtccactttgacaaagtccatgtgctggaagatggtcaacaagactaaggataagttaaatcaagttggtatggtcatatttcagaaacgcaatggacaacatttgctatgagaaaagatccgaaaacaacccaccattgtgcaaggaatctgatgatgcagatgcagcttggggtgtaccgttggaagcatgcatgcacaaactgcctgttggctcgaaagttcgagggtcaaaatggccagagttttggccacaaaggcttgagaagactcctttctggactgatggttccaaggttggggtctatggaaagcctgcaaatgaagatttcgaggcagataatgctcactggaaaagggttgtaagtaaatcgtatgtgaatggcatgggaattgactggtccaaagtgagaaatgtaatggacatgagagctgtgtatggaggttttgctgcagctctgagggaccaaaaggtctgggtcatgaatattgtgccgattgattcaccagacacactgcccatcatttacgagcgtgggttgtttggtatgtaccatgactggtgcgagtctttcagcacttacccaagaacttatgaccttctgcacgcggacca

SEQ ID NO: 452252 - DNA, 445 bp, Sorghum bicolor
cgtccggagagttggacttgcagaccctaataaacttgcccgttgtgatatatgtgaaaattcacctgctttcttctactgtgagatagatggcacctcactttgcctgagctgtgatatgactgttcatgttggtggcaaacgaacccatggaagatacctgctcctaaggcaaagggttgaatttccaggagataaaccaggccatatggatgacgtgcctatggaaaccgtgcctatggaaaccaaagatcctgaaaaccagagagaccagaagaaggcgcccaaggagcaaatggcaaaccaccataacggcgatcacccagcctgtgatggcaattgcgatgaccagggcaacattgatttcgaaaatgatcgatcttaatatgcggccggttcgtactcatgggcaaggatcaaattcccagactcagggggtagatct

SEQ ID NO: 452253 - DNA, 563 bp, Sorghum bicolor
cgtccgcttgatcctatcgaagacggcaagcaacgaggtcatggataccgtggaccctgacatcggggacacctgcaaggacctcggcgaggtgaagaagctgttccagctggcgctcctttgcaccaagcggcaaccctcggaccgaccgacgatgcacgaggtggtgcgcgtcctggactgcctggtgaacccggacccgccgccaaagccgtcggcgcaccagctgccgcagccgtcgccagccgtgccaagctacatcaacgagtacgtcagcctgcggggcaccggcgctctctcctgcgccaactcgaccagcacctcggacgccgagctgttcctcaagttcggcgaggccatctcgcagaccatggagtagggaagagagagaggtctggggagttgaaggatgcacggagtagtgggagtagctgactgacattttgtgggatgcaggaggagattaacatggtgaactcagtagggtgtggttaactgtaaaaatgtatgtgccttaggcagcggagagctcttcctatgttttttatttatacccccatttt

SEQ ID NO: 452254 - DNA, 2072 bp, Sorghum bicolor
  unsure (1)..(2072): unsure at all n locations
cgtccgcccacgagagaattccctccccctagccgccgccgccgccgctcgtgtcgccgagagaaggtgacgagaccgaggaactcgccgagttcttggtagagaatcggttttgcttgtctcagcccggggtctgctgcgtcgggtggtggtgaaggggggaaattcgtgagatctgttccggatcacgcgtgcgcgctcgggaatcggggttcctcacatagcttcgtcgatttgaatttgatgtactaatggagtctaagggtggcaagaagtctagcagtagtcgttcaatgatgtatgaagctccccttggctacagcattgaggatgttcgacctgccggaggcgtgaagaagttccagtctgctgcttactccaactgcgcaaagaagccatcctgatatcccttctggtttacttgttcttgtagtttaggatttcttttctgacactttgattctgaccaatcctctggcctgctgcttcctgataatcgaccagttccccagtcttgctccctgcactcctccctccaccgtcttcatctccagcattgtgttctgattcacctgctccaatggctgttctttctgctgctgatgctcccccggtctcagctatcgggtttgagggctatgagaagcgccttgagatcacattctctgaggcacctgtctttgccgaccctcatgggcgtggtttgcgtgccctctccagggcccagattgactctgttctggatcttgcacggtgcacaattgtgtcgagctctccaacaaggattttgactcctatgtctctctgagtcaagcttgtttatctatcctctgaagattgtcatcaagacctgtggcactaccaagctcctgctcacattcaaggatacttgagcttgctgaagagctgtctatgcactgctgctgtgaagtactcccgtgggacgttcatctttccggtgcacagccagctcctcacaggagcttctctgaggaagttgctgcgcttaaccgctactttggtggcctgaaatctggtggtaatgcttatgtgattggagatccagcaagacctggacagaagtggcacatctactacgccaccgagtacccagagcaaccagtggttaaccttgagatgtgcatgactggtctggacaagaagaaagcttcagtctttttcaagactaatgctgatggtaacacaacatgtgccaaggaaatgacgaagctctctggtatatctgaaattatccctgagatggagatctgtgattttgactttgaaccctgtggctactccatgaatgcgatccatggctctgcattctcaacaatccatgtgacgcctgaggatggtttcagctacgccagttatgaggttatgggctttgatgccactgctctgtcttatggtgacctcgtcaagagggtccttaggtgctttggccccttggaattttctgttgctgtgaccatcttcggcgggcgtggccaagctgggacgtggggaaagcaacttggtgcagaggtttatgactgtaacaacatggtggagcaggagctgcctggtggcggactcctcatctaccagagcttctgtgctgctgaagacgctgttgctacctcgcccaaatctgttcttcactgcttcgaaggtgtgaacatggagaatgctcctcctgtgaaggaccgcaaactggctaatcttctctgctgggaggaagtggatgccatggagaaggatggagtgcttgatgagtaagatgggcttctggtgtcgatttgcttctgagttgttttttttatctttgcaatttcgttgtcgtcgtttggttattctgtgaagcagccaagccaggctattagagtatgaaaaatgtcgtctgtaagcatgttttcctatgttgccacatgctgaatcaatttgaataagtattaatacagctctaggtggtcagctgcgtctaccacaatgagcatatatgtatggagaaatgtctgtccaagccattttatttaagaataataattttttttcgagttaaagtgatatgtgatttgtttcttnnn

SEQ ID NO: 452255 - DNA, 731 bp, Sorghum bicolor
cgtccgcgttccgtgagcttgaagatggacatctccggcgcctacatcgccggctacgaagcagggaacttctcgtgcctcgtcaagagatcaggctcaggccacacgttgtcgtcggtgacctgttaccggagctcgtatccatggggaggtcctccgaccgtcgacgtcgccgtccccgaggtgtccgcatggcgggtggaggatctcgacgaggctatctcgtcgctgttcctgttcccgacggggaacgcgacgaaggaggacctgagccggggcctcgccgcctgcgacgtgatggtcgcgaccgcggccacgttcccgtacgtggagcggcggatgagcgccggcatgtgggacggcaacggcgtgtccaacgacgggagcctgcgcgggcttcaggagagctggccggacctctccgccgccgtccaggagtcctaccagggcgccttcgccgctccggtggctcttcagcggagcaacggcgagtggatgctggtggacaacgtgcgtcgtgccgtgcccctcgtctccttccttgagaacgcaggctgcaagaagaagatgacgacgacgacggaggcggcggcggcggaccagcggcttcccttgctcatgaggtccgtcgtgcaacagccgccgccggatgaggaggacatgcagatgcagctgggcagttcgccggcggcggcggcggggacgacgtcgtgcggccaggccgagccgac

SEQ ID NO: 452256 - DNA, 838 bp, Sorghum bicolor
cgtccgggccgccttgaagaggcgaggtaagatgcaacatgtaagagtcgagtcaagagtctctgcgtgcgtcggcgaaaaaaaaaaagaagaggaaaaaaaagatgtgatgctagatgcctttgccatgatgggtgcgctcgcatggcaggccacggtgataataaaaagatgattattgtgtcccggggggagagatcgccacgggggttgaaattttttggccccgggttctcctcccccatggtgttccctgtccttgcgtccgttgcttgcgttctccgctcgtgttggtcagctacacgctgggtttttgcatctactatcacggagatctacacaacacgtcggaattttttgcatcttatacggagatctacaacgaagctacagcgagaatcccaaggtacaatcgttaattaagttgaaacaatcttttaagtcgtttcgtgttccttctattccacacgaagcctatgttcttattctgcgcttgcatgttcaaaatatgctgaaacaaccatgaatagccatcgaactgaagatcctaaaacaccctaccaacaacttccactccatcaacttccactttgcccagcacagttgaagttagtcttctataattgaagactggcatgaactcaacgaatcacgcgttattaatgattcaatgaacttcagaagtgtgtaaaagtttaggttgcatctgcaaattatatttctgctgttgagcctgataatatcattcgcgtattatctgtaaaacccttttgtctgatggcactgcgtttctatttcatttggatattatattttctgcaatttttcttgcctaatt

SEQ ID NO: 452257 - DNA, 413 bp, Sorghum bicolor
cgtccgggcggcggcggcggactggaaggcgcaggaggaggaggaggagcagcagcaggcggcgccgaggagcggcttcccaccccgagcttgtaaccatggctaggggattgaagaagcatctcaagaggctcaatgcgcccaagcattggatgctggacaagcttggcggagcttttgcccccaagccatcttctggtcctcataagtccagagagtgcctgcctctgatcctcatcatcaggaacaggctcaagtatgctctgacataccgtgaggtcatttctatcctgatgcaacgccatgtacttgtggatggcaaggtcaggactgacaagacctaccctgctgggttcaatggatgtcatttccatccccaagaccaacgagaactacaggccgctgtatgacac

SEQ ID NO: 452258 - DNA, 679 bp, Sorghum bicolor
  unsure (1)..(679): unsure at all n locations
cgtccgcanagggaagacccagagctcattgcatgagctcgatgactcaccttccataattcgtgaaagccgctgggcgaatctacctcctgaactcatccgtgatatcatacggaggctggaggctgatgagagcacctggccagcacggaagcatgttgtttgttttgcagctgtttgtaggacatggagggagatgtgtaaagagattgtgttgagcccggagttatgtgggaagctcaccttccctgtgtctctaaaacagcctggccctcgagatggaaatacaatgagtcagggtgttataaagaggaataaatcaaaatccacttactatctctacctgtgccttaagcaatgttgttacttcagaaagtgggaaattcctcttgtcggctaaaagacaccggaaaaccacatgcacagagtacactatatcaatggattctggcaacatctcaagatcaagcagaacctacattgggaaaaataagggcgaatttccttggcacaagatttttaatttatgatacacaaccaccctataatggggctgtagttcctccttccggaaggaccagcagaaggttcaactccacaaaagtcttttcaaagttgccttctgttagttacaacatcgctcaggtgtcgtatgagctgaatgttcttggcacgagag

SEQ ID NO: 452259 - DNA, 569 bp, Sorghum bicolor
cgtccgcgtgattttgaagagaacggttccatggaacgggtcaccctttttctgaatctggctaatgatcccaccattgaacgtattatcacccctcgaattgctctaacaacagcggaatatttggcgtatgaatgtgggaagcatgtacttgtcatcttgacagatatgagctcttatgcagatgcacttcgtgaggtttctgcagcccgagaagaggtgccaggtaggcgtggttatcctggatatatgtatactgatttggcaacaatatatgagcgcgctgggcgtattgaaggaagaacaggctccattacccaaattcctattttaacaatgcctaatgatgatatcacccacccaactcctgaccttactggatacattactgagggacagatatacattgataggcagctccataacagacagatttatccacctattaatgtcttgccatctctctctcgattgatgaagagtgctattggagagggcatgacacgtcgtgaccactcggatgtgtctaatcagctttatgccaactattgcaatgggaaaggatgttc

SEQ ID NO: 452260 - DNA, 792 bp, Sorghum bicolor
  unsure (1)..(792): unsure at all n locations
cgtccgctagatctgtcctactcatccattggacagaatgcgatagaagatcttcttgcttgttgtactaatttggttaatgtgaacttgaacggatgtacaaactttcaagaattggtgtgtgggtcagatgatagcagttctgtggatatgccagttgacttttgtccacctagttcttcaccaatcaagagtgaagagatcagtgagcgatctggtcgcctgcttgaagttctcagttgtactgggtgccctaatattaagaaagttgttattccttcgatagcaaactttctacatctgtccaaaattagtcttaatctttcgaccaacttgaaggaagtggatttaacatgctccaaccttttcatgttaaacttgagcaactgtagctcactggaggtgctgaagcttgattgcccaagattgaccaatctccaacttctggcatgcaccatgttgcaagaggaggaattagaatctgcaatatcccgctgtagtgcattggagatccttaatgtgcattcttgtccaaagatcaatgctctggattttggcagactccgtttggtttgtcccagtctgaagcgcatccagagcagcctcatctcataatacagaggctgctaccctataacggagcgcaattcatgcaataagcctctgttcagaattgaaagaaaaaagcaagtcangaaaaaagctctccttggtgctcttgtacatagtacccaagcattgccggtatattgcatggcatggtatattaggagccaggggcgatgtgatcct

SEQ ID NO: 452261 - DNA, 540 bp, Sorghum bicolor
cgtccgctcccaagccctatcctttccccacctcccgggtctcccgcattcctatcctctcctctcctcatccgcgccgccgccgccgccgccgtagtcgccgccgccgcggcttcccctcctcccccgagccaagatgaatgttgacaagctcaagaagatggcaggtgctgtgcgcactggggggaagggtagcatgcgcaggaagaagaaggcagttcacaagactacaaccacagatgacaaaagacttcagagcaccctgaaaagaataggagtgaacaccattcctggtattgaagaggtcaacatctttaaggacgatgttgttattcagtttgtgaatcctaaagtgcaagcttcaattggtgctaatacatgggtggtcagtggaactccacagacgaagaagcttcaagatctgcttccatccattatcaatcagcttggtcctgacaacttggacaacctgcggaggcttgcagagcaattccagaagcaggcccctggtgcttctggtgcagaggctggtgccagcgc

SEQ ID NO: 452262 - DNA, 1133 bp, Sorghum bicolor
  unsure (1)..(1133): unsure at all n locations
cgtccgaagtggacacgatagttgtgctgtggactgcaaacactgaaaggtacagcaatgtatgcactggtctcaacgacacaatggagaatctgctggcgtctgtggacaagaacgaggcacagatctcgccatcaacactatatgccattgcctgtgtcatggagggggtgccgatcattaatgggagccctcagaacacctttgtgccagggctgattgatcttgctattaagaacaactgcttgattggtggtgacgacttcaagagtggacagaccaagatgaaatctgtcttggctgatttccttgctggtgctggaataaagcccacctcaattgtgagctacaaccaccttggaaacaacgatggcatgaacctgtctgcccctcaaacattcagatccaaggagatctccaagagcaatgtggtggatgacatggtctcaagtaatgctatcctctatgagcctggcgagcatcctgatcatgttgttgtcatcaagtatgtgccgtatgtgggagacagtaagagggctatggacgagtacacctccgagatcttcatgggtggccagaacaccatcgtgctgcacaacacctgtgaggactcacatcctcgccgcacctatcatccttgatctggtgctcctggctgagctcagcaccaggatccagcctaaaactgagggagaggacaagttccactccttccacccggtggccaccatcctgagctacctcaccaaggcacccctggttccccctggcacaccggtggtgaacgctttggcaaagcagagggcgatgctggagaacatcatgagggcctgcgttggcctggccccagagaacaacatgatcctggagtacaagtgagcgaagtggcgtggcctatatgcaggaggctgctggaagggaactagaatggcgagattagctgtgggattgtattggcttctcgtgttttcttttgcgttctttcctggtcattgctgttacgcttgtgtatttgtcggacccgtaactatcanggctctgctattagcggcacgaagcctgtaatagtatcaagtatcgtatgataatttgatgggaggtgctagtttccctcggcattcctagtgtcattg

SEQ ID NO: 452263 - DNA, 477 bp, Sorghum bicolor
cgtccggaggggcagtgcttgagagagagagcgcgtccgggggagacccatcacccattaccaatgccaagaacaagaagccagagaggacagccgcgaatccaatccgaatcccctccaaaaacccaccaaactgcctcccccatctgcaagaacaagagcagcaggagagcatcctagtagggaaaaaaataggagaaaaaaaagaagcccagagagaccagctgaccaagcaaaaaggtagcatctttgtgtcaccaagacaccgccgatcacagaccaaatcccccctcctctggtccatcccgagcgtagagcagcggagatttcttcgatctgtgcttgcgttttttttccgggtaaaagatttgtttttcctttgactggtactagcggtgggttgttgaaagtttcgaggagagtgctgtgtgagtgtgaaagctcaagatgatccggcctgtttgacacgtatacgcc

SEQ ID NO: 452264 - DNA, 832 bp, Sorghum bicolor
gcgtccgcagagcaagcatgtcaccgtggaggagccccctgctgttccagcacagccgtcggtgctgccacctggtgtgccaaccgaagagcttgctgcggtcaagatccagaccgccttccgaggttacctggcaaggagggcactaagagcactgcgaggtcttgttcgattgaagtcattggttgagggtaattcagtcaagcgtcaatctgcaagcactctgcgctgtatgcaaactctatcgcgggtgcagtcacaaatacgttctaggagagcaaagatgtccgaggagaaccaggccctccaacgccagctcctacttaaacaggaattggagaattctcagaatgggtgagaactgggatgacagcactcaatccaaggagcaaatcgaggcaagcctgataagcaggcaagaagcagcgataagaagagaaagagcgcttgcatatgcattttcacatcagtggaagagtacttcaagatctgtcaacccaatgtttgtagacccaaacaacttgcagtggggctggagctggttggagcgctggatggcagcaaaaccttgggagggccgtaatggggctgacaaggagagcaactttgaccgcggatcagttaagagtatgagcttgaaccttggagagggtgaaatcacaaaagctttcaaccgccgggactcaaagccagaaaagccatcaccaccaactccaaaaccaacccgtccagcctggcaatccccttcgacaccatctgctaaagtggcaccaatacctgccaggaggaaatccgccacgccaaagaatgggctttcacaggtggacgatga

SEQ ID NO: 452265 - DNA, 510 bp, Sorghum bicolor
cgtccgcgatcccccaaatctcctcccaaaccctctgccgacccagatcgaaacccagggactcgattcgtcgtcggaggcggccatggcgctggagtgggtggtgctgggctacgcggcgggcgcggaggccatcatgctgctgctgctgacgctgccgggcctcgacggcctgcgccggggcatgatctccgtggtgcggagcgcgctcaagcccatgatgtcggtggtgcccttctgcctcttcctgctcatggacatctactggaagtgcgagacgcgccccacctgcgacgacgagcacgcctgcacaccctccgagcacctccgccaccaaaagtccatcatgagcgcgcggcggaacgcgctcctcatcgccgccgcgctgctcctctactggatccttttctgcgtcacccaactcgtcgtcaggctcgagcagatgcagtaacgtgtcgacaagctcaagaagcgcgacgactgatagatgggccggccggatcccagttt

SEQ ID NO: 452266 - DNA, 534 bp, Sorghum bicolor
cgtccggcggcgacctcggtggtggcgagggccacaacgggtgggtctcctgcgtcaggttctcccccaacaccttccagcctaccatcgtttccggatcctgggatcgcaccgtcaaggtctggaaccttaccaactgcaagctgcgctgcactctcgacggccacggcggctatgttaacgccgtcgccgtgagccccgacgggtcgctgtgcgcatctggcgggaaggacggtgttactctgctgtgggatttggctgaggggaagaggctgtactcgctggacgcgggctctatcatccactccctctgcttctcgcccaaccgctactggctctgcgctgcaacacaggactctgtcaagatctgggaccttgagtcgaagcacgtcgtgcaggacctcaagcccgacatccagatctccaagaaccagatcctgtactgctcaagcttgagctggagcgcggatggaagcaccctctacactggctacaccgatgggtctatcagggtttggaagatctctgcttatg

SEQ ID NO: 452267 - DNA, 1036 bp, Sorghum bicolor
acgcgtccgcgaacgctagggttttgctgctccccgaccccgtgctccgaagcccgccgcatcgccgcaccaggcgcggccctcctttcgtgcgaccgagatggcgctcccgaatcaggggaccgtcgattaccccagcttcaagctcgtcatcgtcggcgatggcggaacgggtaaaactacgttcgtgaagaggcatctcactggagaatttgagaagaaatatgaaccaacaattggtgtcgaagtccacccattggatttcaccacgaactgtggtaagatcaggttctactgctgggacactgctgggcaagagaagttcggtggccttagggatggatactatatccatggccaatgtgctatcatcatgtttgatgtaacctcaaggctgacttacaagaatgttcctacatggcataaggacctgtgcagggtgtgtgaaaacatccccattgtcctctgcggtaacaaggttgatgtcaagaacaggcaggtgaaagccaagcaggtcaccttccacaggaagaagaatctgcagtactatgaaatttctgccaagagcaattacaattttgagaaacctttcctttaccttgcgaggaagttggcaggtgatccgaaccttcactttgttgaagctgttgctctgaagcccccggaagttaccatcgacatggctatgcagcagcagcatgaagctgagcttgctgcagcggctgcacaacctcttcccgatgacgatgatgatctgatcgagtagagaggatcatgagtctctgccttgagcaggagttgtgccttgcgttttaagttgttctagggtgaactctctcttgagttagcattgtctggagcatctttctctccttggacgtgttgcaacttttgagtgtggaaattgatggactcgtcggcatgaatttgctggctactttatacattgctttgtaactctgtttgatgttaaacgttcttgtggcaacgctcgttgtgctgccattttgttatctatttgtctgatgtaccatat

SEQ ID NO: 452268 - DNA, 782 bp, Sorghum bicolor
  unsure (1)..(782): unsure at all n locations
cgtccggaaactgcacttcttctatcgggtgccacaatagttgatctttctgtcattattgcgcctgctccagagtatcagccaccccctacgtactctgcgccaccaatgagtggaaccagagttgcagttggtggagacaacaccgttgtccacaaggctgaggatgttgtcagctctatgcttgccaagggtttcgtgctaggcaaagacgctgttggcaaggccaaagcgttcgatgagaagcacggcttcacttccacggccggtgctaaggtagcctccattgacaagaagattgggctgagtgataagatcaccacgggcacatccttggtcactgggaaggtgaaggagatggaccagaagttccaggtctctgacaagaccaagtcagcattcgccgccgccgagcagaaggtgagcagcgccgggtctgccatcatgaagaacagatacgtcttcaccggcgcgtcgtgggtcactggcgcattcaacaaggtcgccaaggctgccacggacgtcgggacgatgaccaaggagaagatggcagctgaggagcagcagaagggctctggcccttcctctgggggccactcgtacacgcccatccgatgattcattagcttggtgttatgcgcccttcctcaaaacagtgttgtattacatattggtggatgtaaaacatagatatatagaacagatcatcaggcccctctcaccacatgttcatcgntccatattctggtaaaattcgtactggtggggatttttcagtagga

SEQ ID NO: 452269 - DNA, 458 bp, Sorghum bicolor
cgtccgcccacgcgtccgcggacgcgtgggtgtttacttagctgatggtgatgaaactgttccagttcttagtgcgggctacatgtgtgcaaaaggatggcgtggcaaaactcgtttcaaccctgccggcagcaagacttacgtgagagaatacagccattcaccaccctcgactctcctggaaggcaggggcactcagagcggtgcacatgttgatataatggggaactttgctctgattgaggacatcatcagaatagctgctggggcaaccggtgaggaaattggtggcgaccaggtttattcagatatattcaaatggtcagagaagatcaaattgaaattgtaacccatgggaagttaaagaagcgccaactcattgattgcgttccaaagtgattgcctgagtgcaactctgtggattttgcttaaataaaaattgtaatttttcacacttc

SEQ ID NO: 452270 - DNA, 598 bp, Sorghum bicolor
cgtccgcggacgcgtgggctcggcctgatttcaggttcatattcgatgcgatgcatgcagttactggtgcgtatgcaggacctatttttgttgagaaacttggagctgatccggactgcatattaaatggggtgcctcttgaagattttggaaatggccatccagatccaaatctaacttacgctaaggagcttgtttttaccatgtttggaacccatgcacctgactttggtgcagcaagtgatggcgatggtgatcggaacatgattcttgggaaaaggttctttattaccccatcagactctgttgcaataattgcagcaaatgcacaggcagcaattccttatttccagtttggtacaaaaggactcgcgagatcaatgccaaccagtggtgctcttgatcgtgttgccaagaaattgaatgttccattctttgaggttccaacaggctggaaattttttggcaacctaatggatgcaggaaaattgtctatttgtggagaggaaagttttgggactggatctgatcacattagaaagaaggatggcatctgggctgttctggcttggctttccatacttgcacaccggaacaa

SEQ ID NO: 452271 - DNA, 371 bp, Sorghum bicolor
atcccggtcgaccacgcgtccgcggacgcgtggggacgccatccccatttctcgccggcggagcgcgcctgcgccccgggtgagagggagccaggatggccaagcccgctgccgccgagccattctccatacggggttacgccatgaggatgcgggccgtcgacgcggccgagtgctacccgtttcgcggcgggcggctgcagcgaaggggagggggagccgccgccgccgccgcggttcccgccgttggacccgtagccgctgtcacggtggtggaagcacgagctcgcggcggggcaggcccggcttttggctggcgccaagggcggagaggctgcggcaagccgggtccggggcagtgcgctgcggaa

SEQ ID NO: 452272 - DNA, 459 bp, Sorghum bicolor
ttcccggtcgaccacgcgtccgagcgccaccacatccgccagccatggcgttcgcgctcaaggccgccgccacggggtcggcgtcgttctccgccgcggggccgaggcggggcgccgcctccgccacggggagggtctcgttccggggcgccgcgcccgcggtcgccgtcagggcgccgcggctgccgtcgccgatgttgcggaggacaagcgcagcatctccggcaccttcgccgagctcatggagcaggggaagactgccttcgtacccttcatcactgctggtgaccctgacttgtccaccacagcaaaagcactcaagatccttgacgcgtgtggttcggatgtcattgaattgggtgtgccttactccgatccattggctgacggccctgttattcatgcctctgtgacactcgcgctagcaaagggcaccacatttgatgatgtcatctccat

SEQ ID NO: 452273 - DNA, 449 bp, Sorghum bicolor
cgtccggcccagcacgcacacgagcacgatggcgtccaccaccaccgccaccttcctcgccgtcttcctcctcgtggcggcgtcgtcctcggcgccggcgcggtcctgcgcaccgagcgacctgcacgcgctgctgagcgtgaagcaggcgctgggcaacccggcgacgctgtcgacgtggacggcgtcgtcgcccaactgctgcgcgtgggaccacctccggtgcaacgacgccgggcgcgtgaacaacgtcttcatcgacgccgcggacgacgtgcacgggcagatcccgtccgggtgggcggctgacggagctcatgtcgtgacctgtcaagctgcgggctacgggctcatcccgcggcctaccgcctgccagctgagttctaccgttccacacacggtcgggcatccgagtctgaccgtggcagctgatcgtgacttcagaccag

SEQ ID NO: 452274 - DNA, 681 bp, Sorghum bicolor
cgtccgaattcccgagcacaagttaagaaagctttggaggtcactcactacctaggtggtgaaaactatgtgttttggggtggaagagagggttaccaaactcttctgaatactgatatgaagagagaacttgaccatctggctaactttcttcaagctgctgttgaccacaagaagaagatcggattcaagggaacactgttgatagagcctaaaccacaggaacctacaaaacaccagtatgactgggatgttgcaactacgtttgcttttctacagaagtatggtcttacaggagagttcaagatcaatgttgagtgcaaccatgctactctatctggacatagctgccatcatgaactggagactgcacggattaatgggttgcttggaaatattgatgcaaacactggtgatcctcaagttggttgggacacagatcagttcatgacagacatcgcagtggctaccttagttatgtcgtgtggagtcaagactggtgcacttgcacctggtggttgcaactttgatgcagaggtgcggtgggacagtactgctggtgaggacgtggttcttgctcatatcgctggaatggacacccttgctcgtggcccccgccacgttgcctagctgatcgaggatggctccctagatgatcttgtccgaaagaggtaccagagc

SEQ ID NO: 452275 - DNA, 843 bp, Sorghum bicolor
cgtccgcggacgcgtgggcggacgcgtgggatctacaacaagcaggttctgaaggttttgccataccctataaacatcacaactgtgcagtttgctgcgggaagtgccattgctttgttcatgtggatcactggtatccttaaaaggccaaagatttctggcgcccagctttttgctatccttcctctagctattgtccataccatgggcaatcttttcacaaacatgagccttggaaaggttgcagtgtcatttacacatactatcaaggccatggaacctttcttctcagttctcctttcagcaattttccttggtgagttgcctacgccttgggttgtgttgtctcttcttccaattgttggtggtgtggcattggcatcccttactgaggcctcctttaactgggctggattttggagtgcaatggcttcaaatgtaaccttccagtcaaggaatgtgctaagcaagaaacttatggtgaagaaagaggaatctctcgacaacattaatctattctcgatcattacagtcatgtcattcttcctgttggccccagtaaccttacttacagaaggtgttaaagttagtccagcagttttgcagtctgcgggtttgaacttgaaacaagtatacacaaggtcattgattgctgcattctgcttccatgcataccaacaggtgtcatacatgatcctcgccagagtattcccagtcacacattcagtgggcaattgcgtcaagcgtgtggtggtcattgggacctctgttctattcttcaagacccctggtttttccatcaactctctcgggactgggatcgctcttgctggagtttttcta

SEQ ID NO: 452276 - DNA, 438 bp, Sorghum bicolor
  unsure (1)..(438): unsure at all n locations
gatcctgaacgggttggcacggaagctgccgcacggcgaggacgtgttcctgaagcccgggctgaaggtgctgaactggaccgagggcccccgtggcgacctgaagccatggtaggtgtagtggcatggcatggcaccgtcagcatggatgctgttcttgtgtacacggcacaacacaaccagatgcgaggctgatcgacaacgacgattatgagtactcccatgtaactgatgtaaatgtaaagcccagcaggacctttgcttctttttgaggcgatgtgttgtctgctttgcctgtgtctctgtgacagtgtctgttttgactttatgttagtgttagcctattatagattgcagatcatgtgatgtatggctgttgtattatattaagctatacagttgatgggggagaaaataaggttaacagttaaccccnna

SEQ ID NO: 452277 - DNA, 570 bp, Sorghum bicolor
tccgtattcccggtcgaccacgcgtccgcccacgcgtccggcgaaatccaatctagaagcggccctcctccctctcctccccatccgaaccaaatctaatcgacgcttccccgagatgggccgcaagttcttcgtcggcggcaactggaaatgcaacggaaccacagatcaggtcgagaagattgtcaaaaccctgaatgaaggacaggttccccctgcagatgttgttgaggtcgttgtcagccctccttatgtcttcctaactgtggtcaagagcctgctgcgcccagagttccatgttgctgctcagaactgctgggtgaagaagggaggtgctttcactggtgaagtcagtgctgagatgctcgtcaaccttggtgttccctgggtcatccttggacactctgaaaggagagctctgctgggagaatcaaatgagtttgttggagacaaggttgcttatgcgctgtctcagggactaaaggtcattgcatgtgttggtgagacccttgagcagagggaggctgggtcaacaaatggaagttgttgctgcacaaacaaaagcaattg

SEQ ID NO: 452278 - DNA, 807 bp, Sorghum bicolor
cgtccgctcctccccatccgaaccaaatctaatcgacgcttccccgagatgggccgcaagttcttcgtcggcggcaactggaaatgcaacggaaccacagatcaggtcgagaagattgtcaaaaccctgaatgaaggacaggttccccctgcagatgttgttgagctctgctgggagaatcaaatgagtttgttggagacaaggttgcttatgcgctgtctcagggactaaaggtcattgcatgtgttggtgagacccttgagcagagggaggctgggtcaacaatggaagttgttgctgcacaaacaaaagcaattgctgagaagatcagtgactggagcaacgtagttgttgcctatgaaccagtatgggccattggaactggtaaagttgccaccccagctcaggctcaggaagtgcacgcatccctgagggattggctaaagatcaacgtcagccctgaggttgctgaatctacaaggatcatctacggaggttctgtaactgcagcgaactgcaaagagctaggagcacagcctgatgtcgatggtttccttgtcggtggagcttctttgaagcccgagttcatcgacatcatcaacgcggccaccgtgaagtccgcttaagatgttccaacccttcaccctgatgcagagatatgctgaagaggaaggaacatacatttttttgtttaactgtgctatgtaagctagtagtaactttgcgctggagcatatactgttttccctcccccccagctttttgggaggctacagcttgagcttgctaataatgtttacctctgga

SEQ ID NO: 452279 - DNA, 843 bp, Sorghum bicolor
cgtccgggtgaaactagagtgagagcacatgctgttgcaagaggagtaagatcagatcaaattatattcacagacgttgccatgaaaaatgagcacatacgacgcagtgcactggcagaccttttcctggacacccccctctgcaatgcacacacaacaggcacggacatactgtgggctggtctgccaatgatcacccttccactagagaaaatggcaaccagagtagctggttccctatgcgtagctaccgggcttggggaggagatgattgttagcagcatgaaggagtatgaagatagagctgtagaccttgcgttaaatccagtgaagcttcaagcattgactaacaagctcaaggaagttcgtatgacctgcccgttgttcgatacagctcgatgggtgcgcaatcttgaaagggcttactacaagatgtggaacctttactgctccaggcgccacccggagccattcaaggtgttagaggatgacaatgagttcccgtttgaccgctaacgagatttcatcaccagcccggctctgtaaataaggcgagagttgtagcatatttagcattgtgaccgctccaggtgcttgtttgccgccgcctgtcctgctgtgcacatcacctctgtggaggctaacttgtgtagtatgtacactacaaaagttctagggctagcctgtattgttatccttattgttgccgaggtctatttattagtaacgagccacaactgttatcgggttgttactttgtattgcagtcgtggtttataaaataatctgtaactatgaaggttgtcgatgtgaaatctcattcttaatgacttctgtccgctg

SEQ ID NO: 452280 - DNA, 806 bp, Sorghum bicolor
  unsure (1)..(806): unsure at all n locations
ggcacgaggctctcttccccggccatccgcgccagacgaactcagcacccgcgcgcagcaaggagagtccacacgcccatggccagcaccaacatggcgtcggccacctcgcggttcatgctggccgctggcgtgcccaccgccggcagcggcagcggcagcagcggccgcgtcagcttcgcgccggcgcccaaccagctgggcaggaggctcgtggtccgggctgacccggaagctccggctgaaccggcggaaggggagggcgccgtggccaccaagcccaaggccgagaagccgccgccgatcgggcccaagaggggcaccaaggtgaagatcctgaggagggagtcctactggtacaacgggatcggcaacgtcgtcaccgtcgatcaggaccccaacactcgctacccggtggtggtgcggttcaacaaggtgaactacgccggcgtgtccaccaacaactacgccttggacgaggtccaggaggtgaatgaacaaaagtgaggccggctcaaggggctccccggcccgcgcgcgctagctagctcccgtgtgatgatttgtagttgtgaaatgaggctgtgaagctgcatgctgtgctagctagcgtcacaaacatcgatcttatgtgtaatagcttaatctccataatcatcatgtaattgcttgcttcattcaccgtggactcaataatctctcttgctctaaaattataatgctgnattctttttttttgttcttgtgaatttgtatgcatgcacataaatctctctctggcaccatataatatttgtggctctgct

SEQ ID NO: 452281 - DNA, 463 bp, Sorghum bicolor
cgtccgcgcatttgaaggactccgcattcaaattatcacatggttgacattcttgatcatgaccctttttgccatgctttgttctgtcccaagcaagatggctagaaggatctctaaccaacctagtaggcatgatgactatcgtgttgaatatcctcaagaacaggagtacaaggaggaatttcgacctccatctcctgccccatcctatacagaaaaggatgtactttcatcgatgctaagacgactaggtgagctggaggacaaggtgcaggtgcttgaaacaaagccgtctgagatgccatttgaaaaggaagaattgctcaatgcagccgtccgccgcgtggatgcattggaagctgagttgatttccacaaagaaggccctttatgatgccttgatgcgacaggatgagctactcgcatacattgacaggcagcagctgatcaaatttctgaaaaag

SEQ ID NO: 452282 - DNA, 487 bp, Sorghum bicolor
cgtccgaatttcttaaggttatttttatttctggtccaaaagtgtccatattgacaattaaattgagggaagatacgttctaattgtatgcagacttgatgtttgatgactattagtgtaatctatttacagtgtatactgacaaacaatatttgttccatgtttgactccaatctcattgtctccttatgtttggcaggacaaaaactgaaccacctatttactacatgccaactaaaccaattattgatgatccggccattgttgagcagaacaaggaagtggcattcgaagaatggaagtctatgcgcagggctgagctgactcagttccaaaagcaagtggaggagcaatatctttcaaatgtggagaggcagttggagaagatccagaatgcccggaatgctcggaaggcgaatgggcctgctaacatgcaagaaatggacaaggagctggacacacacaaggcggagcatggtccaaagac

SEQ ID NO: 452283 - DNA, 739 bp, Sorghum bicolor
  unsure (1)..(739): unsure at all n locations
ggcacgaggcaaggttagcagccgcagcagccggaaccctagcgccgccgccgcatccgcagccatgggtatcgacctcgtcgccggtgggaggaacacgaagaccaagcgcaccgcgcccaagtccgacgatgtctacctcatgctcctcgtcaagctctaccgtttcctggttaggaggaccaagagcaacttcaacgctgtcatcctcaagaggctcttcatgagcaaaaccaaccgcccaccaatttccctgcgccgccttgtcaagttcatggaaggaaaggaggagaagaacattgctgtgattgttggcacagtcacagatgacaaaaggatccaggaggttccagcaatgaaggttactgccctgaggttcaccgagacagcaagagccaggattgtcaatgctggtggggagtgcctcacatttgaccagcttgctctccgtgctccacttggcgagaacacggtcctcttgaggggccccaagaatgctcgtgaggcggtgaggcactttggcaaggcttccggcgtgccgcacagccacaccaagccatatgtgcgctccaagggaaggaagntcgaaaaggcttctggcaggaggaacagccggggattcaaggnnatagaaagttgntttgttggtcttgtgcntgttgccatcagcatagtgcaacccgncnnatgtgtcaatcgacagtaattagtaatcactttctaccgagagtagtagcac

SEQ ID NO: 452284 - DNA, 535 bp, Sorghum bicolor
aaggccattgatgacgctgaaggggtagttaaggtgatcgcagagaaggaaactgacaagattctgggtgtgcacataatggcacccaatgctggtgaaatcatccatgaagccgtcctcgccttgcagtatggagcatccagtgaggacgttgctcgaacatgccacgcacaccctacagtgagcgaagccctcaaggaggcttgcttgcaaaccttcgataaagcaatccacatatgatttctcattttctgtttctttaccatccgaactggtggctcaacaagatccaaagtttgtggtaattttgggtctgttggaacaaaaggcccctgattgccctttcgttttgttggcgatactgtgaattgaccctttgccaagttccccacatcttatagccgtttatgcttccttggcttggcttatccatccaaataatattttgaaccatatttgctgtttatgctcatgaaccattgatggatacatttctgacgttctagtaacctttgtgtcgcgatatttcattgtg

SEQ ID NO: 452285 - DNA, 462 bp, Sorghum bicolor
  unsure (1)..(462): unsure at all n locations
nnnnnnnnnnnnnnnnnnnnnnnnnnnnnnnnnnnnnnnnnnnnnnnnnnnnnnnnnnnnnnnnnnnncgtgcggagagaacggcgggaagacccgagagcgctccagagatgtcggcggacgacctgcgatcggagctggacgagctgcggcggctggagggcctcgccaagcacccccgcgtccagaccctcctcgccaacgagatccgcaacgttgaggcaaagttggcgaaggcaaccgaaccgtcgccggagccactggcggcggcttccgcgcccgcgcccgcgcccgcccccgcggcgcgtcctgttttaaactacgtcacgttggggtcgttcagctgggaccaggacaacgagaagatcaagatatatgtctcccttgagggagttgagcaagaaaaggtggagactactttcaagccaacatcagtagatgtaaagtttcatgatgtcaaag

SEQ ID NO: 452286 - DNA, 486 bp, Sorghum bicolor
cgtccggtctccttccaccccccccccgaaaacctcacaaaacccccgctccccaccacccgccgccgcccacgccgccgcctgtaccagcagcttcaagatgagtcggcaccctgaagtgaagtgggctcagaggatcgacaaggtttacatcactgtacagttatctgatgccaaggatgctaaggtcaatttggaaccagatggtgtcttcacattctctggcagtgttggtacaaacgtgtatgaattgaaactagatctgaatgacaaagtaaatgttgaggctagcaaaataagtgtgggggtcaggtccatattctgtatcgtagaaaaagctgaggccaaatggtggaagaaacttgttcgagatgatcaaagggcacctcactttgtgaaagttgattgggacaaatgggttgatgaagatgatgatggtactgatgtgaacttggatgggatggacttctcgaaattcggtggtat

SEQ ID NO: 452287 - DNA, 558 bp, Sorghum bicolor
cgtccgggaggctactgcagaggtctctaaaacatttgatgagaagattgggaagtactgtgatgtaacacttatgtcactggcatatgctgggacaggaaatgtgcttaaggttcagaaacttcttggcatatgctcacagcatcttgagaaaggcgaaacacaccaagggccagctgtccttggaattgctcttattgctatggctgaagaattaggagctgaaatggctgtacgttcgcttgagcgtcttctgcagtacggcgagcagaatataagacgagcagttcctcttgctctcggtatactctgcatatctaaccccaaggtaaatgttatggacacactgagcaagagtgagtcatgatgcacatgccgatgtgtcgatggctgcaattatctcattgggtttgatgggtgctggcacaaacaatgccagaatagctggcatgcatagcaatctttcaagtcattactacaaacaagctgctcatctgtcttgagtaagaattgatcatggccttgtacacataggaaagggcttgctgacccactctg

SEQ ID NO: 452288 - DNA, 850 bp, Sorghum bicolor
tggacgatccacagagatgtttgaggaatgcttccaacagaggtggtacaggactgctgcttgctacatactggtcattgctaagctggagggccctgcagtcagccagtattgtgcactccgtttgctacaagctacacttgatgagtctttgtatgagcttgctgggcgagttggttcgcttcttgctaagatctggaagagattttgagaatgctacttcagactccgagaagctctctccaagatttctaggctattttcttttccgttcaccatataagcggcaatcttctgatttgagaagtaattcaatgaaagaacttagtccacatattgcctctgttatgaacattctagagcgccatgcttgctatttgatgtctggcaaggagctttctaaactcgtcgcttttgtcaaggggactcaatttgatcttgtggaatatctacaacgagaaaggcaagggtctgctcgtctggagaggtttgcgtctgcacttgaactgattggacaaaagctccaaatggatacactgcaaagccgacttgatgcagagttccttctagctcatatgtgttcagtcaagtttaaggaatggatcgtggtgctagctactttattgcggcgggcagaggttttggtggatctctttcggcatgatttgcgattgtggaaagcatatagcattactctacagtcacatgatgtattcagagaataccttgaccttcttaatatcttggaggagcagctttcgtcggtctctgatcttacattgcaaaatggaccattgtcatgaatgctggatgacgacactgattgaaaaaccgactgaatgcggcgttt

SEQ ID NO: 452289 - DNA, 553 bp, Sorghum bicolor
  unsure (1)..(553): unsure at all n locations
cgtccgccaaattcccatctgctactgctccactccactncactccactcaactccaggctcttgctctgctcccgtgggcgagcgcaaacccgcctcgcttccccaaaccctagttcctcgctcgcccgcgtggcctgcgaggctgccacccccggatcaagtccgtacagcgccccccgagcgcgcgtccaccccctcccggactccagcggcggcgggatggggtctgactccaagggcttgctcgagatcgagcccctcgagctccgattcccattcgagacaaagaagcagatctcgtgctctatgcagttgacgaacagaacagatgactacatcggctttaaggttaagacaacgagcccgaagaagtactgtgtccggccgaacagcggcattgtgccacctcggtccaccagcgatgtcatcgtggcaatgcaagcacaaaaggaggcaccaccagacatgcagtgcaaggacaagtttcttgtgcaaagtgtaattgtggcgggaagggaccttagtcaaggacatcacttgacatatgtttc

SEQ ID NO: 452290 - DNA, 442 bp, Sorghum bicolor
cgtccgcacacaccaggtagggaggccctcttccccggcggcgaccatggtgtccttgaagctccagaagcggctggcagcgagtgtgctcaagtgcgggaaaggcaaagtatggctcgatccgaacgaggtctccgagatctccatggcaaactcccgccagaatatccgaaagctggtgaaggatggcttcatcataaagaagccacagaagattcactcaaggtcccgcgcaaggagggcccatgaggccaagcagaagggcaggcactcaggatatggcaagcgccgcggtacccgggaggctaggctccccaccaagatcctttggatgcgcaggatgcgtgttctcaagcgcctgctgccgaagtacaaggaggcgaaaaagatcgacaagcacatgtaccatgcaatgtacatgaaagtgaaaggtaacatgttt

SEQ ID NO: 452291 - DNA, 694 bp, Sorghum bicolor
agaatcaccccttcattcgacctgcaggtattggaatcttttttattgatgtgcaggtgcagcctccgatcaaaatacttgttaaggcgcgtgtcgaacaggtctcttctgtcctcatggcggaagcagcggctgccgctctagcagctcaactcttgcatctcctccaagcacaaaattcttatgttctttcagattgccagcagctgatgcaggaggcatttccattcgcaagattcacagatcctcaaatttgacggcgcatagtctagccacccaggcatctagactctcagcggtcctccctcggaggagttgctcatccactgctcataatcagaagtgtcctgcacgggctgccccccctgaactttcagttccagatccgctgctggtgctgtgcgatgtgttggtcgccgtaggacgaagacgagcatgttctagctgctggtgctgcatagggaggggctcatcggctgccgactctacaagacgctggtgctgaactgctaactcacggcttctactttccagtgcatacagcagtaacttctccagcaagtggaagcactatagcaggaagcaacacgtcaaagtcaagcaccagctcaggcaaaggcaggggctagctggaccattattcttctgagtttgaactctaaacccaagcatgacttatgattcatgcaacaat

SEQ ID NO: 452292 - DNA, 596 bp, Sorghum bicolor
cgtccgatccgtatagctgactgtggccataagattggactgaggcgttgataatgggcggatttggtttcagaatatacgtgttcctcgtgagaacttgcttaatttggttgctgacgttttgccagatgggcaatatgttagcatgatagatgatccagatcagaggtttgcagctttcctctctccgcttacacttggtcgagtaaacattgcagttgactcagtctacatttcaaaggtcagcctagcgattgctgtgagatacagtttgtcaaggagagccttttcaattacaccagatggccctgaaacgttgttgcttgattatcccagtcaccagcgacgccttctaccacttctagcaaaagtatgtctgatgagtagtgctgctaattttatgaaaaatatgtatgtaaagagaactcctgaaatgagcaaagccatacatatttactctagtgctctgaaggcaacactaacttggcagaatatgatgactcttcaggagtgtcgtgaggcctgtggcggtcaaggtctaaagactgagaaccgcgtaggagttttcaaagctgaatttgatgtccagtccacat

SEQ ID NO: 452293 - DNA, 811 bp, Sorghum bicolor
cgtccggggttctgctccaattaacctttctgatcgtctcaaccaagtgctacgctgggctcttggttcagttgaaattctacttagcagacactgtcctatctggtatggttacaatggaaggctaaagcttctggagagactggcatacatcaacaccattgtttatccaattacatctatcccactaatagcctactgtgtccttcctgctatctgtgtactcaccaacaaatttattattcctgagattagcaattatgctggggcattcttcatcctgctttttgcttccatcttcgccactggtattttggagcttcgatggagtggtgttggcattgaggactggtggagaaatgaacagttttgggtcattggtggtacctctgcgcatctctttgctgtgttccaaggtctcttaaaagtgctggcagggatcgacacaaacttcacggtcacatcaaaggcaaccgatgatgatggtgattttgctgagctatatgtgttcaagtggacaagtcttctgattcccccgaccactgtgcttgtgataaacctggttggtatagtggctggagtatcatatgctatcaacagtggctaccaatcatggggtccactcttcggaaagctgttctttgcaatctgggtgatccttcacctctaccctttcctgaagggtctcatggggaaacagaaccgtacaccgaccatcgtcatcgtttggtccatcctccttgccttccatattctctctgctgtgtttgaagatcgatcccttcatattaccttcttataaagctatttt

SEQ ID NO: 452294 - DNA, 757 bp, Sorghum bicolor
acgcgtccggttcgcctctctgcctgcctgcttccctcccttcctccgtcagatcctcgctcgggttgcttgccatggcggaccagctcaccgacgaccagatcgccgagttcaaggaggccttcagcctcttcgacaaggacggcgacggctgcatcaccaccaaggagcttggaactgtgatgcgctcattggggcagaaccctactgaggctgagcttcaggacatgatcaatgaggttgatgctgatggcaatggaaccatcgactttcctgagtttctcaacctgatggcacgcaagatgaaggacactgactctgaggaggagctcaaggaggccttccgcgtgttcgacaaggaccagaacggcttcattctctgctgctgagcttcgccatgtcatgaccaacctaggtgagaagctgacggacgaggaggtggacgagatgatccgtgaagccgacgtggacggtgacggccagatcaactacgaggagttcgtgaaggtgatgatggccaagtgagatgctgcgcccgtttcgaagctagttcctctcctgatggtagtaactagtctagtgttgagactgactgcatgtggttatgccttattcctctccccgtgtcaatggacatatccgtttgttttctcccaagggattttactaccatatcggtaatttcgttcaaatttgtttgtggttgtattacatttgtgttatcttggtacaatgatcatgcctttcccttccaaaa

SEQ ID NO: 452295 - DNA, 605 bp, Sorghum bicolor
  unsure (1)..(605): unsure at all n locations
cgaatccggtcgcccacctccgatcacaagggcgcgagccgacacccnncctcctccccttcttccccgtcgtcgcgtgccctcgccgcagccatctgccatggcggaccagctcaccgacgaccagatcgcggagttcaaggaggccttcagcctcttcgacaaggatggcgacggctgcatcaccaccaaggagcttggaactgtgatgcgctcccttggccagaaccctaccgaggcagagctgcaggacatgatcaatgaggttgatgctgatggcaatgggaccattgacttcccagagttcctgaacctgatggcaaggaagatgaaggacaccgactctgaggaggagctcaacgcgcccccccgcgtctttgacaaggaccagaatggtttcatctcggctgctgagctccgccatgtcatgaccaacctcggcgagaagctgaccgacgaggaggtcgacgagatgatccgtgaggctgacgtcgatggcgacggccagatcaactatgaagagtttgttaaggttatgatggccaagtgaggagcgggccccatgaaataagtatatctataaattgaagcgagttataatgcac

SEQ ID NO: 452296 - DNA, 471 bp, Sorghum bicolor
cgtccgggaaaacgagtgagaaggaggtgggaaaaaaaaaaatgctgcgccacgccgcccgccgtctcgtctcccgcaccgctgcggcggcccctgcccgccgggcgctcgccacggcggaggtgcctgcggaggccggcgaggactccacgttcgtggaggcgtggagaaaggtcgcccccaacctcgagcccccaacgacgcccctctccctcatgaagccgcgcccgcccacgccggccaccatccccaccaagctcaccgtcaacttcgtcctcccctacaagtccgagatcgccaacaaggaggttgacatggtaattgtaccagctacaactggtcagatgggtgttttgccaggccatggtgccacaattgcggagctcaagcctggtgttctctcagtacacgagggaaatgatgtgaccaagtactttgtgagcagtgggtttgctttcgtccatgcaaact

SEQ ID NO: 452297 - DNA, 1029 bp, Sorghum bicolor
cgtccggccatatcacgcctgcaggccccatccatccacacgcgcgcgccactttttctcctaaagatcacaaggagacgacccctctccgctaccattttgcggggcagcagcagagccgatcccgtgcgtgtgcgagtgtgagtgagatcgacaccactagctaggtcgagaccatggctacagcttacgctcccatggcgagccaggtgatgaagagcagcctgcagctgcactccaagccgaggggcttgtccggcgctgccctcaccaccaccaggcgtccccggttcaccgtcaaggccatccagcccgagaaggcgacgtaccaggtggtgcagccgatcaacggcgacccgttcatcggcagcctggagacgccggtgacctcgagcccgctggtggcgtggtacctctccaacctgccggcgtaccgcacggccgtgagcccgctgctgcggggcatcgaggtggggctggcgcacggctacctcctcgtggggccgttcgcgctcacgggcccgctccgcaacacgcccgtgcacggacaggcgggcgcgctcggcgccgcggggctcgtcgccatcctcagcgtctgcctcaccatgtacggcgtcgcgtccttcaacgagggggaaccctccacggcgcccacgctcacgcttacggggaggaagaaggaggccgacaagctgcagaccgccgacggatggtctaagttcaccggagggttcttcttcggcggcatctccggcgtgctctgggcttacttcctcctctacgtgctcgacctcccctactacttcaagtagaagttgattaataaagatccatatatatatatatatagctccgatgctgcgatgcatgcgatcctcctctctgcgtcggcggcatgcgtggttatgtaggtgatggggtccttgtttcacttcagcagtgatgagcaccgtgtataaatgtaattcctctgcacatggatggattgggatgtaacttgaaactgttaattttttttttacttggatg

SEQ ID NO: 452298 - DNA, 1067 bp, Sorghum bicolor
  unsure (1)..(1067): unsure at all n locations
cgtccggtccgcaggctttatgttcagggcaaggaagtcaatggtgctggcatcaactctagctttgctgtgcaccaggatgttgatggaagggcaactgatgttgctctagcatggtcagttgcacttggctccccctttacatttgctactactttagaacaggagtacaagagtgatatctttggagagcgaggcattttgctgggtgcggtccatggtatcgtggaggctctgtttaggagatacacagagcaaggaatggatgaagagtcagcctacaaaaacactgttgagggcataactgggatcatctcgaaaaccatctcaaagaaggggatgcttgaagtgtacaactcattgagtgaggaaggcaaaaaggagttcaacaaggcttacagtgcatcgttttacccgtgcatggatatactctacgaatgctatgaagatgtggcctctggaagtgaaatccggagtgtggtgttggctgggccgaggttttacgaaaaagagggcctcccagcttttccaatgggcaacattgaccaaactcgcatgtggaaggttggtgaaaaggtgcgcgcaacccgtccagaaggtgatcttggcccgctccatgccttcactgctggagtgtacattgccttgatgatggcgcagattgagatcttgaggaagaaggggcactcctactctgagatcatcaacgagagcgtgatcgagtcagtggactcgctgaacccgttcatgcacgcccgtggggtcgccttcatgggggaccactgctccacgacggctcgcctgggatccaggaagtgggcaccacgcttcgactacatcctgacgcagcaggccttcgtgacggtggacaaggacgcccccatcaaccaggacctcatcagcaacttcttgtcagaccctgtccatggcgccatcgaggtctgcgcggagctgaggcccaccgtcgacatcttcgtgactgccaacgccgactttgtgcgcccagagctccgacaatctttctagattgaggcagtgagcanagagagtgagagggagggagagga

SEQ ID NO: 452299 - DNA, 903 bp, Sorghum bicolor
ctcctagtgctgcctttcccacagttgatgttccaagaccttcagagaaagacagagattgcccagttgaaaatgcacagaaggaatgccaagaagctcaaaaacagggacaatttgaaggtttaagagttgctgcttcttcagtgtctgatgggagtggaaaaggcgaggtgtctctccacacagagttaaagatacctcctgtccagaatgctgatgcaacacctaccacaggagctgatacaagtgatgcattcaggaataagaaaaagcaggatcgctcttcatgtggttctaacacaccttcaagtagtgatgttgatgcagacaatgttcctaaggaggacaatgctaatgagaaggtgaagcaagcctcctgcagcaactcttcagctggtgacactaaccaccgcagatttagaagcagtggaagcactagtgattcatggaaggaggtttctgaagagggtcgtctggctttcgatgcgctgttcagtagagaaaagcttccgcaaagcttttctcccccacaagcagaagacctcgaagggggtggccaaggaggaagaagatgaagtgactacagtggcagttgacctcaacacgaacgccacaagcattgatcatgacctcgacacaatggatgagccaagggctctctttaccaatgaattggcgcacctgaagctgcaatcgcgccgaacaggcttcaagccatacaagagatgttctgtggaagcgaaggagaatagggtgccagcaagcgacgaggttggtaccaagaggattcgtgttgagagcgaagcatacacataatcgatctctacatggggaccggtcggcctgcctttaccatgaagttatgtcaaagttatatttacatctaagctactataggacttt

SEQ ID NO: 452300 - DNA, 663 bp, Sorghum bicolor
cgtccggggagccggagcagccgcagtcccaccgacccccgccgatcccgccgccggtcgccctcatctcctcgccgctgcctctcgtttctcttttcaataatcaagatgagccgtggtggtagcgccggcggtggtcaaagttctctgggatacctctttggaagcggtgagccccccaaaccagcagtggcaccaccagctgcatgtgctccacctgctgagaaaccatcggctgcaaagcctgatgccaccaaacaggttgctgctggggtcaccagccaaaccaataactaccacagggctgatggccagaacaccgggaacttccttacggatcgtccttcgacgaaggtccacgctgctcctggcggtggctcttccctgggctacctgtttggtggcaattgatgcccacgtcggagctcaccaagttatcctcccctgccccgctgcatgttatgccatgtctgaatcatgaacaactggtgttgtcgtttcatgtgtgtgtgtgcccccgtgcaatgctttgtgcgcatggttgatttctctgtggcaaacctcccgacccgcatggggccgtaatctgtctctaaatttcagggcaaatcgtgtgcctgaaccctcatcataagtcgtcgttgtaccaagcttgtttcgttt

SEQ ID NO: 452301 - DNA, 550 bp, Sorghum bicolor
  unsure (1)..(550): unsure at all n locations
cgtccgatctcgttcgtctcgtctcaggtctcagcgaccctacnagagcccgtcccaactccaccacctcgcctctccgcggcgcgagcgagggcgacgccggccgcgacggggttccgcccgaccgcggcgtcggcgggaacccgggcttcgctccatctcctcactctcttcatctcttcgatcgcttttgacctgtgaaaatggcggatgaactacgctctacgtctgtggtccagaaggtccatgggcagtctgtgttgttgagcagaatctcttcctactctgccatgaacaaccccgtattcaacaatgcctattctgcttacaatgtgccccagaggtcatattatgggatgaatgcaactgttggactctcatctgtcatggcaccatctcctgtcttcgcgtctgccccaaaagagaaaggcttttctgggtttatgattgactttatgatgggtggggttccgctgctgtctccaagacagctgctgctccgattgagcgtgtcaagcttttgattcagaaccaggatgaaatgctcaag

SEQ ID NO: 452302 - DNA, 599 bp, Sorghum bicolor
aaagcactcgagcctggagtaacagtgcttcctcctcctctggctaccatcgctactcgtcttctccatccatgtcccaagattcttacatgcctacaccctcctacaccagcttcgccacctcgcctcttcccacccccgccgccacctcctcctcctcctcgcctttctcgcagcttccgccactctactcgtcgccttacgcggcgccgagcatggttgggcagatgggcctgaaccagctcggcccggcccagatccagcagatccaggcccagttcatgttccagcagcagcagcagcagcagaggggtctgcacgcggcgttcctgggcccgcgggcgcagccgatgaagcagtccggatcgccgccgctggcgccggcgcagtcgaagctgtaccgcggcgtccgccagcgccactggggcaagtgggtggcagagatccgcctccccaagaaccgcacccggctgtggctcggcaccttcgacaccgccgaggacgcgggctcgctacacaaggcgcttccgctcgcgggactgggcgctacttccggctcgcggagggcgactgcgccgtcagctcggcgcagtacgctt

SEQ ID NO: 452303 - DNA, 393 bp, Sorghum bicolor
  unsure (1)..(393): unsure at all n locations
atcccgtcgccacgcgtccgggtggcagagatccgctcccaaaccnnncatctgtggctcggcaccttcgacaccgccgaggacgcggcgctcgcctacgacaaggccgccttccgcctccgcggcgacatggcgcgcctcaacttcccggccctccgccgcgacggcgcgcacctcgccggcccgctccacgcctccgtggacgccaagctcaccgccatctgccagtccctgacgggttccaagaacggcggctcctccggcgacgagtcggccgggtccccgccggactcccccaagtgctcggcgtcggcgtcgacggaggggggagagagcgacannntnnatttgtntatgatggantctgaacattcaacctttttatctatgaca

SEQ ID NO: 452304 - DNA, 758 bp, Sorghum bicolor
ccgcaataccggtgccgacccacgcggtggacccacgcgtccgcgtcgatctatcagcaaagcacccacaccagcgaaaaagcaagcagcgatggcggcctccatgatctcgccgtcagctctggtggcgccgccgtccagggcgcagggcctgccgtccctcggccgccgcgcctcctccttcgccgtcgtctgcggcaccggcaagaagatcaagaccgacaagcccttcgggattggaggtggcctgaccgtcgataaggatgcctccgggaggaaggtcaagggcaagggcgtgtaccagttcgtcgacaagtacggcgctaacgtcgacggatacagcccaatctacaacgagaatgagtggtctcccagcggcaacgtctacgtcggtggaacgactgggcttctgatctgggccatcaccctcgctgggctcctcggcggcggcgccctcctcgtctacaacaccagcgccctctccggctaaggatactcatttccaatcgtgatccatgcgcttcttcttgatgcggttcatcatgtaaaatcatgccagcagggtgtctgtctgtaatctagcctccttcgatgcccactgtaatgcaagcttcatcatgtaacaatgctactctctactactacgacgtactcttcatacttaattttgggacaacgactatcattatattattaattgatgctatatatttagaatattattaatatataaaaaacagcacagacagcgtaaaaag

SEQ ID NO: 452305 - DNA, 664 bp, Sorghum bicolor
ggcacgaggccgccgcgcttcgccctctcgctccagccgcttcacagcgtcgccgccgcagctcgcctctccgaccgccgcgaggatgccgttcaagaggttcgtggagatcgggcgcgtggccctggtgaactacggcaaggactatggccgcctcgtcgtcatcgtcgatgtggtcgaccagaacagggcacttgtggacgcccctgatatgatcaggtgccagataaacttcaagcgtctttcacttactgacatcaagattgacatcaaacgtgtccccaagaagacaaccctgatcaaggcgatggaggaagctgacgtgaagaccaagtgggagaacagttcatggggcaagaagctgatcgttcagaagaggagggcagcgctcaatgactttgacaggttcaaggtcatgctggcaaagatcaagaggggtggcgctatcaggcaagagctcgccaagctgaagaaggcatccacggcttagtctccttcagtggatggcatgttacagtttttggttctgagttgtatcagcaattcgatcgagtgttgtcaaagccagaattagtaatatgtttcctgtgaacccatttcaaactttgtcaagcatgggtgtgttctggatattttgtcgtgaatgttatggaatatctaaggt

SEQ ID NO: 452306 - DNA, 492 bp, Sorghum bicolor
cacgcgtccggctatgtccacgctgctctaccggagtggaagacgtcaagatgcattggaaaagctcaaagcaacccaacaagttgccccttctgcagctctcagagttgcagcgtgggaagcactaatgggattacacatggaggcagggcaggagatgtcctacttgatttccccagatgatttagttgatctgtcaatcaaagatgttagcagatggtctgatcaggaccatcttaaatttcgggttaatgctatcagaggacttgttgcacttctgaatggagatacagagtcagctgcccagctgtttgatgattggagtagagacttttctggaggcgaaaaccaaacacaaaatgctgccatttcatatggtgaatatttgcattgtgttggggattttcaaatggcagcacaagtgtatgagaaaattcatgaggcattttgcatggatgacgtgtctggaaaccttttagcagctggaaacat

SEQ ID NO: 452307 - DNA, 659 bp, Sorghum bicolor
cgtccgattcgatttgcatggtgtggtggcgttcttggagcttctggaattgggattcccgtagtgggatttgatttctagaggaaataaggcaatggcgaccgcggggaaggtgatcaagtgcagagccgcggtggcatgggaggctggcaagccgctgtcgatagaggaggtggaggtggcgccgccgcaggccatggaggtgcgcgtcaagatcctcttcacctcgctctgccacactgacgtctacttctgggaggccaaggggcagacacccgtgttccctcggatcttcggtcatgaggctggaggcattgtagaaagtgttggagagggtgtaactgaccttgcccctggtgaccatgtcctcccggtattcactggggagtgcaaggagtgtgcccactgcaagtcggcagagagcaacatgtgcgatctgctcaggatcaacactgaccggggtgtgatgattggtgatggcaaatcacggttttccatcaatgggaagccaatctcaccattttgttgggacttccaccttcagtgagtacactgtcatgcatgttggttgtgttgcaaagatcaaccctgaggctcccctggacaaagtttgtgttcttagctgtggtatttctactggtcttggtgcatcaatcaat

SEQ ID NO: 452308 - DNA, 503 bp, Sorghum bicolor
cgtccggtttggattgattggtttgatcagtcgtggggtgagggtcttggagtcgattgatctgggatactgttagaggatttggggagggggcaatggcgaccgcggggaaggtgatcaagtgcaaagctgcggtggcatgggaggccggcaagccgctgtcgatcgaggaggtggaggtagcgcctccgcaggctatggaggtgcgcgtcaagatcctcttcacctcgctctgccacaccgacgtctacttctgggaggccaaggggcagactccggtgttccctcggatcttcggtcatgaggctggaggtatcatagagagtgttggagagggtgtgactgacgtagctcccggtgaccatgtccttcctgtgttcactggggagtgcaaggagtgcgcccactgcagatcggcagagagcaacatgtgtgatctgctcaggatcaacactgaccggggtgtgatgattggcgatggcaagtcacggttttcaatcaat

SEQ ID NO: 452309 - DNA, 450 bp, Sorghum bicolor
ggcacgaggctcgtccccgctttcttcctcgccaacttctcatcatcagccaagtgtaaagggtgcgaagaaacagcagcaaaaggattccattctcgtgttcttggagtggtccatcgagcttcgtcagggagagctattgagagagagagagagagagagagagagagagagcaagcaatggcgaccgcagggaaagtgatcaagtgcaaagccgccgtggcgtgggaggccagcaagccgctgtcgatcgaggaggtggaggtggcgccgccgcaggccatggaggtgcgcgtcaagatcctctacaccgcgctctgccacaccgacgtctacttctgggaggccaagggccaaactccggtgttccccaggatcttaggacacgaagcgggaggcatcgtggagagcgttggggagggtgtgaccgagctcgcaccaggcgaccat

SEQ ID NO: 452310 - DNA, 728 bp, Sorghum bicolor
  unsure (1)..(728): unsure at all n locations
ggcacgagggtcttctccttctccgtcccctccacaacancgcgttccccaaattctcccacctagagatccccaaatccgcggcggcgacctttgaattcgatcccccttcccgaggcgactcaatctgatcgtcggagccggggcaccagcgaccatgtgggcggcgtcgtgcctggcgtcgtgctgcgcggcgtgcgcgtgcgaggcgtgccggacggcggtcggcagcatcggccgccgctccgcccgcatcgcctactgcggcctcttcgcgctctccctcttcgcatcctgggcgctccgcgaggtcgccgcgcccctcctccagtcgatcccatggattaaccactttcacaagactcccgaccgcgagtggttcgagaccgacgcggtgctcagggtcagcctcggcaatttcctcttcttcaccatcctcgccgtcatcatggccgggataaaggaccagaaggacccccgtgacaagatccaccacggcgggtggatggccaagatcttctgctgggccgtcatagtcttcctgatgttcttcgtgcccaacggagtcgtcagcttctatgaatctatatccaagttcggatctggcctgttccttctcgttcaggttgttctgctgttggatttgtgcatggatggaatgagaactgggtcgccaaggatgagcagttctggtacatggctcttgttggtggctcaagtgtctgtac

SEQ ID NO: 452311 - DNA, 682 bp, Sorghum bicolor
ggcacgagggcacctaccattcccggctcccggcacggccgcgcccgagagcgacgcccgccacccacccaccccgccgccgccgccgccgcctcgattcatctggcaatcgaggggactcccagatacagatacaccacgccacgccaaatcgaacaacacctatcataatcacatattcgtccatctcccagtcccaccctcctcctcctccctcgtcgccaacctccaacccccccgcgccgatcgcgtcggagatgctgggcgtcgcgcggaggcggctcggatccggatgcgtgctctcccagctggcgcaggccctccgccccgccgccgccgctcccgccaggacctactccgccgccgccaaggagataactgtacgggaagcattgaataccgcattagatgaagaaatgtcggcagacccttctgttttcttgatgggagaagaggttggtgagtaccaaggcgcatacaagatatctaagggtttgcttgacaagtatggccctgatagggttctcgatactccgatcactgaggctggcttcactggccttggtgttggcgccgcctaccatggtcttcgacctatagtagagttcatgacatttaacttttcgatgcagggcaatgatcacataattaattcagctgccaagtcgaactacatgtcagc

SEQ ID NO: 452312 - DNA, 525 bp, Sorghum bicolor
  unsure (1)..(525): unsure at all n locations
ttcctttgccgccgctgccacgcttcttcccacttcttgccccgccgctctctgctcgtaccgggtccttcttggctggcagacgccactgcgtgcgacccgcgagagctagctgtgcccggcgcgtgcgtgcgtgcgacgatgtcgtcggcggtggagaccatctcctgctccaaggtcgacgtccccgccggcccggagccggaggagaaggccaagaaagcagcggtgcccgcggagcacggcggcgacgcggcggcgcccatcaacggcaagtgcggcgaggcggcgccgcgttgccacgaggaagaggaggaagatgaggaggacgcccccaaggtcatcgacctcggccccatggtcagcatcaaggagcagctcgagaaggacaaggacgacgagagcctgcggcgatggaaggagcagctcctcggcagcgtggacttcaactccgtgggagagacgctggagccggacgtgaagataatgagccctgcgatcctgtcgccgnggcggcccgacatc

SEQ ID NO: 452313 - DNA, 747 bp, Sorghum bicolor
cgtccggcgtgcagtgtgtccgctcctcagcttctcaagcggtagcgtgcgcgcggagatggcgactacggaggcggcggcggcgacaccggtggcgccggcagaggggtcggtgatcgcgatccacagcctcgacgagtggagcatccagatcgaggaggccaacagcgccaagaagctggtggtgattgacttcactgctacttggtgtccaccatgccgcatgatagctccagtttttgctgaactggccaagaagcacccaaatgttgttttcctgaaagttgatgttgatgaaatgaagaccattgctgagcaattcagtgttgaggccatgccaacattcctgttcatgagggagggcgacgtcaaggacagggttgtcggcgcagcaaaggaagagctagcaaataagcttcaactgcagatggcccagtagaccagtaatgctgtaatgaagtagtattcgcctaaataagaagacgcctcaactctgggagaactgagcttctgtgatggtacttcgtgtgagaactagtgcctctgtgatgttacttcgtatgtagtattaactcttatcctactatggtggttagcttctggatactgattgcataatgccctgcttgatccaccttttgcttttcataccatgttttatctttcagctgatgtgctataatggtgaatcagagtcatttaatatcttcgtatttgcctaactattagtctaatattttttatggg

SEQ ID NO: 452314 - DNA, 483 bp, Sorghum bicolor
cgtccggaagagctcaaggaggccttccgtgtgtttgacaaggaccagaacggcttcatctctgctgccgagctccgccatgtcatgacaaatcttggtgagaagctaactgatgaggaggtggatgagatgatccgtgaggctgatgtggatggtgatggtcagatcaactatgaggagtttgtcaaagtcatgatggccaagtgagccacagaaccataatctgaaggcggagaagattgggcattgcatattagtcaagatgcaactcttatttcatcgacttcctccagtgaaacattctgctagttgtagttgctgaaaggcgatgtagttcctgctttgttcttccctccagtgtgttttcagaaatgttgtttcatgtgaacttgtaatgattgccctccttgctgtgtcttgattgcagttgaaaccatatgtagttatatttttcctcttaccaccccaaccccaacccacaca

SEQ ID NO: 452315 - DNA, 454 bp, Sorghum bicolor
  unsure (1)..(454): unsure at all n locations
cgtccgcatcaacaacaatggccatcaagcagaaaggagcgacgacgacgacgttcctgctcttcctggtgctggcagtcgtcgtcgcagccgaggccgcccagctgcaagacgacgagcctgctacggccgccggcggcagccatgcccggcatcagcggcgcgcgaataaggcatccgccggcaccggggacgcgccaacgcacctgcacttctacttccacgacacggtgagcggcaagtcgccgaccgcggtgcgggtggtgagccgccccggcgacgtcgccgtcgccgctgttcgggatggtgaacgtgatggacgacccgctgacggacgggccggagcagagctccagcgccgtcgtcggccgcgcccagggcctgtacatggggtccgaccaggccaagctcggcttcctncaggccatgaacctgggttcacggcgggggacta

SEQ ID NO: 452316 - DNA, 1296 bp, Sorghum bicolor
cgtccgcgccacgccgccggtcagtcagccgagcggtgggcagagcggcacgcctctcgctcgactccgccccgctccgccgctccagatttcgcccacccaccacacgcccatggcgctcgccgcctcccaccacggcctcctgcccgtcgcccccgcccccaccgccacccttaccccgtcgcggggtcacctgcgcttccgcgccgcgcgacctctgcggcaccgacccgcccggagaatttgttgccaatctatcaactcagctaatgtgttgggagcttcttcaaagacatctgatgaggcagtcccagtcccagttgtccagatagatcaagattcagaccgtgatgcaaccattgtgcagctaagttttggagatcgtttgggggcactacttgacacgatgaaagcactcaaggaccttggccttgatgtcacaaaaggaagtgtgacaactgactcagctgtcacacaaacaaagttccacatcatgcgatctggacgcaaggttgaggaccctgacatgttagaaaggattcggctaaccatcatcaacaaccttctccagtatcatcctgaatcaagtgagaagttagcgatgggtgaattttttgggataaagcctcctgagaagaaggctgttgtcgatattgcaacacgtatagttattgaagatgatggaccaaaaagaagcatgctttacatagagacagccgatcggcctggcctacttcttgagataatcaagattattgcggacacaaatgttgatgtggaatcagctgagattgatactgaaggtttggttgcaaaggacaagttccatgtaagttacagaggtgcaaaactaaacagctccttatctcaggcgctgatcaattgtctgcgttattacctccgaaggcctgagacagatgaagacagttattgattgttgtgttgtcgaaccttcctagcagtacattaaaatcagaaacttcaaactttggcttgagttccttctctatgagccacttgtactattgcaagtggagtttccattgtagcatccatatatatgtacataggtggcattgaaatttggctcattaaaccattctgtagtcatatacagctgggagcaacagaattaggtttcaatcatcgttatcccatttgattcctgttataagggatcacattggaaggtcctcacatgattgatgttgtctgtaagttggtacaatccatttgcatgtaaaactcagctgtggactgtggtgttctctgatgaaataaataaaagagcattac

SEQ ID NO: 452317 - DNA, 546 bp, Sorghum bicolor
cgtccgcggacgcgtgggctagcggcaactctctgttatatttgtgctggaaatattgacaaagctgttgaaatatggtcccgcaccttgaaatctgaagatggtgggaagacttatgttgatcttctccaggatttgatggaaaaaaccattactcttgcccttgctacgggccacaagagatttagcgcgtcactgtctaagcttgttgagaactatgctgaattgctggctagtcaaggtcttcttaaaactgcaatggagtatttaaaactgttgggatcagatgaacattcgcaagagctggcaattttgagagatcgaattgcatgttctacagaagaaaatgataatgcgtaggagttctgtttctgaaaacaccagcactccttccccctatgtcccaaatcaaccatatactaccccagaacatcctcagaatgtttaccaggtacctcaaccatacaatgtaccaagtacatattcagaagcttacccacaacctactggaccttatggatacaacaatgcatatcaacctccaca

SEQ ID NO: 452318 - DNA, 643 bp, Sorghum bicolor
cgtccgcatcgatcccgctccaccatcaccagctccggccagttccagttcagtcgtcgtcccggcacgccgccagtgctcgtcgtacgtcgtgcttaataatatactcactttagatggcgatcaagaagggcggcgcggcggcgtcggggctgaagcagatcctgaggcgatgctcgagcttggggcggcgccagcagcagcagcagcagcagcacggcggggacgaggactacaacgaggaggacgaggagacgacggggctgccgtccgacgtgccgcgtggccacttcgcggtgtacgtgggccaagcggcggcgccggttcgtggtgcccatcgcgctgctggaccgccccgagttccggtccctgctgcggcgcgccgaggaggagttcggctttcgcgggcgccggcgccggcggcatcctcgtcctcccctgccaggggggcgcctccccgcctgcacctcatgtgctcgctgtcgccggcgctcgctcttctctcccagaagtgcaccaggtacctgcctctgaccgacggcgagctgggcctggtggcggcgacggcgttcacatatgaattcctgttattctcctaccacttccgcacccacatgggcttggaaaggctactaccaccacc

SEQ ID NO: 452319 - DNA, 767 bp, Sorghum bicolor
cgtccgcagcattacaccaaagccttggaacttgacgatgaggatatttcctatctgactaaccgagcagcagtctacattgagatgggaaagtacgatgaatgcatcaaggattgcgataaggctgtggagaggggaagagagctccgtgctgatttcaagatgatttcaagggcactgacaagaaaaggaacagctctggtcaaacttgctaagacctctaaggattttgatattgccatcgagaccttccagaaggctctaactgagcatcggaacccagacactcttaaaaagttaaatgaggctgagagagcaaagaaagatttggagcaacaagagtattatgatccaaaattagcagatgaggagagagagaaaggtaacgagttcttcaaggagcaaaaatacccagaagcaataaaacactacacagaggctctcaggaggaacccaaaggatcctagggtttacagcaatagggccgcctgctacaccaagttaggagccatgcctgaaggtcttaaagacgcagagaagtgtcttgatctagaccccaccttcaccaaagggtatacaaggaaaggtgcaattcaattcttcatgaaagaatatgacaaggccatggaaacctaccaggctggcttgaagcatgacccaaacaacccggaactgcttgatggtgttaggaggtgtattgaacagatcaacaaggccaacagaggtgaaataaggtaagacgaattgcaagaaagacaggacaaagc

SEQ ID NO: 452320 - DNA, 475 bp, Sorghum bicolor
ctcgccgccgtcgtcgccgccgcactcgtatctgcggcttcccgcgccgtatcctgcggaagaagtgcttaacgggctacaccccaccactgcacgatgtcggcagcggcgcgggtgctcccgaaggcggtgaccttcgtgacgggcaacgccaagaagctggaggaggtccgcgccatcctcggctcttccatccccttccagtcgctgaagctcgacctgccagaactgcaaggggagccagaggacatatccaaagagaaagcacgaatggctgcatctcaggtgaatgggcctgtattggtggaggacacctgcctatgttttaatgcactcaaaggcctaccaggaccctacataaagtggtttcttgagaagattgggcatgaaggtttgaacaatctgttaaaaagcttatgaagaataaatcagcgtttgctatgtgcatcttttctcttgctcttggaccctggag

SEQ ID NO: 452321 - DNA, 432 bp, Sorghum bicolor
  unsure (1)..(432): unsure at all n locations
cgtccgcgatctcggcctcgcccgcaagccagcgcagccgtccccgctccacgccgggtagagaggagagacctaacccaacagcttccgagcgcgtccggcggcggcgatggcgggcaagtcgcacacgcgcaaggcgttcctcctctgcaactacatcctcctgggggccgcctccagctgcatcttcctcacgctgtcgctgcgcctgctgccgtccccgtgcggcctgctcctgctcttcctccacgcgctcaccgccgtcttctccgcggcgggttgctcgggctccttcacggcgcccgccacgcccgcgcagtggcacaacgcgcacaccgggggcgccgcgctcaccgncatctttcaagggcgccgtcgcgctgctcgccttcacacgcacctcagacttcctcgccgagctccagtcctacg

SEQ ID NO: 452322 - DNA, 531 bp, Sorghum bicolor
cgtccggatccttgaaaaggtgaaagcaacatatgaccttccggtagtcactgatgttcatgaaagccaccagtgtgaagctgttggaagagttgctgacattatacagattccagcattcctctgtcgccagactgatcttctagtggccgctgctaagactggaaagattatcaacatcaagaaaggacaattctgtgcgccttctgttatgatgaactctgcagagaaagtaaggcttgctggaaacccaaatgtgatggtctgtgagcgtggtacccatgtttggctacaatgatctaattgttgacccaaggaactttgagtggctgagggaagccaactgcccagttgtagctgatgtcacacatgctctacaacaaccggctggaagaaagcttgatggtgggagtgttgcaagtggggggctacgagaactaataccatgcatttgaaggacttctggtgctgttggagttgatggtattttcatggaggtaccatgatgatcccttgaatgcaccatgcgac

SEQ ID NO: 452323 - DNA, 528 bp, Sorghum bicolor
cgtccggatcgccaatcatggagttcccgcaccaccaccaccaccacggccaccgccgcgacgacgacgaggacgaccgccgcggcccgccgcccccggcctacggcggctacggccagccgccgccgcccgacccgtacggccgcgcgcccgtcgaccccgatccgtacggccgtcctccgccccagtccgcgtacggaggcgggggtgggtacggcaacgtcgtccacgtcgggcacgagcccggagacgggaggccgcactacggcggcggcggccttggtggcgcgtacgggggtgcggccccgagtacggccacgagggccgcccgcaccaccacggcggatccgagtacggccacgagacacgcccgcaccacggggccgggggcgggggcgctgcgccggtgaggcagcagacttacaggatctactgcaagggccggggatgaccagtacagcctcgccggccgcgacggcaaggtctgcctcgtgcgcactgagcgtaacgacgacacgcagcactgga

SEQ ID NO: 452324 - DNA, 922 bp, Sorghum bicolor
cgtccggcagatcatcattcagatacttttgatcataatgagaatactggagaaactgtgtgtgataaagacagtgctaacttgcatgagagatgacaagagaaacaatgcgaggtcagaagcggtaggaggacaaatcaacagtgcagatggtaatacagaagctaatgataataacaatgaagatgaaaccaccggtcatgcagaagaaggcaagcatgatactgaatccaaatctactgatgagagtaaaaatgaagtcaattcaactggagatgatatgccccgaaacaatcattcacaagaggaaaacactgtggaggcaagtggagcgtctcatgatgaagtggtgcaaagcgatgaatcaaccagtgcaagtggaagtgggaatggatcagatggagaaggtgagaaaaaggaggcagttgatactcaaagtggttctgaatcccttcctgatgttgccaaggccgaagcaactgatgaccgtgctactggcagtcttcctgatgaaacagggaatataccatcagttcatactgataattcacaaaatgatgccagtgaaaaccaaggtgatgcaacttctgctacctcagattcatctgagcatggcactggtgaggctgtacatatagaaactggattggaagatgaaagtgcaacagcatcatctgggactggatctggtgatgacaagggtaactcatctgatagcacccctgcagaagaaaatactgagactgcatctggtgatgatgagaagggcatggaaacaggtacaaccactgaagctgtacattccaaagaagagaactctgagaacagcagtgtctcaactgaggcagagaactcccaaggagattcttcaagtggagtgaatggttcttcggaagagacatctaacaagggtgatggagct

SEQ ID NO: 452325 - DNA, 403 bp, Sorghum bicolor
cgtccgagcagctaatagcacaacagatcgcacggaaaatgtgagttctggcagtgatactaatgccaacacttccgttgatgagagtaatgctcacgatattatgacagagaacgtgctaaagaaacgaacatttagggttccattgaaggttgcggaaaaaacgactggtgctggaacacttctttcgaaggagtcgtattctgaagcaaaaaataggttagaggcactcgataacaaggatgctgaaaggaggaaaactgctgaacttaagaataacctagagtcatacatatattctatgaaggagaagctggaggaaagcacagatattttgactgtctcaacagaacaggagagggaatcctttgcggagaaacttaatgaggtgcaggattggtta

SEQ ID NO: 452326 - DNA, 982 bp, Sorghum bicolor
cgcgtccgcggacgcgtgggcgccccctttcccctccccatccccgcgggccgccagaggcaaattcgacctcgattcgtccccgcttcgcccggccgccagcgggattccctccgccccgcgcggatctgaccgctgcgctccgtcaccacgccgctccaatccgccatgaagggggccaaatccaagggcgccgccaaggccgatgccaagctggcggtgaagagcaagggtgcggagaagcccgccaagggcaggaaggggaaggccggcaaggaccccaacaagcccaagagggctcccagcgctttcttcgtcttcatggaggaattccgcaaggagttcaaggagaagaaccctaagaacaagtctgtcgctgcggtgggaaaagctgccggtgacaggtggaaatccctcagcgaatcggacaaggctccctatgtagccaaggctaataagctcaagctagagtataacaaggccattgctgcctacaacaagggcgagagcaccgctgctgctaagaaggctcctgccaaggaggaggaggaggaagacgaagaggagtctgacaagtccaagtcggaggtcaatgatgaggatgacgacgagggtagcgatgaggacgaagacgatgacgagtgatggagcttgctctgagacgatggaccatgctttgtccaacaatggagctgcgacagaaaggccctgtggcgaaaaactataaggagcctatatccatgtactagaattattcagtttcacttcacatcgtgatgtttttacttttgtcgtgctataacggatagcgctccttgttggcgccaccggcgggtggttttgcttctggtctggtgtgtggccacactggaccagcagagacgcccgcttgtacctagattactgtttccattgtcgtcatcggctaacattgtgataatatcagtttgggtaatgttagattaagtaatcactgtgttcg

SEQ ID NO: 452327 - DNA, 826 bp, Sorghum bicolor
cgtccgctcaagaaagtcctccttcgcaaggacaagtatcttgattggcgcaaacggataatgcttgcaatggatgcagccattgggatggagtacttgcactccaaggacattgtccactttgatttgaaatgtgataacttgctagtgaatgttaaggatccatctcgtcccatttgcaaggttgctgattttggcttatcgaagatgaaacaagccacccttgtttctggtggaatgagaggaacacttccatggatggccccggagttgctgacaatgagtggcactaaagtatctgaaaagattgatgtctattcttttggcattgtaatgtgggaaattctcacgggcgaggatccatatgatggcatgcactatggaggagtgatagggggtattttgagcaacacactacgaccaccagtgccaacttcatgtgacccagaatggaggaaactgatggagcaatgctggtcaactgaacctgagagaaggcctaccttcaccgaagttgcatctcgtctccgtgccatcctagaagcaagccagagagaatctccacgttaataatctgcatggacaacactctgcatctgtacatattacctcccagagcaagacacagtcatggacatttgttctagaactggtaccaagtctcagcatgaaaatgtaaaccccagtttccccaaagttaactatgggcagtgtacattgatttggcatccccatgtactgaatttgaaatgatgctgcgttgttacttttcgtttttcatttttgaaattctgcaaagcaacttgatgtcccacaggacacagcc

SEQ ID NO: 452328 - DNA, 675 bp, Sorghum bicolor
tcgacgccacgcgtccgaggagaggcacaacaaaggcacaggcgcaggcgcccctcagccgtgcggcggcctggcccttgggtgcggcagctcgatcggccttccagtcctggccggccagcggcaggccacacgaaggagcagccagcgtgtgtgctttctaggtgttgaagtggggcgccagatctggagtatcgaggagctgcagtgcgggatgagatcagaggagcggtgccggacctgaaacagagctgcgacggcacatcgttcaaatttgtccaagttttaagtggataaaacctcaatccatgtgaaaaagcatgtgtggctatgctgaagaatgttgttcgccactacatcaagatgctgaagaatgctgaagaatgcagtccaagttaaaagaagatgtattctgatcctcttccactacatcaagtgcccaagaaatgtgttaatatttgtttgaaatgtgttgagacttgtaatggtgatggcattgacatgtgtaagtcttgccattttctgtgtaactggcattgatcatctgtacctgatcttttgttttctaaaccttttctatgatgaaaataggttctaatctgtgatgatatttggttgtgatctgtgacgatcttcatgtaatgtcgattcaaatttgaatttaagtcgtatttg

SEQ ID NO: 452329 - DNA, 442 bp, Sorghum bicolor
cgtccgcccacgcgtccgcccacgcgtccgcgtacatccgcgacggcgccgagaaggaccgcctcttccgcgccatcgagaccgtccccgccgtgcgccgcaaggccgactgggccatgcgctggatcgacggcggggagcgcttcgccgagcgcctcgtcgccttcgcctgcgtggagggcatcttcttctcgggctccttctgcgccatcttctggctcaagaagcgcggcctcatgccgggcctcaccttctccaacgagctcatctcccgcgacgagggtctgcactgcgacttcgcctgcctcctctacgacctcctccgcggcaagctcgacgagtcccgcgtccgcgaggatcgtcgccgacccgtcgacatcgagcgcgagtcgtctgcgacgcgtctcccgtcgcgctcgtcgggatgaacggcgcgcttatg

SEQ ID NO: 452330 - DNA, 532 bp, Sorghum bicolor
  unsure (1)..(532): unsure at all n locations
tccgantcccggtcgaccacgcgtccgtcgacccacgcgtccggtcagtatcttgaccattgacaacggtgtctntgaggtgctggccaccaacggtgacacgcatcttggaggtgaggactctgaccagaggatcatggagtacttcatcaagttgatcaagaagaagtacagcaaggacatcagcaaggacaaccgtgctcttggaaagctgaggagggaagctgagcgtgccaagagggctctcagcaaccagcaccaggtccgtgttgagatcgagtccctctttgatgggaccgatttctcggagccgctgacccgtgccaggtttgaggagctgaacaacgacctgttccgcaagaccatgggccctgtcaagaaggccatggaggatgctggccttcagaagagccagatccatgagattgtcctggttggtggaagcaccaggattcccaaggtccagcagctcctgagggactactttgatggcaaggagcccaacatgggtgtcaaccctgatgaggctgtt

SEQ ID NO: 452331 - DNA, 961 bp, Sorghum bicolor
cgtccgggacattttccaggaggtctatgaagctggctggaaatcaaaatttgaggctgctggaatatggtatgagcatcgtcttattgatgacatggttgcgtatgcgcttaagagtgaaggaggctatgtgtgggcttgcaagaattacgatggagatgtgcagagtgatttcttagctcaaggttttggctctttgggtttgatgacatcagtgttggtgtgccctgatggaaaaaccattgaagctgaagctgcccacggcacagttacccgtcatttccgtgttcaccagaaaggaggtgaaaccagtacgaacagcattgcttcaatctttgcatggacaagaggacttgcacacagggcaaagctggatgacaatgctaggctactcgacttcgctctcaaactcgaggctgcttgcgtcggaactgtggagtctgggaagatgactaaagatcttgcacttcttgttcatgggtccgccagcgtcacaagaagccattacctgaacactgaagagttcatcgatgcagttgctactgagctccgatcaagattgggagccaattgagcttacaagaaactttgtgcatggcgacttgaatgcttcatcaccgatctgctccagtcatttctgttacattggtactgccagtcatgcttccgtgatgaattgaatgtgcgtcatcgcaatgcaatttcgatcgaagctgattaaagatgatggtgtcacgtgagcgcccataataaaggatatatagaacaactgtggcagatgattaaaatacttttatgtttgctaagttcagtcattccctgggtattttcttgttttctccttttctgtagttcacaaatcacgcagttcgttcggtttggtttgcccattccgtagttcgccgataaccgtatgcactcggtttttccatcatcatcaagtaaacagatgccttccgtt

SEQ ID NO: 452332 - DNA, 585 bp, Sorghum bicolor
cgtccgcccacgcgtccgatcgcaacgcacagcgaaatcctccaatccacagattcacttcccagttcgcgctcacacccacacccaccgagcagctaaagctagcaatcagaagcagcaatgtcgctggtgaggcgcagcaacgtgttcgaccccttctccctcgacctctgggacccgttggacaacatgttccgctccatcgtcccgtcggccgcctccggcgactccgagaccgcggccttcgccaacgcgcgcatcgactggaaggagacgcccgaggcgcacgtgttcaaggccgacctccccggcgtgaagaaggaggaggtcaaggtggaggtggaggacggcaacgtgctcgtcatcagcggccagcgcagcagggagaaggaggacaagaacgacaagtggcaccgcgtggagcgcagcagcggccagttcacgaggcgcttccgcctgccggagaacgccagacggaggaggtgaaggccggcctcgagaacggcgtgctcacggtcaccgtgcccaaggctgaggtcaagaagcccgaggtgaagagcatccagatctccggttgaagagcat

SEQ ID NO: 452333 - DNA, 701 bp, Sorghum bicolor
cgtccgcggacgcgtgggcagcgatcagaagctcaaacaaatcgttcgaacctctcagcccaaatctccaattcgtagtcgtaagctagactagataggaggcaaaatcgttcgaccatgtcgctgatccgccgcagcaacgtgttcgatcccttctccctcgacctctgggacccctttgagggcttccccttcggctccggcgggagcaacagtctcttcccgtcgttcccgcgcaccagctcggagaccgcggccttcgctggcgcgcggatcgactggaaggagactccagaggcgcacgtgttcaaggcggacgtcccggggctgaagaaggaggaggtcaaggtggaggttgaggacggcaacatccttcagatcagcggcgagcgcaacaaggagcaggaggagaagacggacacctggcaccgcgtggagcggagcagcggcaggttcctgcgcaggttccgactgcctgagaacgccaagacggagcagatcagggccgccatggagaacggcgtgcttacagtcactgtgcccaaggaggacgtcaagaagcctgaggtgaagttcattcagatctccggctagacgtcagtccgcacgtcggatcgtcgtgcctgcgtgattggaggaaacggcagttcacctcggtcgttctgtggaataaatttgggttaaaggattatgagtatgct

SEQ ID NO: 452334 - DNA, 520 bp, Sorghum bicolor
ccgtccgaagaaaacacagatacactagtcgccgaagcaaccattaaccacaaccccaatctcccgcgtcacccaaaactcgaggcaacaaccgatccaccaacaatgtcgctgattcgccgtggaagcgcattcgaccccttctccctcgacctctgggaccccttccagggctttcccttcggctctggaagcagcagcctcttcccctcgttcggaggcaccaactcggagacggccgccttcgccggtgcccgcatcgactggaaggagacgccggaggcgcacgtgttcaaggccgacgtgccggggctgaagaaggaggaggtgaaggtggaggtcgaggacggcaacgtgctccagatcagcggtgagcgcaacaaggagcaggaggagaagacggacacctggcaccgcgtggagcgcagcagcggcaagttcctgcgcaggttccggctgccggagaacgccaagacggagcagatcagtgcgtccatggagaacggcgtgctcaccgtca

SEQ ID NO: 452335 - DNA, 564 bp, Sorghum bicolor
cgtccgcttttatgaaggcattcgtgtccgagaagccaagacagaagctttccccgttaaggatcacagaggagaattgtacaaaaagcactacccacctgcgctgaaggatgatgtttggagattagaaaagattggcaaggatggtgcattccacaagaagttaaatgctagtgggatctatacagttgaagacttcctccggcttcttgttagggatcagcagagattacgtactattctgggcagtggaatgtcaaataagatgtgggacagccttgttgagcatgcaaagacatgtgtcttaagtggaaagcattatgtatactatgctagagactcgagaaacgtgggtgcaatattcaataacatctatgagttcactggtttgagcgccgatgatcagttcatttcagctgaaaatctcacagacaatcagaaggtctatgctgatgcattggtaaagaaagcatatgaggactggatgcaagttgtagaatatgatggcaaggcactcctgagtttcaagcagaataagaaatctgtcacaacacgaagcgatgc

SEQ ID NO: 452336 - DNA, 934 bp, Sorghum bicolor
cgtccgcaatttaatcaaacacccaaagttcatcactgataccaaggctgctattgccgaaacttacaaccagacagattcagaatttcttaaagctgacagcagtcaaactcgagatgctggctcaactgcctcaacagctatcattgtaggtgaccgtttgcttgttgcaaatgttggagattctagagctgttatttgtaaaggaggacaggcgattgcggtttcaagagatcacaaacctgatcagacagatgagagacaaagaattgaggatgcagggggctttgttatgtgggctgggacatggcgagtgggtggtgttctcgcttgctctcgagcatttggtgataaactcttgaagcagtatgttgtcgctgaccctgaaatcaaaggaggaggtggtcgacagctccctcgaattcctcatccttgctagtgatggactgtgggatgttgtcactaatgaggaagctgttgccatggtcaagccaattcaggacccccaggaagcagcaaacaagcttctcgaagaagcttcccggaggggaagctccgataacatcacagttgtcattgtccgcttcctagatggaactaccggtgataaatcaggcgaagacaaagagaccaccaatgaccaaaactcctagttgtctcctgtagggctgcatcatgcgtgtgtgatcttctggctgctgtatctgatgctcaaagtagatgctccgtgtgtcttggctgctggtccgcattccgtagggaaactgactgcccccatcgtcgtcctgatgctgctcatgctcctggctgcagaatgacgaatagggctggtgtagttacagtatggtccccttttccccatctttccgttaagctcagtgatgtagctgtccgtgctgttgattcatgaaatcatgctagagattttcctggc

SEQ ID NO: 452337 - DNA, 533 bp, Sorghum bicolor
cgtccgctccaccgcaaacctcaagtacctactcgttccatattaccttgcggaaatgactgagaagatagcacaagaggatcggatcccggttcttaaggcgtcacaggaccacttgaaggaattcattgctctatgtgaagtactagagcttattccagaggatgagctagaattgtctaggcagaagcagcctgatactatggcaaacaggagagcacagaaggttgcccggttcaaacgtcaaaaggctgcagaaacgaagctccaagagatcagagagagaaaagaaaggcgtggacgctcattgagagcagctgctttatctgccccaattgaagctggagaggaagatgacctggaggatgatggagaggaagaaagagaggcttggttagctaccatctcattggctctcttgcaaggcgtttgatcttctcgacatgctaaagaaagaagaagaaatgcttctagctgtaaaggaaaggaaggcaaaggacgggaatgcattttctcgtgaaatgctcgatgaa

SEQ ID NO: 452338 - DNA, 373 bp, Sorghum bicolor
cgtccgcgacatcctatcctactcggcgctcgtctacaaggcaaaccaacttttcgtccccccgatcgcgcgaaccttccactccctcgcctcctccgccggccccgccatggacacggcgatcggctcggtcccagcctcttccgacggcgcggcgccggcggcgtcgggttccgccccacgcgacgcgacgctggggaggcacctggcgcggcggctggcggaggtgggcgcccgtgacgtcttcaccgtccccggggacttcaacctgacgctcctggacgagctggaggccgaggaaggggtccgcctcgtgggctgctgcaacgagctcaacgcggcgtacgcggcggacgggtacgcccgcgcgcgc

SEQ ID NO: 452339 - DNA, 891 bp, Sorghum bicolor
cgtccgtaaccattgaaaatggtcagcgggaggcccgggaatggtgaattggatgcatggttcaagagcctcatggtgacctctagcagcgagagggggcaggctggaagtggtggcccagcgccaacattatcaggatggaaagaccttccgatggagcttctggtcaggataatatcgactgttggagatgataggatagtcattgtggcatctggtgtttgcacaggctggcgtgacgctctgggatggggggtcactaatctttcccttacatggtgcaaacagagcatgaataatttaatgatatctcttgcacacaagtttacagagttgcaagttctcactcttcggcaaaacaaacctcagcttgaagacagtgctggagagtctggtgccaattactgtcatgatctgcgtgagttagacctcagcagaagcttcagacttagtgaccgctccttgtatgcattggcccatggatgcccgcggcttacaagactgaacattagtggatgttccaatttcagtgatactgccttgatttaccttacctgccactgtaaacacctgaagtgcctgaacttgtgtggatgtgggaaggctgctactgacagagctttgcaggctattgctcagaactgtgggcagctgcaatctttgaacctaggctggtgtgatgatgttacagataagagtgtgaccagcttagcgtcaggatgtcctgatctcagagctgtagacttgtgtggtgtgttcttataacagatgagagggtggtgctcttgccaacggatgtccgcacctgccctcgttgggcctctacttctgccagaacatcacggaccgtgccatgtactccctcgcaaacagccgcgtgaagagcagtgt

SEQ ID NO: 452340 - DNA, 487 bp, Sorghum bicolor
  unsure (1)..(487): unsure at all n locations
acgcgtccggagagattagagggagcgcccccctgcccaaggaaagagaaaccgcggcgcgaggagcaagggaggaagggcaagaggcaagatgagagagatcatcagcatccacatcggccaggccgggatccaggtcggcaacgcctgctgggagctctactgcctcgagcacggcatcgagcccgatggcaccatgcccagtgatacctcggttggcgtcgcacatgatgccttcaacacgttcttcagtgagaccggttccggcaagcatgtgcccgagggctattttcgtcgaccttgagcccactgtcattgaccaggttcgcactggctcgtaccgccagctcttccacccagagcagctcatctcggggaaggaggatgcagctaacaactntgcccgtggccactacactgttgggaaggagattgtcgatctatgcctggaccgcgtgcgcaagcttgcagacaactgcactgggct

SEQ ID NO: 452341 - DNA, 467 bp, Sorghum bicolor
cgtccggtgagggcgagcgagcgacgggacggcaccaatggcgatgcgagcagctccggcggcggcgacaggcttcttctctccatcctccgtctctccgaggcgcttctcgtccgccacaccgccggcgtcactctccaccgggcgctgcatccagcgccatcgtctccgcgccttcccaagttcggaaatacctctagaggaactcaacccatccgtcgatctacttaggaaaactgcggaggccgtcggcgatttcaggaaaacgcccatctatattgtcggcacggattgcacagccaagcgcaacatcgccaagctgcttgcgaattccataatataccgctacctctgcagtgaggaactgcttgaggatgttcttggtgggaaggacgccctcagagccttcaaagaatctgatgagaagggctatcttgaaatcgagaccgaagggttaaagcagctca

SEQ ID NO: 452342 - DNA, 1151 bp, Sorghum bicolor
cgtccgaagactctctcttcccacccgagtctcgcccctcttgacacacgctcctcctccaccagtccgccgccgtctccgcgccccgcctcccccaaaccccaccgcctcgccggaaccctagcccctccgtcgccatgagggagatcctccacatccagggcgggcagtgcgggaaccagatcggggccaagttctgggaggtgatctgcgacgagcacggcatcgaccacaccggcaagtacgccggcgactccgacctccagctcgagcgcatcaacgtctactacaacgaggccagcggcggacgctacgtcccgcgcgccgtcctcatggacctcgagccggggaccatggactccgtgcgctcgggccccttcggccagatcttccgccccgacaacttcgtcttcggccaatccggcgccggaaacaactgggccaagggacactacaccgagggcgccgagctcatcgactccgtgctcgatgtcgtgcgcaaggaggccgagaactgcgactgcctacaagggttccaggtctgccactcgctgggaggaggtactggttcaggaatgggcaccctgctcatctccaagatcagggaggagtacccggaccgcatgatgttgacattctctgtcttcccgtcgcccaaggtgtctgatactgtcgtggagccctacaacgccacgctctctgttcaccagctggttgagaacgctgatgagtgcatggtgctcgacaacgaggctctctatgacatctgcttccgcacgctcaagcttgctacaccaaccctttggtgatctcaaccacctcatctctgcaaccatgagtggtgttacgtgctgccttcgcttccctggtcagctcaactctgacctccggaagcttgctgtgaacctgatccccttcccgcgtctccacttcttcatggttggatttgctccactgacctcgcggggctcccagcagtaccgtgccctcactgtgccagagctgacccagcagatgtgggactccaagaacatgatgtgtgctgctgaccctcgccacggccgctacctcacagcgtctgctatgttccgtgggaagatgagcaccaaagaagtggatgaacagatgcttgacgttcagaacaagaactc

SEQ ID NO: 452343 - DNA, 1052 bp, Sorghum bicolor
cgtccggccaatgagtgccaggctaacttcatcagtgtcaagggtcctgagttgcttaccatgtggtttggtgagagtgaagccaacgtccgtgaaattttcgacaaggctcgccaatctgctccttgtgtcctcttctttgatgagcttgactcgattgctactcagagaggaagcagtgtgggtgatgctggaggtgcggctgatagagtgcttaatcagctactgacagagatggatggcatgaatgccaagaaaactgtgtttattattggggctacaaacaggcctgacatcattgaccctgctctgctgaggccaggacgtcttgaccagctgatctacattccactgcctgatgagcagtctaggctccagatcttcaaggcttgccttaggaagtcccctgtggcgaaggacgtggacttgaatgctcttgctaagtacacgccaagggtcagtggagcagatatcacagaaatttgccagcgtgcctgcaagtatgcaatcagagagaatattgagaaggacattgagagggaaaggcggagaaaggacaaccctgaggcgatggaggaagacgaagtggacgagattgctgagatcaaggcggctcactttgaagagtcgatgaagtacgctcggcgtagtgtcagtgatgctgatattcgcaagtaccaggcgtttgcccagacattgcagcagtcccgtgggttcggcagtgagttccgcttctcggagcaatcggcgacagctggtgctgctgcagctgatccgtttgcctctgctggtgctgcggctgatgatgacgatctatacagctaggtgtcctgttgggttggttctgggttgttcaatatcagtctcgtcagtcgtctgtttaaaactgatcatactttagacacggatgtcatgaaatgatatttattttccgtacatttggatgtcgctgagaatgccctctcggcttttgattatttctttcatgccatattctccatgacattttctgggccatgacattttattaatgattgttgtcattgtattgc

SEQ ID NO: 452344 - DNA, 516 bp, Sorghum bicolor
  unsure (1)..(516): unsure at all n locations
ttagcttttagcccagggcaagaaacgcgtggggggttttggctcctgatcgaaagccgccgccgcctgccggtgcacaagcgaggaagtgggagagaaagagaggagggcaaggaggaaaccgaggccagaggctgagagcagcgcagaagctctgctgtacgggcagccatggcggcgaaggcgagggtctcgctgacggtcttgctcgccgccgcgacgttggcgtgcttatgtgccgtggccgcctccgcctccgccttcgacgtgccgtccgtggccttcgaggagcggttctcggcgctgttcggcgacggcaaacgttgtccgctcctccgacgacaggagcgtccgccttctgctcgaccgccggtcaggttccgggttcatctcttcggactactacctccacggcttcttcagcgcgtccatcaagctgcccaaggactacaccggnccggcgtcgtcgtcgccttctacctgtctaatggggacgtgtacgagaagacgcacgac

SEQ ID NO: 452345 - DNA, 1140 bp, Sorghum bicolor
cgtccgaaagaaaagcagtgttgtgccgcttgagtccaaacccttgaagaaaaccactggaattagtcagagcattggttctggtactgtgaagagtaaggtaccccaacttgatgactcctcaaaagatagtggaagtgttaaccaagctgaagataaggagcaatctcctatgacaaccgagccaactaccaaggtactggaggctgatcttgctcaaccagcacatgatgttgatgaaaatttagaaatttcgctcgataatgatttgaatattgaaaaaacagagaaaccggcctcgagtttaactgcaacaaaaaatggactccagtgtccatgttgtaccctctaccgatgaggtagatgaggccatacaacctcctgacgatgacatgggcatctcatcagctgcttgggtagaagtagagcatccaagaactagaagtcactgattccggtgaaaatgtagtcgctgaggatgtaacttccccaggaattgcaccattgccatcatcaagcccaagagtgcgtcattcgttgtcacaaatgctgcaagcagatagcaatgaaccagaaattattgagtggggaaatgctgaaaacccacccgcaatagtttttcataaggattctccaaaaggattcaagaggcttctaaagtttgctcgtaaaaataagggagataataatgctaacggctgggcaagcccctcagtggtttctgaaggagaagatgaactagaagaaccaagaggcactagtgatagtgcaaattcgagcaggagaacttttgatggttcaaagactaatagcatcttatcagctcaatcaactaccggcagcttcaactctatgaactcggataagctacgggagagacctggagctgccacatcaaccaaagcatcaaggtcgttcttctccctctcaaacttccggagcagcagatcaaacgagtcgaagcttcgatagtgtatgccttgtttgcccagcggttacatggatatctccgctccattcaggacgtctagtagatgtaaaaatggtttgagatttgattgttcggacggagccaagcttgtgtgtttggctctagtcgccttgacgttggtatagcttctgtctatgagatgccatact

SEQ ID NO: 452346 - DNA, 555 bp, Sorghum bicolor
cgtccgcggacgcgtgggggcattcacggtggagaagaagcttgttgaaggggaggtgaactggtcaaatattccggaatggaagacgaagcccaagaggctgagagcacactatgaagtccttgctcgagtggaggagggtcaggcgatccctgagaggatcgcgcaggtgcagcctttccaggccgacgaggccatgtccgagagtgtgctcaccggcaacgtcacaaggtcgaagatggaaatcgtccatcccccgcctgtttatttcactctctgatggaagagctggagcctggaggctgttttgatgttttctcttcagagctactacacgttgggttggtggttagtttacggtgcctcgtaggtaacaaagtcatacaagcggcaagagtttgttgcctatacactgactgcttcgacataaatattggcattttatgtgtactgacagactgccaagccttgtatattatcgactggaataatgagcaatacagaaaaaaaggtttcagtacacttttggatgggaaagaggcgagttcttagtaa

SEQ ID NO: 452347 - DNA, 1139 bp, Sorghum bicolor
cgtccgcgcaatataaacccctggggagcgtggcggccatttgcccccagccgctctttgtgatcctacctcagccgcgtcgcgtcccattcccatcgcattctgcgattcgaagctctctgttcgcagccatggcgaagagctacccgaccgtgagcgccgagtacagcgaggccgtcgagaaggccaggcaaaagctccgcgccctcatcgccgagaagagctgcgccccactcatgctccgcctcgcgtggcactccgccgggacgttcgacgtgtcgtcgaggaccggcggtcccttcggcacgatgaagaacccggcggaactggcgcatggcgccaacgcggggctggacatcgcggtgcggctgctcgagcccatcaaggaggagttccccatcctctcttacgccgatttctaccagctcgcgggagttgtggccgtggaggtcactggtgggcctcagatccccttccaccccggtagggaggacaagcctcagcccccacccgagggccgtcttcctgatgccactaagggttctgaccacctgaggcaagtctttggcaagcagatgggtctgagcgaccaggacattgttgccctttctggtggccacaccttgggaaggtgccacaaagagcggtctggttttgagggggcctggacttcaaaccctttggtcttcgacaactcttacttcaaggaacttctgagtggtgacaaggagggccttcttcagctcccaagtgacaaagccctgctgagcgaccctgccttccgccctcttgtggataaatatgctgcggatgagaaggcattctttgaagactacaaagaagcccacctcaagctctccgaactggggttcgctgatgcttaaatggcccctatcctggagtgatccaaactgctgcctgtatggaatcatgtgcatctggagttagagtgaaccagcagattgtctcgtgtcttctatgtaataaatttgtcgctgttgagccctcaggcgcgtcggggaactttggctatggttgaacgggggggaccctgggcctatactctgatgctgtatgcaactgaaactagtagatctatgatcttatggctgcagtatgttcttgttactttgctaaaa

SEQ ID NO: 452348 - DNA, 831 bp, Sorghum bicolor
cgtccgcaaaccctcatcctccgtcactctccggagcaccccaccctttcctcacccagccatggcggagcgcggcggtgagcgtggcggcgaccgtggcgggcgccgcggcggccgtcgtggcccgcgtcaggaggaagagaagtgggtacccgtcaccaagctcggccgcctcgtcaaggagagcaagatcaacaagatcgaggagatctacctccactcgctccccgtcaaggagcaccagatcatcgagaccctcgtcccggggctcaaggatgaggtcatgaagatcactcccgtccagaagcagacccgcgccgggcagcgcacccgcttcaaggccttcgtcgtcgtcggcgatggcgacggtcacgtcggcctgggagtcaagtgcgccaaggaggtggccaccgccatccgcggcgccatcatcctcgccaagctctccgtcgtccccgtcaggaggggttactggggtaacaagatcgggcagccgcacacagtgccctgcaaggtcaccggcaagtgtggctccgtcaccgtgcgcatggtgcccgcacccaggggttctggcatcgtcgccgcgcgtgtgcccaagaaggtgctgcagttcgctggcattgaggatgtcttcacctcgtcccgtggctccactaagacccttggcaacttcgtcaaggcgaccttcgactgcttgatgaagacctatggcttccttactcctgaattctggactcagaccaaattctccatgactccattccagcagttcacagaccttctgggaaagcccaccaagggtcttgtgcttgaggctccaactgagacagc

SEQ ID NO: 452349 - DNA, 502 bp, Sorghum bicolor
cgtccgctactccgccggtgatgtcgtcatccggcgccccggccccggcggcggcgatggccgttgacgaagcggaggacgatcagctcgcctccatgtccacggaggacatcatccgggcctcccgcctcctcgacaacgagatccgcgtcctcaaggacgagttgcagcggacaaaccttgagttggagtcgttcaaggagaagattaaggaaaatcaggagaaaattaagctcaacaagcagctgccctacctcgtcggcaacatcgttgagatcttggaaatgaaccctgaggatgaagctgaggaggatggtgctaacattgatttagactcacaaaggaaaggaaaatgtgttgttctgaagacctccacaagacaaactatattccttcctgttggtggactagtggaccctgacaagctaaagcctggtgatctggttggagtaaataaagatagctaccttatactagatacattgccatcagagtatgattc

SEQ ID NO: 452350 - DNA, 512 bp, Sorghum bicolor
cgtccgcagaaacctcttgtcatccaagggagcggagccggggagccgccgcccgtttccgtttccgttgccgtggggaggagttcttcccccgaccccgactccccgagctccgagcgaagatcaccgagaaggaaaacctaatcctttccgttcccggcgcccctttgcgtgccgtcgtatatagcagccgaatagagaggggggcgaggagagatcaggagaacccaaaccacgtcgtcaaccctatctattctttattcgattcgactggactcttctcttctcgccaagaaggaagacgaacgaacaaaatccgatccctttctggtaaatccatcatggcagcggcaggagcagcgctccttcgatcggtggcaaccaagatggcccgcgcaccgcctcgccttccatctgccctggagcgccatcgccgactctcaacgagttctagattctctacatctactggttctacgccgcagccagccaaccagggcccgcaaactcat

SEQ ID NO: 452351 - DNA, 426 bp, Sorghum bicolor
  unsure (1)..(426): unsure at all n locations
tcgacccacgcgtccgcaagaaccaatccttgattacagccagcttagcaaaagccatctgcaggatatacgaccttctgaacgcgacaaacacgaggcagagttcaaaaaaagaacaggtgtgctactggctgatattgagcgcactgctcctaatctaaaagcactggatcaatatgatgcactccaaagaaaggacatggaggtcactgataggtttgacgctgctcgcagagaggaacgagagatagcatgataaagataactcagtcaagcaaaggaggtatgagctgtttatggaggcctttgatcacatatctaaaggcattgacaaaatctataagcagctgacaaaaagccatacacatccacttggaggaacagcatatntaaatctagaaaatgaagacgaaccatttctacatg

SEQ ID NO: 452352 - DNA, 564 bp, Sorghum bicolor
  unsure (1)..(564): unsure at all n locations
cgtccgcaaaatcgcactgctgagtgttgcttgtggattgccgaatgttggagtgcattatgagacatggaacactggtgttggtggtcctgttgggcttcatgggttgaatgaaggatcacgagatcttacttggcagacttggtcctatcaggttggcctgaaaggtgaacagatgaatctgaactccctagaaggctcaacctcagttgaatggatgcaagggtcgttgatagctcaaaaccaacagccattgtcctggtatagggcttacttcgaaactcccagcggagatgagccattggctctggatatgggtagcatgggcaagggccaaatctggataaatggacaaagcattggacgctactngacagcatatgcagatggggactgcaaagagtgcagttacactgggaccttccgggcacccaagtgtcaagcaggctgtggtcagcccacgcaacgttggtatcatgtgccaaggtcctggctacaacccaccagaaacctattggtagttttggggaacttggtggggattcataaagatgcctaggaaag

SEQ ID NO: 452353 - DNA, 495 bp, Sorghum bicolor
cgtccgctcgcagtcgcctacacgcccccaagcaagttgcgcatccatccatggctggaggcaagtccggcggcaacgccgcgcgcagcaggaagcgcgtcgaggccaccgtcctcaagcgctccagggacggcagcgcattcaccagatgcgaggcctgcaacaaggatgtccccgtcgtcctcatcgacatgcacagctgcagcctcgacaagcacatcaggatgatgctcgaggcgcaggtcgtcgagaagaccgtcgaggtcgccgccaagcccgccgaacgcaacaagtcctccgccaagggacacggaggcggcggcaacaaggatgccaagcgcaagcgctcgcccacagccttcttcctcttcatggacgacttcaggaaggagttcaaggccgcccatcctgacaacaagagtgtcgccaccgttgcaaaggaaggaggggagaagttgaagttcatgacagacgaggagaagaagccctacgttg

SEQ ID NO: 452354 - DNA, 550 bp, Sorghum bicolor
cgtccgccaagccgaaaccaaagcccgagcctaagcctgaacccaagccagaaccaaaacccgaaccactgccacctaagcctgagcccaagccggaaccaaagcccgagcctaagcctgaacccaagccggaaccaaaacctgaaccactaccaaaaccagagcctaagcctgagcccaagccggaaccaaagcccaaaccattgccaaaaccagagccaaagccagagccactgcccaaaccagagcctaagcccgagcccaagccagaaccaaaaccagaaccactacccaaaccagagcctaagcccgagcccaaaccaaaacccgagcctaagcctgagccgaagccggaaccaaaacccgaaccactacctaagcctgagcctaagcctaaacctgaaccaaagcccgagcccaagccgaaaccagaacccaaaccggagcctaagcctgaaccaataccaaagcctgaacccaagccggagcccaaaccaaagcctaacccgtcgcacattccaccagcagcagacaactgaatgatcgatga

SEQ ID NO: 452355 - DNA, 746 bp, Sorghum bicolor
cgtccgcttttttttttttttttttttaagcagaatactggctcttgctgatttgtattaacagtagatgagagcacttcaaacaagagttgagatgtccaaatcgttcacatgaatccttggctcacttgaaaattgttctaatctcctagcaaagcccaagaaccaagcacaaatttaaactcaggtgcaaaatgtagtagaacacaagttccagatactggcacactatatagtgtgtatctagtgcgatttgacgtactcctgcactatgttaaggccttcagattcttcgccatagtccttgaccacaacacaggagcagcctacaaccttccttgccttgccctcggagtcaattttgcaaagcccagcccactcgccaagagttttagcgctaggcaccgtaaccaggtggacattgtgctcagcacagagagccttcaccagcttgacataatcaggctgatcacagtcctcagcaagcacgcaaagctgagcagcatgcttctcgatggctttggcagcctcacgaagacccttcacaaggccatcatgagcacctgacttcttcatgacgagctgcagggcagtcatcaggtccatcggctccccaagaaccggggtaggtgcctcaaccacagctggggtctcctgatccgccatctcccgcgctccgaggacccggccgacagcgtatgtaacacctgggttggaggagtgccgagcggacgcgtgggcggacg

SEQ ID NO: 452356 - DNA, 1660 bp, Sorghum bicolor
  unsure (1)..(1660): unsure at all n locations
cgtncgcccacgcgttcgtccacgcgtccggtcggatctgagacgagacgagccccccctcctcctcccgaacgaactgcttacccatcccactccgcctccgccggatctcgtcggactcggatccgcccgaccaccccgcgccgccgcagcagcagcagatcagagaagatggccgcagtcgacaccttcctcttcacctcggagtctgtgaatgagggacacccagacaagctctgcgaccaggtctcagatgctgttcttgacgcttgccttgctgaggaccctgacagcaaggttgcttgcgagacctgcaccaagaccaacatggtcatggtctttggtgagatcaccaccaaggccaatgtcgactacgagaagattgtcagggagacctgccgcaacattggtttcgtgtcagctgatgtcgggcttgacgctgaccactgcaaggtgcttgtgaacattgagcagcagtctcctgatattgctcagggtgtgcacggccacttcaccaagcgccccgaggagattggagctggtgaccagggacacatgtttgggtatgccactgatgagacccctgagctgatgcccctcagccatgtccttgccaccaagcttggtgcaaaactcaccgaggtccgcaagaatggaacctgcgcctggctcaggcctgatgggaagacccaggtgacagttgagtaccgcaatgagggtggtgccatggtccccatccgtgtccacactgtcctcatctctacccagcacgacgagacagtcaccaatgatgagattgctgctgacctgaaggagcatgtcatcaagcctgtcatccctgagcagtaccttgatgagaagaccatcttccaccttaacccatctggtcgctttgtcattggtggacctcacggtgatgctggtcttactggccggaagatcatcattgacacctatggtggctggggagcccacggtggtggcgctttcttcggcaaggacccaaccaaggtcgaccgcagtggagcctacatcgcaaggcaggctgccaagagcattgttgccaacggccttgctcgccgcgccatcgtccaggtctcctacgccatcggtgtgcctgagcctctctccgtctttgttgacacgtatggcaccggcacgattcctgacaaggagatcctcaagattgtgaaggagaactttgacttcaggcctggcatgatcatcatcaacctcgacctcaagaaaggtggcaacgggcgctacctcaagacggcggcctacggccactttggaagggacgaccctgacttcacctgggaggtggtgaagcccctcaaggcggagaagccttctgcctaaggcaccctcactttttcagaagaagcttttggtctgctgcgctttatcatgttttatctggcttctatatgttgtgattcttgatctgccccttgcttatcatttgtacttgtactgtcctaataagtggtacttgtgagggtcttattgtgtctgcttatttacctagaggattatttctggttttactggttatgtaatgcttaaaacaatgaaagaagctacaggctacagccactttgagaagtaatgggacctcgtgcattttggttacatattccaatgctgtgcggtgtga

SEQ ID NO: 452357 - DNA, 612 bp, Sorghum bicolor
cgccggtctaccctcccccgccgaaagccagtactcctacgacctacaccccgagccccaagcctgcggcgaccaagccggctacctacccgacccccaagccaccagctaccaagcctccgacacctcctgtgtacactccgagccccaaaccaccggttacaaagcctcctacacccaagccgaccccgccggtgtacacgccgaaccccaagccaccggttaccaagcctacgacacacacgccgagccccaagccaccggctaccaagcctgcgacatacaagccgactccgccggtgtacacaccgagccccaagccaccgaagccgtccccgccgacgtacacgccgaccccgaagccaccggctaccaagccgcccacctcaactccgacgcaccctaagccgacgccgcacacgcctatccccaagcccacgccgccaacctacaagccggcaccgaagccgacgccgccggcgcccaccccgccgacatacacgccgccggtgtcgcacacccccagctcgccgccgccgccgccgccgccgccttactactagacgaagaagtgatgaggtctcccactctgctgtcagtctcggagcattt

SEQ ID NO: 452358 - DNA, 518 bp, Sorghum bicolor
cgtccggccgagccctaagcccaagtcgccggtctaccctcccccgccgaaagccagtactcctccgacctacaccccgagccccaagcctccggcgaccaagccgcctacctacccgacccccaagccaccagctaccaagcctccgacacctcctgtgtacactccgagccccaaaccaccggttacaaagcctcctacacccaagccgaccccgccggtgtacacgccgaaccccaagccaccggttaccaagcctccgacacacacgccgagccccaagcctcctccgacatccaagccgactccgccggtgtacacaccgagccccaagccaccgaagccgtccccgccgacgtacacgccgacccccgagccaccggctaccaaagccgcccacctcaactccgacgcaccctaagccgacgccgcacacgcctatgcccaagcccacgccgccaacctacaagccggcaccgaagccgacgccggcggcgcccaccccgtcgacatacacg

SEQ ID NO: 452359 - DNA, 577 bp, Sorghum bicolor
  unsure (1)..(577): unsure at all n locations
cgtccgcacccagtcgaatccccccacccgcacccggagcagaggagagatggcggacaggaagggaggagcggcaaggaaggaggaggtggtcaccagggagtacaccatcaacctccacaagcgcctccacggctgcacattcaagaagaaggcacccaatgccgtcaaggagatcaggaagtttgcacagaaggctatgggcaccaccgacgtcaggattgacgtgaagctcaacaagcacatctggagcagtggaatcaggagcgtgccacggagggttcgtgtgaggattgcccgcatgaggaacgacgaggaggatgccaaggaggaactctactcccttgtcacggtggctgagatccctgctgagggcttgaaagggctgggaacccaggtcattgatgaagctgattaagctatcacatcttaagcatctttagagagtttttagtttgtatttgcaacagcaaaccttttgtatccaaagaagttntgtgctctggtacctggatcgacataacaaagtgtctatttcctcaatcgaattacatggctaagtcttttgttgtgcttg

SEQ ID NO: 452360 - DNA, 567 bp, Sorghum bicolor
cgtccgagctgctgaatgggaaatgaaagtactcgagaacgaggccaaagtgaaagcaaaggagaaagaaagggatcaaagagttggagagcacaatcggaagatgactgcattgaaatctgaagttgaatcggagcagaagtgccttgaggagaaagaaagaaaaataaaggaaacaattgacaagggttctgaattatgctctcaagctgattcggttgctgaagctggaaggaagaaaatagaggaaatctatgggaagtatgatcaagtttgtgaggcggctaacatgtacattgatggttcggatcagtccttcgaagagactgatgaagctgcagcgatgctgaaaactatagcccagagtggcgcttgatgtggtgtagtgaccatctggcaaagggtcgtggacaattatcatcatagtaataattgtgctagtgtccggctttgtatatataccttcattggatcatgtcgtgtggtcacttttgcaattcgttcatgttgttgctctgatccggtgtggcagtgatgtgcttttagcacctctatttaaattaatta

SEQ ID NO: 452361 - DNA, 1133 bp, Sorghum bicolor
  unsure (1)..(1133): unsure at all n locations
cgtccgccaccttcgagtgacctcgattattctgttcgctctcgcccaagtcatcgtctggtcgtcgcccgcagacgcccggggggccgccatggccgcgtcggatctggagagcaaggccaaggaggccttcgtcgacgacgacttcgagctggccgccgagctctacacccaggccatcgacgcggggcccgccaccgccgaactctacgccgaccgcgcccaggcgcacatcaagctcggcaactacactgaggctgtggcggatgctaacaaagcaattgaacttgatcctacgatgcataaagcctactaccggaaaggtgctgcatgcanttaagctgaagaataccaaactgcaaaggctgcttcttgagttgggttcttcctatgcatcaggcgattcaaggtttactcgtctattgaaagaatgtgaagagcgcattgctgaggaatctagccaggctccagcaaagaatgttgagcctcctgtggctgctgctgctgctactgttgaggacaaggaggatgtcgcaaatatggagaatacaccgccagtggtagaacccccaagcaaacctaaatacaggcatgactactacaacagtgccacagaagtggttttgacaatatttgctaagggtgttcccgctgatagtgtagtcattgattttggtgaacagatgttaagtgtgtccattgaagtccctggtgaagaaccataccattttcagccccgtctgtttgctaagattatccctgagaaatgcaaatatcaagtcttgtccaccaaggtcgaaatacgccttgcaaaagctgagcaggtgacatggacaaccctggattatagcggaagaccaaaggctgttccccagaagataagcacgccagctgaaacagccccaagaccttcatacccatcttcaaaggcaaaaaaagactgggataaactggaagctgaagtcaaaaaggaggagaaggaagaaaaacttgatggtgatgctgcattgaaacaaattcttccgtgacatctacaaggatgctgatgaagatatgccggaggcccatgatgaagtcattcgtggaatctaatggcactgttctctcaaccaattggaaaagatgttggatca

SEQ ID NO: 452362 - DNA, 722 bp, Sorghum bicolor
  unsure (1)..(722): unsure at all n locations
cgtccgatggaatactctcgaaggatcagcactgtggatggacagagtgctgctccaacagcaaacatggctgatacgagagttctagattatggttcagtatttctgggttcaccatcacagactgatggagatgacatatcttctgctccgagctctgccagccagcctggagttaatgttgctgagcttttgctctcacgaggctttgctaaaacatctaaacacagggattatgaggaaagatcacactattatgatgctttattagcagctgaatcacgggctgagaaagcaaagaaaggagtccattctctaaaagaatctcctgtgatgcatataacagatttgacaactgtatctgcaaagaaggccaaagatttccttcccttcttgcagcggaacagaaggcattcggccatcgtcgaatatgtttttagtggccatcggttcaaactaacaattcctaaggagacttgcagtattgccttctcattatctggtgttcgggtcctggtaaaggcgaaccatactcagatgaagctattgcttngatgaggagaaggatactgcaacgtgatgtggagaaaagaggtgggagagttgacaggacaggaacattcataggttctttggtggagttcaagaccaacatgggctctgtacttctggaagctggctcgccaaactgagtcatttggttggataggactagatgctat

SEQ ID NO: 452363 - DNA, 684 bp, Sorghum bicolor
  unsure (1)..(684): unsure at all n locations
cgtccggtttaggctcccaaaagccaaaaatcaaggagaaatattcgcagcggcagcgcgtctcgataaaagccggcatcaactgttccgtcaaagcagagtccacccctccccgcgccgttctttttggttcccctgtccccgccgcctccgaaacccaccgatggaggtcgtcgccgccgccgccgccgccgcgaagcagaagacgaagaagcacgagaagcacatacacctcttctactgctccgaatgtgaggagctcgccctcaaggtcgccgccagctccgacgccatcgagctccagtccatcaactggcggagcttcgacgacggcttcccgaacctgttcatcaacaaggcccacgacatccgggggcagcacgtggcgttcctggcctcattcagctcgccggcggtcatattcgagcagatctccgtcatcttcgcgctgcccaagctcttcatctcctcattcacgctcgtgctgcccttcttccccacgggctccttcgagcgcgttgaggaggagggcgatgtcgccaccgcgttcaccctcgcgcgcatcctctcgatgatccccaagtcgcgcggcgggccgacaagtgtcgtcatctacgacatccacgcgctccaggagaggttctacnttggggacgacgtnctgccatgcttcgagacagggat

SEQ ID NO: 452364 - DNA, 516 bp, Sorghum bicolor
cgtccgcggacgcgtgggtccttaccctcgcgccgccgccaccgcaacccttgcagccccaatcccccacggcgaccatggccggtgcgcaggagtccctgtccctggtgggcacgatgcgcgcccacaacggcgaggtgacggcgatcgccacccctatcgacaactcgccgttcatcgtctccgcctcccgcgacaagtccgtgctgctgtgggacctggaaaacccggtccactccaccccggaatccggcgtcaccgccgactacggcgtccccaaacgccgcctcaccggccactcccacttcgtccaggacgtcgtcctcagctccgacggcatgttcgccctctctggctcctgggacggcgagctccgcctctgggacctctccaccggcgccaccacccgccgcttcgtcggccacggtaaggacatcctgtccgtcgccttctccggcgacaaccgccagatcatctccgcgtcccgcgacaggaccatcaagctctggaacaccc

SEQ ID NO: 452365 - DNA, 528 bp, Sorghum bicolor
cgtccgccgcgaccgatctcctccatccgctcgccgcgccgcaacccggagaggagactgcgctcgatcgagcaccacctggggcccagcatcctcacgaccatctccggcacggcgtccgccctctgcagctccggtgtccctgcgaccgtcgctgctgtcctacttcgccactggccactttgcccggcgacgaacaccaccaggacactagcaggagtaaaactaaaatatggctgccttgccattggccaccgctgaagtatgtgatgctaatcctcatctgattatgaacggcgagctccgtgctctccagcccatcttccaaatctatggaaggcgccaagttttcgccggccctattgtcacactgaaggtctacgaggacaatgttctgatccgcgagttccttgaggagaaaggccacgggagagtccttgtggttgacggtggtgggagcatgcgctgtgccattcttggtggcaaccccgttcagcaagcacagaacaatgggtgggctgggtatct

SEQ ID NO: 452366 - DNA, 562 bp, Sorghum bicolor
  unsure (1)..(562): unsure at all n locations
cgtccgcccacgcgtccggtcgtggcctcgtgggggttggggacggagagccagggagcgcagcaagcggttcggtgggtggggggcgggcggcggcggccggaccgatggggagggcgccgtgctgcgacagtaccaagggcctcaagaagggcccctggacgccggaggaggacaagctcctcgtcgactacatccagaccaacggccccggcagctggcgcctgctccccaagctcgcggggctgaaccggtgcggcaagagctgccggctgcggtggaccaactacctccgcccggacatcaagcgcgggcccttcacccccgaggagcacaactccatcctccagctccacgccatcgtcggcaacaagtggtccatgatcgcggcgcagctcccgggcccgacggacaacgagatcaagaactactggaacacgcacatgaagaagcagctgcgccaggagggcgctgncgcccagcttcgcaacggagcggcggctgcgtcgtcgttcttgccccgccgcccgccacatggcccagtgagagatcgcccgcctcg

SEQ ID NO: 452367 - DNA, 512 bp, Sorghum bicolor
acgcgtagcggataggagagcgcatgacactgtacaagttccaacgagcgaggcgaagctgccgggccaatccagcgtctgcgcgcggagccggaggtgaggggagggccgagggcgccatggcggcggcggcggcggcgaaggacgcggcggtgacgctgagcagcgggtaccggatgccggcggtggggctgggcgtgtggcggatggacaagccggacgtccgcggcctcatccacgccgcgctccgactcggctaccgccacctcgactgcgccgctgactaccaaaatgaagcagaagttggtgatgcactcgcagaggcttttcagactggacttgtcaagggggaggatctgttcatcacaaccaagctgtggaactcagatcacggccatgtgcttgaagcctgcaaggatagcttgaagaagctacagctagattatctcgatctctatcttattcactttccagtagctaccaggcatacaggagttggcacaacttctagc

SEQ ID NO: 452368 - DNA, 541 bp, Sorghum bicolor
  unsure (1)..(541): unsure at all n locations
ggagatcccctgaaaccagctgtgacgggtgtcttagtttttgtgtctactccagatccaattggcaacaagtactatcttggccctgctcctttgcaggatatggcaaagcaaattgctacagccaatggccctactggctataatagggattacctgttctcaatggagaaggcattagccagcataagccacgaagatgagtcaatcatagagcttgcaaacgaggtgaggaaggtgctcaacaaaacaaaggagaccaagatcactggtgccaatgcttccctcaaatctcatgcccctcttgtgcacctgtctgcgcttccagaaggcaccgttgtggactcgagatagcaagagccttggacgctcgacctctactacccggaatttactttcagctcttgcatgtttgtgcccatcctgtactgaatttcccttctcaatggttgatgtgaggctgtatcttccagagtgaaaaacgctaaagccggcactaataatgatattaattttaacatggaggccatgttgcncttna

SEQ ID NO: 452369 - DNA, 1012 bp, Sorghum bicolor
  unsure (1)..(1012): unsure at all n locations
gtcgcccagcgtccggtcggagagaaggagagagcggctccagggcggcggtggacgagcgctacgcgcagtggaagtcgctcatccccgtcctctacgactggtttgctaaccacaacctcgtctggccatccctctcctgccggtgggggccacagtttgagaaagctacctacaagaatcgtcaacgcctttacctatctgagcagacggatgggagtgtgcctaatactctagttatcgcaaactgtgaagttgtgaagccacgggttgcagctgctgaacatatctcgcagtttaacgaggaagcacgatcaccttttgttaagaagtacaagaccatagttcatcctggtgaagttaacagaatcagggagcttccacagaacagtaagatcatagccactcacactgacagtccagatgtacttatttgggatgttgaagcacagccaaatagacatgccgtcctaggagcttctgaatctcgccctgatctgatattaacgggacataaggaaaatgcggaatttgcgcttgctatgtgcccagcagaaccatatgtcctatcaggaggaaaggacaaatctgttgtcttgtggagcatccaagaccacatatctgcccttggggattcctcgtcttctcctggagcatctggcagcaagcagtctggtaaatctgcaactgaaaaggagagccctaaagttgatcctagaggtatattccacggacatgacagcactgttgaagatgttcagttctgcccttccagtgcgcanngagtttgtagtgtgggtgatgatgcttgtcttattctgtgggatgctcgaactggcactggcccagctgttaaagttgagaaagctcacagtggagatgttcattgtgttgattggaatccccttgacgttaactatatcttaactggttctgccgataactctgtccgaatgtgggatcgtcgtaagctgggttccggaggagctagttctccaattcataaatttga

SEQ ID NO: 452370 - DNA, 738 bp, Sorghum bicolor
ggcacgaggcttccgttcgctgaccgctgccctcctcctccttccctcctccccctcctgtctctctctcgctaccctcgcgctcccagacgactattgggccgccgccgccctaggccaggtgctgaggctttccttggtctcttcgccggcgacgagcaccccaccagcagatggcgaggataaagcccaagcaattgctaattcaaagcaagacgaagaaggctccatctcggatcagctactctactatcatcacatggaacttgattgtcatattgattgtgctatctctctatgctacctacagccattggcatcaaaggtctgcccaagactttgaaatggagcttcatgaagctgagcttgctgtgagaccggtggatccaaaaatgataagtagaccaagatatgcggtaatgaacaccgcaaagggtccaattactatagaaatatacaaagatgcttctgctggtgttgtggatagatttattgacttgtgcaagagtaatcatttcaaaggaatgccatttcggcatatcatcaaaaattttgtaattcaaggaggtgattttgattttgatggagctgcccaagaatggataacgaaagctaaagctagtgggaaaaatgatctcagtccaaaacatgaggcgtttatgattgggactgcaaagaatcctaataacaaaggatttgatttgtttatcacgactgctccaattcctgacttgaatg

SEQ ID NO: 452371 - DNA, 730 bp, Sorghum bicolor
cgtccgagaggttgtcatggcaattaaatgtcgtggggagctcttagatggtctatatacgggaatcaattcccaacatattactttgacaagcaaaatggtacaagagcacagtggacttcatgtacaaccacataaagctattgttggtgccaatgcctttgctcatgaaagtggaattcatcaggatgggatgcttaagtacaagggaacatatgaaataatatcacctgatgatattggtttgacacgtgcgaacgaatttggtattgttcttgggaaactcagcggaaggcatgctgtgagatctaagctagtggagcttggatatgaaatcggtgacaaggaatttgaggacttctttaaacgctacaaagaggttgcagagaagaaaatgcgtgtaactgatgaagactatagaagcgttattgtcagatgagatattccagccctaagcttatttggtcccttgctgatgtacaggcaacatgcggtacacttagtttatctacggcaacggtgaaattgataggaccagatggagaggagagaatagcatgttcagtcggaacaggtccagtcgatgcagcttacaaagctgttgaccaaataatccagattccaaccgttctacgagaatatagcatgacatcagtcacagaaggcattgacgcaattgcaacaacctcgagttgtggcactgggaatgtgagcatcaacgccaaacatg

SEQ ID NO: 452372 - DNA, 1305 bp, Sorghum bicolor
cgtccgagaccggcaagatccccgacccggagtccacagacaacgctgagttcaagatcgtgctcaccatcatccgcgacgggcttaaggctgaccctaagaagtaccgcaagatgaaggagaggcttgtcggcgtctctgaggagaccaccaccggagtcaagaggctctaccagatgcaggagaccggcgccctcctcttccctgctattaacgtcaacgactccgtcaccaagagcaagtttgacaacctgtatggttgccgccactccctccctgatggtctgatgagggccacagacgttatgattgctggcaaggttgccgtggtctgtggatacggtgatgttggcaagggctgtgctgctgcactcaagcaggctggtgcccgtgtcattgtgactgagatcgaccccatctgtgccctccaggctctgatggagggtcttcaggtccttacattggaggatgttgtctctgaggctgacatctttgtgaccaccaccggcaacaaggatatcatcatggttgaccacatgaggaagatgaagaacaatgccattgtctgcaacattggccactttgacaatgaaattgatatgcttggtctcgagacctaccctggtgttaagcgcatcaccatcaagccccagactgaccgctgggtgttccctgagaccaaaactggcatcattgtcctttgctgagggtcgtttgatgaaccttgggtgtgctactggccatcctagctttgtaatgtcctgctcattcactaaccaggtcattgcccagcttgagctctggaaggagaagagctctggcaagtatgagaagaaggtgtatgtgctccccaagcaccttgatgagaaggttgctgctctccacttgggcaagcttggtgccaagctgaccaagctcaccaaatcccaggctgactacatcagcgtgccgatcgagggcccctacaagcctgcccactaccggtactaggcagcccagcacgacttccagctcactaggccggttgtgtgatatgaagtttgctacaccggctgtcagttatcttttgcatgcatatgcattgtcatatacgagctgaggggggatgcggtgaggtaaggggctgtttgcttcagctgaagaataatggtgttatcggcttggatgaggcgatgtgcgttgccagatacagttttgtcatgttgactctacttatctgattatcatttgtaagcgatttgctcaagttatgtgtcatttatgaataactttgcttttctcaagagcatacttagtcttatcctc

SEQ ID NO: 452373 - DNA, 1140 bp, Sorghum bicolor
ccgcattcccggaacgacccacgcgtccgatcccctcctgcaaatctttctctgaattgtgggtctccggcaatggcgctcgctccatcgaagattctgggcacccagctcaacttcgccggctcctcccgctacgccaccgcagcgcccaccgcgggggctcagaagattgtctccctcttcagcaagaagcctgcccagaagccaaagcccgttcctgtatcgtcctcttctccagacatcagcgacgagctcgccaagtggtatggtcctgacaggaggatctacctgccagatggtctcttggaccgctccgaggtgccggagtacctcaccggagaggtccctggagactatggctacgacccttttggcctgggcaagaagccagaggacttcgccaagtaccaggcctacgagctgatccatgccagatgggccatgctcggtgccgctggcgctgtcatcccagaggcctgcaacaagttcggcgctaactgcggccctgaggccgtctggttcaagaccggcgccctgctcctggacggcaacaccctgagctacttcggcaacagcatccccatcaacctggtggtggccgtgatcgcggagatcgtcctcgtcggcggcgccgagtactaccggatcatcaacggactggaccttgaggacaagctgcaccctggtgggcccttcgacccgctgggcttggccagtgaccccgaccaggccgccatcctcaaggtgaaggagatcaagaacggccggctcgccatgttctccatgctcgccttcttcatccaggcctacgtcaccggcgaaggccccgtcgagaacctcgccaagcacctcagcgaccccttcggcaacaacctgctcaccgtcatctccggcgccgccgagaggacgcccagcctgtgaggacgcacggacgccacgctggagagcgatgccatgtcatgcgctgctgagctgtatgtgagggtctgaagaatgtgccatgcccatgcgtgtaaattaccaagagggggaagaatccttttcattctgatctctgatatgattgatctgcttcaatttgtgcctgagatgtgctacttacttaagtttttggaagttaattagttcgtgcgcgtctga

SEQ ID NO: 452374 - DNA, 1793 bp, Sorghum bicolor
ggcacgaggcacgggctcacggcgcctcctccgcggccacgacgctccggcagcgcaggcaggtagcacataaatacggagccggagcaccaccgtccggctcggttccgtccggctaccatcatccctcggcacccggcagcagcgcgccatggccacccacgcagctctcgccgcctcgcgcatccccaccagcgcccggctgcacagcagggcggcgtccaggcagagggtggacttcgccgacttctccgggctcaggccaggatcttgctccgtgagcactgccgcgagggaggtctccttctccgacgtccttggtgcgcagctcgtcgccaaggccactggagagaacgcggtgagggcgcccgctgaggcgaagctgaaggtcgccatcaacggcttcggccgcattggccggaacttcctccggtgctggcacggccgtgaggactccccgctcgacgtcgtcgtcgtgaacgacagcggaggcgtcaggaacgcgtctcaccttctcaagtatgactcgatgctgggcaccttcaaggctgacgtcaagatcgtcgacgacacgaccatcagcgtcgatggcaagcccatcaccatcgtctccagcagggaccctctcaagctcccatgggctgagctcggcattgacatcgtcatcgagggcaccggagtcttcgtcgacggccccggcgccggcaagcacatccaggccggcgcaaagaaggtcatcatcactgctccggccaagggcgccgacatcccgacctatgtcgtcggtgttaacgagggcgactacgaccacagcgtcgccgacatcatcagcaacgcttcctgcacgaccaactgcctcgcgccattcgtcaaggtcttggacgaggagttcggaatcgtgaaggggaccatgacgacaacgcactcgtacacgggtgaccagaggctgctggacgcgtcccaccgtgacctccggagggcccgtgcggcggcgctgaacatcgtgccgacgagcacgggcgccgccaaggccgtggcgctggtgctgccccagctgaaggggaagctgaacggcatcgcgctccgtgtgccaaccccgaacgtgtccgtggtggacctggtgatcaacaccgtgaagacgggcatcactgccgacgacgtgaacgcggcgttccgcaaggccgccgacggcccgctgaatggcgtcctgtcggtctgcgacgtgccgctcgtgtccgtggacttcaggtgctccgacgtgtcctccaccatcgacgcgtcgctcaccatggtcatgggcgatgacatggtcaaggtcgtcgcctggtacgacaacgagtgggggtacagccaacgcgtggttgatctggcgcacctggtggcggccaagtggccaggcgcggcggcggcgggcagcggcgaccctctggaggacttctgcaaggacaaccccgagaccgacgagtgcaaggtgtacgaagcatgatgaggcccccttgttgtaggccaggggccgccgtgtgctcagaaaattcactagctttgcctcgtgttctttcgatagagaatactatatacagattcgccgaaagagacgtagacgaaaatgtgccgttttctatgagttgtgtatgtaatcactgaactcgtacaggcttccgcttttcgatcatttcctgttgggactcctgtaattctgcggtgtgtgtttatttcatcaatcatgccgacatgatcgatccatcatatacttttatactaatataagtacatgtaaagatttcgtgtcacca

SEQ ID NO: 452375 - DNA, 780 bp, Sorghum bicolor
cgtccgtgctcgaccagaagttcggcatcatcaagggcaccatgaccaccacccactcgtacaccggcgaccagaggctgctggacgcgagccaccgcgacctgcgccgcgcgcgcgccgccgcgctcaacatcgtgcccacgtccacgggcgccgccaaggccgtctcgctggtgctcccaaacctcaagggcaagctcaacgggatcgcgctccgggtgcccaccccgaacgtctccgtcgtcgacctcgtggtgcaggtgtccaagaagaccctcgccgaggaggtgaaccaggcgttccgcgacgccgccgccaacgagctcagcggcatcctcgaggtctgcgacgtgccgctcgtgtccgtcgacttcaggtgctccgacgtctcctccaccatcgacgcctccctcaccatggtcatgggagacgacatggtcaaggtcatctcctggtacgacaacgagtgggggtactcgcagagggttgtcgacctcgctgacatttgcgccatcaagtggaagtgaggcgttgcattgtaatattttgtaactcaccctcgagagggctctgggattcgccccgaaatgaccgaatttcggtgaaattcacccatttcggtgaggtccgaaacaacattataccgtccaaaaatctcgattaagttcgaatttttagtcaactttagagttgaaacaaacctacaagttcttcattcaatataggaatgtatacctatcaagccataattcatttgttttctcttggtgccctttggac

SEQ ID NO: 452376 - DNA, 421 bp, Sorghum bicolor
aggagaaaggttccatgtgaacggcacttgcacatgggtaagccgatcctaagggacggggtaaccccggcagacagcggcgaccctctggaggacttctgcaaggacaaccccgagaccgacgagtgcaaggtgtacgaagcatgatgaggcccccttgttgtaggccaggggccgccgtgtgctcagaaaattcactagctttgcctcgtgttctttcgatagagaatactatatacagattcgccgaaagagacgtagacgaaaatgtgccgttttctatgagttgtgtatgtaatcactgaactcgtacaggcttccgcttttcgatcatttcctgttgggactcctgtaattctgcggtgtgtgtttatttcatcaatcatgccgacatgatcgatccatcatatacttttatact

SEQ ID NO: 452377 - DNA, 396 bp, Sorghum bicolor
cgtccgctcactttccccaaccccactccaggtcgagcaccgatctagcgcgccccctcgtcttccgctcgccggcgaagagccagccgttcgggacccagacgcagccaaggggagatgaagctcgcggggctcaagtctgtggacggcgcccacgaggagtccatctgggcggcggcctgggcgcccgccgccgaccaccgcccctcggcggtgctcctcgccggggcgctcgacgagaccgtccgcgcttggctccccgacgacctcgccgccttgggatcccccgcgcgcggccacgcgctcggagtcgtcttcctcgccgcccaccccgccggcgcgctcgccgccgtcgtgttgctcgacagcttcatccgcgttttcgatgtcgacacg

SEQ ID NO: 452378 - DNA, 505 bp, Sorghum bicolor
cgtccgcccatccgactcgtgcacagcagcaccgcctcgactcgggagggagaaggagaggggaggcagggcagcgcggagccctcctcctccgatccatcgccgctctcgacaatctgcgcgtctgctcgtgctcgacgacgatggatagaatggagaaagcagagagatttgtacagttaaagaaattggcaggctctgtgatatcatattggtcaatcatatctgttcctgtggaagagaagctaaacttcgtacctttacttcattatgctaaggccgagtcagtggatgagatacctgaacacattgctgtttcagaggacttcatgaaaactgtggaaaatgaaagtcataggcttgagaagattgtggctgagatgattgtaaggaagaaatctaaattggctcagatttatcaaaggactcgtctcgagtctccctttgctgggcaagaaccctctgttacttctgtggctttttaactagtcaaggagcaaatctc

SEQ ID NO: 452379 - DNA, 408 bp, Sorghum bicolor
cgtccggaccacctacccgtcttccactcccttgccgccgccgtcgcgtgctcttcgaatcgaatcgcgccgctgtcgcctcacctcatggcggacagggagcccgtcgtggagcgacccgaggcggctgaggaggaggacgcctcggccgccgccgccgccgccggggaggaggaggacacgggcgcccaggtggcccccatcgtgcggctcgaggaggtacccgtcaccaccggcgaggaggacgaggacgtcctgctcgacatgaaggcgaagctgtaccgttttgacaaagacgggaaccaatggaaggaacgaggcacgggcaccgtcaagcttcttaagcacaaggagagcagcaaggtccgcctagtcatgcgccaggccaagacgcttaagatctgcgcg

SEQ ID NO: 452380 - DNA, 595 bp, Sorghum bicolor
cgtccgggcagcgcaactccttcagtaacaaagcatcacctgcttcttccttcgcctgtgatccattcaaccgagagcatgtcttgctgcagcggcaactgcgggtgcggctccggctgccagtgcggcagcggttgcggcggctgcaagatgtcccctgacatggagaccaccgccaccgtcggcatgaagcccatggtgctcgctgcaccgaccaccaaggccagcgccggcgggttcgaggcggccgtcgagggtggcggctgcgactgcaacacctgcaagtgcggcagcagctgcggctgcagctgctgcagctgcaactgagccatcccggcgatggcgcacgaggaggaaggaggagacagagacaacaaccaccccccagcgtactaaactatgtagcggcgtctaaataagatcctgtcaactgcgtgcgtgcaccgccattattcatgcatggtcgccggcctcgtctccgtctccgatcctggggttgttcatctccaacgtctcgcggtttgacgattgccgtcgtcgtcgatccctatgtccgccctcgtgcctgatctaaatatatgtgttttttttctgc

SEQ ID NO: 452381 - DNA, 420 bp, Sorghum bicolor
gcggctgcaagatgtcccctgacatggagaccaccgccaccgtcggcatgaagcccatggtgctcgctgcaccgaccaccaaggccagcgccggcgggttcgaggcggccgtcgagggtggcggctgcgactgcaacacctgcagctgcaactgagccatcccggcgatggcgcacgaggaggaaggaggagacagagacaacaaccaccccccagcgtactaaactatgtagcggcgtctaaataagatcctgtcaactgcgtgcgtgcaccgccattattcatgcatggtcgccggcctcgtctccgtctccgatcctggggttgttcatctccaacgtctcgcggtttgacgattgccgtcgtcgtcgatcctatgtccgcctcgtgcctgatctaatatatgtgttttttttctgc

SEQ ID NO: 452382 - DNA, 1106 bp, Sorghum bicolor
ttcccgggcggagggagtgaagccagcagaatcaccaccgctgtgcctgctcgtcctgcttcaccgaatcgaatcagacctccgtccgaatccaagccaagctctttcatcaggaatggcaactggtagtgaagcctcgaagccagctgaggtgccagctgagactgtgcttgactggcataaacaggacaacaagaggatgctccacgcggtttaccgtgtcggggatctggaccgcacaatcaaatactacacggaatgctttgggatgaaactgctgaggaaaagggatattcctgaagagaagtacaccaacgccttccttggctttggaccagaggacaccaactttgcagttgaattgacttacaactatggcgttgacaagtatgacattggaacgggctttgggcattttgcaatcgctaatgaggatgtgtacaagttggctgagaatattaaatccaagggtggcaagatcacccgcgaacctggtcctgtcaagggaggatccactgttattgccttcgcacaggaccctgatggctacatgtttgagcttatccagagggctgagacacccgagcctctttgccaggtcatgcttcgtgttggtgaccttgagcgttctatcaagttttatgagaaggccctaggtttgaagctcctaaggaagaaggatgtacctgattacaagtataccattgccatgttgggctatgctgatgaggacaagacaactgttctggagttgacatacaactatggggtcacagaatacagcaagggcaatgcatatgctcaggttgccattggcaccaacgatgtgtacaagagtgctgaggcggttgagctggcgaccaaagaactaggtggcaagattttgcggcagccagggccgctacctgggatcaacactaagatagcctcttttgttgatccagatggctggaaagtggttctggttgacaacaccgacttcctcagggaactccactgaagaccgggatacccagttgctgtcctaggatgtagtaatgcttgtctgtgaatgtaataagatgtgagtggtttgtttccgcctggatgaactgataataatggat

SEQ ID NO: 452383 - DNA, 479 bp, Sorghum bicolor
tcgacccagcgtccggggctgaggctgaggagaaggttgggaagctagagctcactgcagaacagatcaataaccctcagtcagctggtggcagttgtgggttgggcgatgcctttagatgtggaacctgtccttacagaggtcttccaccattcaagcctggcgagaaggtttccttgtctggcaacttccttgctgctgacatatgatggcatcatcagatacatgcaagtgaacatcggcaaaacgaggagataggaatgcttctgtcaatttgttcgttcgtttggatgctacgttgttagttgaggtcgatgctcaccggtttacgttcaaaaaaaattgatgctcaccggaagaactgcattttacatagcttctgttagcccatgcgagcgtgcgtgtgacttgtctttcaggataatgtactcgtgccgattgtatgatactacaagacggtgatatcctacatattttct

SEQ ID NO: 452384 - DNA, 680 bp, Sorghum bicolor
tccgaattcccggtcgaccacgcgtccggaacagacctgaaggatacaatgaaatgttatctggatatcaacaacctaataaagatgtacagaatccacagggtttctgttctttacctgatcagattgctgccggtcgtcctaatttctggcacaccgtaaatgctcattatcaagaccagcaaggcaatcacaatctattccctggttcatggtccatgatgccttcaagtactggctttgggttgaacagacagagctatccaatgatgcaggaagttggtgggttgtctcagagtgctacgaacaccaagtttgggaatggagcttatgctgcactacctggtcatggcattgatcaatactcttctggatggtttgggcacatgatacctggtgctcgcatggacgatgtccagccacgcgtgattaagcctcaacctttggtccttgctcatggtgaagctcagaaaatgaaaggcaattcatgcaagctttttggaattcaccttgatagcccagccaaatctgaacctttgaaatctccaccaagtgttgcctatgatgggatgccacaaactccagcagcagctgaatggcggatggttgattcaattgaagcagacagatgttctgatccacttaagatgccaaagcaactcgatgctacacaagtagat

SEQ ID NO: 452385 - DNA, 464 bp, Sorghum bicolor
cgtccgcccccccgtccccgcgcccccccgccgccctctcccctgcgcgcgcgctcgccacctcgctctcccctccctccacgtcgcccgtgcccgcgcttatataagtgcaggaggagctcatggcggacgctccggcgagccctgggggcggcggcgggagccacgagagcgggagccccaggggcggcggaggtggaggcggtggcagcgtcagggagcaggacaggttcctgcccatcgccaacatcagtcgcatcatgaagaaggccatcccggctaacgggaagatcgccaaggacgccaaggagaccgtgcaggagtgcgtctcagagttcatctccttcatcactagcgaagcgagtgacaagtgccagagggagaagcggaagaccatcaacggcgacgacctgctgtgggccatggccacgtttgggtttgaggactacattgaaccactcaag

SEQ ID NO: 452386 - DNA, 540 bp, Sorghum bicolor
cgtccggcttgctcgtgattggaaggtttctgttaaggaagcaaaagatacactgaaactctggtatagcgatagaaaggaggtgtcgtggcttggcaaatgaaacagaaacagctagcacatgagaagtctgaagtttatactttgcttgggcgatcacgccggtttccaaatatggctcatgcaacttctggccaaaggggcctcagcggccgtgctgctatcaatgctcctgtacagggcagtgcagctgatgttgctatgtgtgcaatgcttgagatagacaggaatactcgtcttaaggagcttggttggacgctactgttgcaggtgcatgatgaagtgatactggaaggccttcagagtctgcggaactggccaagtccatagtggttgagttatgtctaagcccttctatggcaccaatatcctgaaggtcgaccctgctgttgatgccaagtgtgcacagaattggtatgcggccaagtagaccgtagtactttccttccttccctgtccagtgttgactaccaaacacag

SEQ ID NO: 452387 - DNA, 987 bp, Sorghum bicolor
cgtccgcgaacggcgagcagcaggagggcgtcgcgaaccctcgagccccctagcctgtcgccgcggcagccactactactaccgcgccccttcgcacgtcccgcgccgctcccgcccccgcggacgcggcggcgtcgtcagcctgcgtccgatggcctcgtcgacggcggctcagccccccgcgccggcgcccccgggcctgaaggagggcatcgcggggctgtacgacgagtcttcggggctgtgggagaacatctggggcgaccacatgcaccacggcttctacgactcgggcgaggccgcgtccatggccgaccaccgacgcgcccagatccgcatgatcgaggagggcgctcgccttcgccgacgtcccatccccagatgatccggagaaggcaccaaaaaccatagtagatgttggatgtggcattggtggtagctcaaggtacttggctaagaaatacggagcacagtgcaaggggatcacattgagccctgttcaagctgaaagaggaaatgctcttgctacagcgcaggggttgtcggatcaggttactctgcaagttgctgatgctctggagcaaccgtttcctgatgggcagtttgatctggtatggtccatggagagtggcgagcacatgccggacaagagaaagtttgttagtgagctggcacgcgtcgctgctcctggagggacaataatcatcgtgacatggtgccataggaacctcgaaccatctgagacttcgctaaaacccgatgaactgagtctcttgaagaggatttgcgatgcgtactacctcccagactggtgctcaccttcagactatgtgaacatcgccaaatcactgtctctggaggatatcaaggcagctgattggtcagagaatgtggccccattttggcccgctgtgataaaatcagcactaacaatgaagggcctcacctctctactgacaagcggatggaagcgatcagaggggcgat

SEQ ID NO: 452388 - DNA, 677 bp, Sorghum bicolor
cgtccgctcgtcggagagaaagatgatgtcgtcaagggagcgcaagaagcaggcggctgctcttcaggagaagctgaagatcctccgctccatcactcattcccacgctttgagcaacacatcgataatcatggacgcgtcggcgtacatcaaggagctgaagcagaaggtggtgaggctgaaccaggagattgcctgcgcgcaagatgcgctgagacacaagtcgtcgtcctatccgacggtgaccgtggaaaccctaggagtgcaggggtcgttcctcgtcaacgtgttctccgacaagagctgcccggggctgctcgtctccgtcctggaagccttcgacgagctcgggctcagcgtcctccaggccaccgcctcctgcgccgactccttccgcctcgaggctgtgggcggcgagaacgtggcggacaacgtggcgagcacgtcgtgaagcaggccgtcctgcaggccgtcaggaacgctccgagagcggcagcgagcaggacgaggagtaagcagggggcaggctgatgagcgcgtaagcacacaccaagcctctacttgcattggtcgacgtcctcatgtcctggaccgtatgtagtgtcttaaggatacatgaattaagccgagacccctgtattgtagtagctccgttccctctctttaaaattgatttt

SEQ ID NO: 452389 - DNA, 727 bp, Sorghum bicolor
  unsure (1)..(727): unsure at all n locations
gtttgaaggtgttgatgcatgaactcaaattccgtacttctcttagaaacattgttgtatgctggataataaaggtttgaatttataatattcaacttgttaattgtgtaaatggaagtcaccacaaggatatagtaaaaatgttaccctcacaggactctggagtctggagttatatatggttgagcaacatctttgtgtagttgtgatctatttttcagtagttttacacatttattgaaactatgacaaccatcattccatgtttcttatgtctggctacagagattgacggagataaatacacagcaccaggagaaactattagcacttcgagctcggcaagcaaactatagagatgagttcctgcgtaaggaatctctagcacgccagcagcaataccagcatgccagcatgagccattatgccaataattcggcagctggggaacaacatggttatcacccaacagccttgcctggggagcagcatggatataatgcaacacctgctgctgctgctggaggtgctacggagaggctcatcgaggttatgcttctggccagtatgaatctttagcgaccgtccagattacccagagttccatggtgggggcagaggtcgtggtcgcggttctgagcaccgtggtcaataccctgtgagcgtgcttataactctggtggancggggttctaggtatgccttgaagaacgatctggcactctgt

SEQ ID NO: 452390 - DNA, 679 bp, Sorghum bicolor
cgtccgagttgttcttgcagatggccgggtcgttagagccaccaaggataacgagtactctgacctattctatggcattccctggtcccagggaacacttgggttccttgtctctgctgagatcaagctgattcccatcaaggagtacatgaagctcacctacattccagtgaaggggagtctgaaggaaatcgcgcaggcatatgctgattctttcgcgccaagagatggtgacccagcaaaggtccctgactttgttgaaggaatggtgtacacagaaagcgagggtgtcagatgactggtgtgtatgcttcgaaagaagaggcgaagaagaagggcaacaagatcaactgtgtgtgggtggcggtttaagccctggtgctaccagcatgctcagacggcacttaagaggggcgagtttgtggagtacatcccaacaagagaatactaccatcgccacacccggtgcctgtactgggaggggaagctgatcctgccattcggtgaccagttctggttcaggttcctgctgggttggctcatgccaccaaaggtgtctctgcttgaggcgactcatggtgaggctatcaggaactactaccatgacaaccatgtgatccaggacatgctggtgccactgtacaaggttggagatgctcttgagtttgtgcatcgcgag

SEQ ID NO: 452391 - DNA, 516 bp, Sorghum bicolor
cgtccggaagcctgtaggcaatggtagtagacttgcagacctaacccgtgcaaaaaatcttacattgcatagcattgctagatggatggattcagaacttgcacggcatcctaagatgaaagttttcctcaggacaatttcaccaaggcactttgtaaatggtgactggaacacaggtgggacatgtggaaatactatccccttatctaatggaagtgaggtcttgcaggatcattcaattgatatacccgcagaaaatgctgtgaagggaactcaggttaagcttttggatatcactgctatctcgaaactacgagatgaggggcatatatcaaactctactttcaaaaaagcttccactggaattaatgattgcttgcactggtgcttacctggtataccagacatgtggaatgagcttctatttgtacagatttagtatcacactctagttaggcggatctttttcagagccccaaggacctcttctgttcatatcatagcagtacacagtac

SEQ ID NO: 452392 - DNA, 512 bp, Sorghum bicolor
cgtccgtccacccccgattccccgtctctccggctccctcgccctcacacgccgtctctttcctcgagcctccgctccgctagcgacgccgacgcgcgcctctctcacccgcgtcgacgagaaagcacccaccgatggagtacgccgctgtccaccaggaggatcacccgctcgctcgccgccgccgccgccgcatccgcccagaagaggcgccgccgccgccgggtcggactccgcccccctcttctcccgggccaagaagacccgcgcggtggagacccaggcccagacgcgcccccgcctgcacgacatcagcaacgacccccccatcgtcggcctcgcggcgggcgggcttcacgccaccggacaccacccccgccttcaccggcggcaagaccttgccgcagttcgaggggaagcacaccaggttcatctacaacagtgacgacgagatcgagcgcgaaggggtggccgacgcagctgaggcgacggcggagcttggcgcgtgatgc

SEQ ID NO: 452393 - DNA, 473 bp, Sorghum bicolor
cgtccgctcaccgcctccttcctccgcttcctcctcctgctcctcctccccctcaccgccctctacttcttctacacgctgcacctcctcctcacctccgcgtcgtcggccgcctccaactgcgcgcctgacgccgcgtcggtctcccgggtgtccgccaacctcacggcggcgacggcgtcggcgtcgacggcggcggcggagaagcagctgcccccttcccccttggctgtgccctcggcgacgacgctgcagcacgtggtgttcggcatcgccgcgtcgtcgcggttctgggacaagcgtaaggagtacatcaaggtgtggtggcgcccgcgcggcgccatgcggggctacgtgtggctggaccgcgaggtgcgcgagtccaacatgtccacggcgcgcacggtgctcccggccatcacgatctcgcccgcctccgtaccctcaccaccgcgggcaccgtcgcatcgatt

SEQ ID NO: 452394 - DNA, 729 bp, Sorghum bicolor
  unsure (1)..(729): unsure at all n locations
ccacgcgtccgcgcccacggatttgtagtagtggtaccgaggtaggccgcacgcagccatggattttctgcaggggcaaagcgtcgagaccacagtggccgtcgccgtcgccgtcgtcgccatcgccgcgggcggcgccttcctcctcctccgatccaggaagcccaagggctgtttggatcctgagaacttcaggaagttcaaacttgttgaaaagaagcaaataagtcataatgttgccaggttcaaattcgctcttccaactccgacttctgtattgggccttccaatcggtcaacatatcagttgcagaggacaagatgctactggtgaagaagtaatcaagccatatacccctactacattggattctgatcttggatatttcgagcttgtcataaagatgtatcctcaagggagaatgtcccatcatttccgcgagatgaaagttggtgattatttgtctgtgaagggacctaagggccgtttcaagtaccaagttggccaagtgagagcatttggaatgctggctggtggatcaggcattactccaatgttccaagttgccagagcaatccttgagaaccctaatgacaacaccaaggttcacttaatttatgctaatgtcacatatgaagacattcttctgaaggatgagctggacagcatggccaaaacctatcctggtcgctttaagatctactacgtgttgaatcagcctnctgagaa

SEQ ID NO: 452395 - DNA, 514 bp, Sorghum bicolor
cgtccgctcgctcgctcgtcgccgccgccggcgtcttcttcgggttcgctcgccagcggcagccatggtgaagtactcgagggaaccgtccaatcccaccaaatccgctaaggctatgggtcgggacctgcgtgtgcactttaagaacacacgtgagaccgctgctgccatcaggaagctgcagttgagcaaggctaaaaggtatcttgaggatgtgattgcccacaagcaagccattcccttccgaaggtactgtggcggtgttggacgtacagcacaagctaagtcccgccactgaatggtcagggacgttggcctgccaagtctgctaaattcatctggatcttctcaagaatgcagagagcaatgctgaagttaagggattggatgtcgatacgctgtatgtgtcgcatattcaggtgaaccaagctcagaagcagcggcgccggacttaccgtgctcatgggcgcatgaacctcttacatgtcttccccatgccacattgagctgatgc

SEQ ID NO: 452396 - DNA, 644 bp, Sorghum bicolor
cgcgtccgcccacgcgtccgatactgcaaggcatgccaaggagtatggtgatctcaagctggcccagatatgtggtacaatagcagctgatgaaaagcgccatgaaacagcctacaccaagatagtcgagaagctctttgagattgatcctgattacacagtgcttgcatttgctgacatgatgaggaagaagatcacaatgcctgctcatctcatgtacgatggcaaggatgacaacctgtttgagcacttcagtgcagtggcgcagaggctgggcgtctacactgctaaagattatgctgacatccttgagttcttggtccagaggtggaaagttgcagatctcactgggctgtctggagaagggagaagggcacaggatttcgtctgtaccttggcacctagaatcaggcgattggacgaaagagctcaagcaagggcgaagcaagcaccagttattcctttcagttggatttatgaccgcaaggtgcagctttaatcgagaacactaggcaatgtgggcacttactatatcattttcagtcctggggttctctataagaaacagtctttaggttatttagcagggtaaaattcgactacttatggatctcacttgcgcaaagtatgctatctggtttcgt

SEQ ID NO: 452397 - DNA, 639 bp, Sorghum bicolor
cgtccgcttcaatggaagtgtgccggactggcttgactcattctcgaacctcacggttcttcggttgcagagtaaccagctgaaggggtccataccggcatcagttggcaaagctgccatgcttacagaactcgctcttgctggcaatagcatctcaggggatattccaaatttaggcagcctaaataagcttgagatgctggatttaagggacaacgagctggatggagagcttcctgagatgcctacatcagtggtaacaatcttacttagcaaaaattcactgaagggtgaaattcccgagcagtttggtcagttgaaccggcttcagcaccttgatgtctcattcaatttccttgtggggagtcctcctgcagagctgtttgctcttcctaatatcagttatctgaatttggcggcaaatatgcttagtggttcactcttaagtagtttaacatgcagcagcaccctgggctttgtggattgtccactaaccgactcacaggtgatctgcccagctgtctgaatggtaatttgaataacaaggttgttaagtttgatgggaattgctttagtggtgaccctgcccaccagcatgaagctaaatattgccagcaatctcataaggtgaaaggatca

SEQ ID NO: 452398 - DNA, 452 bp, Sorghum bicolor
cgtccgcccacgcgtccgcctcccccaaagccgccgccgccaaaaccctagcgccgccgctgcgaacccagcagccaccaccgcaaccatgtccgtgctgagccgccctaccccgggcacggtccagtgcttcgggcggaagaagaccgccgtggccgtggcgtacacgaagccggggcgcgggctgatcaaggtgaacggcgtcccgatcgagctgatccgcccggagatgctccgcctcaaggccttcgagcccatcctgctggccggccggtcgaggttcaaggacatcgacatgcggatccgcgtccgcggcggcgggaagacgtcgcagatctacgccatccgccaggccgtcgccaaggggctcgtcgcctactaccagaagtacggcgacgaggccgccaagaaggaggtcaaggacatcttctctcgctacgaccgcacacttc

SEQ ID NO: 452399 - DNA, 498 bp, Sorghum bicolor
cgtccgagatttcaaggttttcaatacagcaaaagcatgctcaaggaagaggttgagaggtacaagaagttcgcagatcgcttggagccctttattgctgataccgtgcatgtgctaaatgaatctattcagcagaagaagaaaatcctggttgaaggtggacaagcaactatgctggatattgattttggtacttatccatttgtgacttcttctagcccttcagctggtgggatatgcacaggcctagggattgctccaagggtgattggtgacctgattggagtggtcaaagcttacacatcaagagttggcttctggccctttcccaactgaactatttggagaggaaggcgatcgccttaggaaagctggaatggaatttggcacaacaacgggtcgccctaggcgatgcggctggcttgacattgttgcacttaagtactgctgccaaatccataggggtctcgtcacttaattttaccaaacttgatgttc

SEQ ID NO: 452400 - DNA, 758 bp, Sorghum bicolor
cgtccggtgtgcttcgcttcaacttcctcggcaagcagaagaggagggagggaggtcctgctcgctcgatccagacgcatccgccgaccgccgtcaccggagtcgccgacaggatgtttctcacgaggacggagtacgaccgcggggtgaacacgttctcgccggaggggcggctggtccaggtcgagtacgccatcgaggccatcaagttgggatccactgcgatcgggttgaagacaaaggatggtgttgttctcgccgtcgagaaacgtgtgacctctccactgctggaaccaagcagtgtggagaaaatcatggaaatcgatgagcacataggctgtgccatgagtggacttattgctgatgctagaacgctagtggagcatgctcgtgttgagactcagaatcataggttctcatatggggagccaatgaccgtagaatcttctacacaagctatctgtgacttggctctgcgctttggcgaaggtgatgaagagtcaatgtcacgaccatttggagtctctctcctaatcgctggacatgatgagaatggacctagcttgtactacactgacccatctggaaccttctggcaatgcaatgcaaaggctattggatcaggctctgaaggagctgatagctccttgcaggagcagtacaacaaggaactgaccctccaggaggcagagaccatacccctgtctatcctgaagcaggttatggaaagagaagggaccccaaacaatgtcgatatc

SEQ ID NO: 452401 - DNA, 768 bp, Sorghum bicolor
cgtccggcaccagagaaaagctgggagtcatggtgggaaaaagagcaagagccccttcggtactctgggaagcgtggtactattgtcgaaatactgcttgcattgcgtttctttatttaccaatatggacttgtgtatcatctgaacataacgaagaagataaccaaggataaccagagtgtgctggtttattgcttctcatgggttgtaatttttgtcattttactggttatgaagaccgtatcagtgggcaggaggaggttcagtgcagagttacagctcgtgttccggttgatcaagggtctcatatttataacttttacagccatcgtggtaatcttaatagcaatccctggcatgacgggtctggacatctttggttgcatccttgctttcatgcccactggatggggtttgctcctgattgcccaagcgatcaggcctgtgattcaaaagattgggctgtgggggtcaatcaaggctcttgcccggggctacgagatcttgatgggacttctcctgttcacgcccattgccttccttgcctggttcccgttcgtgtccgaattccagaccaggatgctgttcaaccaggccttcagcagaggtctgcagatctcccgtatctcggaggccacaagaaagaccgagggacccggaacaaggagagtacgggatgctgattgaaggtacggcggacgccggcgccggagtcctggaacaataggttcagagagagagggcggtgggacatgatcagtacctgct

SEQ ID NO: 452402 - DNA, 758 bp, Sorghum bicolor
cgtccgccccgtctcgctcgcctcctcacggccattaaaccccacccgcgcgcgcggcggccggcggcgagcccccacccacccgagcaagcggaggagtaagagagcgctcggtagtagcaggaggaggcatgggtaccctggggcgcgcgatcttcacggtgggcaagtggatccggggcacggggcaggccatggaccgcctcggatccaccctccagggcggcctccgcgtcgaggagcaggtttcaaggcatcgtacaatcatgaacatttttgagaaagagccaaagatccatagagatgtgtttgttgctcccagtgcagcagtcattggtgatgttgagattgggcatggatcatcaatctggtatggatccatattgagaggtgatgtcaacagcattcatatcggatctggtactaatatacaagataattcccttgtacatgttgcaaaagctaactttagtgggaaggtccttccaaccataattggaagcaacgttacagtcggccatagtgctgtattacatgcatgcactattgaggatgaggcttttgttggtatgggtgccactctgcttgatggagtgttggttgaaaagcacagcatggttggtgcaggatctcttgttaagcagaatacaaggattccttctggagaggtttgggtcggtaatcctgccaagttcctaaggaagcttacagaagaggagaatgcgttcattgcccaatcagcaaccaactatttcaac

SEQ ID NO: 452403 - DNA, 501 bp, Sorghum bicolor
aaccctaacccctccgccgcccctcggcctaccagcagctgccgccgccgccatcagccggcgagatggcgctgtacctgctgttcgagtcagcctccggctacggcctcttccacgcgtacggcatcgatgagatcgggcagagcgtggaggccgtgcgctcctccgtgctggacctcgaccgcttcggcaaggccgtcaagctcaccgccttcaacccttctctcctcggccgtcgacgcgctcaaccagtgcaacgctatctcctgaagggatcatgaccgatgaactgaggagctttctggagctgaacctgccgaagcctaaggagggaaagaaggccaaatacagcctcggcgtcgtcgagcccaaggtcggctcccacatctccgaggtcaccggcatcccctgccagagcaacgagttcgtccaggacttcctccgcggtgtccgcctccacttcgaccgtttcatcaacggctcaaggattctgacttggag

SEQ ID NO: 452404 - DNA, 583 bp, Sorghum bicolor
ggcacgaggcaaaagcaaagcagcaggcctcaagaacaaggcaggggaggagaccggcgaaaggggagctagaggaagatggccggcgcactgcagccgccgccccagctgctgccgctgctgcttgcactcctcctcgtctctgctgccgcccctcaggttgttggagtgggggtcggagacaactccctgagaatcatccaggaggatattattgagacagtcaacaaccatcccagtgctgggtggacagcctcacgtaatccttacttttcaaactataccattgcgcaatttaagcacatacttggagtgaaaccagcaccaaagaatgtactcagtgatgttcctgtcaaaacttatccaagatcactggaacttccaaaagagtttgatgctagatctgtgtggtcccgttgcagcacaattgggaacatacttgatcaaggtcattgtggtcttgttgggcttttggtgctgtggagtgcctccaggaccgtttgcattcacttcaacacgagcattttacttcagtcaatgacctactggcatgctgtggtttatgtgccgcgatggtgtgatg

SEQ ID NO: 452405 - DNA, 447 bp, Sorghum bicolor
cgtccgcccacgcgtccggttgatgaactaagcagaaaaactatagtttgatatattttgtgaaatgtcatgcttcttttgagtcttggatataatacgttttttttggcccttttctcaattattgcaaagagtaaaatgtatggaccgtctctaaacttgtcctggagtaccatccaggtccctggactctcaaaatgcatttttaggtcaccaaacttgttccgggacaagttcaaccgctcatgtattttattctataattgcaaatctgctctcacaatgttctgtctctgttccaggccaacgatgatcctttatggtatcgacaacataaggacctgtttggaccaaaggttgatttcaacctcatcaagagcaacccactatgccggttgggactgtagtgactagtgaggtagagggattccaaagcttgatcagaat

SEQ ID NO: 452406 - DNA, 546 bp, Sorghum bicolor
gaccgactcgatccaagcgggccaagaacgcttccggactattaccactgcgtactaccgaggagctatgggcattgtgctggtttatgatgtcaccgatgaatcttctttcaacaacatccgaaactggattcggaacattgaacaacatgcctctgataatgtcaacaaaatcttggttggcaacaaggccgatatggatgaaagcaagagggccgtacctactgcaaaaggacaagcacttgctgatgagtatgggatcaagttttttgaaacgagtgccaagacaaacctgaatgtggagcaagtgtttttctccatcgcacgtgacatcaagcagaggcttgcagagactgattcaaagccagaggacaaggcaatcaaaattaacaagccagaccagggttccgaggcaccagcttgcccagcgatctgcctgctgcggctcataagcagatgcgagatggccataatgattggttatttgacattatttatttcccgcttggctgttataggaagaatttgaagaagccacttatgata

SEQ ID NO: 452407 - DNA, 843 bp, Sorghum bicolor
cgtccggcttcactataccactaccagaccacgagcacaagagtgtgaagaacctagacaacctgtacgaggagaggacgaggaggagcagatggccggcccccagggcgcgaggtgggccgcgcttgcgacggacttctcggaggggagccgggcggcgctgcggtgggcggcggccaacctgctgcgcgccggcgaccacctgctgctgctgcacgtcatcaaggagcccgactacgagcagagcgaggccatcctctgggaatccaccggctccccgttgattcccctctcggaattctctgaccctattatcgcgaagaaatatggagcaaagcccgacatagaaaccttggacatcctgaacactacagctacccagaaggagattatggtggttgtgaaagtcctgtggggagatccacgtgagaagctctgtcaagttatccatgacaccccgttgagctgcttggttataggaagcaggggccttggcaagctcaagagggtgctcttgggaagtgtcagcgactatgtcgtgaacaacgcaacctgccctggcaccgtcgtcaagtcatcaagcaccgaaggttgatctcatcaccgaaatgcctgaatgtgttgttataataaagatggttggcctgatgaagaacatgcactagtttcttgctatctgaaacatgttgaaccaggcagttctattgtaataatagataaactaccttatgaaggacatggttgtgtaatagcactgtttgccagagtagatgtactatgcttttgttgctgtatgagtgatgtttatatctttgaggttttgaagaagtggatcctattttt

SEQ ID NO: 452408 - DNA, 511 bp, Sorghum bicolor
cgtgcgcttcaaccccacggagaagcgaaactgacctttccccctccctgcatcccacctcgcggagatctagtcctagggtttcgccagcggcgaggcctaagtcatcggcggcgagccaaactccacgagcggggaaagagggggaagcagagacgaaggtagacatggggcagcagtcgctgatctacgcgttcgtggcccgtggcacggtcatactggccgagtacacggagttcaccggcaacttcaccaccatcgcctcccagtgcctcatgaagctccccgcaagcaacaacaagttcacctacaactgcgatggccacaccctcaattacctcgtggaagacggattcacatactgtgttgttgctgttgaatcagtggggcaacaaattcccattgctttcatggatagggttaaggaggatttcacaaaaaggtattggggtgggaaagctgctactgctgcagctaaacagcctcaacccagaagttcgatcaaaactta

SEQ ID NO: 452409 - DNA, 556 bp, Sorghum bicolor
cgtccgatcgcaatcgcctgagcacctcggctacttggctctctcgcgcgcgagttcgtgcagcagaagagcgatctctttcgtcgtcgtagcaagctaagccgatcccaagcccaatggcgcccctaggagacggcggagctgtgccggcggcggccaacaacctggtggtgtcgttcggcgagatgctgatcgacttcgtcccggacgtggcgggtctgtcgctggccgagtccggcggattcgtcaaggcacccggcggcgcccccgccaacgtcgcctgcgccatcgccaagctcggcggatcctccgccttcctcggcaagttcggcgacgacgagttcgggcacatgctggtgaacatcctgaagcaaaacaacgtcaactccgaaggctgcctcttcgaccagcacgcgcgcacagcgctcgctttcgtcaccctgaagcacaacggggagcgcgagttcatgttctaccggaacccgagcgcggacatgctgctcaccgaggccgagctgaacctggacctgatccggcgcgccaagatcttccacta

SEQ ID NO: 452410 - DNA, 525 bp, Sorghum bicolor
cgtccggaagatttaacatgcatagatctacagtcagctgtggagtttatgacctgctcatctttgctccttgtgaattattatggctataataccccatatccttgcaggttgtcaggtggtcaaattcttgaggcacttcacagtgatcctgcgtcttctttgtctgtggaacaggaaagaactgcaaaacttttgaaaccaccccccaggtttgtcatgacgattacaatgttgtgaagagagcggctgtatgtgcctccgagttgcttgtgattgatattctgtgtttgtctagaaccctttactttattttccacgggcatgatatgccgtctcgacttgagcatgtctgttactggaaaactgtcttgtattcttcatcattactgacatgtgatttctgttaacagtacatcatcagcactcgctaaactaagcaagggtgcttctggaggaactggtaaaactccccagactgaaaagaaagaaacaccacaatagaagacttaaaggataatgagc

SEQ ID NO: 452411 - DNA, 619 bp, Sorghum bicolor
cgtccgcccacgcgttcggctgtgtatgtgccatttttagtggatgacttggctcaatttcttaatacatactcttcaccagattttgctggcttcagttgcacaattcctcataaagaagctgctgttaggtgctgtgatgaggttgatcccattgccagggacattggagctgttaacacaatcgttagaagacctgatggaaaacttgttggctataatactgactatgttggagctatatctgctattgaggatggaataagagcatccgaacaaacggattcggacacatcaccactggctggaaggctttttgttgtcatcggggctggtggcgcgggaaaagcactggcatatggagcaaaagagaagggcgcaagagttgtaattgcaaaccgtacttttgcacgtgcacaagaacttggcaacttaattggtgggcctgcattgactctggcggatttggaaaactaccatccagaggaagggatgattcttgcaaatacaacagccattggaatgcatccaaatgtgaatgaaactcctttatctaagcaagcactcaaatcttatgcttgtggtttgatgcggtctacacaccaaaagagaccagact

SEQ ID NO: 452412 - DNA, 642 bp, Sorghum bicolor
cgtccgaagttttcagacaaattcaccattatgttgttccattatgatggtcggactactgagtgggatgaatttgagtggtctaaaagagcaatccatgtgagtgttaggaagcagacaaaatggtggtatgcaaaacgatttttgcatcccgacattgttgccagatatgaatacattttcatctgggatgaggatctaggtgtagagcatttcaatgcagagaagtacattgagcttgttagaaagcatgggttggaaatctctcagcctggtttgcagcctgataaaggactaacatggcaaatgactaaacgacgtggtgaccaggaagttcacaaagtaactgaggagagaccaggctggtgcactgatccacatctaccaccatgtgcagcatttgttgaaattatggcaacagtgttctccagaaatgcatggcgctgtgtatggcatatgattcagaatgacttggtccatggatggggtcttgactttgctctgaggaaatgtgtggagccggctcatgagaagattggagttgttgatgctcaatggattgttcatcaagcagttccttcacttgggaaccagggcaagtcagataatggaagagcaccatgggaaggggtaagagcacgc

SEQ ID NO: 452413 - DNA, 887 bp, Sorghum bicolor
cgtccgccgtatgcttgatatgggatttgagccacaaataagaaaaattgtgaaacaaataccacctagacggcaaactcttatgtacactgccacatggccaaaagaggttagaagaatagcgtcggatttactgaataacccagttcaagttaacattggaaacactgatcagctggttgcaaataagtcaattactcagcatgtggaagtcatcccacatatggagaaatcaagacgacttgatcaaatcttgcggtcacaagatcctggatcaaaaatcataatattttgctccactaagaggatgtgtgatcagttggctagaaacctatcacggcagtatggtgcttctgctattcatggtgataaatcacagtctgagagggattctgtgttgaatgactttcgaagcggcaggtgtccagtacttgtagccactgatgtggccgctcgaggcttggacataaaggacatcagggtcgtggttaattatgatttcccaactggtggggaggactacgtccatagaattgggaggactggtagggctggtgcgacaggttctgcctacacattcttcggtgaccaggattcgaagtacgcttcagatcttgtcaagattttggagggtgcaaaccaatctgtgccacaacaattaaaagaaatggctcttcgtggaggatatggtggaagatcacgtcggtgggcatcttctgatgactcttatggtggtcaaggatatggtgctaaaagatcaactgatagcttcaataacagcagcttcggcaaccaggcttgggggggtcaagctttcactcgagcttcataacagctccagtggcaatcagtttggtgatactacgagctttcatggcagctatgat

SEQ ID NO: 452414 - DNA, 484 bp, Sorghum bicolor
  unsure (1)..(484): unsure at all n locations
cgtccgagtggaggaaacttgtgtccgcgataaggcagttgaatctctgtgccgtattggtgcacaaatgaaggaatctgacattgtcgactggttcattccagtagtaaagaggctagcagctggcgagtggtttacagctcgtgtatcatcctgtggtctgttccacatagcctatccaagtgcgtcggaccaattgaaaacagaattgaggactatctatggtcagttatgtcaggatgacatgcctatggtcagaagagcagctgcatcaaatcttggaaaaattgcagccacagttgaacagaatcanttgaagacagaaataatgtcaatatttgatgacttaacccaagatgatcaagattcagtgcgtttgttggctgttgaaggctgtgctgctcttggtaaattgttggaaccacaagattgtgtagcacacattcttcctgtcattgtcaatttctcccaggataaatcaatg

SEQ ID NO: 452415 - DNA, 670 bp, Sorghum bicolor
cgtccgcttttgggcttggggattgtaaggctcctaaggttctcggagacatttttgagtctattgctggcgcaatattcctggatagtgggtgtgatacctctgtagtctggaaggtttttcagcctctacttgatccaatggtgacaccggacacccttccaatgcaccctgtaagggagctccaagagcgctgtcaacagcaagctgaaggattagaatacaaagcatcacgaacaggcaatgtagctacagttgaagtctttgttgatggtattcagattggtgtagctcagaacccacagaagaagatggcacaaaagttggcggctagaaatgcactggttgtcttgaaagagaaggaaactgcagcaaagaaagatactgagaaggacggcgagaagaaaaacggttcacagttcactaggcagaccctgaacgatatctgcttgagaaggcaatggccgatgccacagtacaggtgtataaacgagggtggccctgcccatgccaaaagatttgtttatgcggtaagggtaaatacatctgaccgtggatggactgacgagtgcattggagagccaatgccgagtgtgaaaaaggccaaggactctgccgccgttcttctgctcgagctgctgaatcgaaattactgtgacaagcctgatgg

SEQ ID NO: 452416 - DNA, 529 bp, Sorghum bicolor
cgtccgaaacgggaagcacaaaatagagggttctagtgtgccgttggttgtcaaatgggccgatacagaaaaggaaaggcaggctcggaaagcacaaaaggctcagttacagctatctaatatgcccagtgcaagtccaatgcagcagtcttcagtatttggagctttacagatgggatatatgcctcaatacaatggatttggctatcagccaccagggacatatggacttatgcagtaccctttatctcctatgcaaaatcaaggccccttccagaatatggttcaacctcttaatcaagggaactcgataagaggagtcaatcctgaactgtctcccagttcagttcaaaggtcctttgcaatgcagttagggagcccttatcctgctatccctggtatgcagtatcctgggtcatatccctgggggtccatgaacaatcgtccttttggaaattctcacaattcaatttcaattaaagttccaaattcgaatgccaattcccgcatttcttctagtcccagcagc

SEQ ID NO: 452417 - DNA, 947 bp, Sorghum bicolor
  unsure (1)..(947): unsure at all n locations
cgtccgaaaccctagccctcgcgccgccgcagccgccgccgccccccagcgctcgagctcctcgcctccatcgagctcgcgccgcaacgccaccatgaagttcagacatcgcgaacccgaccaccgggtgccagaagaagctggaaatcgatgacgaccagaagctgcgtgccttttatgaccgaaggatctcccaggaggtcagtggtgatgctctgggcgaggagttcaagggttatgtcttcaagatcatgggtggatgtgacaagcaaggcttcccaatgaagcaaggagttctgacttctggtcgtgttcgccttctgctccacaggggtactccctgcttccgtggttatgggaggcgtaatggtgagcgcaggaggaagtctgtccgtggttgtattgttagccaagacctttctgttatcaacttggtgattgttaagaagggtgagaatgatcttcctggtttgactgacactgagaagccaaggatgaggggtcccaagagggcctccaagatcaggaagctctttaacctttccaaggatgatgatgtacgcaagtatgtgaacacataccgcaggacattcactaccaagagcggctagaaggtgagcaaggcacctaagatccagcggcttgtgacccccttgaccctccagaggaagcgcgctagaattgctgacaagaagaagaggatcgctaagaagaagtctgaggctgctgagtaccagaagcttcttgcccagaggctgaaggaacagagggatcgccgtagcgagagcttggccaagaggaggtccaagctttcatctgctgccaaggccgctgcctccaccgcttnagagtgttcagagctttgagatgttttaaaggcctatcttgttacaacttaagtacctatgcttgccctggctgtgttgcaatcagtcgacccactctac

SEQ ID NO: 452418 - DNA, 660 bp, Sorghum bicolor
ctccgggtgctgatgctgacaaaaaggattccactagggggcaacaacatggtggacgccctagatcagaagagcctaggagggatgatcgtcgtgccgatagggatcgtgaaaagtctcgtgaaagggtacatgaaagagagcgtgaagagagaacccgtgaacgttcgcatgaccggactcgtgatagagattcacgggatgagaagcatcaccatagagaccgtgagaggactcgggacagggagagaggaaaggaccgcgaaagggaccatggccgtgaccgtgaccgtgatcgtcgtgacagggacagggatcgtggtcgggaccgtgaaagggaccatgctcgctctcatgatcgccatcgtgagagaaggcagggaccgtggtgaaagagatcatgggcgcacccatgaacgtgaacgtgctcacatgcatgagagggatgcagactatggcaatggtgggacaaagcatgacaaaaatctgtctagttatgggcaggattatggctatggtcagtatgagcaacacaaaggtcatgatgcatatggttatggtcaagatgggcgtaggcatgaaactgaacactcaaagcggcatgagcacgagtattatcgtgttgactcgtatggtaaaatggaagccaactatcagatg

SEQ ID NO: 452419 - DNA, 690 bp, Sorghum bicolor
cgtccgggtggcgcgaggtcgggccgtacccgccggggctcaaggccggcacggcgcgcgcggtgtgcgtcggaggtggggagaaggtcgtggtcaccggcgcgcttgacggcgaggaaggcggtggaaggcacgccgtgtgggtgtttgatgtcaagagcaagagctggaccgtcgtgcgcccgccgccggagttcgccggcttcgtcttctccgtcgccgccgttcggatctgaggatctgttggatctatctctgagtatgtggatcttcttcgtcccgtcccgtccgcgaccaagagacgtaaaggctactagtagtactagtacgtactgtatgtccgtgcaccgtttccgccattgctggatctgatgaagttgaagacccgcccgagatctgttggtcggcgcacctgtgttgccctgccatcgagggaagggcaaggaggtggtcgacgccagccagatcagatccgtggagccatgggtgggtgtagaaacttgggaaaaagagagattcctgctgctttgttgctgctggtggtggtgagtcgagtgtgaaaattggatgagagatgagtgtggtgtttttgtcccgaggtgaaggacacagactgttttcttgttgctcttgtcctacagccccatgcttttgctgctgctattgcaatcgccgagtactagtactagt

SEQ ID NO: 452420 - DNA, 521 bp, Sorghum bicolor
cgtccggccagccgccaccagtctctccctctcctcccggctccggcgaagagcgcccaccagatcacttgttaatctttctcaaggggagatggcgttttctttcgcaaacgtcaactctgaggcagggctgaaaaagcttgatgagtaccttttgactcgcagctacatcactggctaccaagcttccaaggatgatctggctgtctactcttcattttcggctgctccctcatccaagtatatcaacgtagcaaggtggtttactcacattgatgcactcttgaggctgagtggagttactgcagagggcctaggtgtcaaggttgagtcatcagcagttccttcagcctcaactcctgatgttgctgaggccccagcagctgacgatgacgacgacgatgatgttgacctttttggtgaggagactgaagaggagaagaaggctgctgaagagcgtgctgctgctgccaaggcttctggcaagaagaaagaatcttggaagtctcagttttactgat

SEQ ID NO: 452421 - DNA, 1271 bp, Sorghum bicolor
cgtccggacgccgccgccgcaagccgtccgccttgcccttcacgaaggcttggtcctccttgtaccaccaccacctcccccgccacagatctgtttccctctagttagggttagcgttcctctgcagcggcgatggcgatcaagcggaccaaggcggagaagaagatcgcgtacgacaagaagctctgcagcctgctcgatgagtacaccaaggtgctcatcgccctcgccgacaacgtcggctccaagcagctccaggacatccgccggggcctcaggggcgactcggtggtgctcatgggcaagaacacgctcatcaggcgctgcatcaaggcctacgccgagaagaccggcaaccacacctttgacccgctcatggacctcctcgtcggcaacgtcggcctcatcttcaccaagggagacctcaaggaagtgcgtgaggaggtcgccaagtacaaggttggggcccctgcccgtgttggtctggttgctccagttgatgttgttgtgccccctggcaacactgggctggatccctcccagacctctttcttccaggtgcttaacatccccaccaagattaacaagggtactgtggaaattatcacccctgtggagctgatcaagaagggtgacaaggtgggctcatccgagtctgccctgcttgccaagctgggtatccgtcccttctcatacggtcttcaggtcaccaatgtctatgaggatgggtctgtgttcagtcctgaggtgcttgacctttctgaggaggacctgattgagaagtttgccactggtgtctccatggttgcctctctgtccctggcaatctcatacccgacccttgctgctgtgccccacatgttcatcaatgggtacaagaatgttcttgctgttgctgtggagacggactactcgtacccacatgctgacaagatcaaggagtacctaaaggacccgagccaggttgctgttgctgcccctgtcgccggtgcggactctggtgctgcagctgctcccaaggaggaagagaaggctccagagcctgaagaggagtcggacgaggaaatgggcttcagcctgttcgacgactagagctgctattatcgtcaatctgctgcaagttttggcattttcttatgatggacaacagtactatttccagttatcttagcgcattgtgttttattagtagacaaaactgtgttggtgtccacctatagtgtgtaatcgacaatggtatctccttaatgtcatgtacctgttgttgtgtt

SEQ ID NO: 452422 - DNA, 448 bp, Sorghum bicolor
  unsure (1)..(448): unsure at all n locations
cgtccgctcagtttggcacaatggctctggctaataagcttggtggtctgctcaagaaagccacgagttcaaatccgtctgtctatcaagcaatcagatgcatgtcatccaagctctttgttggagggctttcttatggaactgatgatcacagtctcagagatgagtttgccaaatatggagaagtcattgaagctaggattatccttgaccgtgagtctgggaggtctagaggttttggctttgtaacttacacatcttctgaggaggcttcagctgccatcactgccatggatggaaagactcttgatggacgaagcatacgggttaatcatgccaacgagaggacaggtggcttccgcggcagcggtgggggtggttatggtggtggcggcttnngtggtggtggctatggcggccgccgcggtggctatggtggtggcggcgg

SEQ ID NO: 452423 - DNA, 1000 bp, Sorghum bicolor
cgtccgcccacgcgtccggtcatctcctcctccccaagacacccaccaaccccgtccagccgccggctgtctcggccgccgccgccgccgccctctcccggtccctgaggcgcgccaggtcggccatggcgttcaacaagatccaggtcgccaaccccgtcgtcgagatggacggcgatgaaatgaccagggtgttctggaaatctatcaaggacaagcttatcttccctttcgtggacctggacatcaaatactttgacctcgggcttccatatcgtgatgaaaccgatgacaaagtcacagtcgaggctgcggaggccacactcaagtacaatgtggctatcaagtgtgccaccattacaccagacgaagcaagggtgaaggagtttggcttgaaggccatgtggaagagcccgaatggcacaatcaggaacattctgaatggcactgtgttcagagaaccaatcatctgcaaaaacatcccaaggcttgttccaggctggacaaagcccatttgcattgggaggcatgcattcggtgatcaataccgggcaactgatgcagttatcaagggacctggcaagctcaaattagtttttgagggaaaagaagagcaagttgaactggaggtgttcaacttcactggtgctggaggagttgccttatccatgtacaacactgacgagtccatccatgcctttgctgaggcttctatggccactgcttatgagaagaaatggccattgtaccttagcaccaagaacacaattctgaagaaatatgatggcaggttcaaggacattttccaggaggtgtacgaagctggttggaaaaccaaatttgaagctgccggcatatggtatgagcatcgtctcattgatgacatggtagcatatgcacttaagagtgaaggagggtatgtctgggcttgcaagaattatgatgggaatgtgcagagcgatttcttagctcaaggtttggctcaatgggtttgatgaca

SEQ ID NO: 452424 - DNA, 521 bp, Sorghum bicolor
cgtccggaaaattatatctcacgcaatagttatattaatgagtattatcacttctgttttatgaacctgggcgttgtcaggcttgccagttgcattgtaattcagtatgtgctggtgtccttagataaattcacttatttccttgataaaacacaatttacaatggctagctttcgacaatggtgacccactgatctattgtgcccaaacagattttttactcactgggtggcagaagtggtgtgaccatattgtttccttgctataggagctacatccctggttagtgatctaaaattctgatgaacaaatagacccatgaccaatgccacctgtctgatcataacctttactattacaagaactttttgtagcagtactaaagcaaggaggcatttttctactggttagtgaaattatctcagtgtgacatttgtatcttctaatagttcatctgctattaaagttttgactttttttctcctaaatatcttctaaaataatgtaacatcatttatgaa

SEQ ID NO: 452425 - DNA, 1542 bp, Sorghum bicolor
cgtccgggttgatgctcttgcgaaggcattggctggtcaaaaggatgaggcttactttgcagcaaatgctgctgctcaggcatcaaggaaatcctctccccgtgtgaccaatgaagaagtccagaaggctgctgctgctctcaagggctctgaccaccgccgtgcaaccaccgctagtgctagattggatgcccagcagaaggagctcaacctccctgtccttcccacgaccacaattggttcgttcccacagactgtggagctcaggagggtccgccgtgagtacaaggcgaaaaagatctctgaggaggagtacatcagtgccatcaaggaggaaatcagcaaggttgttaagctccaagaagagcttgacatcgatgtgcttgtgcatggcgagcctgagagaaacgatatggttgagtactttggtgagcagctctctggttttgcattcactgccaatggctgggtgcaatcttacggatcaaggtgtgtcaagccaccgatcatctacggggatgtgagccgccccaaccccatgaccgttttctggtcaaagacggcccagagcatgacatctcgcccaatgaagggaatgttgactggtccagtaacagattcttaactggtcctttgtgcggaatgaccagccaagatttgagacttgctaccagattgctcttgcgatcaagaaggaggttgaggatcttgaggctgctggtattaaggttatccaaatcgatgaggctgcattgagagaaggtctgccactccgcaaggctgagcacgctttctacttggactgggccgtccactccttcagaatcaccaactgtgaaatccaggacaccacccagatccacacccacatgtgctactccaacttcaacgacatcatccactccatcattgacatggacgccgatgtgatcaccatcgagaactcccggtctgacgagaagctcctctccgtcttccgtgagggtgtgaagtacggtgctggcattggccctggtgtctacgacatccactcccccaggatcccgtccaccgaggagattgccgaccgcgtcaacaagatgcttgcggtgctcgacaccaacatcctctgggtgaaccctgactgtggtctcaagacccgtaagtacgcggaggtcaagcccgccctaaccaacatggtctctgctgccaagctcatccgcacccagctcgccagtgccaagtgaggactgtcgtctccgccatggcctattcctttaattacaaggagggtgtcatcgaagccatttgtttccaataatcagggtcccctgttcccgttctgctccatctgtttttagattagtatttttcttggctcgatgatcgccccaggcaatacctgttttactccatttggtggttcagaggcaagttgcccgtgtacttgtattgtaaaactgagtggtatctttgcagtgtttcatctgccactccgaggtgtgtcttactcaaggtaaagatctcgtatcgggaagttaatatctaattgtgtttgcgctc

SEQ ID NO: 452426 - DNA, 506 bp, Sorghum bicolor
ccgtccggctgcagccctatctccatgagtcgcgccacctccatgcgatgcgtcgggtgagaggctccggcgggcgcttcctcaacacgaagaaagaaggagggcatggcacggacgttgatgcgaatgggggcagcaagatggcagcagcagcaccatcacgcctcaccatgccccctagctccgagcctccacgaccaccagggctcagcaacattagcaacccgcacttccactcccagagtagcgtctccagcttgtctggctccgatgtgtcaaacatctacggcggcttggagcagccccctcgggcgccacccttcttcaccgtgctgccacccatcatggacggcgaccatggtggcgtcacccacatctcttccttcaagtgggcagccagcgacagctgctgcgagctcctcaaggcatgaaccgaggaggaggggatggctactcagacaaacggccttctccccgatggctggtagtctgtaggcaaatcattc

SEQ ID NO: 452427 - DNA, 525 bp, Sorghum bicolor
  unsure (1)..(525): unsure at all n locations
cgtccgtgcgtacgggaacatgtaatgctcaatattgatgacctaagcattcctgagcctaatgaggtcatgggagcagtcaagaataaatcatctggggaaaccattgcacgtctaccctccaaggctcatgccattgtagcaatgggagaaagcatggtttctgaagaggaacctcttctgcaagtggtggagtgtcgcatttgtcaggaggaagatagtataaaaaatctagagagcccatgtgcttgcactggcagtctaaaggatgctcatcgggtttgtgtgcaacgatggtgcaatgagaaaggagatgtaatatgtgagatatgtcatgagccttatgaacatgggtacactgcacctcccagagctcatcctgatgaaactaccattgatataagtggtgggtggaccattactggtaccgcatttgacttgcgtgatcctaggatacttgcagtggcacaaaaccacatcatggaagctgaatatgatgattattctgccacanatgccagcact

SEQ ID NO: 452428 - DNA, 669 bp, Sorghum bicolor
cgtccgccttgataggaaaactgctggtccgctcattattgcttgcagcaagggaggaaccagtattgaagatcttgcggagaagtatcctgatatgattattaaggttcctattgatgtatttaaaggaatcacagatgaggatgcagctaaagttgttgatggtctagccctgaaggcagcagataggcagtcttctatagaacagattaagaagctgtatgaacttttctgcacgtgtgattgcacattgctggagataaatcctctggcggagacagctgacaacaagcttgttgctgctgatgcaaacttgaactttgatgattatgctgcatttagacagaaagaaatttttgcactgcgtgatacaactcaggaagaccccagggaggtcgctgctgccaaagcagatttgaactatattggtcttgatggagagattggttgcatggtgaatggagcaggattggccatggcgaccatggatattataaagttgcatggtggtacgcctgccaatttccttgatgttggtggaagtgcatcagaggggcaggttgtggaagcttttaagatactgacttcagatgatagagtgaaggcaattctagtgaacatttttgggggcattaatgagtgtgatgtgataacaagtggaattgtaat

SEQ ID NO: 452429 - DNA, 492 bp, Sorghum bicolor
cgtccgcttgcatctttgaaacttaaagatgcgccagtaattggtgcttttaatcctgtgaagggagagatagtcctcgcacaatttagccttgacaactcctggaacagagctatgattgttaatggacctcgttctgtagaatctccgaacgacaagtttgaagtattctatattgactatggcaaccaagaggtggttacctacagtcgtctacgacctgtggacccatctgtttcctcgtctcctgctcttgctcagctatgcagccttgctttcataaaagtgcccagtcttgaggatgacttcggtcaggaagcagcagagtatctaagcgaatgtttgctcagtagctcaaaacaataccgggcaatgatcgaagaacgtgatgcttctgggggaaaatcaaaaggacaaggaaccgggaaatgttctcattgttactcttgttgatgcggagacagaaagtagcataaatgctaccatgcttga

SEQ ID NO: 452430 - DNA, 547 bp, Sorghum bicolor
cgtgcgactcccactccctcgcatccacccggctctcccccgcctccgcccccgcgggggaccgataaaccctaggccccgccgccgtcggaggcggcgccgcaggaggacacgcgatgtcgcacttcgggaggtcgggtccgccggacatccgcgacaccttctcgctgctcgtcctcaacatcagcttccgcaccacggccgacgacctctacccgctcttcgagcgctacggcaaggtcgtcgacgtcttcatcccgagggaccggaggaccggggactcgaggggtttcgcgttcgtgcggtacaagtatgccgacgaggcgcagaaggctatagatcggctcgatggccgtaatgtggatggaaggaacatcatggtgcagtttgcaaagtacggccccaatgctgagccaatccaaaaaggaagggtcaaagagggggctgagaaatcacgagacaggtcaagaagccgtagtccaaggccaaggaatagagacagagatcatagaagggcgaagtcgagcaggagtaggagcagagaaag

SEQ ID NO: 452431 - DNA, 434 bp, Sorghum bicolor
tcatggccgcgctcgacaaggtggtcgtcatcgacttccccgtcgtcgtcgccaagccgccgcctccggcatgatctgccggcggccattgtattgtacggcgccctttttcaggtagcatcagatcagatccatgtgtgttgcagcgctgctgctgctggtgtgctactgcttactgtacgtacttagtggtactactatttattgcttgttctgctctatctatctatctatctatctatctatctatctatctatctatctatctatctatctataatatgtccccggttagtgcatgcatggtgtagtagctgtaagcctgtaaactctgcaaggcaaaaatatctgcaccgtgcactctccgctcaagtacctattgtttggttatctttggaataaattccggtcatctttctggtatgcttgtaaaa

SEQ ID NO: 452432 - DNA, 863 bp, Sorghum bicolor
cgtccggtaccggtggatgggtcctgcacgctatgacttttctggaacaatggtctttctgaagcataggtcatacgaggcaaaggttgcttttctcgagactccatacactcattcacttacagcatcagcagaggatgatgtaactggagcacaaccactacaatctctttggaacaaacctcgcaaaataatctgcagaacaaattgctctgtatgcaaagaggcttcaacatctggacaaaattcagaagatgtttcagacaactccagaacattatgcaagaaccagaagtgggtctggtccgaaggacgtttcctcagcgttggtgcagctatcatttcatgtcgtaatgaaagagcccctgatggcctggtagctgacgcacacctttcggatgggtttcttcatcttctgctcataagagactgtcctcttcccctttacttgtggcatctaacaatttaccaagaagggtttggatcctctgagcttcaaggttgttgagcatcacaagacaccagcatttacctttatctcatcacatgatgaaagtatctggaacttggacggagagatgtttcaggcgagtgaggtatctgtccaagcttgccggggccttgtcaacctgtttgcttcggggccagaggtgtagtaatgctactcgcctaggagagagacatccttatttagacttgtatgttgtacacccttgactcttctttgtattttagtagagacctagaatactttgttgatagatatactgttagctacatggcatggaaacaacaacccatttgtgccatagaatagaggaacaaagaattttgactgaattaatgaagtaaaaggttcttct

SEQ ID NO: 452433 - DNA, 624 bp, Sorghum bicolor
cgtccgagtcgctacacctacactgcacagtcacctctgcctcctgcagtcaccgggccccggcgcagcgcagccaacccaacggacacgatgcaggcccacggcatcgccgtccgcgcccgcgctccggtggcgccagcccacgcacgccgccggcggcaatgccgcgtgtcggcgacggccgcagtcgcggcgcccgccgcgcgcgcccgcgtgtcgcactcgatgccgccggagaaggcggaggtgttccggtcgctggagggctgggcggcgcggtcgctgctgccgctgctcaagcccgtggaggaatgctggcagccgacggacttcctgccggactcctcgtccgagatgttcgagcacgaggtccgggagctgcgcgcgcgcgccgcggggctccccgacgagtacttcgtcgtgctcgtcggcgacatgatcacggaggaggcgctgcccacgtaccagaccatgatcaacacgctcgacggcgtccgcgacgagaccggcgccagcgcctgcccctgggcggtctggacgcgcgcctggactgccgaggagaaccgccacggcgacatcctcgggaagtacatgtacctctccggccgcgtcgacatgcgcatg

SEQ ID NO: 452434 - DNA, 860 bp, Sorghum bicolor
cgtccgactacgtcggcgtctactacaagtccgacgaggccgtcgccggcgacgcggagctgaaggcgttctgggacgaggtgcggaacgtggggcacggcgacaagaaggacgagccgtggtggcccgtgctcaacacccgggacagcctcgtggagacgctcaccaccatcatgtgggtcacctccggccaccactcggccgtcaacttcgggcagtaccactacggcggctacttcccgaaccggccgaccaccatacggaagaacatgccggtggaggagggccgggacgaggagatgaggaaattcctctcgcagccggagacgacgctgctggacatgatgccgacgcagatgcaggccatcaggatcatgacgacgctggacatcctgtcgtcgcactcgcccgacgaggagtacatgggggagttcgcggagccgtcgtggctggtggaacccatggtgaaggcggcgttcgagaagttcagcggcaggatgaaggagatcgagggattcatcgacgagtgcaacaacaacccggagaacaagaaccggtttggagccgggatcgtgccgtacgagctgctcaagcccttctccaagccgggagtcaccgggaggggcatcccctacagcatctctatctgatgtcatcgagacctcatcctcagcattagtttcttggtatcaggctcaacagtctctcagctccatccccaataagttcaaaaagaaaaaaaaaaagaagctctactcccaatgggaggttgcattattgcatgcagaggctgcttgtcaaataaaatgtactctgatctacgattgtattgtaccatggattgtacacttgagttaaaa

SEQ ID NO: 452435 - DNA, 734 bp, Sorghum bicolor
cgtccggcggctcgcgcacgagcaccacgaactttcgtctccgccgtcccactacacctcccgtcgcgccgccgagcgacggcgcgcatccgcctcctccgcgccgcctctcccgccgccgccctgcctcccgcgccgtcacgcctctcatcgccgccccgcctccctccgtcgtttctggctgcggggcttcttctccgtcgccggctacgcgcgtggatccagggtcagcggcgtccgtcccgcgtgagaagggagacggagacgggagtttgtcatggcatcaaagcgtatcctcaaggagctgaaggacctgcagaaagatccccccacatcatgcagtgccggtcctgctggtgaggacatgtttcattggcaagcaacaattatgggaccacctgacagtccctatgctggcggtgttttcttagtgaacattcatttcccgccggattaccccttcaaacctccaaaggtttctttcaagacaaaggtcttccatcctaatatcaacagcaatggaaggatatgccttgacattctcaaagagcagtggagccctgctttgacaatttctaaggtcctgctctccatctgttccctgttgactgaccccaacccggacgaccctcttgtccctgagattgcccacatgtacaagacggaccggccgaaatatgagtcaacagctcgcagctggacgcagaaatatgcgatgggctgacgataccttc

SEQ ID NO: 452436 - DNA, 861 bp, Sorghum bicolor
cgtccggcccgcctctcgctccgaagcttctctcctctcgcgtctcgtaccaggaggaagggggacgggagagacccagggagcggaggcgtgcgaagctcgcggcgcgtgcgcgtgctgcggtctgcggggagcgggagattgggccctgagctagggtctgggactgggaggcggagatgtcgacgccggcgaggaagcgcctgatgcgggacttcaagcggctgcagcaggacccgcccgccggcatcagcggcgcgccgcacgacaacaacatcatgctctggaacgccgtcatattcgggccggatgacacgccgtgggatggaggcacgttcaagctgactctgcaatttacagaagattaccccaacaaacctccaactgttcggtttgtttcgaggatgtttcacccaaacatctacgcggacggatgcatctgtttggacatcctacaaaatcagtggagccctatatatgatgttgcggcaatactgacctctattcagtccctgctgtgtgacccaaacccaaattctcctgctaactctgaagcagccagaatgttcagtgagaacaagcgtgagtacaaccgcaaagttcgcgaggttgtggagcagagctggacagccgactaaaactttatccgctccaccagatggtgcaaataagcacctgcctttcctgctttgtcagtctgtattatcgtcttaaaccgttaaatatcctcagctactgttgtgttcttgtggttcagtcccctgttgtactgttgcctgccggtttcctaatgtagtgaatggtttcgtggactggagtattggtgcgtatgtaaagccaagttgttgctaggtttgcagt

SEQ ID NO: 452437 - DNA, 513 bp, Sorghum bicolor
ggtcaaggagccagccagtggggggaacgcaaacgcagcgagcgttctgccggagatcgaaaccctagctagggtttgagggcgctgggctgcggcggcggcggtcgagatgtcgacgccggcgaggaagcggctgatgcgggacttcaagcggctgcagcaggacccgcccgccgggatcagcggcgcgccccatgacaacaacatcatgctctggaacgccgtcatattcgggccagatgatacgccgtgggacggaggcacgttcaagcttactttgcagtttacagaagattacccgaacaaaccaccaactgttcggtttgtctctaggatgtttcacccaaatatatatgctgatggaagcatatgcttggatatcctacagaaccagtggagtcctatatatgatgttggtgcaatattgacttctattcagtctctgctgtgtgatccagacccaaactcccctgcatactcagaagcccgcaggacttgtcattgagaacaagc

SEQ ID NO: 452438 - DNA, 544 bp, Sorghum bicolor
  unsure (1)..(544): unsure at all n locations
tcctacagagcaaggagagatctttgatccggagagaaattcatgggaacaaatgcctacaggcatgggtgaaggttggcctgcaaggcaggctggaaccaaattgagcgttgttatagatggcaatctgtatgccttggagccagcaacttcttctggcagtgcaaagataaagatgtacgatgctcaagaggatacttggaaggttgctgtaagccaggtacccgttggtgcctttgccgagtcagatagtccttatttgcttgttggatttcttggaaagctccatttgatcatcaaggatgtgggtagcaaaatcaatgtcatgcaaacggactctctggagccattggattcgccagccctttcggctggcacaacatgtcaagtcccagatgtctccttggagcaggcagatgtttggaaagccatcgcgtcgaagagtatcacagcttgtgaacttgtcagctggtaggttctcagcatntgagtttttaagggtgagtttctctggatcttagtataagtttgtgcggtagatata

SEQ ID NO: 452439 - DNA, 785 bp, Sorghum bicolor
gcccaccgaattccctgcctgcgattcctctcccctcgcctcctcgtcttcccctaggggatcgccggagaggaatcgcaaagagggccgtctcatccaagttaaggaagccatggagcacaaggagactggatgccaggcacctgagggacccatcctttgcatcaataactgcggcttcttcggcagcgcagctaccatgaacatgtgctccaagtgccacaaggagatgataatgaagcaggagcaggccaagctggctgcctcctctatcgacagcatcgtcaatggcaacgatgctgtcatggaaccagttgttgctggcaacacagtggtcgctgctgctccaatcgagttgcaaacaatgaacgtgcagcccgctgatgttgctggacctagcgagggggcggcggtgatctccaaagggaaggtagggccgaaccggtgcagcacttgcaggaagagggttggacttacaggattcaactgccggtgtgggaacttgtactgtgcactgcaccgctactccgacaagcacgactgcaagttcgactatcggactgctgctagggatgccattgccaaggctaatccagtggtgaaggcggacaagctcgacaagatctagggtttcctacggttggctcaaggaagattgcaacctgtggtacttcatcatgcggaattgctgcattgcccatgcctttccctttcatgtttgctgctacaatcttgttgttcggcattgcagtgcatggtgcgcactttccgagcctggctcaaga

SEQ ID NO: 452440 - DNA, 641 bp, Sorghum bicolor
cgtccgaccttccctggcccgacgacgcccccatttcgaagctcctcctcgcgattccaatccacgcacgcctcctccgcctccgcgtccccctcgcgcaggcttatagtcagtgatggaacacaaggaggcgggttgccagcagccggagggcccaatcctatgcatcaataactgcggtttctttggcagcgctgccaccatgaacatgtgctccaagtgccacaaggagatgataatgaagcaggagcaggcccagctggctgcctcctccattgatagcattgtcaatggtggtgatggtgggaaagggcctgtaattgccgcaactgtagatgcggcagttcctcaagttgaggagaagactattgttgtgcagcctatgcatgtagctgaaaccagcgaggctgctgctgtaatccccaaggccaaggaaggcccaaacaggtgtgcaacctgtaggaagcgtgttgggttgacaggatttaactgccgatgcgggaacatgtactgttcggtgcaccgctactccgacaaacatgactgccagttcgactatcgaactgcagctagggacgcgattgccaaggccaatcctgtggtgaaggcggagaagcttgacaagatctgaggcgggcatt

SEQ ID NO: 452441 - DNA, 697 bp, Sorghum bicolor
ccacgcgtccgcgaaccgcaacccgcaccgttccctttccccacctcgatctcgcgcgctagggtttcgtctcgccgccgccgccgccgccgccggcgctctcgccctcctccgcgaagatgccgaagaacaagggtaagggaggcaagaaccggaagaggggaaagaacgaggccgacgacgacaagcgcgagctcgtcttcaaggaagacgggcaggagtacgcgcaggtgacccggatgctcggcaacgggcggtgcgaggccatctgcgtcgatggcacgcgccgcctctgccacatccggggcaagatgcacaagaaggtctggatcgcggccggggacatcgtcctcgtcggcctccgcgactaccaggacgacaaggctgacgtcatcctcaagtacatgaacgacgaggcgcgtctgctcaaggcctacggggagctccccgagacgctcaggctcaacgagggcgtcgacgtcgatgggcccgaggacggcgaggagggcagcgactacatccagttcgaggacgaggacatcgacaagatctaagaaatctttttctccttgcggggctactctattattgtgtgactttgtgttctagtatgtggtggtatggtttaggctgggctggctgttgtggattagctatcctgcctgcgtggatcacaatcctgcctgattgatcttgt

SEQ ID NO: 452442 - DNA, 387 bp, Sorghum bicolor
cgtccgcgtgatgccactagaggtactgcttactagctacaagaggcttgttgtgaaggactctgctgtaaatgctatctgctatggtgctaagcttatgattcccgggttgctccgatttgagaatgatattgagaccggggaggaggtggttctcatgacaacaaagggtgaggctattgcgattggtgttgctgagatgactactgctgtgatggcaacctgtgaccatggtgcagttgcaaagatcaagagggtcgtgatggacagagatacatacccaaggaagtgggggcttggcccggtggcactcaagaagaaaaaacttattgctgagggtcttcttgacaagcatgggaagccaaatgagaagacaccaactgagtg

SEQ ID NO: 452443 - DNA, 638 bp, Sorghum bicolor
  unsure (1)..(638): unsure at all n locations
cgtccggtcatcgtcctcccctccacactctactgggcgcgtagctacagctagtgtggactggagatcgatccgtccggccggtccatctgctggacctcgattgatggcttcttgcctagggacatccggggatgtcgaccccctgcgaggaagaggttgatgagggatttcaagcggctgatgcaggaccctccggctggaataagtggcgccccgcaggataacaacataatgttgtggaatgctgtcatatttggacctgatgataccccgtgggatggaggtacgttcaagctgactctccagtttaatgaagaatatccaaacaagccaccaaccgtgcggtttgtttctaggatgtttcatcctaacatttatgctgatggaagcatatgcttagatatcctgcagaatcaatggagtccaatatatgatgtagctgctatactcacatcaatccagtcattgttgtgcgatccaaacccgaattcgcccgctaactctgaagctgcccgcatgttcagcgagaacaagcgagagtacaaccgcanagtgcgggaagtcgtggagcagagctggacggcggactgatgcgttccgctgcgctgcgcaactgctcactgcgcccgcgcccc

SEQ ID NO: 452444 - DNA, 523 bp, Sorghum bicolor
cgtccggtccctgtgtatctggtgctcataactctatagttactgctagggctggaaaggaccttgtttccagcttggtgtctggattattgacaattggtccccgtttcggtggagcaattgatgacgcagcccgatacttcaaagatgcatgtgacaggaacctcacgccatacgagtttgttgaaggcatgaaaaagaagggaatccgtgtgcctgggattggtcacaggattaagagcagagacaacagggataagcgtgtgcagcttctacaaaaatatgctcacacacattttccttcagtcaagtacatggaatacgctgtccaggttgagacctacaccttgtccaaagccaacaatttggttctgaacgtcgatggtgcgatcgggtcacttttcttggatcttctgtccggaagtggaatgttcaccaaacaggagatcgacgagattgtggaaatgggttatcttaatgggctctttgtgctttggcgttcaattggcctgatcgggcacac

SEQ ID NO: 452445 - DNA, 700 bp, Sorghum bicolor
cgtccgagcagcagaagcagcagccgacgcctccgccaccctcgaatcgttccccaccatggcgtcgcagggatcctccgtcttcgccgcactcgcgcaggccccggaggaccccatcctcggagtgaccgtcgcctacaacaaggatcccagccccgtgaaggtcaacctcggcgtcggcgcctaccggaccgaggaagggaagcccctcgtgctgaatgtggtcaggcgcgccgagcaaatgttgatcaataacccgtcacgtgtcaaggagtacctaccaatcaccggtttggctgaattcaataagctgagcgctaagcttatctttggtgctgacagtcctgctattcaggagaatagggttgctacagtgcagtgcctatcgggtactggttctttaagagttggaggtgaatttcttgcaaggcactatcatgagcgcactatctacatcccacaaccaacctggggaaatcacccaaaagtattcaccttatctggattgactgttaggagctaccgctactatgatcctgcgacccgcggtcttgacttcaaaggactcttggaagacctcagttctgctccttcaggttcaattgtactgctgcatgcctgtgcccacaaccctactggagtagatcctaccccttgatcagtgggaacagattaggcagcttgatgagatcaaaatcac

SEQ ID NO: 452446 - DNA, 1171 bp, Sorghum bicolor
cgtccgcacatactttccgcgcctcttcttctgtgctgtgcccctctcctcccatccaaactgcggatacacagcagcgacacgatcgcctgaacacgcacgcacacccacgttgtcagaagctgatcgatggcggctcaggctctcctctccggccggcagctgctgggccgccccgccgtgcagtcggccgtctccaggtcgtcggcgaggaaggcgcccttcgtcgtcagggccagctccagccctccagccaagcaaggtgccgacaggcagctgtggttcgcgtccaagcagtccctctcctacctcgatggcacgctgcccggcgactatggattcgacccgctggggctctcggacccggagggcaccggcggcttcatcgagcccaagtggctggcctacggcgaggtgatcaacgggcggttcgcgatgctgggagcggcgggcgccatcgccccggaggtcttcgggaagctgggcatcatcccgccggagacggcgctgccgtggttcaagacgggggtgatcccgccggcgggcacctacaactactgggccgactcctacacgctcttcgtcttcaacatggcgctcatgggcttcgccgagcaccgccgcctccaggactggtacaacccgggctccatgggcaagcagtacttcctcggcctcgagaagttcctcgccggctccggcgacccgtcctaccccggcggcccactcttcaacccgctcggcttcggcaagaccgagaaggagatgaatgagctcaagctcaaggagatcaagaacggcaggctcgccatgctcgccatcctcggctacttcatccaggggctcgtcaccggcgtcggcccgttccagaacctgctcgaccacctctccgaccccgtcaacaacaacgtgctcaccagcctcaagttccactagaacgtccgttggttgctgcatcatacctgttgttcatatgctctggcttggctgatgcatggaaaggagcctgaagcgttgcatcaggactcatggccagcctgctgctgcttgtaacaaattagtattgatcttgttgagaccacaaactatattgcacatggtaaatcaatgtacaattccctccctagtaaaaaattaaaaacaaaaacaaagaaaacattaaactaaaagg

SEQ ID NO: 452447 - DNA, 1867 bp, Sorghum bicolor
  unsure (1)..(1867): unsure at all n locations
cgtccggatgcacactacttgcgtggactgcttcctccggcagttgtctctcaggaactccaaattaagaagttcatgaacaacctgcggcagtaccagctccctattcagtgctatatggccatgatgaaccttcaggagacggacgagaggcttttctacaagcttttgattgaaaatgtggtggagctgcttccttatgtttacacaccaactgtaggtgaggcctgccagaagtatgggtccatctttggacgaccacagggtctgtatgtcagcctgaaggacaaggggagggtcctagaagttctaaggaactggccacataggaacgttcaagttatctgtgtcactgatggtgagcgaatcttgggacttggagatttgggttgtcagggaatgggaattcctgtaggcaaacttgctctatacactgctcttggaggagttgatccatcagcttgtttgcctatcacaattgatgttggcacaaataatgagaaactgcttaatgatgagttctacattggactccgacaaaaacgtgcaaggggcgaggagtatgatgagcttatggaagagttcatggctgctgttaagacattctacggtgagaaagtcctcattcagtttgaggactttgccaatcataatgcctttgatttgcttgaaaaatacagcaagacccatcttgttttcaatgatgatatccagggcacagcatcagtggtccttgcaggtttgttagcagcactcaagatggttggtgggaccctggcagagcagacttatttgttccttggtgctggggaggctggaactggtattgcagaactcattgctcttgagatgtcaaaacagacgaaggctccaattgaagagtgccgcaagaaggtttggctggtggactcaaagggtttgattgttgactctcgtaaaaactcccttgcgccattcaaaaaaccatgggcacatgagcacgagcccttgacaaccttgtatgatgctgttcagtccatcaaacctacagttctgattgggacatctggagttggaagaacattcacaaaagaaattgttgaggccatggcttccatcaatgagaggcctatcatcttttcactgtcaaacccaacctcacattctgaatgtactgctgaacaagcatatacctggactcagggtcgtgcagtatttgccagtggcagtccatttgcccccgtggagtatgatgggaagacttttgtacctgggcagtcgaacaatgcctacatcttccctggactcggcctcggtcttgttatttctggagccgtccgtgtccacgaggacatgcttcttgccgcctcggctgcactagctgatcaggccacagaggagaactttgtcacgggatcgatcttcccacccttcaccaacatcagaaagatctctgcgtacattgctgcagccgttgctgcaaaagcttatgaactcggtttggcgacccgtctgcctccccccaaagacctggtggcatatgcagagagctgcatgtactctcctgtctaccgtaactaccagtagtgctgctggaatcaattttggagttataaaatatatcaacgcagatgatactgcaatgttgtagttatcgctgtttaatatagtccctgctgctaaccacccttgttgctggtgctgctggtcgacactgtacctttctatgcatatatgatatgttgtaacgttatgaaagcaaacaatcttttgtcccaaagtttgttattctttcgcttgctaaaannnnnnnnnnnnnnnnnnnnnnnnnnnnnnnnnnnnnnnnnnnnnnnnnnnnnnnnnnnnnnnnnnnnnnnnnnnnnnnnnn

SEQ ID NO: 452448 - DNA, 834 bp, Sorghum bicolor
cgtccgaacgcctgcactagcgctagcagcaatccattgtgtgtaattaattgtaacccgggccggcccgacactgcacgagatggccgactactaccacggcggcagggccagcatgtacgacgactgctacgacgccggcaggcacggcggcggcagcatgaaggcctactcgcgcaccgacgagtactatgacaacgtgcaggacgaccgcatcaggatgaggcccgtgtacgccgacgacgactgtactggctacaacggcggcggctacggcgccggcaggcagaccgccgtctacactactgacgagtactcccgcggcggcggctatggcggctacggcggcgagcaggagcacttcaagagagaggagagggagcacaagcacaaggagcgcctcggcgaggtgggcgccctcgccggcggcgcctttgccctgtacgaggggcaccgtgcgacgaaggacccggcgaacgcgcagaggcacaagatcgaggccggcgtggcggcggcggcggcgctgggcgccggcggctacgcgtaccacgagcaccgcgagcagaaggcggcccactacgagaccaagcagcaggcgccggagcacagccacagggtgccgcacggctactactgcaactgaaactcatccgatcgatcgatgcatatgcagatgcagatcatgcagatggacgatcgaacgaatgcatcagcatcaactcgatcctatggactgccgtacgtacgtacgtacgtactatacgtgcgtgtaagtaaataagagcagacgtgacgtgtgtgttgctcactactcatacttatttgcaaaataat

SEQ ID NO: 452449 - DNA, 544 bp, Sorghum bicolor
cgtccgcccaaactgcggaggtacagcagcgacacgatctcgccaccgcacgcaccttgtccgaagctcagcaccgatctatggcggctcaggctctcctctcccgcccggccgtgcagtcggccgtctccaggtcgtcggcgaggaaggcgcccttcgtcgtcagggccagctccagccctccagccaagcaaggtgccgacaggcagctgtggttcgcgtccaagcagtccctctcctacctcgatggcacgctgcccggcgactatggattcgacccgctggggctctcggacccggagggcaccggcggcttcatcgagcccaagtggctggcctacggcgaggtgatcaacgggcgcttcgcgatgctgggagcggcgggcgccatcggccccggaggtcttcgggaagctgggcatcatcccgccggagacggcgctgccgtggttcaagacgggggtgatcccgccggcgggcacctacaactactgggccgactcctacacgctcttcgtcttcaacatggcgctcatgggcttcg

SEQ ID NO: 452450 - DNA, 777 bp, Sorghum bicolor
  unsure (1)..(777): unsure at all n locations
cgtccggacgagaggcttttctacaagcttttgattgaaaatgtggtggagctgcttccttatgtttacacaccaactgtaggtgaggcctgccagaagtatgggtccatctttggacgaccacagggtctgtatgtcagctggggctctcggacccggagggcaccggcggcttcatcgagcccaagtggctggcctacggcgaggtgatcaacgggcggttcgcgcagctgggagcggcgggcgccatcgccccggaggtcttcgggaagctgggcatcatcccgccggagacggcgctgccgtggttcaagacgggggtgatcccgccggcgggcacctacaactactgggccgactcctacacgctcttcgtcttcaacatggcgctcatgggcttcgccgagcaccgncggcttcaggactggtacaacccgggctccatgggccagcagtacttcctcggcctcgagaagttcctcgccggctccggcgacccgtcctaccccggcggcccactcttcaacccgctcggcttcggcaagaccgagaaggagatgaatgagctcaagctcaaggagatcaagaacggcaggcttgcaatgcatgctatttaagaatgcattagacattgcatttttcttgtggatactgatcacttatggattcgactcatgcatcatgggacaagttcgttttattgggcctaggcttgtcatcggngttgttattcatcttctgtgtaactacagtaccctggctttttatgcaattcta

SEQ ID NO: 452451 - DNA, 514 bp, Sorghum bicolor
ggcacgaggctatactctcctctcctagcatagggtttatcttctcccatactctgccccccgactcgcttctcgcacacggcagccggattccgaagcacccccagccataagcttctaatcgtttagagagcactcgagaatgtcgtccgtgcagctctctggtgccggagtcgcggctgtggccttcacgaacaagagcctcgtctctcagcccgcagctctccgggtctgctcgtcaaggcgctcggtccgtagcctggtcgtgaaggctgccaccgtcgtcaccccaaagtacacttcactgaaacctctgggagatagggtgcttgtgaagcttggtgccgcagaggagaagacagttggtggcatcttgcttccatctaccgtccagaccaaaccacaaggaaggtgaggttgttgctgttggagaggggaggaccatgggtgacaagaaagtagcggttgatataaagactggagcacaagtagtatactcaaagtatgctggcac

SEQ ID NO: 452452 - DNA, 638 bp, Sorghum bicolor
cgtccgcccacgcgtccgggaaagggaaagcagcgagctgtgggagagagaaaggttaagaggaatccgagctgcggtgccgcttcttcttcttcctcctcttctttttcggcaccgccactggtgggagaagattcttgggacgaggcgacgcggaagggatttctttgggctggctccgctccggtggttgctttgcgtttgcttccatggagagggatttcctgggcgtgattgacagggcggcggggaagggcggcggcgatgtggtgttggtgaggacagccgaacggagctagcagaggcggcgcagtggcagtttccggccaagtccggcagcggcgcaccggcgttcatgtccttcaggaccgcgagggggggaggagggctctgaggagttctccatctccgggttccggccggccggactcgccttggacggcatcaagaagcagacctccttgcctgctgtgatctcccagcaccagcagcagcagaggcagttctggctcagcagcagccaggtcacggcacagcagtatcctgccgcggcgcacggcggccagcgcttgcaggggatggattacagtgcggtggcgcttgattatctccctggcggatccaggctagtgcatccg

SEQ ID NO: 452453 - DNA, 843 bp, Sorghum bicolor
  unsure (1)..(843): unsure at all n locations
cgtccggagagactcgcatcagtgcaagaacaaattaacaaaattgcacaagaaagggaaagtgctataagggaagaatttgcctcacatttggaggaaaaggaagaggaaataaggaaattagttgcaaagattagagaagaggagagtgaagaaagtgtattgactgagcggttgctggttgcagaatcaaaaacacatggccataacaaggaaactgcaggcttgaaggatgaaatcaaagaactaacaagcaagttggagtttctgagagacagagcagtatcatatgaaaaacaagctagaatgcttgaacaagaaaaaaaccatcttcaagagaagttcttatctgaatgtaagaaatatgatgaggcagaacaaagatacaagtctgcagaaagggatgtgaaaaaggctactgagttggctgatgcagctcgaacagaggctattgcatcccagaaagggaaggatgaggcacagcggttatcgatggaaaaggtagcagttatagagagagttcaaaggcaggtagacagactggagcaggaaaaagttaatctattgggcgaagttcagagaatgcgtaattctgaatctgatgcctggtccaaggttaccgtgcttgagagtagggttgctgagagggagaaagaaatggatgatttactgagctgtagcaacgaacataggttcagcacccttcatgtccttgagagtctgttggcaacggaacgtgcagctagagctgaagccaataagcgtgcagaggccttatctatacaactacgatacggccaatggtaacttgatatactccatcangagctgacatcgattcgt

SEQ ID NO: 452454 - DNA, 505 bp, Sorghum bicolor
cgtccgtgattatggtagccgtggcaggtatgactctggtgaaactgatgggcgatctcgtaggtctgctagaggtcgcagtagaagccgtagcagaagtcacagtagaagccgtagcccaaggcccaagaggtctcgccgacatgaagctagacgtagcaggtctacagagccggagtaggagcaggagctggagctatagaaaccgtcgtgctagccgcagctaagagtcgcagccctgttgctagccgaaggtatgaaaagactgctgctatttcaggatctgctcggcctaactcggggcatgcagagcacaaaagccctccaagatctcactctgtggatgaccatgtgaaccactctgaccacaaggatgaccacatggaagatgggaagatggaaagggttgatcttgatcgctcgcccagcccacaagatgacaagtctgctccatatagtcctgtgtacaatggcaaaaccagtggctcgatgagccccaacgttc

SEQ ID NO: 452455 - DNA, 798 bp, Sorghum bicolor
cgtccgcccagtcgaccaagcacgcgcctaccagcaggcgctcggtggcaccgacccctttggagccaatacctcaaacgaaaataggggcatacttattgtaaagctgcgtcgggggcaagaactaaggcttcgtgccattgctaggaaaggaattggcaaggaccatgccaaatggtcaccagctgctaccgtgactttcatgtatgagcctgacatacgtatcaatgaagaactaatggaaacattgacagtggaagagagaagaaggttgattgaaagcagccctacaaaagtatttaagcttgattctgctaatcaggtggtggtggacaatgctgaggcatacacctatgatgatgaggtgatcaagcacgctgaggccttgggaaagccaggcttagttgaaatcaacgcgaaggaggacagcttcatcttcactgtagaaacaactggcgccatcacggcctacgagctgatcatgaacgcaatcacggtcctgaggcagaagctggatgctgtccgcctccaggacgatgcatggtgaccttggcgagctcggtgcccaccttggcgggccttaggatctttgcaacaagaattgcccttggtgtcttcctccaccgcctatgtagtaggcctatctaactgccatgctagtcgaacattctgataaccctacggtgtctaagccccagattatggatttccaagtatccagtactgaattccagtctccgcgtccaccttgctttgtatcatcgatttagttatgctcgttatcgacacctgttgttt

SEQ ID NO: 452456 - DNA, 412 bp, Sorghum bicolor
cgtccgaaagaagtatggcaaagattttgtttctgctgcagttgacttgcgcccagatgctgctgttaacaaccttctgattgagaagctgtcggttaagaagccttctggacaaattaagctgaaagttctaaaggatatagcaaaagagcaccagattgattgggataccactgagagtgagcaggagcttctgaaacctcccgaagagttgattaaagggccaagtacatttgttgaagcttccaatatgcctgttaagactattctgacaccacatgtcctgcaaccaaatccagttaacttcagctataggtattcggatgatgaatatgatgacaggggcactatgcaattcaaagatgcagcttcagctgctcgagcagctgcagagtctgctgagagagcagca

SEQ ID NO: 452457 - DNA, 564 bp, Sorghum bicolor
cgtccgcagaggccaaagattttctgctgaagtgcctgcagaaggaaccagagctgaggtctactgcaccggacttattaaggcatccttttgtcactggaaaattggatgacctgcagccactcaatcatgctgcagacaaggactcttgtaatgagattcctgcagatgatatgccaaatggcttgggtttgaatcattcttccaactggtccactatgaactccaataaatcatcaaaaatcaagcctttatgggagggtagctgtgatgatgatgtcatgtgtgagtttgctgacaaggatgactatgcagcagttggatctagctataatcctatgtcagaaccatttgatgactgggaaaacaagtttgacataagcccagagcaaaattctcatcaaccaatggaatttggtgaattggccaaacatgctgaaagcagcataactgagaatgattttacgttccctgttgagggaagttgcgaagatgatgatgtacttacagagtcaaaaataaaggcatttcttgaggagaaggcccttgacctgaaaaagctac

SEQ ID NO: 452458 - DNA, 297 bp, Sorghum bicolor
ggcacgaggccgaccccaccgccccctttacgcgaagcttcaccgcggaatctaaaactcgccgctgatccgcgagtcgtcctcttcgtcttcgctcggcgatcaatcgaagagtggggagggagagatggcggagaatccgcagctgtttgggaacgggatgccggtgccgttctacggcgagatgttcgtcctcgcccgggacggcgtcgagttccacgtcgacaagatcccgtcagctcctggcggtcatgtgaaaacaaaaggcacaatttacctgtctaatataaggatggt

SEQ ID NO: 452459 - DNA, 572 bp, Sorghum bicolor
  unsure (1)..(572): unsure at all n locations
cgtccgcgcatttccctttccccgcaccgcacccaatcccatccccgtcggagtgcgagacagagagagggagagggagatggcgtcggtggcggagatgcagcccctcgcgccagcggggtaccgccgttcgccggagatgaaggagaaggtggaggcgtcggaggtggacctggaggccgggaccggggagacgctgtacccggggatctcgcgcggggagagcgccctccgctggggcttcgtccgcaaggtctacggcatcctcgccgcgcagctgctcctcaccaccgccgtctccgccctcaccgtcctccaccccaccctcaacgccacgctctccgactccgcgggcctcgcgctcgtgctcgccgtcctgcccttcatcctgatgatcccattgtatcattatcagcacaagcacccacacaatttcgttttcctgggtctgttcactttgtgcttgagcttcagcattggtgtggcttgtgctaacactcaagggaaaattgttctggaggctttagtattgacagctggtggntgtggttctttgactgcctatgctttct

SEQ ID NO: 452460 - DNA, 490 bp, Sorghum bicolor
cgtccgcggacgcgtgggcggacgcgtgggttcagcagctcgagcacgatggccctcgcgctcgccacgaccccactcacgcacctcgcgcgttgcgccgctcccgatctccggctcccagtcctcgctgctgctgctcccgcgccgcgcgtcgcacgcccccgtctctctctccctccccctccggtcccgcctcatcgcggccgtcgcgaccaaggaggaacccgagctcggcggcggcggatcaggtggcgacgagcggtgcgggagggggcggcggcggcggcggaagcgacccgaaggaaggagggcaggaaggggaagggggagaagagaagatggagcagggcctgtccttgtcgcagaaactcactctcgcctacgccgcgctcgtcggagcccgggggtaatgggatataatgagagtggagccagaaatccttggctgcaggaggcatatcaggcctgggtctgtacttcgtccatactc

SEQ ID NO: 452461 - DNA, 501 bp, Sorghum bicolor
caacctccgccgccagggctactccggctggatggacctgctgctcaagcccgtcgggctcaaggccaccgccatcgcctacaagtccggcgagcggcagaagctgcaggacgccgggtacgtcatcgtcggcaacatcggcgaccagtggagcgacatcctgggcgcgccggagggtgctcgcaccttcaagctgcctgaccccctctactacattggctaattgagcgatgatgccacgttggcctccgtataattgttaatccatcgcagcggctctccatcagcccatcatcgatcgatccgtcgcccggttgcaatgcctgtgctgtttgtgatgaactgctctttgttgtttgttatatccttcccttcttattttacgaccgctgcatgttatcattaattcctaaaggttaatttcctgagctgagtggaaataaaagctgactatgtggagagctgtcgatttgtcaataaaggttatgacagctgcatttt

SEQ ID NO: 452462 - DNA, 1225 bp, Sorghum bicolor
ggcacgaggcccaacctcctctgctcccaagatctcctccccacccacctcccggtccggtccggtagcagagagcggagagggggcagagagatcgagatccggaggcgcgagcaccaccaccaccaccacgacctgcggcaatggcgggcacggtgacggtcccgggggcgtcggtcccctcgacgccgctgctcaaggacgagctggacatcgtgatcccgacgatccgcaacctcgacttcctcgagatgtggaggcccttcttccagccctaccacctcatcatcgtgcaggacggcgaccccaccaagaccatcaaggtgcccgagggcttcgactacgagctctacaaccgcaacgacatcaaccgcatcctcggccccaaggcctcctgcatctccttcaaggactcggcgtgccgctgcttcggctacatggtctccaagaagaagtgccgccccacccgccccgacgactgcttcgttgccaaggacccaactggcaaggatatcaatgctcttgagcagcacatcaagaacatcatgagcccatccaccccgttcttcttcaacaccctgtatgacccctaccgcgagggtgctgactttgtgcgtggataccccttcagcctcagggagggtacccacactgctgtctcccatggcctgtggctgaacatccctgactatgatgctcccacacagctggtcaagcctaaggagaggaacgagaggtatgttgatgctgtcatgacaatccccaagggaaccttgttccccatgtgcggcatgaacctctgcttcgacagggatctcattggccctgctatgtactttggtctcatgggtgatggccagcccattggtcgctacgacgacatgtgggcaggatggtgtgtcaaggccatctgcgaccacttgagcctgggaagtcaagacccgtctgccatacatctggcacagcaaggctagcaacccctttggcaactcgaggaagggatacaagggcatcttctgggcggaggacatcatccccttcttgcagaacgtgaccattcccaaggattgcgacactgtccagaagtgctacatctacctctctggacagggaacggagaagcttggcacgacagacacctactctgtgaagctcgccgactccatggtcacctgtattgagggctgggatgagctgaacccagctaccgctgccaccgagaatg

SEQ ID NO: 452463 - DNA, 730 bp, Sorghum bicolor
cgtccgatcgaagatccattcgatcaggatgactggaccacttatgccaaactcactgatgagattggacagcaagtgcagattgtaggagatgatcttcttgttactaaccccactagggttgccaaggccatcaatgagaagacctgcaatgctcttctcttgaaggtgaaccaaatcggctctgtgactgagagtatcgaagctgttagaatgtccaagcgtgccggatggggtgtgatggcaagccacaggagtggcgagactgaggacaccttcattgctgacctctcagttggcctggctacgggccaaatcaagacaggagctccctgccggtctgagcgcctggccaaatacaaccagctcctcaggatcgaggaagagctcggtgatgccgcagtctacgccggagcaaagttcagggcaccagtggagccctactaaaccacgagagcccagagtctggagaaagaagacgaggatgtttcttgtggagctactagttcgctgctgctttttgatagaatgtctgtactatcacaataaaagtatggtcttgtttgccggagagctacactagtgattttgtcgtgggaacataaaaaaagaaaaaacgatctggttttctagatatgagtgatggagtggtgggtccgcactcgttgtaatatcgttgcccaaactgattttgatgggtactccacagaaagcaagcgactttcttgtt

SEQ ID NO: 452464 - DNA, 825 bp, Sorghum bicolor
cgtccgcccacgcgtccggccggagaaggaacagcttcaaccaggggaggcggagggtgggaggccggccccgacaggctgatagggaggacagtgtgcggcggaccgtctatgtctctgacattgatcagaatgtgactgagcagaagctcgctgaagtgttttctaactgcgggcaagtggtagattgtcgcatctgtggtgacccccattctgtcctgcgctttgcgttcattgagtttgctgatgatgctggtgcaagagcagcactaacacttggaggaaccatgcttggctattatcctgttagagttttgccttctaaaacagcaattctacctgttaatcctaaatttcttcctcgaactgaagacgagaaagaaatggtatcgaggactgtatattgtactaacatagacaagaaggttacagaggatgatgtaaagggtttcttccagcaatcatgcggaaaggtttctcggctgaggctccttggtgactatgtacactccacatgcattgcttttgttgagtttgctgaagctgaaagtgcaattatggccttgaacttcagtggtgtggtccttggtttactccctatcagggtgagcccttccaagacaccagtacgtccgcggtctcctcgtgtgatgtccaactgagcccgattcaagccgccgtcacccttgaggctgccaccaatggcaaatcatcccaggcagagcttcttctagctatgagcgccctagaacccttgcttcgtggatcagtgacgtcgtcgccgtcgtcccgagagtgtcccagtacctaaagtagtcataggaa

SEQ ID NO: 452465 - DNA, 693 bp, Sorghum bicolor
cgtccgaaacacttgaggtctatgacgagacagcaagattcctcagagagctagaaatggatgatgatgcactcacaaaagcaattattggaaccataggcgatgttgacgcctaccagctaccagatgctaaaggttacagcagcctaatgagatatttgctgggcatcacggatgaggagcgccagcagagacgtgaagagatactagtcaacaagtctgaaggatttcaaggagttcgctgatgctgttgaaaccatcaaggacaacggggtcgtggttgccgttgcatcaccagatgatgttgaggctgcaaataaggaaaacccggtattccccgaagtaaagaagtgcctgtgaggtccaccgctccttaataagggttttagtcggaggtgttttttcgacaggccttcactagacagcagtaaatggcaagtctgacaatgtaacatattgtgagagcaccttctctacgaccatgatcatagctgaatcttggcttctcttttcccatgcaatttttggagtcaataattagtgcagaggtaggaccaaagcacatagatgtagcgtcttcccatgttgactaaaaattcggatgtacccaatgattcagccaatacagaaacagatgatgggattttcccaaattgttggggtttccatatattaatcacccagttcaatgat

SEQ ID NO: 452466 - DNA, 469 bp, Sorghum bicolor
  unsure (1)..(469): unsure at all n locations
cgtccgcccacgcgtccgcggacgcgtggccaagcatccatcgtcggtggcgcaatcaactacgtgagggagctggagcagctgctgcaatcgctggaggtccaaaagagcatcaagagcaggggggcatcagcaggcagcacggacgccggcagcagctcccccccattcgccggcttcttcagcttcccacagtactccaccaccacctcggcccacggcggcggctgctcaggcaacacgagcaacggagggaactgcagcgacgccgtggccgccgcatcagcagcaggatccgcggagaccggctgccgtcggccagcggcggcggcggtcgcggacatcgaggtgacgatggtggaaggccacgccagcctcaaggggctggcgcgccggcggcccaagcagctnctgaagctcgtcgcggggctgcaccagctgcgcatnccgccggtgcacctaaacatga

SEQ ID NO: 452467 - DNA, 794 bp, Sorghum bicolor
cgtccggtttctatcttgctccgcaaaccagcgcaaacccttccctgacagcggcggcgactccccagcggcggcgccatggtgctcgaggcgacgatgatctgcatagacaactcggagtggatgcggaacggcgactacgccccgtcgcggttccaggcgcaggccgatgccgtcaacctcatctgcggcgccaagacccagtcgaacccggagaacacggtaggcgtgatgacgatggccgggaagggcgtccgcgtgcttgtcactcccaccagcgacctcgggaagatcctcgcctgtatgcacgggtttgaagttggtgccgaggcaaacttggctgcagcaatccaggttgctcagcttgcactaaagcatcgccagaacaagaggcagcagcagaggattatagctttcatcggaagtcctgtgaagtatgacaaggaagttttggagacaatcgggaagaagctgaaaaagaacaatgttgctcttgacattgttgactttggtgaatccgatgatgaaaaacctgagaaactggaagcattgattgctgctgttaacagcagtgatagcagtcacattgttcatgtccctcctggtgataatgccctctctgatgtcctcctaagcactcctatatttaccggtgaagaagggggaagcggttttgctgcttccgcagcagctgctgcagctactggagcatctggatttgaatttggtgtggacccaaatgtagatccagaattggcacttgccctgcggttgtctatggaagaagagcgggc

SEQ ID NO: 452468 - DNA, 524 bp, Sorghum bicolor
  unsure (1)..(524): unsure at all n locations
cgtccgtgctaccatccatggtgcagtccttgctttgacagcttcagtcctttctgttccatacgacatgcctagctggcttccttctcatgtcacgctacttgctcgcttcatccgggagccttctcccattagatcaaccgtcacgaaagctgctgcagagtttaagcgcacccatgctgacacatggagcatccagaaggacgcatttacatgaagacgaactggaggttcttcgtgatacatcttcctcctcatcgtactttgcttagattaaaatttcaaaggtcataggatattctctggtgccggtgatgtgtatacgaaatttgttactgttgaattgccagtgttgctcatatagtataacctatacatagttgttttatttcttcaacagatgccttggtacaagatgaagctacgcatatatacatttgtgaaaaannnatttgtgttgtagtagggaagtnnttttaattaaatttataaatttatgttatatcccttttaattaataatgt

SEQ ID NO: 452469 - DNA, 536 bp, Sorghum bicolor
cgtccggcaaaagcagccgaatcgtctcgtctcgcctcttcagttctcttctcttctcccctccccgcagcccggtttcccgaccaggttccagagaagccaacccaaccccccgtccggttcgcgcgatggcggaggagcagcccaacccccagccgcagcaagcggaggagagcgaggttgttgtggagcagcagccgaggagggccccgaagctgaggtacctggacttcgtccaggtggcggcggcgcaggccgtggtgtgcctcgcggggctctacggcctcgccaaggaccacgccggcccgctccgccccggcgtcgacgccgtcgagtccaccgtcaagggcgtcgccggccccgtctacgctcgcttcggcggcctgcccctcgacgtcctcgccttcgtcgaccgcaaggtggacgacacggtgcacgaggtggacaagcacctcccgggcgcgctgaaggcggcgtcggcgcgtgcctacgcggtggcgcggggcgtgcctgaggtggcgcgcgagctggtggcg

SEQ ID NO: 452470 - DNA, 1183 bp, Sorghum bicolor
cgtccgcaagacacgcacaaaggtgggccgtcacaagaacacacacacacacacacacaaggcaacagtctccattctccacaccacacgaccaccagctcaactcagctctcactaaaccccatccactcctttatcatcgtctccctccctccctccctctccattctcagctcagctgggtcgtcctcccgccatccatggcaaatgcttctctgcaatcctttcttctcccgcagcaccattctttcgccagcaacggcggcagccatgacggctccccgtctgccctgttcaagctctccaccaacaccggcagcagcatttccttcaggctccaccccaacacctcccgctcggtgaccacaacctcgaccaccaactcgtcagctccaactccagtggccccggcagctgcatcagcagcagaagaagactcatcaccagccccctcccttgacctcctcagccgccagctcgcggcaggggactaccgccaggccgacgagaccacccgggcgctcatcatcgaccttgctggcgagtccgcgaggcgccgagggtacgtcttcttctcagaggtccagttcatctccgccgaggaccttcgcgccattgacgagctctggaaagagcacagcaatggcaagttcgggtacagcgtgcagcggcggctctgggagaaatcgcagcgcgacttcacccgcttcttcatcagggtcggctggatgaagaagctggacactgaggtagagcagtacaactacagggccttccctgacgagttcatgtgggagataaaggatgacacacctgagggtcacctgccgctcaccaatgcgctcaggggcacacagctcctggggaacatcctcacccacccggccttccaggaggagaaccagcaagacgaagctgcagctgcagcagagagtgccaccactggtcaaagcaaagatgataacaaagggagggagagaccaaagttcatgaaagatttcaagcctgattattccttttgaccgaggctgaccataaaagggcatgggagtttgtgatgcagagatgctggcatggtgtaattgatttaaaagatcatgtatccgtagttctgtttgggttactgtcttaaaacatgcatcaaagattgtgccaatatatattacgaatatataattggttc

SEQ ID NO: 452471 - DNA, 629 bp, Sorghum bicolor
cgtccgaccacacacttgccgagttccagggaagggttatgctagtgggtctgctgtgcaaaaatgcagcgacctgcgtctgcatatgggagttgcagaagatgactctcctctggaaggaggtggacagaatgccaaatatctggtgcttagagttctacggtaagcacatgaagatgacatgcctgggcaacagtggtttgctcatgctctccttgaaggcgaagcgtatgaaccgccttgttacttacaaccttttcaaaagggagtggcagaaggttcctgattgcatgctaccatgcagccgcaaaaagcaatggatagcatgtggcacagcgtttgatccggtcccctgtgccttggcctgacatggagtgtaccttctttggccgagcatgctaatattttagtcatttcatataattggtctattatctttagatatttctatgttgttgtgacaagttctgcagaaccgcatcactgtggtttgttttgtatcacgctgaagcaatcaaactgtttccttctattacctgctgctacttgggtcagtgctacatcaattgggcaagccgacctgaatatgtttcatggaagtcaaaaatggaacgccaggtatctgtatg

SEQ ID NO: 452472 - DNA, 724 bp, Sorghum bicolor
gctgactcgagacgcaggagaaggatcgagaccaggcggtggcttcccgggggcaggatcgtcgcgaccacgaaaggcattaatgcatttatctctttgtcttgcagatgtcttactcaagaggatccagtgaaaggtatggatctcgctcaccttactcgagaagcagctattcaaggtacagaagtcgctctaggagtgtggactcaagcgatgctgaaaaccctgggaacaacctgtacgtgactggtttgtcaactcgtgtaacggatcgagatctggagaagcacttttccactgagggagaggtgattgatgcaagcgttgtgcatgatccttggacaagggaatcacgagggtttggttttgttaccatggctactgttaaggaggcagatcgctgcatcaaatatctggaccgttctgtgttggaaggtcgggtcataactgttgagaaggtaaaatgtaaaatcataagattgggaacatctgaacttccttattaacttcgctactgaatgatatttgtatcattgcttagtactctacactgaacattttagtgttctttccattgaagattttgttgacagcaacagggtagatgttggtagctgctctgcaacaaactgatacaacctaacaccaaaccatgccacctcagccaaagggttgtatgccctacattgtatattattatttttcttaagtgtgtttattcaga

SEQ ID NO: 452473 - DNA, 536 bp, Sorghum bicolor
cgtccggatgagtactgcttcagtacgaaggagttatggtccatcatcttcccttctgattctgaaaggattgccatctctgaaacgcgaaagatgaatgaggttgttcatacccaagctaagataattggtgatcatgatgtgatgtacaagtacttgtcaaagaatttagtttttgttgctactttgtctccaaaagctgctggtgatattggatctgcgctacctgaagaagcttcagttgttgcatatcttattgatgcagtcactggacgcatactccatcgcgtgactcatcatggtgctcaaggccctgtacatgcagttttgagcgagaactgggttgtctatcattattttaatctgcgagctcacagatttgaaatggcggtgattgagatatatgatcaatctagggcggacaataaagatgtcatgaagctcatacttgggaagcataatctttcagcaccaattacatcttatgcgcgccctgaggtgcagtaaaatcccagtcattcttttcacccatcagt

SEQ ID NO: 452474 - DNA, 547 bp, Sorghum bicolor
  unsure (1)..(547): unsure at all n locations
cgtccgcccacgcgtccggacccacgcgtccgcgagtcttccattccacaggagcagggctctcttcttctcccatctcatctcgcgccgggggtcgcctgagatcacagagaaaatggtgaagggagttgctgtcctcgctggccctgatgtcaagggcaccatcttcttttcccaagagggagacggtccgaccacagtgactggaagtatctctggcctcaagccggggctccatgggttccatgtgcacgcgcttggtgacaccaccaacggctgcatgtcgactgggccacacttcaatcctgctggtaaggagcatggcgcacctgaagatgagaaccgccatgccggtgatcttgggaatgtgacagcaggagaggatggtgttgttaatgtcaatattactgacagccagatccctctcactgggccacactcaatcattggccgggctgtagttgtccatgctgacccggatgaccttggcaagggtggacatgagcttagcaagagcaccggaaatgctggccgacgtgntgcgtgt

SEQ ID NO: 452475 - DNA, 600 bp, Sorghum bicolor
  unsure (1)..(600): unsure at all n locations
cgtccggcagaagaggtatgttgagagtgttccattaatcattccacttcttgagaagcaacatcgaaatacaacaagtaaattgcgtgaagtcagtcatgaactcagtgatatgaacgaagccaaactgaaggagaaagctcagctattccatgactcatttttgaccaagttatctttgctattgaaaggcatggtggtggcaccccctgataaatttggagaaactttagttaatgagaggattaatggaggaacatttacaggaagtgagaatttccagctcccgaacaagatgatgccaaatggtggaatgcgtctttatggtggtgcacaataccatcgggcaatggctgaatttcgtctggtagttggtagtatcaggtgccctccaataactagggaggaaattgtcaatgcttgtggtgttgaggatattcatgatgggacaaactactccaggactgcttgtgtaattgctgtggcaaaggcacgtgacacatttgagccattccttcatcagctgggttntaggcttttatacatactgaagaggctgatcccaatctgtgtttatctgctggagaaagatggtgaggg

SEQ ID NO: 452476 - DNA, 701 bp, Sorghum bicolor
cagcgccctgatatgataacccctggagttgatgctcaaggccaaccaattgatcctgagaagatgcaggagcattttgaggacttctatgaggacatttatgaggagttgggaaagtttggtgagattgagaatctgaatgtctgtgataaccttgctgaccacatgattgggaatgtctatgtccaattcagggaggaagaacaggcagctgcagcttacaatgctcttcagggtcgcttttactctgggcgccctataattgttgagtattctcctgtgaccgacttccgtgaagcaacctgtaggcagtttgaggagaacagctgcaaccgtggtggctactgtaatttcatgcatgtgaagcaaattggcagggatctcaggaggaagctgtatgggcgttctgcttccaggaggtaccatgggagaagccgaagccgaagccccccaccacaaaggaggggtcatcgtgaccgtgatgactaccatcaccgtgaccgtgatgattaccgtggcggcggtggcggtggaccgggaagaggtagcaggcatgacaggtatgatgatggagcaggcagaggcggcaggcatgacaggtatgatgatggagcaggcagaggtggcaggcattgagaggtatgatgatggaggaaggcgcaggcatggtagccccccaaagggtgcaaggagcccagtca

SEQ ID NO: 452477 - DNA, 525 bp, Sorghum bicolor
cgtccgcgccttgaagatcatcaagatgcttgtagattctgatggcggagaactccatgatagtaagcatgatagatggtgctcaaacatagcagtgcccgggatggaagtgataaagcggttcacctctgtcatcaaaagatccaacaatgttcagctaccacgtgatatcttagagagccctaatgccatcagcaccctggagagtatgctaaaatgtccaaaatgcaaagtgcaagaggagctgcagaaatcagtcataatggttctaacgcatataacatcgaaggaaacatctttggctgcgggcgaggaaatcaagaagagactcgatgaagtcaagaatagactcatcttgtcgctgatagccattttcctcgacggcggccatggcaagagttccgtgaaaaaatgggcagctggtgaatcgctggcaaagatgtcccgtgttaatgaggatagtgccacgatcctgggagcacaggatggtcccattggtagtggactcactcaagtgttctagac

SEQ ID NO: 452478 - DNA, 630 bp, Sorghum bicolor
cgtccgcgcctccaccctcgtcgccgcctctctccttctgagaccgcagatccgtcaggtgagaggaagccgctcgcacccatggcctccggtgagctcgcatgcacctacgccgccctcatcctcagcgacgatggcatcgccatcaccgccgagaagattgccacgatcgtgaaggcggccaacatcaaggtcgagtcctactggccggcgctcttcgccaagctccttgagaagcgcaacgttgaggacctcatcctctccgttggatctggtggtggtgctgctccagttgctgctgctgcccctgctggtggtgctgcggctgctgctgcgccggctgccgaggagaagaaggaagaggttaaggaggagtctgatgacgacatgggcttcagcctgttcgactgaggagccccacactcccatagcaaattcgcttatgctgtccaagactatcttatgttatgtctctaggcttttgttacaagtactgaaggtttgagtattctgagatgtggctattggcaatgtgatgatgaaccccaaaccatcttattagagtgaaacttgtttctatattgttccaagtttcttagcctcaaatttaatgcatctggttgatgcgct

SEQ ID NO: 452479 - DNA, 939 bp, Sorghum bicolor
  unsure (1)..(939): unsure at all n locations
cgtccggaaaaaaaagaagcccagagagaccagctgaccaagcaaaaagcgttgggttgttgagaagtttcgagaagagtgctgtgtgagtgttgaagagctcaagatggatccggccttgcttgacgacgtcatacgccggcttctggaggtgaagaatctcaagcccggtaagaacgcgcagctgtcggagtcggagattaagcagctctgcgctgccgccaaggagatcttcctttcgcagcccaacctgctggagctcgaggcccccatcaaaatctgcggtgatgtccatgggcagtactctgatctcctgaggctatttgattatggtggctatccgcctcatgcgaactaccttttcttgggtgattatgtggatcgtggaaagcaaagcctggaaacaatatgtcttcttttggcctacaaggtcaagtacccggagaacttctttcttctaaggggcaaccatgaatgtgcatcagtaaatcgcatctatggtttttatgatgagtgcaaaacccagattcagtgtaaagctctggaaaacattcacagattgttttaactgcttgccagtgtcagcattgatagatgaaaagattctctgtatgcatggcggtctatctccagagttgaacaagcttgagcaaatactcaacctgaatcgccccacagatgtgcctgatactggattgctctgtgatcttctttggtctgatccttccaatgaagcaacaggctgggccatgaatgaccgaggtgtttcattcacatttggtcctgataaagttaatgaattccttgagaagcatgatttggacctcatctgccgagctcatcaggttgtcgaagatggatatgagttntttgctaaccgtcaactcgtaacaatattctcagcccctaactactgtggagaattcgataatgctggtg

SEQ ID NO: 452480 - DNA, 624 bp, Sorghum bicolor
  unsure (1)..(624): unsure at all n locations
tgctcttcagtttactactcgcaaataaagtattgtctttttttttttttgagaaagtaaaatataacttaggatttttctctgaacaaataaaagactccctcgaaaattacaaacatcataacaaatctatttagtttagaaacatgttacttatatgtttagatatttatttgaaaatactagcaaaatctcatgatttgaatattttttagaatatattctagaagaaattattagtcaaagataaacatcaaaccgtgcaaaggcaaatgtgacaactatttttcaccagagggattaatccttagttggtcattttaaccatgcagtacatttaccttatctgttgcttctgatgattccaaatgatgtgcacaatgttctaattcccaaacatacatgctatgttctaacgaacctgcagagacatttgtccgtgccgatggggcattcatcccatttgctcatgactttgacatctccacagtctcaaccacagttaggggtgttggtgacattgnggatgtcaaatttatagatctgcagtgtccacttaatagcctcataggaggcaagtatgcaaaatcggcagaagtcttgtcacacaactggaactgtgat

SEQ ID NO: 452481 - DNA, 689 bp, Sorghum bicolor
  unsure (1)..(689): unsure at all n locations
cgtccgcactcgggagtttctgagggttatggttttgtagagttctattcgcacgtgtcagcagagaaggcactacagaatttttctggtcatgtaatgcctaatactgaccgggcttttaagttaaactgggcatcatatagcatgggagaaaaacgcacggaactttcatctgatcactcgatatttgttggcgatttggctgttgatgttactgatgagatgctgctggagcttttctctagcaagtaccgctcggtgaaaggagctaaagttattattgatgcaaacacaggccgttctaggggctacggctttgttaggtttggagatgacaacgacaaatctcatgcaatgtccgaaatgaatggtgtatactgctccactcggccaattcgtgtaggacctgcgactcctagaagatctccaggtgattctggctcctcgtctcctgggcattctgatggtgactcttctaacaggacggtatatgttggtgggcttgaccccaatgtcagcgaagatgaacttagaaaagcctttgccaaatatggtgatcttgcctctgtgaaaattcctctaggaaagcaatgtggctttgttcaatttgctagcagaactgatgctgaagaagcactacaaggattaaatggatcactcattgggaagcangcagttcgcctttcatg

SEQ ID NO: 452482 - DNA, 1321 bp, Sorghum bicolor
cgtccgcaataatctgatcaacttgttgatagacaacggcatagagccatatgtaacaattttccactgggacacgcctcaagcactggtcgcgcgccccggcggcttcttagataagagaattataaaagattacacagacttcgctggactgtgctttgaacgattcggtgacagggtgaacaattggttaacctttaacgagccacatacatttacatgtttatcctacggaaccgggatccttgcccctggacggtgctcaccaggaatgaaatgtcccgacccaactggggactcaatcagagagccataccttgttggccacaatcttcttctagctcatgctgagactgttgatctttacaacaagtttcataggggtgagaaggggcgcatagggcttgcgcttaatgtaatggggactgtgccatatggaagtacgtttctcgatgaacaagcccatgaaaggtgtatggactacaacctaggatggtacttggagccagtggttcgtggtgactacccccattccatgagatcatcggtgagggataggctaccccacttcacagaaaaagagcaacagaagctagtgggttcctatgacatgatagggatcaactactactcctcaaggttcgccaagcacgttgacatcacagaaaatttctcgccagagctcaacacgcatgactgctgtgccactgaagaaattacagggcctaacggcaatactattggtcctgctactggaaatgcgtgggtctacatgtaccctaaaggcctaaaggatatccttatgatcacgaagaagagatacggaaatccaccggtctacatcactgaaaacgggatgggggacattgacaatggcgatctatccatggaagctgcgttggacgaccacataaggctagattaccttcagcgccacatctcagtccttaaagattcaatagattccggagcgaacgtgcgtggccacttcacatggtctctgttggacaacttcgagtggtctagtggctacaccgagcgtttcggcatcgtctacgtcgatcgtgagaatggctgcaagcgcaccctgaagcggtcagcaaggtggctgaaagagttcaacggagctgcaaaaaggcctggaaatctgattaagccaaatttcagcgaaataaataagatcaaagttgttacgccagcttagaacactggctgatgtttacccgtagtatttttcatctcaaactacaaaacaatttatgtctatgtaatcgatgttattattttaatttcatgtttatgaattttgtttggtactccc

SEQ ID NO: 452483 - DNA, 550 bp, Sorghum bicolor
cgtccgatcttgttggaagagtacctccaccacatttgtctccttttgtggacaatgatgcagagggctacattcctgagtatgcagaaacaataaagaggctgcaagctgctgctcgcaatgaggtcttgcctcttcctggtattggtgatgaagatctagacaattcattggtagcagcaatgatggatcgaacagaatctaacgaagctgctgaaaagaagaggaagttggagatgctagagaagcaataccatgatgaactgaagatggaaattgacggtgttgctttctctagtctgtcaaataaggaagcaaataaatcaccagatgccaaagatgatactcagtcagatcacgaggcggatgccattaaacaagaggagaaggatgatgatgacattggtactgctctcatgtctcgcaagcagcaaggcccttataaagctatgaagatgggcaaagaaaagaaaaaagagaaaattgagctacttaagaagaggaaaaagaatgcggattctagtgcttcttccaagaagcggcactgatg

SEQ ID NO: 452484 - DNA, 962 bp, Sorghum bicolor
  unsure (1)..(962): unsure at all n locations
cgtccggcagaggatcctgcagcaaaaaggtttatcatttcctttggcgctgatcgtgttgtcagcctggatgggattgattttgtcaggtgtgaagttgttggacagagtttcatgctccatcagatccggaagatgatcggtcttgctgtagctgtgatgaggaactgtgcacctgaaacaatttatgatgttgcctttcgcaaggatgtcaacctgaatgtgcctactgcccctgaggttggactgtacctagatgaatgcatgttcacatcatacaacaagaaatggaatgattcacatgaggcagtttccatggaaccttattatgaggaggctgaagagttcaaggtcaagtatattttccctcatattgcggcgatggaacacaaggagggagctgtagctttgtggttgcactcattgaaccacagaaattatccagatttccgctacatggaaactgcttgagcccaagggtggtgctgagggttagagtatcgatgctggtccagaggccaaggttggggctgaagttgataatattgaagaagcacaaatgccaagcggtaatctaagtgagtaataaattttgccatggggcatgcaaaaccgatgaggatatctgtttgtggtatgtactgagagggacctgaggcatttctagtgagatatcataatatagagaatgaagactcacatattctccaatggaatatgaacatcaagaggttaatgtgcatggctttatgccatcatgatacctgtattaatcttctgaaataagaatctataggtatattagtcttatctgaacttcattcgttgcttccagacagttgtatgacaaatgatggcatctngaaaatgcttcagcatgttnttgtctgctgaaaaaaaaaaaaaaaaaaaaaaaaaaaaaaaaaaaggccggcggccnnnnnnnnnnnnnnnnnnnnnnn

SEQ ID NO: 452485 - DNA, 494 bp, Sorghum bicolor
cgtccgcccacgcgtccggtggtgtcccacttgttgctcatgaaaaattctccaaacctagagaggttgagaaacttgtcatagttccctcgaaaaaagacctggggctggcttttaagggcaaccaaaagatggtccttgaagcattggaggctatgagtgagaaggaagcatttgagatgaaagctggactacaaaccaagggggagacaaattttagagtctgcacacttggaaaagatgtggtgaggacaaagaagatggtttcaatcagcatggagaagaagctggaacatcagcgagtcttcaccccttcggtcatcgagccgtcatttggcataggccggatcatctactgcttgtttgagcattcattttacacaaggcctagcaaatcagaagaggaacaactgaatgtcttccggttccctcctcttgtggctcctatcaagtgcaccgtgttccccctcgttaaaaatcaagagtttgatgct

SEQ ID NO: 452486 - DNA, 525 bp, Sorghum bicolor
cgtccgcttccacgcaaagaaagaagccaaggcaagttcttgttcttgagcgcgcgaggagcaggcggagagcatcgacgatggcgagcggcagcatgaagagggagatcagcgagacccacgacactctccgcttcggcctcaacgccggtgtcaaggctgacctcgcgccgccgcacccgctccagtccaccatccaatcggaggccaagttctgggcggacaagaagaagttcgggacagaggccatctacggatccgccttgaacatccgcaaggatctcgatgcccaaatcctctccaggttccaaagacctcctggtgctttgccatcatctttgcttggatatgaggcactgacaggttccctggatgattttggatttgaagattatcttaacatgcctcaagattctgacagtttccgtcaaccggatatgcaccacggaatggaggttcgccttggtttgtccaaggggcctatctgccctagcttcaattgagagtgattgagtttgccgacgt

SEQ ID NO: 452487 - DNA, 835 bp, Sorghum bicolor
cgtccgcccacgcgtccgcgcagccactgcaaacccttgcgccgccgccgcctcacaggtaaggccgagatggtttccggctccggcgtgtgcgcgaagcgcatcgtggtggacgcgcgccaccacatgctcggacgcctgtcgtcgattatcgccaaggagctgctgaatgggcagaaggtggtcgtcgtccgctgcgaggagatctgcatgtcgggcggcctcgtccgccagaagatgaagtacctccgcttcctccgcaagaggatgaacaccaagccgtctcacggccccattcacttccgtgcccccagcaagatcctgtggcgcaccatccgtgggatgattccgcataagaccaagaggggagaggcggctcttgcaaggctcaagacctacgagggcgtcccgccgccgtacgacaagaccaagcgcgtggtcatccctgacgctcttaaggttctgaggctgcagcctgagcacaagtactgcctcctcggcgagctctctaaggaggtcggatggaactaccatgacaccatcagggagcttgaggagaagaggaaggagaaggccaaggttgcctatgagaggaggaagcaactggccaagctgcgtgtcaaggctgagaagacagccgaggagaagctgggatctcagctggagattcttgccccgatcaaatactgagaagctgtgctttcgtgcgtatcagttttgtggaacaactggtccattgttttaagtagtttggtaaaaagttgtgacagtataatcttgagtagtaaaccgtgttatccttctgcgactcctattttgaacacattttcatgct

SEQ ID NO: 452488 - DNA, 396 bp, Sorghum bicolor
cgtccgcctgctgtccacgaaatcctcgttctacttgcccgcctcggttaccgtcttgttgcgcgacagtattggagaatcgagagtgctctcccagtcccaggtcgaggtggtgtaggcgctcgcggagcagccggggcgttggagtttgaggaggaggagaagatggtcgtgctgctggtggccacgacgtccgacccggcgtccattgggcccgccgccgccttcctcgccatgcccggatggtcccccggcccgcccatcgccgaggggatggaaagttttactaatgggaatgttcgattattgaagcatgagcatagcattatcgcagaggatgatcttgaccagcgatggcaggaaagccacttgaggagtctgttctgaggtcatatt

SEQ ID NO: 452489 - DNA, 502 bp, Sorghum bicolor
cgtccgctttgatgctcataccattttaatctatttcttcactatgatccacctgcccagtctttgcatcaatctggcgtggaatgtcaaaccaaagggctttgcctcatgcagatcagcatggctctgggcctcatatagacataattttctactagtctctgatgactccttactagtagtctgggcctaactgcttgagacataattttctagatacagtcacgtttgtctccttactagtagcttgtgcgtaactgcacgagacataattttcttgatagtcacacttgtctataggccacatggatccctactatctagtctttgagtatataagtagtaggtagtctgtgagtatataagtagtatgagctaatgcttggtgaactattgttatccttcagatttttcaggggtgcacacattaagccatgcaaatttgcactgtaactgggcttcttggattttttaaaaaaaacttaggagaatctgaccaagt

SEQ ID NO: 452490 - DNA, 960 bp, Sorghum bicolor
gacccacgcgtgcggaaaagaactcgctccgaaccctgcgatcagaagaatccagactccagaggcgactccaggtttgtgggagatgctgcgcgcaggaggcaggctgctcctcgccccggggctccggcggttcggcctgggcaccggcgccgccgccggcgaggcgggccctgccgccgcggcggcggcggtgagggcgtaccacgagcgggtggtggaccactacaacaacccgcggaacgtcggttccttcgacaaggaggaccccaacgtcggcactgggctggtcggcgcgccggcctgcggggacgtcatgaagctgcagatccgcgtcgacgaggactccggcaagatcgtcgacgcctgcttcaagacctttggctgcggctccgccatcgcgtcctcggccggcgctactgaatgggtcaagggaaaaccaatggatgaagttttgacaatcaagaacactgagattgcaaaacacttgtcccttccaccagtaaagctccattgcagcatgcttgctgaggatgcgattaaagctgctgtgaaagactacgaagccaagaaggtgaagatggggcaaaagggtgtagacagtccttcagagaaggctgctgaagcatgaaagtttctgccatgaagtatactgagctgatatgtttctcagtccatgactccctgccacttattgttgccaaagataaatgcttctgtttgtgaggcgagggattgtgtgtaatgttcacaaactctggtagtacggcttgtggcttaactcttttaaggatggtgacgaccaatttcaaataaatttgctaccatcttagaattagaagaaagtacttctatgtgcatgtacaagagctgtttctagaagtgttatctgtcaacatacgtaatggaaatacggtcaccgtaaaaaaaaaaaaataaaaaaaaaaaaaagggcgggcc

SEQ ID NO: 452491 - DNA, 763 bp, Sorghum bicolor
cgtccggctagcttcatgtcgagcatctcaaacccccctacgcagctccctctcctctccgcctccacccatcgagcaccgagcggcggcggcatggaggctggcggcgaggagttcgcgatcggcgtcgtgatctccgcgaagaccaccctgggggaggagttcgagggccagatcgtcgccttcgatcgcccctccaacctcctcgttatccaggaggtcgtggggagggcggagaggggggagcggcggaacgtgagggtgctcaaggcgaactacatccgggagttctctgtggtcagcaagggtgacgaccctctcgatcctgccggctgcatgctggacctcaacgccatttatgcccgggaggatgctgcactcaggcaagcagagattgaggccgagagaattggtgttggtgtcaccccagaagctcaaagtatattcgatgcgctgtccaagacgcttccggttcagtgggacaagactgacattgttgtaatgaaggaggttcgtgtatgcagtccgtacctgcctgaaaatgtaagtggaggaacagcggcagcaaatgagcgcgttaagaaagtgattgactttgaaaggaaaagattgcattcacgtgtacctggccaattctcttaacttaaaaggcttgactaatatttacattagcctccgtgttgtatttctaataccgcagccagttttcttattctcatcgatggggttttctattatatgtttcagaaaaaatctgtcataa

SEQ ID NO: 452492 - DNA, 666 bp, Sorghum bicolor
cgtccggaggcatttgaccaaaaagatcacattcatgagcggcataaggtgttaaagaaggattctgatgttttatttaccaacctgaaagccctagaggaaaacacaagaaagattcaaaaatctttcgaagatgaaagaacagctctaagaaaattaacagaggaacaccgagcagctaatgaaatacgccaaaaggcctacagtgagtggactgagcttagaaatgagcccagcaagaagaatgaatactttttcgagtacagggatgcccggaatgcagcagaaactttcagagctaatggagatgcaaatggacttaaaacacactgtaatagtcagattgagagaattatggaaatgtggaacacaaacgaggacttccgcaagcagtatgttgaatcaaacaaggttagcacactaaggagattagggacccatgatggacgaagacttggccctgatgaggatcctccagtcattccaagcagaagaccaagcaacatttatccattgtctgcctcaagcccagaagtgcccactttagcttcaatgccagcacctgtattggctgctccagctgcagtccctgccaaagaggactcctttcctgctttggcagccccccagaccagtaagcgcgccaaatcaaaagcatctggtagc

SEQ ID NO: 452493 - DNA, 771 bp, Sorghum bicolor
cgtccgcttgatcaatgtgccgttctggtactacgcgttcagcgccctcttctacccgttcctgacgcagaggaccaagagcaagttcgtcgttgctcgcccgtccaaggtcaccgagaccctcctcaagtacattccgattgaggccatcccggtgaagtacggcggcctgaagcgcgacggcgacaccgagttctccgcggacgacggcgagagtgtcacggaggtcaccgtcaagggaagctccacccagaccatcgagatcgaagccattgagggtgatgccacgctgacatgggacctgacggtgctggggtgggaggtgaactacaaggaggagttcgtgccggcggacgagggctcctacaccatcatcatcaggaagggcaagaagatggggaccggcgaggaggcggtccgcaactcgttccgcgccggcgagccgggcaaggtggtgctcaccgtggagaacacctcgcacaggaagaagaaggtgctgttcaggcacaaggccaagagcgcctgcgccaagaagtgctaaggggagggaggctcagtagaaacatggatggaatcgaattgttcgaggatgggatttgggagtgagattgattgtggattcaatattcattcattaaattctttgtatgtaagagagagagtgagagtgagagtgagaacattatttggtggttatttgaggcgggttgttgcggcaaaaatacagagtttcgattgaggaattgtgaaatatcataaaagtttcatgtg

SEQ ID NO: 452494 - DNA, 651 bp, Sorghum bicolor
cgtccgcccacgcgtccgcggacgcgtgggttttccggctccccgcaccgcgagatctccgtcccgatcccacgaccccggcggcggcgatgggcggcaaggacctgacggaggaccagatcgcctcgatgcgggaggcgttctcgctgttcgacacggacggggacggcaagatcgcgccgtcggagctgggcgtcctgatgcgctccctgggcgggaaccccacgcaggcgcagctccgtgacatcgcggcgcaggagaagctcacggcgcccttcgacttcccgcgcttcctcgagctcatgcgcgcccacctcaagcccgagcccttcgaccgcccgctccgcgacgccttccgcgttctcgacaaggacggctccggcaccgtctcagtcgccgacctccgccacgtgctcaccttcatcggcgagaagctcgaggcgcacgagttcgacgagtggatccgcgaggtcgacgtcgcccccgacggcaccattcgctacgacgacttcattcgccgcatcgtcgccaaatgatcccgtcctcttttttttcccacctcttcactccgatccaccgccgccttcccgccctcttcgtttgtaatgacttcgtctccccctccccgtgatttgatcttgtaccctctat

SEQ ID NO: 452495 - DNA, 799 bp, Sorghum bicolor
cgtccgctttttatttttgtttttcttttgtctcctcgcatttaaagcatcgaggccgaatcggacctccagttctcgagacgagtcgtctccatctctctacgcacctaacaatttcggcagggcaggacggcttcttcctcctcgccttcaccttcgccgcctgcgcggccgggacccgtcgcaattgggcttgtaagttctagttcttcatgtcaactaccaatctgaggcggcgactccatcatggagacgttgatggaaggaaaaacgagcatgttgacatatccagtgctgattccctcaatgaacctctattagggaagtccagtggtgacaattttggatcagcggtgtatgatcctagaagacaggacctgtgggatgatgatagaaagaaagaacaactacactggtcatttcttttctcaaacttgattgcacaatgggcgcaatggttagcaagcattattgtaagctctggatctatctttggtagattattccccttctcttcagagaaccaaatcaatccagtatatcttagccctctacaggaacaaaggctgaataatttaagacgcagattgcaaatcccttttgatggctcccgtattgaacatcaagacgccttgaggcaactctggcgtttagcttatcccactcgtgagattccacccctcaaatcagaattatggaaggagatgggttggcaaggcaatgatccatctactgatttcaggggtggtggactcatatcgttggagaacctcatctttttcgccaggaactaccctaa

SEQ ID NO: 452496 - DNA, 647 bp, Sorghum bicolor
cgtccgcacgtcccattgccttgcatctggcgacattatgatttcttgccttggggacaaggaggggaacgcagctggcaatggcttcctgctgttagattcagagtttaatgttaaagggcgttgggaaaagccaggtcacagtcccttgtttggatatgacttctggtaccagcctcgccacaagacgatgatcagttcatcatggggagcccctgcagcattcaggacaggtttcaatcttcaacatgtccaggatggcctgtacggaaggcatctgcacgtatacgactggcctggtggtgagctcaagcagacacttgatctaggtgacactggacttcttccccttgaggtgaggtttttacatgatccatcaaaggacactggctatgttggctgtgctttgacaagcaacatggtgagatttttcaagaccgcggatggatcatggagccatgaggttgctatctctgtgaaaccattgaaggtccggaactggattctgccagaaatgccaggattgataactgatttcgttctctctcttgacgaccgttatctgtacttggtaaattggcttcatggcgatatcaggcagtacaacattgaggatcctgcaaaacctttcttggctggacaagtat

SEQ ID NO: 452497 - DNA, 422 bp, Sorghum bicolor
ggtattagaggcttttgtgattcttaagaagaatctccagtaccataaagagtcaagccttcagttatgctagatagcatggtgcttttctgtctcgtccacatggcagtcttcaagccttggcaacctttgtagaggaatcgatcgccactggatatcttgctcaatcctcggtccgttcatgtttgattcttaccagagttgcggctaactcaaagctgtctttggttatgcatgctgatataccacttgtaggtgttttgagtctgtttacttcacctccagtgtatctgtacgattgtatttattactacagacgtatttagagcttactctgcacggtgaggtgataacatggcatagcattttttgcgttcgtctcggtcaatctataatccttgttttgacatgttgcatcaaaa

SEQ ID NO: 452498 - DNA, 643 bp, Sorghum bicolor
cgtccgcaacggacagttttctgtcgaagtaccttttcgtttcccacagtatgtgaaccctttgccgaaggttttcatgaaaaaggagaaaatacagttgactgtcaatagtggtgcgagtaaagaggttatattgcagggaacaagccatcccttgaaggaaaaaaatcggcaaggtgagaaattgtctttcctgcacgaagcagttgttgagaattggtcaaccaaagattttacctttgcatataccgtttattctggtgatttgtctggtggagttcttgtgcagccctcaacattgcgtgactatgacgacagagatatgttctgcctttttcttttacctggaaataacgcgaacagaaaggtcttcagaaaggctgttgtttatatcattgatacaagtggaagcatgcaaggaaagcctcttgagagtgttaagaatgccatgtccactactctctctgatcttatgcaaggagattacttcaacataataacatttaatgatgagcttcactcattctcatcacgtttggagcaagtaaatgaaagaacaattggaaatgctattgaatggatgaacctaaactttgtcgctcagggtggcactgacatgatgcatcctttgagtgaggcaatg

SEQ ID NO: 452499 - DNA, 607 bp, Sorghum bicolor
  unsure (1)..(607): unsure at all n locations
cgtccgggaataccctgcggcgaaatcctggctccgccactgctcgccgaccggatgagccccgtcaccgccccaagcactagcagacatgcctccatcggttgcatctcaagctccgccccatccccagctgatgccacccagattgagctgctgttctcgtgaagtgggagctagaagagctcgtgacgtggatctaaagtttgcgatgccagagctcatggctggttcgttcctggcaccaacgttgcggaagaaaatgatctatccatgaactgataaagctttgcatgtcggtgaatggtgaccttctggaattggagcgatctgtttatgttcattgtgtgcagttcagatgcaactactgaaaagcgtcacatagatccagagtcacgagctgctaatgcttggaatgagtccttgaaccattcacaaaatatccatatttgcaggcaagtcaaagaaaaatccctattttgattgatgccgcaagaaagagggagcagctggatgagcttctcaattttgcatcttacattgtatggtctgcaaagtttcctcaagcacaggctgagcagatgaaagcctangcgaagaaagagctggc

SEQ ID NO: 452500 - DNA, 587 bp, Sorghum bicolor
cgtccgcttgttcagttgcgcttcgtctcctcctcctcctcctccgcgcagatcgccaggcgaggaaccaggaaggctaagtgcagggcaggatgcagtacaagaacctgggccggtcggggctccgcgtgagccagctctcgtacggctcgtgggtgaccttcggcaaccagctggacgtgaaggaggccaaggcgctgctgcaggcgtgccgggatgcgggcgtcaacttcttcgacaacgccgaggtctacgccaacgggcgcgccgaggagatcatggggcaggccatccgggacctgggctggcgccgctccgacgtcgtcatctccaccaagctcttctggggcggcccgggccccaacgacaagggtctctcccggaagcacatcgtcgagggcctccgcggctcgctccgccgcctcgacatggactacgtcgacgtcgtctactgccatcgcccctacgcctgcacgcccgtcgaggagacggtgcgcgccatgaactgggtcatcgaccagggatgggccttctactggggcacctactagtggtccgcgcagcagatcaccgaggcctgggctgtc

SEQ ID NO: 452501 - DNA, 679 bp, Sorghum bicolor
cgtccgcccacgcgtccggaacaattacatctctgttggtgcttctggagctttatttggcctgcttgggtccatgctttctgagctactcatgaactggactatatactccaacaaggcagcagctataataacactcctgtttattgttgcactcaacttagctattgggatattacctcacgctgacaactttgctcacattggtggcttcgcgacgggtttcctcttgggttttgttctgttggcaaggcctcaatttagctggatggagcgccatgagttgccacagactaaccaacctcccaagtacaaagcgtaccagtatattttgtgggttgtggcactcgtcttgctgttagttgggtttgtggtttcactggtgatgcttttcaaagggaagaatgggaacgatggctgccactggtgccactacctgaactgcgtgccaacatctaagtggaagtgcaacacctagacacctcagttttctgttacactctccggcgaaacatgtagtattcagattcagaagaccattttttatgtttgtttgtctgtagatatgaacaagttctttgttctttgctgggttggagtttcctggtctttgtaaactgttttgttgacggttgtatgtttataactcgagcttgatacctgttcaaaattgttgttt

SEQ ID NO: 452502 - DNA, 517 bp, Sorghum bicolor
cgtccgcttactgactggtggtcgagattcagtttgcagggtgtgggacatcagaacaaaagcacatgtttctgctttaacagggcatgacaacactgtctgttcagtgtttgctcggcctacggatcctcaagttgtcactggttcacatgatacaactattaaattctgggatcttgtagctgggaggactatgtgtactcttacacaccataaaaagtctgtccgagctatggcacttcatccgaaggagaaagcatttgcatcagcgtcagcagacaacataaagaagtttagccttcccagaggcgaatttctgcacaacatgctgtcgcagcagaaaacaattatcaattcaatggctgtcaatgaggatggtgtcttggcaactggaggggataatggaagcctgtggttttgggactggaagagtggccataactttcaacaagatcagactatagtccagcctggatcactggagagcgaggcatgcatatatgccctggcctatgac

SEQ ID NO: 452503 - DNA, 543 bp, Sorghum bicolor
gccactcgcctgcctggtgcgctgcactgactctgacagcactcagggagagagatggcggcgatgccggcgctcctgctgctgctggtggccgcggcgatgatgctctccccagcgtccgcccgcattcccggcgtgtacggcggcggcggctggcagagcgcgcacgccacgttctacggcggcagtgacgcctcgggcaccatgggcggcgcgtgcggctatggcaacctgtacagccaggggtacggcgtgaacaacgcggcgctgagcacggcgctgttcaacgagggtctgagctgcggcgcgtgcttcgagctcaagtgcgagaaccaagcccggggtggcggtggtgccgccccgggagcccctccatcctggtgacggccaccaacttctgcccgccaaactacgcgctcccctccgacgacggcggctggtgcaacccgccacgcccgcacttcgacctcgccatgcccatgttcctccacatcgccgagtaccgcgccggcatcgtccccgtcttctaccgccgggtgccat

SEQ ID NO: 452504 - DNA, 549 bp, Sorghum bicolor
  unsure (1)..(549): unsure at all n locations
cgtccgcggacgcgtgcgttacattacacccttcagtttcagctgtgtgctctgaccgagtgagatggcgagcgtgaaggttttcgggtcacccacctcggcggaggtcgcccgcgtgctcatgtgcctgttagagaaggaggtggagttccagctgatccgcgtcgacgcctaccgcggcaccaagcgcatgccccagtacctcaagctccagccgcacggcgaggcgctcaccttcgaggacgagagcctcaccctctccgattccagggggatcctgcgccacatctcgcacaagtacgcgaagcagggcaacccggacctgatcggcacgggcgctctggagcgcgcgtccatcgagcagtggctgcagacggaggcacagagcttcgactcgcccagcgccgagatggtctacagcctcgccatcctgccgcccaccctgcccaggctgcagaacgacaacaacggcaccggcagcgggttcaacgccagggacgtggccgtgggcagcaacgccgacgcgtncagcggcaagcgcggtgtggc

SEQ ID NO: 452505 - DNA, 796 bp, Sorghum bicolor
cgtccgtccatgaagagcccggactttgagtacatagacaatcaggattcctcgatgctggcttcattgcagcgacggacaaatgaacatctgcgaataacagaggatagagatgttgaagaaaataagtggaagaaaaatgccattgccccaatggaaattgaccgcatttgtgatgttgacaacgaatatgaggacccacagttgtgtgctactctggcttctgacatttacatgcacctgcgggaggctgagacgaagaaaagaccatcaactgatttcatggaaacaattcaaaaagacatcaacccaagcatgagggcaattttgatcgactggcttgtggaagtttctgaagaatatcgtcttgttcctgatactttgtacctgacagttaactacattgaccgttatctttctggtaacgaaattaaccgccaacggttgcaattacctggtgttgcttgcatgcttatagctgcaaaatatgaggagatatgtgcaccccaagtagaagaattctgctacataacagacaatacatacttcagagatgaggttctagatatggaaacttctgtactgaaatacttgaagtttgaaatgacagcacctacagcaaagtgcttttttgaggaggtttgctcgtgctgcacaagcgtgtgacgaggatcctgcattgcatctcgagttccttgccaattacatcgctgagctatcactactggagtacaatctactctcttaccctccatcactaatagctgcatcggctattttcttggcaggtttatac

SEQ ID NO: 452506 - DNA, 870 bp, Sorghum bicolor
  unsure (1)..(870): unsure at all n locations
cgtccgagcgcagccagcaagcgcaggccccaagccctactgcaaccgccgacgccaccgcgccgaacgccatggccgaccccgcggagcaccgtccagcggaggaggaggaggaggccgcggcggccggcgaggatgaggacaccggcgcccaggtcgcccccatcgtgaagcttgaggaggtcgccgttaccaccggagaggaggacgaggacgtgctcctcgacatgaaagcgaagctataccggttcgataaggatgggaaccagtggaaagagcgcggaacaggcactgttaagctgctcaagcacaaggagaccgccaaggtccgcctcgtgatgcgtcaggcgaagacgcttaagatctgtgctaaccatctcgtggtggcgacgactaagatgcaggagcacgcggggagcgacaagtcgtgcgtgtggcacgcgctggacttcgccgaaggcgagctcaaggaggagatgttcgccatccgttttggatctgtcgagaattgcaagaagtttaaggatattgttgaagagatagctgaacagcaaggaaacactgaggagaaagaaaatgaggaagcctccactgccgctgatttggtagagaagttgacggtgacagaggccagcaaggaggaaactgtggagaaagaggaggctcctgcatctgatgataagaaggatgctaaagagtgaaggcgtttttatccgcaaaccagggtcaaatgagtgtccttccattcattttgttgtcaaggttcatcttcccttcacaaattntcattgtgttttctctgggatgaatgcttgtggtaggtgaaatcagagtcatcaagcatctacatggttttcttgttgatagact

SEQ ID NO: 452507 - DNA, 424 bp, Sorghum bicolor
cgtccgcgcttcttcacaattcccaaatccatcctgccccgatctcctctcctcctcccccaaatctcgggcgccgccgcaaccctaggcccccgcgatccgctcgccggagggaaggagggagccccggccggcgcccatggaggtgaagctgtggaacgacaagcgggagcgggagctcctggagagctacgcggacctgtacgcgatcatcaagtccacggagaagctggagcgggcctacgtccgcgacctcgtctcggccgccgactacgaggcggagtgcctcaagctcatctcccaattcaactccctctcctcctcgctcgccggcgccgtcaccgtcccgcgcttcgtccaggcgtaccgcctcgattgccccgccgcgctcaatcgccttcttcagtcgggcgtcccggctacc
